United States Patent Application Publication US 2011/0014706 A2 - sequence listing, part 23

SEQ ID NO: 41136 - DNA, 509 bp, Arabidopsis thaliana landsberg
catcactcacaatgctcttaaaagagaaccatgacgacgaccatatgcaagcagaatgtgctcggaggttggtgagaactgcacggaaatttttaattataaagtatttcatcacaaaaatacaagtgaacaactctatttactattaggggtgaaatctcaaggaactttgcagttatgaagtacttgaacaatgttatgtctagaaaaaagttgcaacagagacttatgtctaacaaatttatttaatccaaccaaattgtggctaacctggatagaggttaagcaatgtgcagccctaattgcccgggacacaagtaccgaaccaaatctgcagacatacataagacattttctcttgagttttttttgttttgtgctgtgtaaaattttgaaaaaggtaacaagaaaaacaattggaagtagcacttacgattctttttccagagaatacacacgaagttcatacatgacttgatgtgctgtgacaggatgtcgagtaggggaag

SEQ ID NO: 41137 - DNA, 979 bp, Arabidopsis thaliana landsberg
ttggatttgttcataatgagaacagagagattgaagatgatagataacatttttgtctgtactattcatcaaattgtttatgctgtctatttaccaattaaatagtcatgatatgaactcaaattatggtaattttcacaaattcattcacacaaaaaattgccaagaaatttaaagaagcaacacctttgttgcattgataagagatattcaaatgttcgtatctcattttagctttagaaatgcccactcacaccaataattaatcaagttgccgtttattaaatcttaagcttttgaagacttttgtcacagaaatagatacttagcatctttgtcactaagcttttaaagtctttatcaaaaaaagattgacacttagcatcttcatctacataagtgttggatatatataaggattaagaggtcaggcacgagtgtgtatagacgtcatgggtgcgagaagcagccagactgtggatccagtgttgagccggagatactcatcggaatcagagacggtactagcggtgcgacgacgaccgcctatggtgaacggaggaggattcgtagtgagcaatagcaaacaagtagtagtatttagagttgatgggtgtggagttcttggaactaaaggcaaacttctcttgagaaatggtgatggtaatgatttgcttctcatccgcaaaatggtaaccaactttatgtttttgcttagtttagatcatttctgtttaattacaatgaaacgagtgcataatgttactcttatttggttaaagggaggaatagtgcaggcactgaacatggtacacaacaaatgggaaggttttggctatgacaatgaaggaacagagaggttagttttcaccttgaaagatccaaaagattcatgtcttgttcaaaacagttcaatcaaaatcttagttcacggtaaacccccgaagatatcatcaactcgcaacaactacgtagagat

SEQ ID NO: 41138 - DNA, 962 bp, Arabidopsis thaliana landsberg
ttttacatgaatacacttttttgtagaaatagttaaacttgaatcgattttacatgttttgttttaatttaaatggatacttaataaaaaagttagtcaatatctctacattttttccaagtaaactgtttttaaatttttttagtttttatattaaaaacaaaaagagtgttcgatcatttatatgagtcttattattccacacctctagaatatatatgtactcgctacaaatgagtctaatgagcttttgccgttgatgatttgttcaatgttctaataattgtcatcagtctataaccattgacactacacaaaacggttgcaatgtatgacttttgttgaactttgtagtgactagtaagtaagtgagagtgaagaagcaacggtttttctttcttacaaaaaactcatatatacttcagagttaagacttaaaaatatataatagtggataatcagttacaactattttttttttaaatggtctgtaacaaaaacataagaattcatcgattacttagaaacaactcaaatgagaaagaaaaaaaaacacctattgattaggtccatatctagtcaaaatctgaatactcaaatattttgtcattacattaattaacccaaaataattgaccaaaaaaggcaaaaaacataattatatttcttaagaaaattgaggagcttaacaaaggaaagaaacgtataattgtcccatacgaaaaaaagaaataaaaaaacaagtgtccattaaaatgagagagtccctacacgaaattaaataagtttttgtctgttagctacaaatttctctacaatcatcgtatctctttcgacgcatctctatctctggttgctccttgaataagcccatcattttttatttctcctgcgaattctccgacatagattttcttttgaatttctcctgctaactattgagctacggaaaggcggttaca

SEQ ID NO: 41139 - DNA, 760 bp, Arabidopsis thaliana landsberg
gtatatgacagagatgacaacttactcgtaacaatagtaggcatacatccatgaaagaagtttgattttcaatatcttcccaatgtatggtataacaccaacaacacaaacctgctttgtacatcccattagcttatcacatctattatcatatgcgaatgaagaaaatgtataaatgcaaatgagatctacatagagaagtcatttacctcaagaaaaaaaaatgtcaggagaagtatcgagtacacctgctctcctataccgatcatcaccctgaaaagaatccatgacaaaaagaaattggttagcacctatgaacagtttctttcttctttttggttttgaagtagtgacatggtagatcagtaccctccaagaccagaaggcctttcagcatttgccatattcagggacgccagagcttcaccttgtcttaatgcttcagctgagtttaagtcagatatctcaattgcctcgaatccatgctttgcaatatcgttatacctgaaaattagatggtctttattacctcaatgctcacgaaatcgcccacccccctatatagatttatagcccttttcccttggcgcttctcagctcgttaagagtgtcataggtaaccaggtcacaccactaaataaactctgtgagttgagtgattctcttgggcatggtcataggtataataaatcgaataaggtggcaaatggtaaaactttgtacagatgcagataggttacctgatgttactcaacatggg

SEQ ID NO: 41140 - DNA, 463 bp, Arabidopsis thaliana landsberg
tacgggtgttgctggcaatgagctagccgatgagttggcgaagcaagcagcacgcagcaccgatgccccaaaggtctctgtgggtaacgaaccctacctggacatgtttttttttgtttgtttgaagattttgcctcggagggcaatgattacaagggcaaccaagggcacgtaggcccacaacaaacgacacgtaggccgcacaactgggcacgtaggcccaaggcaggcgggcacgtaggcccatgcacacaggatgcagctaagggcaccaaggccagtctggaaaccgagttgtccacgtgtcaaagtctaacgtcgccagtgtcaaggaagctagctgtccaagacggcaaacagggcgtgcagaacggagctgcacccacccagctaccccaggacattgcgaacagccacaggtgcacccagagaaagatgcaccaccatcagccgagcacccata

SEQ ID NO: 41141 - DNA, 1952 bp, Arabidopsis thaliana landsberg
  unsure (1)..(1952): unsure at all n locations
tttaaaataaaagcatgcattgatatttgaaaggagttggtctcgttcccttcaaagtcttatctcctgataagcttttaaacttaaattaaaaaacaggtcagacaatctactgccacctgcctcaaccatgggatagataaatgaaacctgagagatattcatcatgtaaattcaccggatttcactcaatagtccttgacagttgagactgcatttgtttatgcatgtgggaaacattctattcaaatttgcttatgattattatgcatgtccgcccatacgtacggtgagttctcgtataccaatcatatccacaagctaaacagttacaatcagaaataaaagattaacatttttccataaaataattcttagcaccctaatctctagaactaaaattactaatggtaaatgtaaaaccaatggtctttgtgaaataattacttgttaatttagttcaattctgcaattcatattttttttaaaaaagttgtgaaataatttagtaaattaatatgtttcgaataattgatgtttagaaggtattataattttgtgttagtgtataattctaagaaaattaaattttataatttgttgaattgattttgatgatttttaaattggtgtttcaattacacttttctagtaattatcttctatatatcaaagagagaataattctcgttgatatgacaatcccatatttttctcacttcttgttattaatttttttaaaaattctactacaaaaaagttgtatttttaaaatgtacacttatattagtaggattttttataataaaaaaaatcagatagctttaaaaatgtacacttgttttgaagagaagaaaacaaaagagatgcaaaatcgctgataacattgtaatctgccaccgtctctgaagctgcattcgaccactgaacctcttgagggtttgattagatatacccattttactgttttctttgtccgagtgaaagtctgaagctttatatcttatgatgcttatggagagctctttgttctgttgtgtgctctattcctgataaaaccatgtgatgcttgctggttgatagcttcaactgattgggcctttccgttaattcgggatgttagcaactagcacagtaattgcaggtgaaggcggtgtcatggagttgatgttaatgagtgctttgccaagtcacttcttcaagataagagaacttctatcctttgttgaatcaggctctgggtgttattttcttcattttcttgatattgttgatattagtacaagaacacgctgaatctgacagacatattttcatggctagctagcttctcgccgctcatcatgtgtgcccaagttacactttatgaatcattctcaaagaaaaaaccgaacttgctgtcttgtatcttaagaggccgcagaagttagtatcttttgtgttgataagctgaatacttttgagtcatatatctatatattaatgcctgtctggagcagcattgtgaggatgctatagtgtttagcctgcagttgaactcggatagcttcagacatctcaaagaattttcgacttatggcattggctttgtctcagaatgggtatcaatgagtttagctcctttggtcgcagaggaannnnnnnnnnnnnnnnnnnnnnnnaatcgccgccttttccatggatcccaggtctaatttttatcattcagaaggacaatatgagaaagcggctgtgtatatttttcccatttattagaggaagaggactgtctcagctctatgggttctgatgattgagagttgcaggcgtttcgtacaaagcatgcaggcaaaagctttttcaggttctttgactgccggtggaaatcaaataaatgcaatacaggccttggtgattcaatgaaggtggtattcaggctaaagtgctttgcaggacttgttttggatttcacg

SEQ ID NO: 41142 - DNA, 565 bp, Arabidopsis thaliana landsberg
gaatataattggttattttacaattggaacagccattcaagcatcttcaacgtctcctttaagtttttttaacaaaaattctcaatcacaaaaatcatcgtcatcgtcaccaaataattttgcaaaataaattgttacactgatttgaccgcgcaaagcgcaagttattaaactagttttaagagattaaggtgatttctactatttttggccatgctttagttatcaattaaaaattataaacggttgtcttttttttattttttaaccgttgttattaattgtttagtgaatggtcttcaaaagctcacacactcggctgggattagatcatcaattattactaaaaatcaatccttaagattctcagttgctaccttttccaaataaagcaaatatgttccgtaaatttattcctcgtctttttttaccaaatatttttcagctttattgatactgaggtaaacgatttttttcttatttgatatggcatctatgcagtatatgctaaaagaatgacgattctaggctgtgttgtgtgaatttatggttttattgttgtgag

SEQ ID NO: 41143 - DNA, 549 bp, Arabidopsis thaliana landsberg
cgaatactaaaccagattaaacctattctaaaccagattttaacctaatttcaacccactctaatgtaaaaccttttcttctatacataaaatattatataaaaaaccctgtttcttcctctaattccactcttctctctcgacagatgtaatgatttacgtaattcttcggtctagaatttaaatttgtttgatttttgctctcttaaacctaagacttgttgaggattcatgaatgttgaagtaaaaagagacgactttacttgaaattggaaatctttgcagattgttgtggtgagtaggactctaaaggcaacccactttgttttctcgacgcatcaaaattgaatgtattttttggattcaattattgatttcggtaatatttaccaattgatttggattttgcattagagcttgaaaatccagaaatccaagagaagttatacaagttgattaaaagcgtaatgaaagaataagagaggaaaaagattccaatttcagtttcaagaacacataaaacccagaagctacttatgatagaactca

SEQ ID NO: 41144 - DNA, 285 bp, Arabidopsis thaliana landsberg
tctgcgtacccatttgttgttttgatgtttccattggtcaaattcaacattatcacctaaaataacttgcacatgcacgacaccaaattaaatagctttggatccaataagagaaagtatatattgtaggtactaatatatccactcgctctaatccgacccaaacccgagttcttgaaccttgaaaccttttaaacaattagaggtttagggggtacgtaaacttaaaacgtagctcaatattagatattattgtattcgtgggggaatgaatataagcaaagc

SEQ ID NO: 41145 - DNA, 536 bp, Arabidopsis thaliana landsberg
atggctccgatgacatcacatcccctcgaaaacgctctctttcacttggatcttcgcgatccaagaagtttcgacgtcttctcacacttggatcgagcaaatcttccaaacgcgactccaccatatccactgctaccactgatgtccccttaccttctgcttcacctccctctggcgatccgtcatagcaatattgactcaaatagcccccttcccgttcacttgacactgggaagagcccctcaagggatttgatacactcccaacctatttatgcccttcacatgctaaaaccagcgcgcccaacatcacaatccgagttattagcatactatatgtatcaatattacaatagttcacactcagctccacttggacggctataattgtccaaaaggaaccaagaaagttcgacctcgccattgaccgctccgatgcagtccgaatgacattcttgcactggtataagtgcttctgcgaggctttgattaggaagcgaagtcatatggctgtcctgggcaagtccaaacgtaatc

SEQ ID NO: 41146 - DNA, 955 bp, Arabidopsis thaliana landsberg
cttttttttctttttttttaatgttgttttctaataatctcttttgatttttagagaataagttttatgttggagctcaagtcaaagttgcattgtcgacttcataagatcaattatcttcatatgattgtttttcaaaatctcgattatatttttcatctaaatacttcatattttctgatattttattctcaattgatttatttttagctactagcttactaccacgagtttccaccattttttttaagaagttggatattttcaagattttagcattgtccaacatatcttttttgtcgattcgtaagcgaagtaaaaatttgatcaaataatctttggaaaagtttctatcttgttttacttaataactcacacattttaatgctcacgtaatagaaactttttctgatatttactttacttaagtattggcacattttctatcatactctaactcatccaaaaaccaaatatgctaaaattaaagataaattgtaagatctgcaatagagataggaataataataatatatattaaaaacaaatcttactcttagagtctctacatgctaaaacaaattacagtaaaatctaaactgaatgatataaatcattattccaatttaaaattattgccttttatcagaaaaaaactatacacaaaaatctataaaataataataaaaaggacattaaaatgtaagatattcatgaaatggtaacttaagaattactgactgaataaagtagaatctactctagaaatcaaggcatagtacatcaacagatgttacaaagcattatgaaaagtccaaatacacattcaaaaagatatcaatatatactttttactttcgcatatgagttgaaatgtttgaatactttttttttctgtgcaaaaaaaatgtttgaatacttattgcattttctttctcactgggtcacatagaat

SEQ ID NO: 41147 - DNA, 536 bp, Arabidopsis thaliana landsberg
gtgggcttatagtactatataagaaaataggaagagagagatagggtttatcttgtatctgagtgaaaacaaggtgtaagggggagggaagagactccaggcaaatctcttaaaacgtgtatctttcttttatcaataaagttgtcttccatttacattgcttttgctatagtttgtgttctaaaacgtatcaaacttggtatcatagcatcgtaacctgagaaatggctccaaacaaaatgaacgagttggaaaaagtcgtcgaatccttgcagcatgcttgttcataagatctcgctgctggaggaggatgtgaagtatgtgaagaaacaactcgaaaaactggattctatggagaaacagatggcaaagttggatgtgttggaacagtgggctaaacacatgatggagactgaacgtcgaacgttgtttgctgagaaaaaaccggaggaagaaactcaagcctccagagtagctacaaacaacacctgtggttctactccgatacatgctcttgtacacactccagatctgat

SEQ ID NO: 41148 - DNA, 378 bp, Arabidopsis thaliana landsberg
gattcttgaactgggtctttccaaacttttaccacttgaatttactaagcttctgcaatctccatcactttcttcttgtaaagcttctcctctgcatctcttaagaacttgaatctcgacaatggcgaagatgacggtgaatgtgatgatgacaatggagatgatctcactagtctattaaactcagcatcagaggatgactcaaacaaactcgagatctcttcttttctaccattacaagactccattagcaatggagttaaaggaggcgtgaacaacgaatgagaagcacgaggagtgagatatggaggagttatgacaccactttccatattaagaaacaaatcattcaaactctttccttttgtggaaaccaca

SEQ ID NO: 41149 - DNA, 365 bp, Arabidopsis thaliana landsberg
ctttttgacaattataccctaattgtcggggctcactaattttaaaacgacattagtcacgcgagaagatgccaacccatcacatcatcatcatcatacatcgcggcttttataagtaaacaaatcgactcttatgtatttctcccgacacaacacaaagttcatataataagaaaaacagagagaaacacacagagagctagaggagagtgagtgtcatgggttgtgttcgctgcaaatcatcagatccatggcaaacatctgccaatgcctttgaatccgacgatgaatccggaatcaacgaagcctgggttgagatctccagccgcagatcatttgtcgccggcgaagagatagtcggaagg

SEQ ID NO: 41150 - DNA, 576 bp, Arabidopsis thaliana landsberg
cgatctattaaatgatccaatgaccaaaaacaatatccaatgttagagagtactactatttacctgttcatactaaaaagacaacggtaattaccgtttgggtcccatggataatgattggattaacactaattaattaaacctaacggtaacttgtagatatagatactgcttatatcttttgatatagctgcgtgcgtatagactttacaataattattcgccatggttacatagaagaataatctcgtgtgaaaaaagaagaagatacaacaagaatgtgtattgtgtcatggggtagttgtttgtgtcaattcttctgtatccaaatgttcttgttctccttccgatctctcagactcaataagcatgagaacaacttgtcgcatcgatggcctcgcgactggagacacacttgtgcaaagaagtgcaatctttaacacagtgagcatatgagagacaattctctcgtcttctagcgttaaccgagcatcaagaactcctgaggacaatgcatctcttcttatgtaactcctcacccaattcaccacatctcctccttgatctattggctga

SEQ ID NO: 41151 - DNA, 613 bp, Arabidopsis thaliana landsberg
ttgtgtaggtggcatagtggtccatggttgtgttgagatagctctccagatcaccttgatcagttcgtgtaaacctaataagacattcctgtgttcttcctctgtccatggagttcctacagcgaagccagtgtcgaacgcgcatcaaaatctgtgttacataaaccagatcaccacttgttacataatgcaatcaagaagtttgatgcaaaataggctcaattacaaaaatttgcaatttgataaaggtttgaatctcagaaatcggacgaagatacctttctttctctctgggctagaggaagagccagcatcgaaatcctcagaagctgtaaccatcaccagcgacatggtcagggacatcacccggagaacccggagtgttggacccggttccatgcccacccgatccagaacccgtgtaatggttaagattacccatacttgcacttttccggatcgagccttcggtgagcggaacaccaaagagcttcacgccgccattgggacaagtccgagagttgtggccattgtgataacagtgagaacatcggcgagtcattcccgacgcgatttgcttctcttaatcggatctgatcgaagtctaaaacgc

SEQ ID NO: 41152 - DNA, 625 bp, Arabidopsis thaliana landsberg
acatgcccttcttttggtcctcacaccttttatctcatcgttggttgtatctcgagagcctttcgttacaacaatatcaacctttctcttgaatctttggaacttagctagcaccaccactccgcacttttttgatgatatattgggttattcaaaacattgctatgtttgtgaattcctgagacttattagttattagaatgatgcaggtaactagtttaaatatttggtataagttttacaatggtagaattggtttttaacatttgcgtgaatgaactaacactagtatagtactagactactagtatataaaaagatatgaaacattctattgacttcaattattgctaataatattttattttatttcttcattgctaaaaattttttgtattgagaatttcttgattcctcacaattttattattagtggacaacttctgcttactcgtttttctcatgctcgctactagttagtatctttttgttcttactctaattttgtatttttctaagaaatattgaaacatgaaaactaaacgaacggaccacgaggcctgttaagaacagattctcttttttgtttgatattgatattgggcccatgagtgagttataatct

SEQ ID NO: 41153 - DNA, 792 bp, Arabidopsis thaliana landsberg
  unsure (1)..(792): unsure at all n locations
gtaccaacaaattgaaaagaggagtgaaggtaagtaagtcaacgggaaggttgtgagatggagtgagcaccgtttacgctacttctccactgtgtgcattcaatgaagtgattctactgaaaatcttatataaactatacatgcatgatgcattgagatgcatatgtttttataattgacataagattagtaaacacatgcgtgagtggtacgactaatctaagagtagtagtgcttgaggtgtggaagctctctctctctacaccttcttcttcatagatggatcgtctaaaatcacttaagtaattatctgtataataaaagaaaggaaatgatggcgtagcaatgcatgctaagggacaagaaaggcttcgggggagagatcacttctcttctactccatcctctttgtctctgctgcttcaaatctctcatctacatgatcagatcatttaagcgtgatagactcttttttattattattattacttatatttttttttgaaaaagtattaaagtagtaataaaaagcggggagaggagaagattgtctcctagagcgacttgaatccttgagctttcaaactcatctcccggagcttcccttttctctttactctctctctctctctctctctctctctcacttttctctgttttttttcttggtgtctgtcttaattccaccattaatgctctctaccttccctttttactcttnccctgcttttgtgtttttctctttctcttttctaaaccctttcaaactcttcttcctcttttttctttttc

SEQ ID NO: 41154 - DNA, 540 bp, Arabidopsis thaliana landsberg
aaagaccagagttcagttttacactaaaaaattctataggaagaaattttttgaacaattcacaaaattgaaacttattcatctcttcatcagtacccttttttttgtaagtaaatcctataaacccacaaaaagctaaagaattcttgttaacttgaaaacgcaatagatgaagaacagaagaagactcagattgcttctaccagtccatgattactaattttgtatgacatgaatcttgagatactattactatactctatacatatgtagcaaaacttattgtttttcttgaatatttcttgtttcatcttgaatgtttagtgctaacgttaatattaattagaatacttattcaaccaaataagtcaataatcacatggtacaatataaaaatttgcacttatatattgtttataacttataagaaataatcattatatataaataaacaaaaactgatgataaacgtcctcgggtaaatacataatatgcaaatacgattttattcctaagcatttgcgattgcatttaaaacac

SEQ ID NO: 41155 - DNA, 624 bp, Arabidopsis thaliana landsberg
  unsure (1)..(624): unsure at all n locations
ttaaatgggtctgaccagacacatcatagacattacggtatctatcacaggcctattttaacctaatatcctacactttttatacattaatactactattgcttaattcaaacttgctaaacgacgataatatttatttctagggaccaaatatataattgtttttttggttttctgaaatttggcagacgtagaccacgtaagactataccacaaaggtctgactaggcacaagtttcgctgacccgcacgcgcctaacgtcaccttttgaactattcgtgcaacgagcgagactatccatgcggcgtcgttttttcccaacttcctcttcctctcgtattgtcaaacggtcaaacctatactcctacataagaaaaaaagaatcagcagcatataatagcaacatttgaaacttcataagcatatataaagctagagatgcaaactaaagacaaacaatatagcagtttcgaattatataatagatacaataaataaataaataaataaagaataacaaccttntatcaaaaataataataataataatttggatactattactatctnttcgagtttgctattttacataaaacaatatgtcagggaaaagaatctcaaag

SEQ ID NO: 41156 - DNA, 771 bp, Arabidopsis thaliana landsberg
tcaggatactgagtgtacttgtattctatggtttttgttgtttgtgtgaaatttttggaaagggatatgttgggaggccatgtttctattaccatgctttggatatagttaaccctggcctatgtgaaatttttagctggtggtcttcgtagtagtttcacactcactgccctcagctggatggtttttaaatcttattgcgtacttaactttcaactttgacgatggtgtctgctatccaggagaatgcagacaggacctggcttaaaaaacatgctgaatcaatggaactcgaattggacgatgaagaaagtgaagaggaaagagtggacaatgtcaggcagagaaaagcgacctcagcacgacttaataagctgaaggaggtttttcactgctactcagaaaaaaagttctcctgaatcatgaaatattactttcccttaagaaaatcgtattacgaattatatgttgatgtctggttcaatccgcaggaacttagcacgctcttatcacatccgatgcagcccaagaaattttcaggccgttactttgctggggtaaattttgttcctctcatctttcttttttttggtcacagcctccatatcttgcatttaaaaaaaaaaatctttagccattctagctctcttccaaacaaaaggtgctgctgcacaggagacttatcaatatcctttgtcccaggttggtgtgtcgactctaatgcagaatcagtttgtaaagttaaagaagcaaaaacaagcacatatgcaa

SEQ ID NO: 41157 - DNA, 741 bp, Arabidopsis thaliana landsberg
tcggtgtcaagattccacactcaacagctattgctctcgccgtgaaaatgttatccccggtgatcattttgatgtttacaccggcgaattgacaatcctcaacagctttcttcactcctggtctacacggatctttgattccaatgatcccaagtaagctcaacttctcttctttcaacttcttgttgtcctcattgtcttctgaatacgcaaaggcgatgcaacggagagatttagctgccatagattgaataatcttctcaaactgaatcttatcatcttctttcatctctctcacaactccagaaccatcacagaacgttgaacacatagctagaatcttctcagcagctcctttccaatgaacaacattgttctctgtgtttacgcctttcttcttcatcaacacaccacttctcttcttctctgaattgaaaccttccacatgaacaacatcatgttcttcaatcactttctccatatccatctccagttcctcaaccgcccagctaagaatcgctttctccgttggagaaccagagaactcatactctgttcctgctttagccttaaacacactccctgtagtgttcattgcaactccttgatgaaacaactcaacaactttctgagacacagaagaagctttacctgattcgagaccgaaccagaaatcggttaccttcatttggttaagcgtcaaagtaccggttttatcggtacaaataaccgttgcagatc

SEQ ID NO: 41158 - DNA, 987 bp, Arabidopsis thaliana landsberg
aaatgctttgggttcacatgaactttacttgttggaagacagagcggtaagtgatttttgcaagcaaagcctggtttctggctgttctataaaaaagataattttccgtttaaggatctcattctcttttctcagtttcattagcttctgtttcaatgtctcgacctgtcgatttgaagttgtatccctctgcttttcagctattgacgttctactaataagcactgcaaataataaaaagggatcttcaattagttttgcaatatatagacttaagaagttctgtggactcttagtcttgctgataaaacctgaaaccaaaccaatctatgactttttagtgaagaggaaaaaattcttacattccttctgcagactctgaagtttgttactgatatcatttttctctgcttgttccattagaaggcagtcctttagatcctgaatctcgagttcatctatcaaatgattatatcaggaagccatgtgaatgccgtaaagaaaatacaaacttaagtacaattggaggtcaggtgggtgagagtcttacacttgcactccacttccgtaactactcgatccagtttcttcgacattgcttgaatatgcgatttgttagctgtcaagtcttgtcgaagtctatcaattaccatatcgtttgttgctttttcaaccaaaaggcttctgtacataaatggttggggtatttaaccaaaagttcagatacattgacacttgaaataatagtcgtaaaatgagcttttacctgattttatactctagctcttcaacttttgttacatgcttctgcctaagtgattccaaagcattcctatgttcctgccacagcttacaaatatctcaaaacagatacataactaggaacgatccaagcatcatctttagttttaaagcacaaggaaactctacacagaattgacaagtactaaaaactctttaatctaaaagctcacatgttctttgctt

SEQ ID NO: 41159 - DNA, 900 bp, Arabidopsis thaliana landsberg
atggaaaacatgtttgggctcgaaaatacattcccagatcctccattaataataatcttgccccatttatggagttgctctctagtttttattgtatcatacttcttgtttgaacttgaggagttgtgtgtacctttatcatttctttttggaactttatttggtggtattcgatattattgtatgttgttgtgtggatgacttctattttgcatggactttttttttcgtcaccttcgagtacatctttcattttatttacccttcttctctttctttatgcaatgactccttattttacttggtgtatatttagtttttattagaaaacatttctcaatccttattctcatagttcaaaacctcattttgcttcgtaatttcacttttattaatataacaacactacattgaaattgaaattaaaagaaggcttgcacctgtgaaataaatgattttatatgcataaccaagtcttgttggactgaaaagaagcaggctcttaaatgcatagagaatctgtaacaaacgtagtcctaactcctaaactcattcttatttatgagctttgttataaagatatcactttgcattgtgaagaaaagtggtaaccataataaagaatatgaatatgctttagaaatggcagaggatgatctcgatcacaaggatgcccgagacatattatagaaagaaatcgcgatctccatactaatcaggataatgattagccactccagagcagctgatttcctgttctgaagtatttcttgaaagaaacgaacgttgtgctgcaaaatcaccaataattattattattttccgacacaacgaataataggagaaagattgtgtggatgataataataataatacctctacaaacttgagcttataatc

SEQ ID NO: 41160 - DNA, 464 bp, Arabidopsis thaliana landsberg
  unsure (1)..(464): unsure at all n locations
ggatttgaaggcaaggtcaagggcgttgacggcaatgccctgttcgccattgaacgcaattcttgggttggccccatcgtgtctgctgcctgcggaatcgccggccagaacggtatcaaagcggacacctggtattcgtgccgatccggccaactggtcgaagcctaacccctccctctcaggcttaaggaagaaatgaaagatgnnnnnnnnnnnnnnnnnnnnnnnnnnnnnnnncgcccccgacggccaatggcgcgttgccgttttgatgagtgatgaccggatgtgcgtcacggatacttagaaatacgccagccaggccaccgcaactctggccgccattgccgcacaccgcgccaagccatttctgaactatgtggcggtcagagcgtatgggtgtgggcgaattgctacgctggctcgcccatgctagatagagccctntggatttaaactcactc

SEQ ID NO: 41161 - DNA, 1086 bp, Arabidopsis thaliana landsberg
accccccataaacttttccataaatattcttcatttaaatattatatgatctttatatggctcactcaaagtacaatagagactcggtgtatatatatatatatatatataccatatacctatatatatatatatatatatatatatgaagaattaagaaagtgtggagcattttaaaacttttttttctctagttttttttgcttttttttttgggcaatgttcgttccctcgagtctattaaattttttgccatttttgttttttggtttttcagtgacaaactcacatggatttcatttcagattcagttagattttattatacttcagcccagtgtaggaacaaccggaacccaaaatctagagagcattcatggtggggttcaatagcccatgtaatagcccacttcccggcatcagaactgacaaatccaaaattgaattgaaatgtgtttataacccgattagttttaatattacggaacaaacaaatcaaaaccataactcaaactaaacgaagtcatataatagatatgataaatttatatcaaacgttttattaaatataaaagagtgttaaaagtttttatttatctaaaatgaacatagttaaacgaaaacccaaccaaatctaagtacaattgttcaaaaccaaagtgaaccaagttgaattattgtttttaattcacaaaacgatttgttgaaataagggctgaagtcgtagaagctttaatagataagaaaagaaagagatatgttgatatcgagaatacccaaaaaactaggatttctgaatattagaaactagagaacgtaagaaattctttgattttttgtgaatatcgaatcctatctcttttagaattgttgagatctttcaagatctagatctacccgaaagtaagaattatagaatactttttctgaaaagctatttttttttttttaattttattgttcaatcaactgaatactgaatacaaaagaaaacctgatttatttataataaaactcaatttattgataatataactcaaaaacctagataactctaaaataatcatataattatctcaaataccca

SEQ ID NO: 41162 - DNA, 625 bp, Arabidopsis thaliana landsberg
aatgttgtctctggtgtgggccattcgctgacagagttgcgagaaatgttggagaagatcaccactaggccattggcagtcgactataagactatgcaaagagttgatgtgcctgtgaacattctggacatcagacgattcagtgacgagatgcaatggcggccaacaattggtatagcccaaggtatcgctcgcatgtgggacgctttcagtgccaagtgattcgtcatcagcgatatctccactcaagatcagtgtcgtcgttgcggtattcaatgctgacagtacgctagagcaatgtcttcgaagcgtcagctgccagacctatcaacatatccaattgatcgtaatcgatggtggctcaacggatggctcgcttgagatcatcagagagttcgaagacaggatcgattactgggtgaccgagcctgataagggtatttatgacgcctggaacaaagctctggtaaaagtagaaggtgagtgggtatgtttcctgtgagcggatgattttttctgggacaaagggtgcttcaaaacttcgctggatacttagaaacactagatccacatttaggtgtgcatatgggacgatcatgactgtcaacgatgcaagcgagcccct

SEQ ID NO: 41163 - DNA, 361 bp, Arabidopsis thaliana landsberg
tacgacaacttaacccacaaacaaaaagcaaaacatgcaaaattattaatgtgcttcactctgactctcaccaccataaggtaaaaataaaatactctcaccgccgaagttacccccacaaggtttctattttaatctcttagttccattactttatctacattaacatacaaaagaacattctatcagaatgaaccctttttgagttccaaaatatacgcataaagatattattatttgaactaacagaatctaagttagatagatagattatattaaataccatacatactatcacgtggatcgtttctagaatgtacagtaaaaaaaaaacgttaggcgatatgtagtctaagcaagg

SEQ ID NO: 41164 - DNA, 924 bp, Arabidopsis thaliana landsberg
aagcatcttgaccaatacaacatacaaaaataagcagcttcttatgttgtcttcaattttgtaccttctacattttcatctttaagatccagacgactgtttctggatggttccccctcttttaatgggtattcactatcatcaccgttctcagaaacttccaggaggtcctcagagtcaatttcaaattcctcaacattctgattggaagtttttatgtcagtagagtctgctgaatctttaattgaaactggcgtctctccaagtccaatatttgtttctttttggagctgtgaacgatatctcgtgaagatatttaaaacaaaaggaacaagaccagaaaaaatgttgcctttgttggatgtttcctcttctgaagaactgtgatgacatttgagactagcattaatgcttaaaagtggtcacgagaaatagaatctgagtcttggtcaaaagcatcatagatcttaatcaaacacataaaaatatatggtataaatgctgaaaccatatatttacttttctttgttgattttcagctaaatatgataccatatgcatgagcttgaaattgttagctgtcactaaacatgaagacacaccttagaataaaaaacgttgtgacacgcactttaggctccagatcaggctcatgaacagtagatactataatatctccagtgtactccatagtttgacggaaagtacgaagaattgttttcacgtctttcttctggagaggtaccgaactagccacaatgcatataatagcgtttagatcctgcatattggtaaaagcatggttgagacttgagaagaaaaaggttactttgaataacataatttcgtaagaattattttcaaggagcatatcattcgagaaaaatgccaaaatacacacaaacaaaaatttcaaataccctt

SEQ ID NO: 41165 - DNA, 869 bp, Arabidopsis thaliana landsberg
  unsure (1)..(869): unsure at all n locations
atgatctactattttgatcgactttgacactcctacatttacatcaatgtttctttttctttctgaaatattctttatttaccttaccttttcatatatttatgttctcagcttcaattcatattcactcctatttttttggcaccatacatcatgcacatctggatcaatacgtaacatgaaagtctttaagatttgtcttgtcaccattaaccagcatacgtgtttacatgtggaattaacattgctaatttactgataattcaaattgtacattataaagaaacttcattttttctctggtggcccgtggccacaaccctacattctaacatccattaaagagggttcgaacttaacctaatctagagatgacattttgagtattgtcgcaaataaaacattctgatcataattaatatttagttacatgttagtatggattcaaacctgaggttgatatgatcggatccaaacagtagactacattaagtttacggatcgcaatcaagattgttacgttggcatcaaggtatatataaaatatcttgaaactttttagtaatttttataatgttgtacacatatatacacatgcacaactataagctaaataaagtatgtccgtattacccgcttggtagttgaagacttaaagaggccatcatcaattccatctagtgacatttttcaatttctcataaatgatatagtttattctatagtttgcatgacataatttagttttgtttatatgatacgaacaaagttgggtgtaacaacatatgaccggtgactntatatccgaaattcagaattcgatatgagatgttctaaatgaatacttatgtgaaatacaaacaacgcat

SEQ ID NO: 41166 - DNA, 467 bp, Arabidopsis thaliana landsberg
  unsure (1)..(467): unsure at all n locations
aaatactttaaaaatgtcagtgagatactttataacaaacactatatgcgtgcactaataacatgtaaatcgtcactgagagacattataacaaaaacactattcgtgcacgaacatgctactgttctgcttcgaaaacagatcaaccgtacaacagttttataaccatttaaagaggaatcaatagtttggtaagagtaagatggaattaaatgaaaaaaagttgggagaactttagagacaaaagagtggttcaaaaacgtactttgtacagatctgaagctggaagggatgttattgtcatccatgtgaatgtcttcgtcatcgtcctgaaatggagggtccaaaactgatactgggctgctctgntctttntcttcttcctcttcctccatttctagtttctttagcttctctacttcaatactctctttttccatcttgtttacacataatgaagtacttta

SEQ ID NO: 41167 - DNA, 767 bp, Arabidopsis thaliana landsberg
gaataatttaattaatgatccactaaagcttcattcttaacaaatcagtttatagaggacaagaaagccttataattactccaccttcttttgtctttttgtttgtgaaagagaaatatctgatggtaaaaaagcccaagaagacctcctctctacacctttgaaagtttatgcaaatttagaaacaaacaaaacgaaccactatagctaattatcttatatagataagatatgtagaaggagggatatacatatgtataataacaatcttgatatataacttccatcatccatggttaagattgtaacaccatgagttggtgcgaggataattcatatatacaaaccaaaaatcacgcgtatgtatgttattgcatgcatgtcttgcatcatccatgcatgaatgcatcaaagagtctccagtctttaatatacatatctacatggatggatgaaagtcatgaaaccatgttattaataccctttttcaaaacaaataataatgaaaccatgttgttataattggttaggtttgaagagatatacatagatagtccccatgcatgtgttattagtagtgtttaggatgaaaataacccctaatacataaattaattttatgattaattaacactctaagattaaggtaaaacataattaattaagactttagattaattaagggttagtaatcacgcggtgaatttagtctctataaaagcagtacctcaccttccacaaccttcaatatcaactcacccacatct

SEQ ID NO: 41168 - DNA, 597 bp, Arabidopsis thaliana landsberg
ccggtcaagccacttgtagacagatccctgtttccaaaaatcaaaaaacaattaaaaaccttttgtgaaaatcatatgaagaagaacaaatcaaaactctgctttaaaaacagaacaaactctatacttacaaagaaatgatcttgggggtctcattgtcaacataagtgcaattaacaccagaccacttgtaatccagcggcacgcaaggatctccttcccagtcaatcttgttcacgccgtaagccgacttgatgttcatcattgcatcaactgaaaacatattttccttaggtaagtaagaaatttggttcttaatcaacaataaagaaattagtttaaccaaccttcttttctatcagtttcctgttgcggcaacaagttaaccgaataaatctccatagcgttgagcagaggaggtaaagtcgaatttcctgttctttgaagcgaaaatatgtactgcccatttgcatcggcgacaacttcggtaggtgtaaatacggaagacgtggtgaaattaagtggtctaaaaggtccatagatatgcttgttatggacatgatgttgaactctttgtatcattggattgagctcttg

SEQ ID NO: 41169 - DNA, 875 bp, Arabidopsis thaliana landsberg
aaacatattaatcgaatttccacatttaactactcaaagtcggtagattcagaatgttgttcaattttaacatactattcgctaactttaccaccctacctataaaaagtgaatatgcgtttatgtcttaatagttatgtattttacacttgtgcaaaacaaaacaaacaagcaaaacattttatcagaataaacaaaagaaaataggaaacaagtttgacttcttcttgagggaatctgagtaatggtttaagaacaatttaagctagatcatggcacatgcatgatcttcttctaaatagtttagtcctgcttaagttttgtaaaaaaaaaatattaaatccctaaaatctatcagcataagtttgcttttggataacaaaaatctatttcaagctaaaagatagagtaaagcagacagtttttgggaaggtttcaacgactttggtcaaatgaatatgtgcccgacacgtagcattccctcctaatataattttcttgacattcaatagagatcagattagtgattaaccatttccatcaataacttaatggattttatacgttttcctctttttttttgcatgcacattactactacgtggaggaaatatactgtatatgcatgcatatgatgaaatcgccacgtaataacatttcggaatacccaataattgagtgcctctaattaattgtaatttgtcaccagatatttattcaaattatcatgcaaaaatttaaatttgaattcaggttttgttttcttttgccaagaatttggtttttcatcatatatacctacatgaaaacgatagaggcaacttctctctcacattaatatacaacctatttaatttttattcgaattttcgtaa

SEQ ID NO: 41170 - DNA, 257 bp, Arabidopsis thaliana landsberg
gggagattaaacgacttcctagacatcattttagaacatttatttataaccctcatattggcgttgttttaagttatttaaactactatatatctttaattaaaatagttgattaattttgtgagatatattctatatacaaaataacaattttaaatctttcatattttagatttttatttcaaaattttcatgaacaattaggttaaaatttgtattagtattattttaagttactcaaatggtactacaattgg

SEQ ID NO: 41171 - DNA, 1135 bp, Arabidopsis thaliana landsberg
gcatttgttttctatattgttggaatatcgtgggcattttaacatgtactaggtataatattgcaaaatattacaaaactgtgcaagatttggcgacacaatccatcatgattccgatggttccactctgagattgttcatggattagttcgaagagtcgatctcacatgacacgcgtggaatcagtgatccaaggttttgtgttctgcattgttgatagcttagtttcttcggaccccaagtaaaacacttccactgctaagaatgtgtttcatttgtctttacattttgcatcatcgtttttcgttctcaatagctcaatgcagtgatcttcaaaatcattttcacttctttagacaccgataatttcattgctttcgtcgagtcgatgaactgatttgagtttgtgattttgcttcatgcttttattttattttactatgagaccaaaaataaagtttaaaatcttgatcgtaaacaaaacattttcattgaatcatttttctgggccaaaagaggcctttttaatggcccattaatgatccaaacgcgattaccaagctcttcgcttccaactacatctcctctctcacagcttcacttcacttgtgtcatctaaagcttcccttgaatctcttctctcaaattcgctttacttcttttcgcgatacagattcacttgcattaaaatctgttttctcggagagattcttcccgtggatgagataagagatcccaatttcgccgtttcttcattcacaagagttgcatacaaactgtttgatgaaattcctaagagaggatctgattattaggtcgttgctatttcactaagctgattttcaaatgtgggttaatgggtatcatcaaataagaatacatctaaactctgaactcagtttcaaggcaaatccaagtcgcttcttccgttcattccaggttctgtatcatccttcagttgattcatatgaagatgtattgcctcatgaatggtacgaaacgaaactcccagttctgaagaaactaaaccgtgcgttgagagatgttgatttagtcgacggagagctagaggacatcaatggtgtcatcgcctatgatgatggcgtcacaaaagacatgcaagcattcaaatctc

SEQ ID NO: 41172 - DNA, 534 bp, Arabidopsis thaliana landsberg
caaggatatgaacatcggacagatagtagtcatgtccatcttcgccacctataacaacaagtttgttcttccacgatgagcaagaatggctatcccgcgcagatggaggattcccaattgtaacagcccgtttccacacaaaagtttctacacaagcataaagccgattaacttacttgcatcctcgaaaatttagtacaaaagtattttaaagactcaacattaacgcaagaaaggatatggtttcaacttgtttttaagttagaatctatctaaggtcccttatcaatgaataaaagatgataatatggaaaagattcacatgccaatttgaagagagccatgagtaaccaaccattacctgtattaaatatgtaaacgtcattgtaatagatttcttcattaataccagaagatttctccacagccaccaaagacaaacagtccttttaccaaccatgtgtggcgctatgaccttctcttgcctcaggtccctctttcctaacactcggacattttcaagtatgtgaagtt

SEQ ID NO: 41173 - DNA, 557 bp, Arabidopsis thaliana landsberg
acttcaacagttcatccaccttggccagtaccccggccggtggcagtgaggttgtatctatcgtcacagcgtctgtcgccgggaccagaggcgcaacagcgcgcccgcgatccctttcatcacgctgagcaatttcagcgcgaaggtcgtctagactagcatttaccccggattccctcaactgattgaagcggcggcgcgcgcgctcatctgggctggcatcgagaaaaatcttcaaaaccgcgtccgggaacaccaccgtgcccatatcgcggccatcgccaatcaatcccggcgcctgccgaaatgcccgctggcgctcgaacaatgcaagccttacctcagggattgaagcgatcctggacgccatgccgccggtggtctcggtccggaccagacgcgtgacatcctgattattgagaataataagttcttgtttttcatcagtttcagagaatctgatgtccatttcaggggctaaagccgccaaagccttcgcatcggcgaggtcgacaccagtttggtgggccgtcacagcaagcaggcgatacagggca

SEQ ID NO: 41174 - DNA, 999 bp, Arabidopsis thaliana landsberg
  unsure (1)..(999): unsure at all n locations
cgaataataatataatatttaacatgtaaattgcaaagggaaataaaaaattttgtatatgggaattttgactccacccactaaaaatatctgaaagatttaaatgaattatagaacgaaaaatatatttttggtgttcggacaatattatactaaaaaaataaaatgttacctgcaaccatgggcataaggatgagtgcgaaaaccagcaacaaaggtaatacaacagatgaagttttcttggttgtcattagaaatgtttctagatgatgcaatctgaatatccttcaaaacccaatatgtattaaaaaataaaaataaggttcaaagtcattatttgaagaaattttttgtattagagtcatatataaacacaagaaacagaacaatatattaaaaaaaaaaacacttatgcttcaacataaaactaacatttgctacgacaattgaacaaatatatttaccttctgattttctaaagttttgttacttactaagaacttattgtggttttcttgagtgtgtatgtatgtatatatacatacacacatatacatatacatatcagcaacatatatattccatcttttgtatgaatcgtatcaaatgaattttccaaaactgaaaagtttacaaaaattttggtcaacaagttttattatttattatatctttctgttttttaaacaacaaaagatggaaagtatctcatacatttaaatgattatttttattcaaacataanaatatatatattanaatatcaataaataatacananagttttttaaacaatccaactaaagtcanaattgtattttgcttgctaaattagtatanagtcttttaggaaggaatccaaaaacaaatgcgactttggccatttgactcaaagtgcccgcttaaggcaggttcaaaggcccaaattaattttttacatgttaaggctttnntgttttaatacatattagagatttttgatataanagcagtgggtca

SEQ ID NO: 41175 - DNA, 558 bp, Arabidopsis thaliana landsberg
ttcttttacttctcgtgtgctctgtcttgacttccagcatccttgctaagaaccacgtcctctcttctttctttacttgtggtttgggtttgattttgttactgctcgtttactcaactctgagatttgagttgcatcataaaagatctctctctctctccatatctctatttttatgttgtgaaagttggtttattttcatgtaatgaaagtgctgattggctgaacatttgcaggtcaaaggagccaacataggcgatgtattccttgtatctgatgttgtgtttcatgatagaagaataccaattccggtaggttcatcttcctttctttcttttttccatctttagtgatgattccctttttgccagttcatcttgcaagttcctgagcaatgtttgtgtatctctctagatgtttgatctgtatggagttggtctccgtcaggcattctcgacacccaatctcctcaaggaactcaatttgaaggtatttaatagactcaagatgctacttactcttttaactatttcaattttgacaacaatggggtggttc

SEQ ID NO: 41176 - DNA, 427 bp, Arabidopsis thaliana landsberg
tacgaggcctcggtctcgagcacggcggcaccgaccccggcgaactgctcggcgacccgttcgagcccttcgccttttgtcctcacgcagcgccaccacgtgggccagcacgagggcgggcagcacgtcgtccatgtcggccgccacctcggcgacgcggtcggccaccagcttgggccggccgagccgggcgacgtcgtgcagcagcccgagctcgccgacctgcgccgtcgcctcccggcagggctcgccgtcgaggacgagcccctcgacgggctctgccaccgcgccggtggccaccagggcccaggcccgggcccgcaggagctgggggccgatggcgtggtagggggtcgggtcggcctcgaggtggtcgaggatcgccagggccgccgacccctcgccgagggtggcccgggcgtgcgcc

SEQ ID NO: 41177 - DNA, 900 bp, Arabidopsis thaliana landsberg
ccttatacatctcaaaaacaatctctctgtcggtcggtcgtaaccaaaagccgtctcagaagaaaactcaactgcgaagaatatggcgaccgatgatgtgaacgagcctctcccggcggcggcggaattaccggcgacagaggcggagaaacaaccacacaagctcgaaagaaagtggagtttctggttcgataaccaatcaaagaaaggcgccgcctggggagcttctcttcgtaaagcctatactttcgacaccgtcgaagatttttgggggttcgtctttctctcttctcctttgatttcaatatttgtcaatgccttgctttgtaacttctaaatctgggatttgtatagaagctatggttattgtgaatctcgatctatgtgtatggatccgaaaatctaaggatgttaattttttggttattgttagattgcacgagactatatttcagactagcaaattgacagcgaatgctgaaattcacttgttcaaagctggcgttgagccaaagtgggaagatccagagtgcgcttatggaggaaagtggacttgggtttgttactgctaataggaaggaagctttagacaaaggctggcttgaaactgtattacattctaaccctaaccctaaccttttactcttctgtgttttgatagatgatatgtggcctttggcgactggttctatttcttatgatattgtagttgatggctttgattggagagcattttgatgaaccatatgagattttgtggtgtggttgctagtgttcgtccacagtcgaagcaagacaagctctccttgtggactaggacgaaacctaatgaagcttgcctggtatgaagactgcttgtcttctcactatgttcatattgacgctggtgttggctattat

SEQ ID NO: 41178 - DNA, 546 bp, Arabidopsis thaliana landsberg
tggcgcttacatcaatgtcaattgcatgtatcggtgtatggctatgtatcttgcagtaaaccacctccctttgcttggctatttcattatggttattggtgacatcttcttgttggttttgatgcttctccttgtttcttatgtgtctacatatactaatactgatatgataatattaatggcttcactgtcggttgaacctaaggaaaatctgttcaccaacttagagtgccgactccttgggagataatcatcagatacccaactctatcttcgacatattttctgagcacaaagccaacagattctgcatttccgcttttcggcagcgacgtgaagaaacgttttgaccctgtaagattaaccatttctattgtgtcttggtggtgttttaagatcaccttgagagctgaggggcacctagggacgcaggacgactccatggggaaagaaccatcttcattcttaatataagcaacctgtgtagagcttgcaaatctggttagcagatgcaaaggatgctacaaaggtaagtggagtttgttc

SEQ ID NO: 41179 - DNA, 485 bp, Arabidopsis thaliana landsberg
aggtcggtactgacagtttctttgttttatcttgatatattcgtattgttttgaaactatggacaattaggtaagatgcttataacatgtatattgtatcttctaagttctaacaataattaattacaatacattctattatttcgatcattaaaaaattggaacttttattccatgtactattttggattcacaacgttaattcgagattttaactataatttttcagatataaactcacattaagaatattaaaaaaattagatttcaactgtgatttatatctctagtttcagataaaattgtgagtttcttgttattcaagacgtacacaaagaggataaatgacattgaaaatactcaaatcttattctgtcagcccataagataaatcattcaattatttgatcaccacgagttgattatctatattgtattaattaccgaaataattaagaatactaaaacacaaaaaatgtaatgaa

SEQ ID NO: 41180 - DNA, 856 bp, Arabidopsis thaliana landsberg
cggcacaattagtttaaccattcatttaacacgattgcatagccagttctgaaatttgtagcattgtcaattttgtttaacgaaattgtaatagttgcaatttgtgtcataccgtgctggttatatcaacataattaaaaaaaggtgtgattatttaacgtaatatcaatgattggagtttattccatacaaaagtataataactttattttgtttttttatcaacttatcaaacaagtgacactggatcactagacaaagattcatcagaccaagtgaaagtgctataaggagacggatttggaggatcaaaaacttgagtcacaccttcaagcatctgtgtaacatttctcatgttaggtctcatcccatgctcttcttgtatacaccatatcgctattttcacatatctctccaccgtatccatgtcatccattgcctctgaatcctcctcagtcagatcttccaaccttccttgtcgaaaacaatcgtaagcccaattgatgagaatcacgttatcctcaaggtcgactgctttcttgcagcacacgatttccaaaagcattactccatagctataaacatctactttggatgtaatgggactgttcctgaaccattcaggggccacatacccttttgttccacggatgttagtgagcgtatacgtttggttcatcaacaaaagctttgctagaccaaaatccgagatccgaggagtgtaatactcatctaggagtatgttctgcggttttatgtcacagggtatgaatctgctcgctgcacttttcatgtagatacaagaattccacgagcaatggccaccgcaatattctttctatttttcagcttggcc

SEQ ID NO: 41181 - DNA, 1006 bp, Arabidopsis thaliana landsberg
atttataaaacattttactaattgagtataattaaattaaaatccttagaaataaatttggaaaaatgatttttgctcttattttttggagcgataatccggttatttaaaacatggtcaacttctgactttttgcttttgctctaccaaaagatttgccaaagtcgataaagaattatttattgctccggttactttttagtttttggtccattcattttgatcaagtcaagtttatgaacaaaagtaaatgactcgtaaaattcttcacaatttttctttttcaacagttactatatcgtaacgtatttgtttataatgtgaatatatcaatattattattacatacaactcttgtataaattagtatgtgtcgccatttgtaatagacacgagttcgagttggtgtatacataatcgtatggtatgtgaagatgactgccgtaaaattatttctcttaaattgagtatttccaaaacactgctgtcagtacccacacttgccaacggccattgttgcattaagtatcgcaatgcactgatttatgaccttcaatgatctccctactacacaaactaccaatttttactctaggttgcatgctttggcattcgtcaagttttgctctctatttcgtaatcgagataagtaaatttgatgtttgttttttatatttcttattgacatttctataactaatttagtaatttaacatttatgtacacgagtttttttaatactaaaaatattgtttacaaatatagttgggtcatatgtgagatcctcaactggttgattaggtgctccaagatattgattaatcgtatgagattagtttttggaggcttgagtttgaaagtatttctctccacaaccgggagtttgagataattagtttggttgaactgagaaaataaggttaaaatgatgatctaaaattggatttgaacaataggataattatgtttagttgagttatttaaaatgatatattagattgttgtg

SEQ ID NO: 41182 - DNA, 582 bp, Arabidopsis thaliana landsberg
atgaggtccatcctagcacaactgcagaagcctaagtaaaacgattcttgacagattttgaaccctttttctactctcacatgactgttctgtcacgatcagctgaagctttctttttttaaatgttcttattcaacttttaaagtcatctttttattaattagctatcatttttggttgaacttgtcccaattctatcgcaaaatctctgtttggtcattttcttgcagtgatatcatggtttttgtatgtataaaagagtaagactttaacgctgattaggtcttgaatagacgattttgatcttctgtctgaatcaatatcattcattggataggaaaaatgggtttagggaatgaggaaagtgtatagggtgaagacacacactaatcaatttcattcatttgcgagggtggaaagacacgtttttagggtttaaggttttgagaaacagaaatgaatggtggcaactatgagattttatttagttttatttcgttctagtttgcttgatcatgaagtaactaaaatttggaaaaaggtgaaccacttgtgtccccctagaaagtttcatatagcccc

SEQ ID NO: 41183 - DNA, 636 bp, Arabidopsis thaliana landsberg
tgtcgaacctcctcagagtgaaaatcgtcatgagagtgatgaatagagattggagaggatgaagatatattcctggttttcaaaagtctttccttttccacagcagctaaaagctcttggctacaaaacaaaggaaccaataatactatcaagacctaactatgagcaaagtatcatgagaacaaaatctttctttctccttaaagatggatgagagtacctagcagggtctctcaaaacaaacaattgccagcaaataggacactctttgcttctctgtgacctgtgtaataataaaccccaatgacaaatcaatcagtgatagagatatgaagagaagattcaagtccaaagaaagataaaaaagatcacagattcatgtttccaagtaccattcaatgatgcactgaaggtgatattcatgtttgcagctggtgacctgagaaaaccatcggaaagctttagatatcggagaagaaacaacaatagaagatgtttatgttagattcaataggaccaaaatgagaaagcgagaggatcaatcaaacatgttcaacgatggttcaagaacaagtgatcgagttaatcaaacgatctcgttattaatctgagtcaaaatatcgcagggcacaaaat

SEQ ID NO: 41184 - DNA, 666 bp, Arabidopsis thaliana landsberg
catctgttcccaaattttcacatccacgttttttctaacacatttaaatcagttaaactccaaattaaaagttttatttcttctgcaaaaccagagttattatgaacaattgaaaaaaagaagcaaggtataattttgatgatcataagaaaaatgacggtccgatgtctccaaccatgagctgttcgttacatagtatgttgttcaagttatctactttttttttgtgtgtgtggtcaacttttacgttaatcttgattgcactaaatttcttaaattattaaattgaaagttagtaccgaagagactgatttcacaatccaactacccttctgttcacgttccaacttacaaaagagaatgagaattctcattcattctctcatttatttatttcatgtctctcactttattactctttttttttttttttgttcttttctcctcaccaaaaaatagtatagaaacaaaggaatctttcaacttctctgacgaattttcgattttctaagtttactcaaattagatattttttaaaaactaccttccatgtacacttttattcatgatacatatatacatgaaaaaggtcctgccaaactaattaatactcaaaacattttttgctccaaacaaacaaaaaaaacagaaaatttaattcataat

SEQ ID NO: 41185 - DNA, 1241 bp, Arabidopsis thaliana landsberg
taacggtagcatcaccaatcctttaataagcctaattcctaacaaatatcagatgtagatttcactctggtatctcctaaagtttctgtagtacgaattgatccagaacaatcatagtaataacatcgatagggatttttcatgtatatatgcgtttacataaatagggtggaagatatgacttgtaacaccatattatccatagtagtaacacaaatagagattgattcatataaatgcataaatactaatagggtggaagattgtgagaagaggctaaccttgtggttttgatacttgcctccagaaccgttgggtgcgtagttaaccgaattgtatcccgctgttgcaacagaaggaagcgcatacgcatatggaggaccatgaaaaccagagtagaaaagacctaaaatgccgagtttaaaggaacttacaagagaattaagctacaacagacaaccatcatacacaaccctcaaaatggaaagaagatccatgtgagatgaaagatactaaatgccattactataccttagttgacatctgacaatctaaaactcagtagaaaatcctactctaatcttacatttttaacaagggatatgatccaacatctacacttgacacttagattgttcacatgaccctaaaacaagaaatcaaaaaccttgtactgtgatttctagcctatctacgcctgtccatgtgtagtgactaaagagtcttaaaacaaataatttgatagtgtcaattcaattgtcaaaggatactccggaaatgatctaaccatttactctattgctttccaacatgaataaatgcaatcaaagacatacagtacacgataacaaaagaagcttcacggaggataacaaacctaacttagctagtactgagttgatatacctgcatatgaatatggggaatgcacattctgggagtaatgatcgtcctcagtaagcttagccaaaatcaaatcgattgcccgcatctgctcctcgaaggtcccagataatgtcactaacctatcgctcaacccgtaaaaggtattatccagaggggatatcttaataccagctttagattcctcaatgaatgacctttttgcaaagaaagaaatgtcttgagggttagtgacagcagtacaactgaaatcagtattccttggaaaaaacaaaaatgcaatgccatattctagaacttaaaaggaactagatattccatacgcataactcgtcaaa

SEQ ID NO: 41186 - DNA, 605 bp, Arabidopsis thaliana landsberg
atacgctgaggacagcacgacctctgttgtctgtctgtcgcttgtgtacggatcaattgacacatcaaacatgtagtagacccagccagctgacatgacacaaccacacaacaagagcagaaacagacaacagcagttacagcggcggcggcggcagcagcagcagaagcagacacaagctgaccactcattaatgaaatcaatggatagacaagatcatggagcatcagcatcagaccacagtacaccccattcaattggcaattatatgccagcagagcttcgctgtcgatcgcctctgcagcggcaagcaattcaacattcgccgagcaatgcggcaaagttggagaaagggggagcggggaacacaaagagcagtagtagtgaagcactttgacagcgattaacatcgatattgagcagtgagaggaatgagagaaagaaaaaccgaacgacctctttgctcggttaaagtcgaggagcccacaaatctcccaagtgaatagtgcgcagtgtcaaggcaaagcaaggcaagacataacgacgatgtctacgactacgaccgtctggcacactccactaagcactagttacctaggcaaagc

SEQ ID NO: 41187 - DNA, 2033 bp, Arabidopsis thaliana landsberg
taattatgacagaaaccaagaaaccaatacatgaaagtctatacacaaaaagaattacacaagacattttgtttggtttctgtatgaacaaagacatattttaaaagaacacaaactgatttttcactccatcacaagagaaaatctggaattataacgtgttctgaagcagaagctacttcattttgccgtcgtgatttgtgcttactacttccctctcccttcttcttctttttcttcttcttcttcttctctgagttctgatgattttctatcctcgagctctcttctttttcctgttgtcctgaattcggatttccctcgtacctatctttttcttttcccttgttctttaccagaagaacgctttggatcgctcgggacaaagattcatcatcattagcagtctgtatatttgtttttgcttgaggagtgattcttgattcatctccatcgtctagtttcaccactacaggccgtggtttagattggtttggctttctcttggggttaaatgaatcctgggatatctcgtttgctaattcatttgccagaggataatcgcttgacgtgccgttgctatcttgatcctccttttgagaagtaagataatacattccatggcgtttacggtgttcagctagcagagatgaagcttcatgtggaggagacgaagatgaagtggcttcttgttgatctctgattctgagtttggagacagagaagctgatcttgtctgtgtatgaaaccgaatccgattccacgggtttaagatgttccccacagatctcctccagatccccgagattctctttcagctctaacccatccggtacacaaaccttttcttgtgcagttgcagaaataggaccaaactcttctgagaacacatcttccatgaatgctgtaactctagaagcttctgtttcgttgccttggaggtttaattgctcagctatttcttgctttatcacactgatgtatcctaaaacattcttagctctctcctgcacttccacatcatgggttccagataaaggccccaaaccaagctcaatcacattcaccagactcaatatagattcatgagtgaaaacattcaccaacaaagagccagaacttgattcctgagccaaggatgacgaagtgggttcctgggacgagaagtaagaccccagacagaagacaagaactttgaaagctgaatgtatatagatagcttttatggaggggggtaagagatcagttcgtggttgcagaagcgcctccacagtttcatacggattcttagagaactcaacgtattcacctgaaacccacgcagctgcagatagtatagggtgtaagaacaagttaccgagcaatgcaggatcaatgagcagtgcccaagaaacacggactagctgtggtctagcatctctgaccctcataccgatatcgatcaactgatgctcaatctcttcccctctttgacaatgtgggattctagccatttcaccaagaagagacaaataccaatcaaagtcaactatgatctcatatgcattcctggagcatgccgataagacagaaaaaataatctcattgcagaacaaagggtctgacttgagtgcataattcataagaatcctggagatttccgacacattatcttcattcaccattgccattaagagatgcaatgcctcgagtttaacatttggatcctcatcgctcatagccttgacgactacctctttgttctccaaaactgcccacaaatgcttaggagcaacaatcgacaaggcgttaagaccgagatacttaagatttggatcatcttccaccagaaactcccggatctttgcaacagcaagtttcacagccgcttcgttatcgctcaagctactcaccacggttctaacacactcaaaaaccagagactttgccacagtcctcctcatatgttcacaaatcggctcagcaaccttcttacccaatctcggttcaatcaaggccaacttagcaaatatcttaagaaccttgatcagaac

SEQ ID NO: 41188 - DNA, 568 bp, Arabidopsis thaliana landsberg
ttctattacttataccatttgaaaaaaaaattgtccaaaaaaaaagaatactatttgaatcaaaatgatttaaatatctaaccgggactacaaaagaaaatgttatccaatgggttgggtcttgttgtgatcaaatatgtgagggccaaattgttatgaaacaatatttaggcccagaatagtctcactaagtgcaatcaagcccatgaccgtcatacactaagttaataatagatataacaaaagaaataatttaaatagaagcagaagtaatgaatgatcagaaatgtgtccacgaaagtttcatgttcttgctctcactctcataatcatgtttatggtcgctcacacgtaattgtcacaagagttaactacactacggtcaacgatttgaaaagtatttaaagatatatcagaagtgcgttttcgtaattatgtagagatttcacaatttggctcaaactaaccaaaatgccctggcatgatgagagctcgtaaataggcttttttagcattgtgttaactctatgcattcaatcttaaacattcatctatcttaccatactat

SEQ ID NO: 41189 - DNA, 464 bp, Arabidopsis thaliana landsberg
aatcattttgcttattagatattaatatgtaaaattttataaatttcttgggggtttgaccgagaaagaattaatcattcgagatgtcaaaagttcatgtgatgtgtaatcatctttctttgttttccacatcaaaggtgtttttatctatgcatgatgactccgatgatattgtttggttaatgtttaatttgctttatgcccaagcatgttaacaaatgttgttcttttggtggaaaactttccaaatctatcaatttcttttgttcttttatgaatctatcacattttgtagtaatgtgatagtttgatgatgatttagccttgctagtagagcatgatttctgtttatcagataaagggaagtgatgatagagaaaaaagtgaagcatcaacaagtttaaatcgaatgattaggatggacaaccagttggaatatgcaatggatcagttagaatagacga

SEQ ID NO: 41190 - DNA, 508 bp, Arabidopsis thaliana landsberg
caaaaaacaaacctttcttggagtttctgataataatttgagtgaaagcatttattacaatccaatttagagatatttcgagggggggtcttagattagaccgattcccttacttatgaattaagaatggggcttatagtcagttctctcagttctcaagtgatgattggtcactgaacactctattgtctgattgatattagctaataggacagacatgggcttgaccatatcactctattaagtgagaaactaatgatgcttattcatagagtctttacctctggatattagttaagttttcattgttgatttttgtttgtaggtgtgaagaatgtgaggttcttaaaccttgatttgaaatcctcacatcagagagctaagagatcatcaactgtggttcctgctttagctgaaacagctgtttctatagcgattgcagccacggtgtgttggtactgcagcatctattcttgttaggagaaaataacaaagcctccgaagaagc

SEQ ID NO: 41191 - DNA, 535 bp, Arabidopsis thaliana landsberg
acatattatgtgtacattatctacaagtcaactaataggaaaaactctcatgtttatctctttcttgtctttattttgaattaaaattagaaattatttgtgttagctacatagctttatgcataccacaaaggaaccaatattccaactttttaattctcctgcaccagtgcagcgcatgccctcatacttttattaaatttggcgtacaataactaatgactacgttatgattcaatttattttgtcttgtcaaataaagaaaaagaatcattactctttgctattaaattaaagcttgtggtatggaaattgatgtggtgcagggtcaagcacgccggaaaaggctagcaccgtgggccccacagaacatgcaggcacggccacaaccgctgccacagctgtttcagcctcgccgcttcatcagatcaccgttactacggctgccacggccgcaggaaatatgattaccgaccaaaatagagaaagaaggttcggtttttcgaggaaattcgagttttaaacgctctcacac

SEQ ID NO: 41192 - DNA, 814 bp, Arabidopsis thaliana landsberg
gacaaacctatattctacattatattttacgaatttaattgggggattattttatctttccatttaggttaacttttggttgggacaattatgtattactaatcaaacaattatataatgtgttttagaagttttagaaccaacagacaagaagtttataaccgtgacggcgaaaaaaaacaaaaaaaccgtgaaacaacttagtttttgtagacaagtagtcaagtacatttaaaatgtggccgacaaaaaagtttttcaatcttaatttttgtatacactcgaattaaaatctagcaaccatctttaactttttagttgtctggaatctttaatttggtaacaccaaaatcttccattatgaaaaaaccgatctagttgaatagatggccaagtagggggaaataatcatactcgtgtaaacgttggaattagatcataaagtatacattcatattattattttttcttaattatgtaatattcatgtgattagcttaactggctttacataataatgtgagttgatggtgcattcttggaacaacccacatggaatgttaatgtatattcactgatgcaatgttacaagttgcaaacatctttaaacttaagagagatttttctttatttgccataaaccttttatgttgggattttatattttaactctcacaacttaaaaaagtattatgtacaccattgatgtcttcattggactaatacataattagttttccttaaaatcttcccatgaatcaaactttgtatggtagaactattcctacaactatggctagcatattagcatata

SEQ ID NO: 41193 - DNA, 558 bp, Arabidopsis thaliana landsberg
ccttccaagcccgaatagactcattgctttatcggagtgagacacgaactcgaaggtgactcttttatattgcaatgttttcttcgattctgatctctctctgcgtaaatttcacgatcgcagaccaaaacttgaagaagactaaaaataaaataacattcatttattctttattttaagagtttacacaacacaacacaacacaaagtaaccattttgaaaagtttcgaattacaagctctgtcaaagttcaagacttcgataattattaacggtgagataatataaaatcagcggaaattttgtttcttcatcctcgtcgtgtgaacgaagaacagagagattaaactgtgtctgtagcttttgtgggctgggcaggagtttgggtttcaggcccaatagtattcctgcacatgaagaagaacagaacagagtgtgtaaaaacaaaataaagtttcgatttgtttagttgttatcttcacttacttgcgagggtgatcctctgaaatttcatctgtaatcctcggttcatcttctctaccctgcaatttcggacat

SEQ ID NO: 41194 - DNA, 626 bp, Arabidopsis thaliana landsberg
ctgaccaaggaacatagattcattgctctaacactctgaaagctagtttataacaataacatcatcaatctttattgcaatgacaaggtgagacagaaacaaacaatcagcaaagatgattcactatcgaacaaagtgatgtaacttaagttctttaaacaaagaaaaagatcttctcttctcactcattcttctagtcatagcaagcataaatttatagaaaaacaagaggagagacaaaatgcaattgaaagacaattaaaagtttatcagtacttctgttgaaaggttatggggtgtggctaaagacagacactccatagttttatagctcatctggtcccaacccagtgtcagtatcagtatcagagtttagaacttttcatttcatgataaagttaacattaccaacaaaaaagtcagaaatcttacaacactttgtcacatgtcttttctaatcttaacacagaatcttctcttcctccacttttatagtaaccaaaatatataaaaagttcccaaacaatcattaaaaccggcaaaaaggcaaagactcagtcgaaacgatcattaaatcatataaaaatgaaaccttttgaacttttcaagattgaaacttttataag

SEQ ID NO: 41195 - DNA, 200 bp, Arabidopsis thaliana landsberg
atatacactgagccaaaccgaaatattaaaatatgtttgataaccggtaaccagaggaaccaaaactgaaaggcaagtacagtcattaccaatgggtttgaaaccgttctaaatttgtttgggacattttatttttcaagtttggttgtcttaatggatactttttgttgttattgcctactgtccgtcaaacggttggt

SEQ ID NO: 41196 - DNA, 524 bp, Arabidopsis thaliana landsberg
gactcggagtcgattctgatttcgccggacgccaagtttttttatcgtgttgcggcggcgatggcggagcgcgtgacgactctgccgcgcgagcagatcatccgagcgtcgattgccgggcgtggtgccttgattctggtgcgggatctcgacgaagcctgcgtggtctcgaatcagatcgcgccagagcatttggagttggcggtcgatgcgccgcgggcgctgatcgccaaggtccgccatgccggggcgatcttcgtcggccgctacacgccggaagccttcggcgattactgcgcggggccgaatcacgtgctgccgacgtcgcgtgccgcacgtttctccaatccgctcggcgtctacgaattccagaaacgcagcagcttgatcgaatgcacggtcgacggcgcgaagaccttggctcggattgcaggacgcatcgtggacgccgaaggcctgcacgcgcacgcgcagagcgcgcgcgatcggtcgtaaacaccgcagaagctgctgcgctcgacagc

SEQ ID NO: 41197 - DNA, 575 bp, Arabidopsis thaliana landsberg
aatcgaagcatcgtaaatatttacaaaaagataaatgatagagtgcatctcgctattttatgacattttacttaaatatctaatggaatttacgtgttcaacacattttcgggttttgagttttatttcctcgtatattcaactaaacatattttcatggttagggtttgtttttttttccgttatgaataaaatataaccgagcttcaatattatgacaataaaaaaggtttggtgagttttcaataatgtgaatttctttggtattccttcatctccactgaatcataaaaccctaattagaagttattatcctatttggttttgaattaaacaatctttggggccagcactagaaaacaatctgcacattgctcaatttttgtgggtttctttggatattagcgttgttattattttatatatagctcgctcattaagagaattctataaagtgtcttgaaaaattataaaaaatatgtgatggaatgcattacgctattttaagacattttaagtatatattaattttatggactttaagtgtttgatatgtttttggtatttgagtttta

SEQ ID NO: 41198 - DNA, 625 bp, Arabidopsis thaliana landsberg
aaaactcaagatttttttccgaagcttttatcggaaactattgaatttttagtaggtctattttcattcattggcaacttgcgaaaaaagagaaacaatgtcaataattaatgtaaattaaaaaaaaaaacaaaattgtagttgagaagagagagagatgcaaaggtgtcaacgtccgtgctttgacttctatcttttctcttgtcctcatcttaaatcctcaaagctgacctaaccggtcactcccttcttctccggtcatctttaattattattcaattaacccataatcaaattttaatataaaaattaaccatttgcaaaataaaatcaatataattaataaaagctactcctttacctttttattgcatagaaactactaaaatataaatctaccatttgcagaataatcggcaaaaaaccataaagaaacatttatagtcacataattttgcatatatttttctaaattcgatcactttcatcattcattattcattaatcgttccaaattttcttttgcctatccggcgaacgaccaacggttcaaagtaaaagattccgccaaaaaaataaaaaagaactcttagagaaagactttccctaggcaatgttattgatt

SEQ ID NO: 41199 - DNA, 550 bp, Arabidopsis thaliana landsberg
taattttgttaataaaataaacctaattatagtgtgttcaaaggttgacaaaagtttgcatacgaaagatgatttatatattgtcgagttgctgctatggttaatcaacgattcaatgaactagagctttttaatccagattaaaatactttcagtgatattaacatgagtcattatgtattttcaaacttttttttatttactttttttttttactattcagagcttattagtattttggtcacaggagacttttgctcagattctttgaaatcgtctacatgatactacttaattaatcttttaatgtttggtcaaacgtaatcaaaagttttagatgtattgtaaaagatttagttggattatctttttcattatattattggacttttcgggagagggtgttacttggaaacaaagcgacgtgcttacaatacatgtgttcacgtgcgtatttgtctcaacgcgttactattattgtttttacacacgagctctatgacttgttgacttaaaagataacaaattggataggttcgttgactagaac

SEQ ID NO: 41200 - DNA, 1136 bp, Arabidopsis thaliana landsberg
gtatcaaggtctctaaacccacttggacggcagaagtctcattcaactatatctcaatccaaagtattgatcatgagttatatattcacaatactgtatatacatttcataaaaagtagctacattctaaaaaaatgttaacgagattatagctagaggtggtatgaatttgaagagactgctgcgtgagtttagaagattatgtgtatgtattaacaaattgatatgtctttaacatactttgttatatcatacgtatgcaagtcctatagtagttgcaaagacactacgatataacttttaagtaaactatgaggtaacttacgagtagatgatttattagaaaaacataacaaggttattacgtgcatattttatcagtggatcatctaacagtcgaaggtttagaatagtttagtggttcaaatatatactctgaaatataagagataggattcaagttttcctagctactatgatttcaattgtggtagatcagtgtaaacatctaaaatgaagaaaatactctggctcattcttagcctccttgaatgaatatagttaacttaggtccgagattgtgtaaaggctattagataatacgagatagtgataccataaatcaccgatcactaacgacaaaatatcacagttgaaatggactttgactttatctgacaataatcacgttcttgcagagagataagattggctctacagctacccaaaaggcaaagttaatgaagtttcggacaaaacctttaattgcaaccttcccttcttttcctacgatcgatttccggaaaagcaactattttcactaactctgcgaaagttccagagattttggatctggaatatacatatatatgccttaacgaatcaaaaaacttttcagtaatacaataagtattttcggaacaaagaaaacaacaaataaaaagctttcaacggtagattagagagatagtttacacatacgtatgactattttttcatgatttcaaacataaaaaaaaaaactcacaactacatgtaacaaaaaaaacaaaaatccgatgcttctcgtgcatgggatacaaatattaaaaatgcatgagctagattgattagataaatctcagaaaaatactttt

SEQ ID NO: 41201 - DNA, 496 bp, Arabidopsis thaliana landsberg
aataatgaagcatatgtataccctggtttgacatgtccatttattgacaaggaaaggagttttcaatggagcgggagcttctctcattctttgaccagactgcgatggtgtgtctgagtttttcatttgctttaacttgagctcttcctggtactgtttcatccgtttctcttccttcatttttccaggccccttcccgtggaatttgtgcgagagtagtcgaaaggcttcttttggagttaactgttaacaacgtgagagtagaagatcaattattttacatatgcacacaaggacgagtttaataagagtgaaaatctatgcacacaaggacgagtttaataagagtgaaaagcaaagctttagaaaacttacagttctaccaaactcgtcagtcctctcaatacggatgtacttgaatctatccttagatgctctatccttagatactttacctcgatgatcatgcacaatacccacaagcttgctctttttt

SEQ ID NO: 41202 - DNA, 169 bp, Arabidopsis thaliana landsberg
catataagaactgctatgtggtcataagtagaacaaagttttgatcaaaaacaaatcaaaccagagaaggaataatgctatataccaaagtaaacttaaaactcaatgaataacaatatacaaaagggagtacacaatgctgacacagctattaacatgaaatcaatgg

SEQ ID NO: 41203 - DNA, 448 bp, Arabidopsis thaliana landsberg
ttccttaagctggcaaacaaattttctgtgcaaatgtagatatttttgaaccaaagaataatgtgttcgctaaatatcatatttaaaatcattttgaaataacttgtcagtgatcttcaaaatcttgagtgttgttaataacaccatcttatacatgctaaagctgagggaacttagatagaatgcaaaaagtgtactttaaatttaaaagcttcttgaatctgactaagaaagaacttcattaactggttaagtaaacaagtgtaatataaagcaattcttttaacaactctaaaaccgtaaacactgaatcgacaatcgacatataacctcaggtgagcaaaagtggattctactatatgtacctcaatgtagatggattctaaatccaaagccacaagctgaacagagccaattctcaagcaagcttcttcacccttcaccattg

SEQ ID NO: 41204 - DNA, 669 bp, Arabidopsis thaliana landsberg
cgcatgtgaactcggctttgtcaatgactggcaatgagccaaaatgttagcaccaaccactaaaccgtgcctcctgacttggccatcccttgaggtttttgaatgctcatcgaggcttctgaattggagttcggaaacagattcagtaaattgtaaaacataaacaagttttgggctcattcccatacatagatttgcttacttgaaacatttttttttaccttacctactctttctgcttttaaaaagttaataccaaaatagcatgttactggacgtgtacctatgaggagcgaagacccattttgctactagaagcaaaacaatgtaagagacgttgcgtaaaaagtatctcaatctgttcactccaaaataagctcttctcaagtgtcatctgacgctgcattaatcaaaataccacacggtattatcaaaagtgtcgtaagcattctttcaagtgttgggaatacattgggtacacaaatcggccatttacagttaacacacatctatttaaatcactcttttctctttgctccaccaaaacattccggcataaacaaaaaaaagtcccactagaaaagctcattatgacagtgaacgaggaaaacaacaagccgacaaagacccatgtcttaatcttcccatttccggcgcaaggtcacatga

SEQ ID NO: 41205 - DNA, 598 bp, Arabidopsis thaliana landsberg
cattcaattttataatttgtatcaagtatatacgtaaacgattgtcatgtacagacactcaacatactttaaaaaaaaactatatatccatttacttttcgaaattttgaaaccaaatttataagaaaaacaaaattttaagggattgaatgtttccaaatagtttgagatggtcctagaatatgaaaacagatttgaaaagacacttgataatatttccttaaacaaaaatatatatgatttacattaagaaaaaagtattagattgagaaaaaaacctctcaataatatattttaaaaaacaaaatgaaaatatcctacaagtgatattgacgaaccaactaactcatacattaataatatctccttgtccaccaatcctccaatccaatcagacaacggtatatataaatatctaatttggtttttatctaactaaaccgttacataaccgaatcggttttggaaaatatgtatcgataactttggtcctaatcttttaatctcaaacaatatcatgaagtaattgagctcccatcaaattcctataaggcaaattctgaacttgatcatcatctaacatcgacgctgaatattg

SEQ ID NO: 41206 - DNA, 939 bp, Arabidopsis thaliana landsberg
caagcataataggacaagagacttatgataaccaactataaaactatattctgttcatagttttgagagtcaagatgagaaaactttaccaagtttcttcatctcgaagtccaaactgtagaagaaagagtgaagttaagtgtatcaagaagccgattataagagaaagactacttaatagcgtaaaatatttgaatccatgtcttgcattataattgtaaacaagtacctagccttgggaatttttgatggagaagagcataaaggtgaggccgaactaaagaacattagactgaccattctttacttgcaagttatgacggcttcaaaaagatatgtagacaataatgatacaatctgatctgatatgtgcgtatatttatactccaagtaagtaccaataaccactattaaaatgtgtatatatatgtcaccttcaagtggatagagtgcagaaatttctgaagcagccaatccatgcacggctagtgagtcagatatattcacaccatgtcttcttattgtccattaaatgttggaccaatatatgagcatattatgttttaaaatagattataatttgtacgtacttaaatatcatttgaaagaaatatactatatatcatttgaaatctctagtaatcaatgccatcctttattttggttagaaacccaatatttaatactccttgcgttccatttaaaagattcttaattatgtataatagacaaaacaaacattatagtaaatgtcatttagctaaatttgttagaaacggatatttttaaaaaatagtgacgctacaacaactttccttcaaatgaacttaaaactatccttctatttgtgaattttatgtaatatgatcttttggaaattatagaatagaaaggaaaaaaaaaaaacttgaaacaaaaaactttcaactttttacgacg

SEQ ID NO: 41207 - DNA, 973 bp, Arabidopsis thaliana landsberg
acggtacgtgttaaaatttaaatcttcattttgtaatactaacgtagtttaaagatggatgtttaaaatttgttcaagcaatttttttgtaattctcccgtcttgcaaaaatatcaataaatgggctttacggcccatataattggagctcaacaaggctcgtaaggaataatcaaaaagatctttcttcttccctgagacggcgagaccaacgataggaacgccggtgaacgaagcaatgcttgggctttcttacggtgagctcttactcatcgtcggcgccacagctgctcttgtaggttagtctctcttcaatcgaaaatctttaccagctccgatctttgtgttcttctcccaaatttctctggaatcgaatgatttgagtgttcattggaagaatcaaatgtgaatctctgatttaacaggccccaaggatcttcctattattgctagagcaggaggaagattattcggacgagccattggttacatcaatatggctcgtggtcacttggatggtgtcatgaaacaacctcagatgcaagaggtttgattgtttcttcatcaacattgttttatctcaacatcattgttgttgtcttcatgaatcttaaggaacttgttgtagtgaattcgaatgacatattccttgaagtcatgttgccttacattactctcgtacttggtttagatatcgaaggaagttcaagatttacgggcacaagtagacgcgattagccatggagcaagattttctctatttgattctagtcctttgactcgaagagtggacaaccagaaaactcaagaatctagtccaagcaccaccaatggtacagaaaccactcgatagtcattactctttcttgcttcttgatgatcatgatcttgatttgttgtattttaggggaatgttacatccgttaatgttgaagaaaaacagaaacctgtaaatcattatacaaaggtcttt

SEQ ID NO: 41208 - DNA, 451 bp, Arabidopsis thaliana landsberg
taaatttaagataaagatacatatggtcattcttactgattaaggtaacctttatctcaactccacacccgcaacaaggttttttttttacagcagcattcaaccaatccaagagtttatcaaaaggttaggttcttatcaataaatctctcataactcacttctataaacacatacgcttaaaatctttctattgcttaattattaatggatgcaggatgggtataaaaagtggagagtctattgcacgtgctgatacagcagctggaatacgtaaaaaagaaatggtatcgattcatcagcttcacaaattcatatctaaaactgatgaacaggtattacaaatatattcaacataattaagttccaaaattaactccaaagaatcactactaatgttttgtttacaatgttccataagtcacaggatgctgatttcctttgcaatgct

SEQ ID NO: 41209 - DNA, 788 bp, Arabidopsis thaliana landsberg
gagtacctagcctggaattagctgaagcagcactcaaaaaacacatcataaaagaacaacacgatccattccaacacaagaggtacaaaagaaggttactaagctgtatagatgtacttacaaaatttgaagcattcctctaccagcccagtattcaagaacctgtaaacagatttgcaaaattagaatcaattcatgttagaaaatcaaaggaaagagatagcaaaagatacgaaaccttggaaaatttgagaatgaaaccccattcagtctcaacgagaacaacaaaacaagcaatcaccacagcataacaccggaatattccatcgaagagctgctcggagaggaaaagataaaagctttacacagagatcaaatcttcaagtaatctaatgcctgcgcagcgagagaggaaaaagagagagagagagagagagagagagattatacatcgtggctgtcacggaaggagcgaacggcagcgagaacgttaacgacaacacagagaatggcgatgagagaggtaacgaggctgaagcatctacaaacaacaaggaaaggatctgctctgtttccgagcttcaatttcgcggatccggaagaaggtccggcgggggattcttcgatttcctcagtcctatccatctaaaaccaatttcccggtgagaaaatccgccgtcttaagtggaatttggaatcgagacgcgaaaaacgaaatggagaagcttgttggttaggattcagaagtggttagtgcggaaactgaattctttctttcacggacgttc

SEQ ID NO: 41210 - DNA, 731 bp, Arabidopsis thaliana landsberg
catcattacctcaagtgggtaatcttacccttcaatcacggtgttactgtcagaaaaaatacatgtgggtgcgtttctctttgtcgattatgtgcctctatcgcctacgattaacatgtaattaatgtttgattttatttagcacatatcatcactacatttcgcaatttatttccatctttcgaaacttgctattacaagaaattctaaattcttatgtcaatacagtttaaaacctgacattcgatttatgtcaaataatttcagcatcagatagtaatctcaaaatttaaaagtacacaaataaaaggattggtaacataattatagaaaattcaatcaaaatcatttaaaatgaatatattagccgaaaactaattcacttaacgatacgctgcattatgtaaacattttgtaagaatgagatttctctaaatcaaaaattttaaaattgttcaatgagataccttaaccgatcggttcaataaaatcttcgtaatttctgtacgaaaagttgtacaaatcaaacaatcaaacgtccaccatttttgaaaattacattgtttcactgctaatttgggtctttgccctactagtttgcctaatacaaccataacatcctaaagattttaaaaagagggacaaaggttaaagtgcaaatattttaagaagcaatatttttggggaggaatcaaaagaattatagagaaggtttagttaaggagattaag

SEQ ID NO: 41211 - DNA, 820 bp, Arabidopsis thaliana landsberg
  unsure (1)..(820): unsure at all n locations
ttctctataattatatgacaggaagagctggattggaatgaagaattggtagaacgttacgtgggacgagtggtatgattatctttgattttgaaaaattaattagtgtagagatgggcacggtatgaagatctagcaccgagctgtgttgtattgttgtaaaagctactaaaagtctaannnnnnnnnnnnnnnnnnnnnnnnnnnnnagagtttgaccaagttgaattttgtaaactgccctatcatagagatctgttattaaagaaacaaccaagttggattttgcataaagtacataatttctctcttgctaagctatcatcgcgacagttgtttggacaataaagatagttttgtaaacagtttgttgtcatgctactacggagataattgaattagtgacttatttgagttgttatacttttttcttccaggcactatggcttcaccggcggttcctctctcttaattggataatgtatttcgctcgcaatcattcagatgcttcacctgaaaccggagagagtattattatgaatgaagaaattgccatcttcattgataatgaaatccgtcttctggaatcttctatgaccgtcccggataccaaatttgaacattttcaagctcaagcattgcatgctgctgtctacatgctatggctgacaaaggtaacagtggactcttcttgtcccaatcaagtcttcataaaaattgccacttctgtcaatcacacacgtgcaaacaaatagatcgggagtctgccggatagcataacgatacaaatatggccgactttgatttttgatacgcattc

SEQ ID NO: 41212 - DNA, 673 bp, Arabidopsis thaliana landsberg
tatctggaaaaaataataaagtacaattataaaacaaaggtagtagctagtacaatagagtaattatcgaaccagaatgctgacgtgtcacggaaatctcgctcgtccaagctgtcactcaaaacagtaaaactgaaacgcacacaaaactcacgtgacgagaagacacactttttatcgtctctctcaccgaacctaatctgtttctttacgaacctaaggctcggacagccgttttaccatattacctgttccccataaaaaccacagctaaaagaaaagaaggcaccttttttcatgtttttactgacacaatccaaatgtataacctttcttaatttagcattctaattagtgtttttgtccgacacattaaattttcatatcatcgtcttccaccacaagccaccaaaagaaacaaacaaaaagagcggaacaaagaggaaaatgaaagtatagagaatttaccaagtatctttgtatgtatgttaaactgtatattagattaacttaccatgtagattgtagagaatatgtattcttcttattaattatgatgtgagtacaaagagaaagataatctagagtttagattacaaacttgattgagaagtaacttaacatatatacttatcttcgtatattcttctctgtacaaagactgacactatta

SEQ ID NO: 41213 - DNA, 727 bp, Arabidopsis thaliana landsberg
  unsure (1)..(727): unsure at all n locations
gtcttggctgctttaacgttttaaggactttttcatcctttcaatccttgcacgctttctcatagtgagctcttgtatgtccctcatgatcttacggtcattctcactcaaggaagggccttttggaggtcttggaggctttgaagcttttctcgacttcttaaactttccattaccgcattttttctctgaaagatccaaactctgactgctagtttctactcggttttcgtctcttatcaatggatagctcagatcatcagcaatcttttcagagacaccgaaattcgcccgttcactccagaccccattgcctgaaacagtatctgatgtggattcttgtgtaacgtcagatcgaccagcttcaatatctacttcaagatcttgttctcctgataacatttgatccatcctatacactaagtttctccttctcaaactcttatctgcttaaaaccctttacttcccctggataaaccgctttttgactttcgaaactcgcaacttcctagaacatgagaaacaaatgataggagagattaggataccaatcatccttataacacacaagagtaaattgacacagaagaatgctaattctggttcaccttanaacactaactaagaatacaaagntaccatgaaaactgattntgcttaactaccaaaatcagtgacttatatacctttataattttaacgaaaactgaatgcgaattttgaaat

SEQ ID NO: 41214 - DNA, 889 bp, Arabidopsis thaliana landsberg
  unsure (1)..(889): unsure at all n locations
ccagccgattttatcaaaaaaaattgaatatgaacttggtaacttaggggtagaggttaactctattccgacaagaatgatgacggtttgcagagaggcgggtacaaccaaatatttactttatttaaataaaaatatcggaaataaacggattttaataaccgatcatcaaatatctttttcaaaacgacaagctctccatgcatgattttgttttcttttttgtcttcttacataagcattttctaaatataaatataatctaaaacgttaaactgtatacaagtaaacaactttaattgcaagtttcgtactggtgcataatctaaaactatataaaccggacgaaccgaaaaaccaaagcatagagattacaaaaccccaacaagaaaagaaaaatggagaatccaagctcaaacatagaaaaactgcaacaagattgttataacgaatggatgagtttacaagccaaacgcatgacggagcttaaagaagccatatccaccggtgaaaaagacgataacaagcttctagatttgatacgaacggcgatcagagattttggagactacgcccgaaaacggtcagaacattcccggcgatttagttcaaactatttcgctccgacatggaacacttgtcttgaaaacgcacttctttggatgggaggttgtcgtccttcttcgtttatacgactcgtatacgccatgtgtgggtctcaaaccgaacaccggttaaccaacttcttcaataacaccaatcacgacatcgacagtaagtcagagacgtgctntgtttattattctaaaatattntaaataagaatcattaaaagctgcgaaaatagaccatctgtttctttatatgtagtttgaatatagtcactccc

SEQ ID NO: 41215 - DNA, 536 bp, Arabidopsis thaliana landsberg
gaggtgctggagagtcgatgtacgtgggtggctctgatgtcatttgggatcccaacgccaaagctccatcgccgtactgaccacaaatccatctcgttcaaactagggtttcttcttctttagatcatcaagaatcaacaaaaagattgcatttttagattctttgtaatatcataattgactcactctttaatctctctatcacttcttctttagctttttctgcagtgtcaaacttcacatatttgtagtttgatttgactatccccaagttttgtattttatcatacaaatttttgcctgtctctaatggttgttttttcgtttgtataatcttatgcattgtttattggagctccagagattgaatgtataatataatggtttaattgatttctccaacaagaagacatctcatggtttggtggtctctaccatagattttagctaatcttgggaatagaatggattgtaagacttgaattacagttaaaaccaacgaacatgtctaagatatcacaaacactctctatatt

SEQ ID NO: 41216 - DNA, 373 bp, Arabidopsis thaliana landsberg
  unsure (1)..(373): unsure at all n locations
ccccccccccncccccttccncccccccccccccccccccccccccncccccccttctcctcccggccntnccccccccccccccccccccccccccttccttctcctcctcccccccccccccccccctccttgtttttgtatttgccccccccccccccgcccccccaaccacccaacnncccacaccnccccccccccttcccccccccctctccnncccccccccccctcccgcgtncctttccttttattaacataacccccctcccccccccccccccccccctactccccccccccccccccccccccccccccgcccccccctcgcccccccccccccccccccccccccccccccccccccccc

SEQ ID NO: 41217 - DNA, 1100 bp, Arabidopsis thaliana landsberg
tgcagaatttattcatctagtctttggttggtgttacttaagcaaaagtcccttactcatagactcatagtcataggcgcatagacgcatagtagtagtcatattagacccatactccctagagaagagaaaaaccattctctgaaagtgacaagagataacttcatattatcaatggaccgaccaaccatatgatcaatgttggctagccatacattcttgtttatattttccatttccaaatcaaaaagcggatctgtgtctgtgatttgtgctgaagtggcttttagaaaattagaaaaaaaatataatttttgttttccaaaatttaaacatcttttaatagcaaaacaatttatatttgtctacatatacatggcgtgttactctagaaacaaaacaaatactaatttttttattctcatttagaaaaaactattttaattttgcaactttttagaaatagtaaataaaatattattttaattcagaaaaagatatgagatttttatttctctacaaaaactatttttagttttgcaaaaatagcaaataaaatattgtttatacaaaataaaagatatgaccttatacaaataatattttaatggctaaaacagaacaaaaaaaaaaaggtaggaaacgtgggccgaacattatcagaaggattcaagcgaagcaaaatcccaccctttcttctgtgacagagtgtctgtatttgttgtttcccttcaattggagagagtaagcgagtctcttacgcccagagagagagagagagagagaggcttgtttgttttctctcctctaaggtaaaataatcctcagatctctgagtctcattctcttcaaattcttccgatttcttctctcagattctatgtttttctcattatctcttccccgatttatagatcttttctgcaaaaagttcgggattttttttcgtgaatttcgaagaatgttggctcttttcttcgtctaagtttctttttctctcgtgggatttgatgattcgatgttttaatttgattcatagctgaaaagtttgttctttaatacattgtcaaggctctcttcgttgattggctctgtcttta

SEQ ID NO: 41218 - DNA, 369 bp, Arabidopsis thaliana landsberg
  unsure (1)..(369): unsure at all n locations
cctgnnnnnnnnnnnnnnnnnnnnnngccggctgtagcagcggcccgcgcgccgttggactgcgccgcagcagcagcgcatacaccggcaccgcatgaaataaatcgaagtgttcggtgccgggtgcggcgcaggcagcggggcccggcatggccgttgagactcctttgatatcgtgcggcgggtggttatcgaaggacagcaccgcaacggcgagggcttcgccgatgacggcgtcaaacttgcaggatgccagcgcctctgtactgctgcacgaggcgaccaccgatagtactgcgaccaggtagttctgtattgaaggcttcagatggtacacggcggggcccgccaggtcgccagcgggggtgc

SEQ ID NO: 41219 - DNA, 408 bp, Arabidopsis thaliana landsberg
gacccaacagacttttcgaccaaaagggaaagtttcgcgaagatttggccgccctagcccctgaaggccacaggcggctgggcatgaatccccatgccaatggcggcgagttgctcgcgcccttgtccctacctcagtttcgcgattttgcggtgaccgtgaaggcgccgggccaaagcgaaggggaagcgacacgcatccttggtgaatatctgcgccaagtctttgtgctgaatgcggacactcagaattttcgccttttcggtcctgacgagacagcttccaacagattggatgccgtctccaaagcgtcgaagaaagagtggatggcagccacaaaatccactgatacagatctcgccgccgatggacggggtgatggaggtgctgagcgaacatatgtgccaa

SEQ ID NO: 41220 - DNA, 557 bp, Arabidopsis thaliana landsberg
ttgacatcttgccgagctctcatatggtcagatacctcataacctactatttttctggtatatacatcattaataaacacttcataatagaatttgtccccaaccgctatgtaggtaatatctgactgccatacggttgacggcctacctatttcaagaccctttatcaaattcggataatatacagatgatgcataggtcgttcttctgtaattcctctgcctttttatcctgaatcccagctccataaacgtttcaatgaaccggtcccgacctataaaatcaggcttcagcgtataatacatcttctctatgccacatcctggatgttccttcctaagctctgtggcttcccatagcaaacacccgattttgtcattaaaggttgcctgacgtttttcatactggcttactccctgcttgcttatccctgcttgttcatatagtgcattcattgaatagcctattttttgacggttttgcctgaaccagctgatggtaagatattggagttttttttaatgtctatattaagctctttctccgctatttccatc

SEQ ID NO: 41221 - DNA, 789 bp, Arabidopsis thaliana landsberg
agaatagtatatgtataacatttttatgttatggtcttatggacctacaaagagaattgtcaatgaaattttcccttaaaagcgaataatttttttaattaaaaactagtggttgtgagacttgcaagttacgaatgacaaaaaaaaaaaaataataataatgaatgagaaatggtcttcaatcttcatcaataggccaacttgtttgcaacaaccaacaatccaactaaaaatcattttaaacaaattatatgatgatgacttattcctacaaattactacagttttggccttttgtccaacgatgttgtgatacgtttctacatatttctcaatcgatcaacgctaatgcttatttttcaagattactattttgtctccatgtgttttcagagactatgccttgtctttgttggttggtttcactttctttagccatttttttttttaagtctccactcatattgaattagttaatttaggagttggcaaaataaagtaaaactatggcttgcattttagtataagtagtttctgtatgtgaatgtgattaagctcccaagagttttgtcttacctcttgttgtgatatgtttattttgattttctacccaataacatatcttgtaaagcgtttataacaaagtagtgtttgatgggtacaaaccacccagatgagctatatgacttttcatttgtttggttttgagccactgagtgacatataatctaaaattgtgccactttcccattaaaaccatattgtttcaagcataatatcttaatatca

SEQ ID NO: 41222 - DNA, 445 bp, Arabidopsis thaliana landsberg
caagtattatatacatctgcggtaagactacaatttttctttatatacaaaagagtcgacgtcattgaagaaaagactggatagattacaaaatcagaactgatcggttacaatgcgtcttttagactgatcagttttgcgctgtaatcaaagcaatcaaccaatcattcgttcattacaaaacatacatgataactgattgctacaatcacatgaccgagcagttggataagtcagttcgtcataagattgctgaatcttctgacatgattttcgagggttatatcgagagaatatttgcgagaacaagagcatcaaaattctaagaaccatgtgggacacatgctttctttacaaggtatgtggaaaaagttattatagatggcaagatcgacaaattctcttggaaaagctgatgagtgtacaatatgttgtgcaaacttaa

SEQ ID NO: 41223 - DNA, 545 bp, Arabidopsis thaliana landsberg
taacctaattcttactcaaatatccttttaggtggagcatcaaacatgtaaatgcatttttacttatttcgacggaatagagctttcgttgaaccattcatacatggagtgatcgagctattgtttggaccgtattaacggatcaacatgtattcatgttttgatatcatgttaatttgttatggggttccaattctaaatcaatttggcaataaataaattaactcatgtcttttatgtattactcaaatccattttcatctctgatgtgagacctttcttcacaatatatcaaataactgggtttgaaacctttttcgaaaattactattaatattattaactccataatgttttagctacagtgcattaatgtcaaatattctgtatacacgtggaaacctcaataaaaattagcaatttgacagaataaataacaagtaattggctcttcaatcctaggaagtaattaagtaccccctatcgctcattaaaattttggagttgtacgtgttaaattattaaaactccaacatgagtgattc

SEQ ID NO: 41224 - DNA, 438 bp, Arabidopsis thaliana landsberg
aattcagtggacttactaatccacgattacagcggtcgactttctcgagaaatccggtgagatcggaggagttctgaggcacgtattcttttcgactgttctcaaaaacatcgttccaggtgaatgatgggcttaaaggaacagtttcaactgataaaacgcgggaaatatgtagcggaggagacctcgaactcgaactcgaacgccactgtagagtgggtataagcgcgtgggaagagaataaagaggtgggagtgggacaaagtgagcaaaatgcagatgccatgtctgtggaggagacacaatgctgttctagcttgggatgcaaggcgttataaatacagatgattaagctttttgaaaaaaaatctcatgtgtcgcgctcacaataactttacatgaaaaatatttcaaaattagcatattcttatatttgat

SEQ ID NO: 41225 - DNA, 858 bp, Arabidopsis thaliana landsberg
tttggagatccataaaatacattgggtgaaaactgccttcaacactctttttcacattcttggaatcagactgtgatatgacataagaagacaatcaaaactcactccaccatcattcaaaacacaatgaacaaaactttgtgttcaagatacatacaacagaatctacactgacacttccatcaatctgatttctttctcctctttttccagataatctagacaaagaacttagctgcaacttcttacaggtcccaggagagtcattctctggattcaacattttcttgctccgtttcttttctctcatagcagaagctgaaatattccacagattataatttcatggttcaccttttgtatattgctatacaaagatctcaaacaggtctcgttgtagaagaacataagattcaactgtcaattgcgttaactaaacttccaaattccactactaaaagcaatgaatctctattcgagcaatcacagaacatgattctattaatggaagagagtgaaaaaagctcaccaggcggagaaatcccacacttgaaacactgaaacaatcgatcaacatcatccatggagttcgagctaagtttcttcgacattttttctccagtcttcttcttctcctcactgttcactattgagttgtgacaattctaagtgagattttttcacttcccccttcgatgggatttgaaatttttggaatcagaaaaattgaacagttggctgttttttttccgttcaccaaaaaaacaaaatcaacgacgaggtcaaacgtaagcggagtcgtaatcacatcacgtgtccaaattctattggtatgcgcttagagaagtattactacta

SEQ ID NO: 41226 - DNA, 341 bp, Arabidopsis thaliana landsberg
cgcaaccattatcttcagagagcatatcgatgaccaaaccaaaagactctcggctcctgagacgctctcttctcgacgcccatataaaaaaacggaatcctaattgtctattgacctcatctttgattaccgatgtgatgatattcttcgagagaaacggaacaagcggctccaaagcaggctctataggtttcttcttagctagaatgctgatgacctcgccggagatattgaattcggcgttaccggaagagtaggaacgttgcatccatgacggctttgaatagaactgaatgactgatcgaaagaacatctgtggtttcatagtaaatgcgaagccg

SEQ ID NO: 41227 - DNA, 1029 bp, Arabidopsis thaliana landsberg
  unsure (1)..(1029): unsure at all n locations
cagacgccgtcctctcgaataaagaccgggaagatttcccctttagggttttaggatatataatgcaaaataaacctgataatctatatagaatggcaaacgaaacctcatattttgtaaagtatcgtacaaatgaaccgacattatatttaatagttataagaaccagattctttcgaatcaaattaaaccaatcggtttaaactttcaaactataaaccggagtgttaaaatgggtatcccaacccaatttgactcaattttccttcacttgaaccagtgataaagaagttgaaagtagaagttaatttcttcttcaagttacctatatattcttatcaagatcatataatatttcttcaatttcaagcaaactaagatttatcagaagccatggaagacaaaactgagatctatctatattaagcttccaactntntgtctatctccaatgaaattcaagaaaacattcggagatgcaacattcttgagattagcttcttctaattcagttgcttgccttaattcgttgataagttcatagttattgttacttcttcttcagcaaaaaaatagctgttgaggttaatatatctccaaacaagagtaactggtcttcatgttttgtcgtttccagtttcaagatggttgttagatgattgagattactaaactaatcctaccaaatattcttattcttcaaataagttgaatataaatacgaaactatcatcagtcaatgattttcttcaagattctctagactaaagaaagaatcttccagatacatatagttttagacttttagtatagtgtgcatcttttgaccagctctgttttatctacaggctactaaaaataatgccaattaaaaactatgggaaatacattttctctactatctctctacctttccatcatacatattgatatccaaaataaatttatcttttattaatgtatcatgagctcgtagttcttcaagagagataaaaatgatgattcttcttctttgtattgttgttgatt

SEQ ID NO: 41228 - DNA, 828 bp, Arabidopsis thaliana landsberg
atcattaattataatccctagaaagctttttaccatacctttcaaatatttctatatagggcaagggtccgatcttacgggaagcactttttcgccggtaatggaagagggggttaacatagatattcagatggtcatatatataattaatataagaatcaagaagatcaattccaaatatatgctgagtttgtaactatgttaagtttcatggatttctaactctaatccttatctttcgaggtgatgattgtcttggtccaactcaaattgttctcattctatgaaggacaacatatcttacttggaccaaataagttccttaatctttaaacaaaatcaattggcgttagtaaattaattcatgtcctatacatattactctaggtctaagcttacttcaactgacatgggatctcataatcactggtttactttagtcaagtggtaaatgggaaagaatcttggcaaattgatgagagggaagtggcacacaagagaaagttagaaaccgataggagttattattccttcatgatcagaagtgagattgagagaatctcacaaagacaatcatatcttgttgtatagagacatgtttcaagaatagggcttataattgttgacacacacacgattcaatccatcaaacccaggctgactttttttcgtggctgcgaaaaataccgacaatcaagagaagaataagcatatctatctgcttattccccaccactttgggctatctcacacacacacccttcatgtgagcatgattcttgaacaaataatattcttcgagagagaaagtgaaagcttgggtcacat

SEQ ID NO: 41229 - DNA, 769 bp, Arabidopsis thaliana landsberg
tttacttcctttttctacagttttatagcatcgtattttataatatatcgtactagaaatatactttgttttgcatatgtactagatatttgttttacactatacaccattttctttgtcagtgaaaaaggtctatagtgtaaaacaaataattagtacacaacacacacaagattagttgtatgaatataatatatatatatataattaactttataaaatactaagttttactatagcatgaaaacatatatcaacatttgaaaagataaaatttatatttgttcaaccggtgaaaaaaatatttatatctattagtttgctcttgtcattctgtcttccggtaagaccacactctttttcgctctttacgtatttttttaaaaatcgaaaataatcatgatgctccaaatttatatgtattgttaagccaaaaaatatttttatgagaactcaaaccgaaactataatgttgttttttaacttagactttattaagttttgaacaatatgatctgaattgttctatatgtgcataatccgtttgtatttgtagatttaatagtcgcctccatttacccaaaatgggcaatcttgaagcaatggatggaaccggtgaaattgtagcaatacgctcttttaacatgaaaaggcccatatactagaaaatgggagcaacaccgatgctaaaacatgctcacccattcatgcaaaagtgaaatcaatgtgagaaatggtatatgtaaatacgaagagaagaaaagtggtt

SEQ ID NO: 41230 - DNA, 1666 bp, Arabidopsis thaliana landsberg
tgctttgaatatgagtaacactcggtttcaatgtactcacgttgcgggtctatggataaggcttaccaagtattttatggaatgcgtgaaagaaacgtagtctcgtggacggctctgatctcgggtttagctatgaatgggtttggaaaagaagccattgaagctttcaacgaaatgttgaagtttggaatctctccagaggaacagacactcactggtttattgtctgcctgtagccattccgggctggtcgctgaaggaatgatgtttttcgatagaatgaggagtggtgaatttaagataaagccaaatttacatcactatggctgcgttgttgacctcttgggacgtgctcgtctacttgataaagcttacagtctcattaagtcaatggagatgaaaccggactcaaccatttggcgtacgcttctcggggcttgtagagtccatggagatgtggaacttggggaacgtgtgatctctcatctcatcgaactcaaagccgaagaagctggagattacgttctgttactcaacacatactccacggttgggaaatgggagaaagtgactgaattgcgttctttaatgaaggagaaaagaatccatactaaacctggatgcagcgcgatcgagctacaaggaaccgttcatgagtttatagtagacgatgtttcgcatccgcggaaggaagaaatctataaaatgctggcggaaatcaatcagcagctgaagattgcggggtatgtggcggaaattacatcggaactgcacaatcttgagtcagaagaagaaaagggatacgcgttaagataccatagcgagaagctagctatagcctttgggattctggtgactccaccaggaacaaccattagagtgaccaagaatctcagaacttgtgttgattgtcataattttgcaaagtttgtatctgatgtttatgatcgtatcgtgatcgttagagaccgttccagatttcatcattttaaaggcggctcttgctcttgtaatgacttttggtgatgattcaagctgataacatttttcttctaatcattacgagtttgaaacaagctcataacttatgttgattgcaataatgtcacaaagtttgtatctgatgtatgtacataaccgttaaagagctttctagttatgcatggatacaatctttaagtccgttaaacctctaacttttattttatatgctattgacattcctataaagataaagaaaaaaaatctaaaccaatggctaaaaatatttaattgttagtataagttttcaaatattgatcatttgaaaatcctcaaaaacaagtaattaactctcttttttgtgtgcaaatgagtaattaacgcttaaccatcaattttccagaatataaaggaaataaagatagccaagcgaatttaaaaaactgcttttctaggatctccctacaaaaatagttggagacatatacaataataggacgggtatagtaattttaggttattaaaggtattttttgaaaaagtaaaatgttatatttggtttactgatattaatatgaccgaactataaatctgatctctttaaaaatgttgaaaattagtaattaattattacttgtgtaaatcaaatttggtgaattaatatgtgaacacaatgatgagtttt

SEQ ID NO: 41231 - DNA, 1064 bp, Arabidopsis thaliana landsberg
tatttagaagatgtaaaaatttacaattttaatcaaccacctttaaaataaaatcccacataattttgtttttgttgtactaaagtaaataaaattgttttctttgatagtggcaaaagcacaataatattaatattgtcttcttaaaggaaattgtcacttgcatggaattcatataatatattttgaagacaagaaacaatatacattatgttataaaaagttttttttttttcgccattaagttgtagatatttgacaaaataaataaattaaaatataggtatattcggtatactgtaagtgggccaggaacaacgagacatataatagttaaagtctgagcccacaaagtttaatagtggaccgctgactcattttggagtttgctaagtgagccccattcatttcagaactttcgatattgaaccccatacgttttaattattaccgtacgggacccccacttttgattttgtgtctcgttgttatagaatccaaaatatattaaagtaaaaatatacaaaagaaaaaacaaaaaaaagtacacgaaagttgtaaagtaggacaatagaggtattgtattgaactattgattgatagaagataatccaaattcttgagttggttaagtaaaaatgtaatgattggtaagagaacaccaaaaaggtgtgaatggtaaaaaaaagaaagggttgcttatttggcaaagctagcaagtttgctgcacgcgtgtggtctgaatttccactatctccatctgtctgaagattaaaatccattttcgtttttttattgataacgctagttactacaactttttactgctgcgtctgaatctctgaccgaaaacttaaacacaaaatagaacgaatcataaattcatcatactgattcatgctctcacactaataacaacacaaactacacacagggccagcatatgaacgtacgttcgctcgctattgctgtgtgtcccacgactccctacttctcccattttcttttggtaaactacaaaacatcaccaccaaacaaaaactcaaacctccccaaggaaaatg

SEQ ID NO: 41232 - DNA, 535 bp, Arabidopsis thaliana landsberg
aagagatgtgaagatgattttgtatctctctattttttatgttcttatatctgtaatgttcttgatttatgttgccactttatcttcgtttaatggctaagacggtttgggcctaggtctctaaatcccctccaacactccatggtccaggttctttttaaacttcggcaaatttataattatatgaaattctaaacattttatttttagagattttattctttcgtttgtgtcagaaaaaaatctctccatttggagtaaaatttccaattgtttcaagctcaccgaactttcattccgggaccttaatccacgccggctgttgttaatgttttatgtataatttgattaaaaaaacctttgaccaaagaaaaaatgaaagagtcgacaaaaaataaaaataaaatgaaagaaagcattaactagaaaatacaatattatatacggcaccatgatttgtttacgtagaaggtggttatatttcaacacagacaacagtatatatatataggataattatggtcttataagacaa

SEQ ID NO: 41233 - DNA, 387 bp, Arabidopsis thaliana landsberg
tttttgcgagtaaaacacttctgattaacttcaaatgatttgtgtaagggaacgccagttaactttaagctgatggtttctcaaacacaatgcaaaaccaaaagtttcatatttaccaatatcataaccttttataaccttcgatgcaccgtatgaatttgatgaattcatgttttgtagtaaattctaacataaaagccgaattgttcttagtatttgcttcaacagttgactacataatcttgaacacaataatcatagcttgagacatttctggggaactaaaatctatagctaataacttgcataaaaaaaaaaaaacccaaagatggctacctggggagaaggaaggttaacttcaacctaagtgatcctgattggaaaata

SEQ ID NO: 41234 - DNA, 454 bp, Arabidopsis thaliana landsberg
  unsure (1)..(454): unsure at all n locations
gtttgatatacagttatcattatccatcacatgatcagcttctgtcacactcctcacttatttaatattaaaccagtaactaataaacgtaattaaggaatagacaaaaaaattgagagagagagggagagagatagagaccttgaggtaacaatgctcactgcatggttgtctatcttcatcctcaaacaaactagatttgtcttcgctctgacaagccaaagcaatctaattaagttaatcacttaaccttatatatnaagggttgtgaaactaacaaaataatttaaatgaatttaatgcttacggatctagactcgggctcatacttctcatgcatatgacaatcgaatatctgtaaaacaaatgataaaataaaataaaaacatgtatgatcatctcccttttttgtggctaaattaaaaaagaaagattcaaagttaccatgcaacga

SEQ ID NO: 41235 - DNA, 975 bp, Arabidopsis thaliana landsberg
cgagaagataattcagcttttttggttattagacattgcagagtgttatttattgtttccactttcatggtggtagagttaattactatattacccctcagttttcttcattattttcaacccaataccagtcttctcatctgcatgtatttttatcatctttcaaagcttctaatgtgtaatacgtcagggtccagtcttgagttattaaatcataaacatgaactttatagtcctttcaatgtggtatacatcagcattaccaatatgtattaagctgaaacgtattatattaaaacagttttttttggtacaatttacaaacacatagtatacaagcaaactctgattggtatcaaacaaaacaaaacaaagacctataccaagatacgctgaaaataacattcagcagcatttgttattgacaaatatattagttaacttattgtagtatataatttgtgtatttgaattagttagttggtggtggtgcatctactgcagcagtactaggcttagcttgttcagcatcatgaataagcttcacaatctcatctttctttaagaccatagcttgaatcttttcttcaatcttctgaagcttcatcttcaacttctctggatctttcttatcttcagggttcttctctttcttcgccttcttatctttcttcttgctcttcttctcttgatcttccccttcttctcctccaccatttttatcgtcctcgttcttatccttcttatctttatccttcttcttctccttcttctcagctttctcagccttgttgtgttcctcttctttgttatcatggttcttcactttctcttctgtttctcccattattctttatgagtttgattttgtttttcttagatagtgcttaaatctagaaaactttcttacatatttcatgtagaactcagaattacccttttattacaaaggatcttcagctaatttggacataa

SEQ ID NO: 41236 - DNA, 1071 bp, Arabidopsis thaliana landsberg
cagggatatcctctctcgtctttttacggttggttagcatcgccatatatatgtataggtatatatatatatatataggtatacatatacatatctcagttgactagaagatgctgacgtgtgacagaataacagaagtacatcggcgtggtgatctgacgaagcgccactcctgatgataggaaaatattgcgagcagttggcatgctctggtccgtttatgagtaatccagttctatggagtagttgtgtgaaatgtaagtctgttctcctctcatagtggaatacgatgttttaatatcatggcgcatgttaccccccaaagattaggcatcaggatataacaaaccccaaggtaggacgaatcaaaaattccaaataaagagtaatggttgtaaagttggacatatatattagttatatgtggtagtgactattgtatcggttatgacttatactattaaactacgttgtaatttgaaattttatttcacttaaaaaaaacatgcattacaagattaattcggataatgatataacggcaacactaatcgtctatcagaaaacatgactattcgtgtcctactgttcgtacatatatgtttaacaaaagtaattttactaggatcattatcatatggtatatcttagcatctgaaattagtctatctaccaaggcgcagtgaatcctatatacttctattatacattaaagaacttaaaaaaaaagaagatcttatgaatataaaacaaggctaataatcttggaatactctcttgctcattagcagctggtcttttgcggttcttttagttgtactactgcggattaagtcgagtacgtatcgtagttttggaattaaaaaaaatatcactctctaaacgagtttttttttttttttggatgggaagatgtcagcaaaaacaagatgttcttcagtgaaaaatcaaactacgttatgtcttgaggtgattgatcatccaaaaatctagagtattcaagattaccaatattctagtactcgatcgcgactaaaatgaatgattccaaaataagattccatataatct

SEQ ID NO: 41237 - DNA, 362 bp, Arabidopsis thaliana landsberg
  unsure (1)..(362): unsure at all n locations
nnnnnnnnnnnnnnnnnnnnnnnnnnnnnnnnnnnnnnnnnnnnnnnnnnnnnnnnnnnnnnnnnnnnnnnnnnnnnnnnnnnnnnnnnnnnnnnnnnnnnnnnnnnnnnnnnnnnnnnnnnnnnnnnnnnnnnnnnnnnnnnnnnnnnnnnnnnnnnnnnnnnnnnnnnnnnnnnnnnnnnnnnnnnnnnnnnnnnnnnnnnnnnnnnnnnnnnnnnnnnnnnnnnnnnnnnnnnnnnnnnnnnnnnngaaagagtgttgctacctggggaatgctcacgtggaagcagtggggaacagggcctcgaagattaatttgatcggatagtgtgagtttgaccaatgtgttactagacaagatt

SEQ ID NO: 41238 - DNA, 778 bp, Arabidopsis thaliana landsberg
cgtatataaaatgatagattttaggtgaatgtaaatattaacaactccaacatatatatttcagatgtgtttatataatttgggtttctatctagtattttttttttttttataggacataggaaaatgtctaatagttttaactttggtttgggttcaattttaatcaaaagcatctttgttctctaatgaaattgaatagaataaaatttcgactaagttagttaatttatacaaataaaagaacaatctatgaacatacagtcatttagcacatccttaactttcatcaacacatgactttattgcttcacttctcttccctaacttgtctactacccaaaatataccaagaacacgagattcaaactacacaaaagcacttacttgattctacaattccatatctaatagaagagattaaatacagtgaagttgcagcagggatttcatcacttgagtctcttgcttcttatggaaagcaccgggaaacacttcaccaatcttctctttgcgcagctaatcaacttctgagattcatgatactccattgcgagtcggtcataccagcacagagggcagagaaagttcccgtattcatcaacgttaaccggacaattcaaacactccttgtgaacttttgcagcacactcgcttctgcaacaaatcaatgacgttctttctttcacacacttcaagcatacattgtccggtcttgtacgggagctcgaagcaagaaggaacaagtaagagtaagaatgtttaatgagcgagtttt

SEQ ID NO: 41239 - DNA, 269 bp, Arabidopsis thaliana landsberg
  unsure (1)..(269): unsure at all n locations
atcacaatgagcggccggcgttaatgatctgggtctggattcagtacgcactgcctatatgcaagcacaaagacaggcgtatatggcgataatgcataaatggaacaannnnnnnnnnnnnnnnnnnnnnnnnnnnnnnnnnnnnnnnnnnnnnnnnnnngtattggatagcttgagtgtgttgccctatatacaatatggcagtttgctagatgtgggtagtggtggcggattgaccggattgattgtggcgattacgcgaccggatg

SEQ ID NO: 41240 - DNA, 613 bp, Arabidopsis thaliana landsberg
gttcccttagcccagttttgaagacggttattttattttttgacacctacttttgttactgcctgttgagaaggatcatcataatgtataacagcattgtgttgcacacctctctgaagaaagtctaaattgatattaaattcacggagtcccctctttataaattgatctcaagtcaaagcacttcattgatgtacggctttccaccagttgatcaatttatccgataagcgttttgctatgcgaggatgctgcgccgccacattgtctgattcggctatgtcatccttcagattatacaattccggatccgtaccgtcttcatttaccagcagtttccaatccccttccctgatagccagctcaggactgcggtacctcggattacccggtttcaggtaagcctgattgaggccataagcccatttcaggtcatgggctcttttctgaggatgtccaaacaaagccccgctgatatcttctccgtccagcggcccgtcgggcagagatacatgcgacagatggcagagtgtgggcaggatgtcatattgcagctaatagtagaagaatctatggcgccccgggcaatatgaccgggccatcttacaagcaa

SEQ ID NO: 41241 - DNA, 749 bp, Arabidopsis thaliana landsberg
gatgacagctggtttatacctagcaaatatgggttggaaattcagcttttcgattcacaacaaagattgtcattggtcaagttattgtcacgtttgctcagtgttgttggtaaaacaatgatggcaacttaagagttaggcttccaaatgcttataaattagtgtacgtaatctaacaataatcatatttctactatttaaacaggatttggctgctatcactgtgagaaaccagggacaaaaaatcaactacttctgatgaagcgaaacacatagaagttggaaatatcatttgaaaaaagaaaaaactacacaggttagtgttttcatatttgcctctgaaaagtgttgttaagttgatgttaaatttaccaaaagactattaatcatttcatattagcaatccaaaatagacccgttgaaaaaacaatgattgagcatcatcatctgttaatctaatcaatacttccctttttcttcctttaaaaagaaactagtccttcttcttccattgtctgtcgttcacttagtttatttggtgtctagaattagggaggcaatctctgtgccaccttcatcatacttaatagttagttttcctttccttatcaacttttttcattaatataataagaaaaaactcattacatccgagatacataatgatttgcaaataaatttgaaaaccttagatagctggaattatgatttacagtagtaaatttttatagtaacaaatttgaactttc

SEQ ID NO: 41242 - DNA, 562 bp, Arabidopsis thaliana landsberg
taagatagatggaaaacttggctttctcatcatcaagaacagagatgctaggaatctcctacatgggtggagctgcaagtttctcatagaaggcgagacccgaactgtctgtactgaacctgttactaatgttcacactagaatctgagtcatcgcatgaaaactcttcaaggaaaacgtcgtcttctcttgacaatgacctgtaaggaccaaccaattcatcataaacatggggcataaacaaacctaatgtaataatgggtttagggtagattacatctcagagggagcctcatcgccgttgctgcgtggtgacaaaggtgcagtccctgaagaagaagatggcaagacttgaggtaaaggccgagtggctgcccgtacacttgaaagtcttccctttgataaaactaatacagtgcagaagtctggagcccatctcatcacattacttggaatgtcatcagccttgagcagccttcaaatcaaaaccaaattggagaatttttcagacaagattattaggtactactggtttcatcagagagaaagatatagaaatact

SEQ ID NO: 41243 - DNA, 558 bp, Arabidopsis thaliana landsberg
taagatatcgaaacaagtgtttaaaaacgaagagacgattattaagcatcaatgagagaacttcagagctgggtttgagttctgtccaataatacatcaccacgttatcattgttgtcctttagtatctcattacactcttctgttattcgcccaatacagtcattgtccacgtcatcctatttccctctgaagccgccaaatatcaaaaaacacaaaacctttacccgaagcaaagtagctgcacacttgccatttataaggcatgtttcttcatctaaagcaaagtattttcgagttcttgagccaaaaatatcaaacaatgtctaaagaagctgagatgtcgatcgcggtgtcggctttgttccctggttttagattctctcctaccgatgttgaacttatctcgtactatcttcgtcgtaaaatcgatggtgatgagaactctgttgctgtgattgctgaggtcgagatttacaagttcgagcgcggggacttgccagggtttacttcgggtttctttctctttatgtttactttgggtcactaatttgaatgt

SEQ ID NO: 41244 - DNA, 704 bp, Arabidopsis thaliana landsberg
gcattgcgtggacggataatattgtttttggacttaccttttcgtccctttaaattactataattttagccactaactatactatactctaagaaaatttattaacacaaaatgaatctattaatcaattgatattaatcacgaaagaatctaaatgaaaaaatggacccggtaacttttctccggcatgtgatcaagtggggacaagtgtacaagtgtaccttaacaaccatacacgttagcttcagagttcagacttcagacaaaaaaaaactaaaagaagaaaaaaggaagatagaagagattatattctattacttaccatccccagaatgaccaatcgggaaagacaatatcctccgtccatctatcaccgcagtatctaaacaacggaggtggcgcatcctcaaccgtacgattcaatatattataaccgtccgatctaatgactggtcgatcatcacagtcaaacatgagatccacgtcaggtaacttccctggatactttctcagcagctgaagaatcccccatagtgtgaacgcatctctagtttgtatagacttcttgtagttttcgacgaacaccttgccgtttaaaataactaacctgaaatgtgctgtagttttgcctctttccaccatttcttttgttatccctgtttctctccatggttttagatcctcgtgaatccacttgaagtaat

SEQ ID NO: 41245 - DNA, 370 bp, Arabidopsis thaliana landsberg
ttcgatttcggcctgtaagtagttgctttcagcgatttccagtttagatttaagggcatcgcatgaagcttcccaagtctccttttccttttcctaaaggaacaaaaaaaaatcatggcttctatgaattacaacaaaagaaaatagaggaatttatatggccaaacaaatagaaactctaaacatgctgtctgatgacagactgacgccttagatcatgtttacaattatctatacgcactcctatattcattccctgggtaaaaccatgctagtaaatctgctaaatgatggaaatcatttgacgagtagtatgcaaaacaatgtcttagaatatacgaatgggcaacaataacgaaggacaaatgac

SEQ ID NO: 41246 - DNA, 568 bp, Arabidopsis thaliana landsberg
catctttttttgttgtggaatgattttgttctgttagtgatctcattgaaacgttcaggagttggtggttggattatcagaagctactttggatgagaaacgtgtcaccccgctgcctacgttatatcttgaagatgatggtatggtcatcttacaattctctgagatatttgctatacaagagccacagaagaaacggcagaagagagaaattagatgtatcacttatagaggtatgtgatctgcaacggcttcctaattttgtttattctcaaaagcctttgaattttttgtgctttccattgggatgttaaaatctacaacaacaatgatttctcaagattttcagtatctcccgttcaattctaaaagccattaggtgtcgaaagcatgagaagttttttgtatgtggctctgtcttttcttggcaagaatttagtagatatgtatatttggtgcttctgaaatgatatacattattttctctgtttctctcgttactctctgcattgttctttctgtttgtaatcacacttcttgaatgtactagaaagctgagaagtctatg

SEQ ID NO: 41247 - DNA, 513 bp, Arabidopsis thaliana landsberg
tactttctctctaactaaagtctcttaacataatcgactattattgttcaaaggttttttcaaacgacaaaagaaaaaacagagtaagtgaatgaaaaggagatgatgcatgaaaatgtttaaaggacacagattattgatctccttgtttcctttggctccataggcgattagacatatatagtaccacgactacctttacaacagcaagagagaacattcgacgatgtaatgcatgtgactggtcggttagaccggacagtcttcatggagccagtgagctgctaaaccgaaaatgtacttcacgtgacaataaaaatataattaattattgtatagactaatgatatttgtttatcatgaaaacaagggaagcaaaagttgacgaagtcgtagagtgatggggtagtagtggtggagccatgtggcgtctttacttaacaaaactaatgcaagtccaagtcctacgccaataacaactatacattgatatttttgatcaaacgtcatttt

SEQ ID NO: 41248 - DNA, 729 bp, Arabidopsis thaliana landsberg
attgagaccctggagtaccaacaaaacccagtgaattcacagttcaaacagcttcctctatgtaaagctgcacattggatcctccatgagggtaacaatggctctgcatcttttttatactatcaagactcatcggaatagacccaaatttctggccgtgactcgctgaatcaagttcatgctctgttcgcgctaagaattcatcttgttcccctataaagtggagcttgaaatttgtagagttcttagacaaatcacccaagtaagttccggtccagttaaattcaggaaggtctgtcattacaaacacattaattagaccaggattcttaacgctcaaagcttccaacttctgatataaacccgtaaaagtgctctcccgatgattcttgaactggccatctagtaatctaagttgtgcacaaagaaacggcgcctttatggtttctgaagcaaatttctttcccgcgatcattatctctcgaacaaaaggaaggaaatcgaccttctcaaccaaagattttatctttggagatttatggatatcgatatacagctctgagcctttgtatggagctgtgaagaggctcccaaatgctagaatagctgcagactcagcttctgtaccatgtccaagagtcttatacacatctcttcgccttctcacgttggacaatttctttatcttcttagcttctcataggctggacgaatctatctccatcagct

SEQ ID NO: 41249 - DNA, 682 bp, Arabidopsis thaliana landsberg
aataattatttaaatttatataataaataaaattaaaataatgctatatcggattcaaatttaaaagtttgtgtatagattaatttaatttttacttaaataacccacaccttatcaaaaatataaaattttaaactgtgaaaaagttttaaatcttataattgatatatttaaaattaaataacacgttgataataatataaacatttggacatatataaaaataaatataacactagacaaattatattgtaggacaaattttacacatgaggccctaaaaactttttatattacgtggcctaaaacaaatgtttcggcttttttatgaacgggccgggcttggattcggccatattttgagttcatgccttttaatatggcaagaaaaaggttagaaactaatggaagactaattgtagattgtaaccgtaatgacatactgcaaatgggtaaaaatcgtattattccataaaccacaaatggagaagtcaaagtttggcaaatatcacaacaaaaaggttgatatatcacatgcatattatgtagctacaccgacatatcaaaattctcctatcaaatctttaaaaacataaatcacgaaccctactcacactcaccaaagcagcccatcattcttcccaaatctataatcacaacacaataatacaacagtgacaat

SEQ ID NO: 41250 - DNA, 2664 bp, Arabidopsis thaliana landsberg
tacccgacgagctatggagaaagatcctagagattggcgtaaagtcttcgactttctcgtacaaagatctttgctgcatctctatctcctctcgccgtctcttccgattgtcctgcgatgattccctctgggatcttctgctcgtccatgatttccctaaccacatcgtctctgcttcttcttcttctgaatctcccaccaagtttatctacatgactaggtaaccttgtttgattgaaatttgtgctttctgagatttcttctgttgttagtgtgagtatttaagctcctatggatgtggttgataggtttgagagggagaaggagaggaaattagctgcccatagaagagctttactcaggaaggagagtgaaatttctgaatggggccggaggattcgtgaattggaggcacgattgtccgacgaggctgagagactacagtcttcttctctgcaattttcagatttgctgaaagtgaggtagtccccaacctggtgaacattttgtcagatttcagaaagtttcgttttttaaagtcgttatagctctctgtctatggctacgaatagaaattataaaggagattgcttgttcagttgtgacagtttagaaagatgattctttgttgatcaagtgaaatgagattggtcctactgttcttgcctcatgcatccttctcatgtaattttttaatgtctttctcaggcaagcatcagtagctttgaacgtttggcagccggaggtagtacgtggtagacaaaagcaaatggttgagcaaaacgctgttcctgttgagggtcgattgcgtgcacttgagatggagatgaagttatgcaagcagcaaatcatgggtttgaatagggcacttgtgagtcttagttagggaattccaatcatgttccacacttccactggttgactttttaggtctcttaaattgttatctccgtaattccagagggaggtaaaacaccgatatgacatagcaataaaagagctagaatccatgaagtatcatcctttacgagattacaagtcgatacgtaatggagaccaaggaagtaatggcaagacgaaaaagttgaaaactagcatcaactatagtggagaccaagtaagtaatggcaagaggaggaagttgaatacaagcattgattgtaagtttatgaacatttctcacttttcttcatgtagtagtgttaccgaaaaattctattcttactctcgaaaaattatacatgagtatattcctgaaaatctgcttgttctttgaagtgtgagacaatgcaatgtagaagagttttatgccgatatggacttgtccgaaactatgacgtgggatgtttaatgtttgaagttatagatttacattgttgatctttgttatcttagttgtgttatcgattgtgggtttttaatatacttatgaacacttgttatcttgattccgcaaaagcagttccagcaaaacccagaaacacggagaagctgttccagtcagaatcagaatgatggttggctgttccagtcagaatcagtatgatggttggctgctccattccacagagagattgaatacttgagagttgtcgtcgttgtattgcttgtaatatttccaattagatttgcagaagaaagctgaaattttgtcacataatgtggtcgatatagaattctgtaagtttggaatatcatgaataaagatgtatttgtttaaaaggtataaaactccttggttctttggcatgtctgggtcaaatcaagactctgttctgctttactgttcccattggacctttttttgtactcggattttccagttttggtttatagttttttactagtcttttcatgaatgtgatgatgatatggaagaatgctcctaataaggaatggtttcatgatcatcattgaactctagagaaaacgattatagatactaactcatggctaaatggtttcttaatctggttttcgttgcattgaatcatagtcggttcggaatctcccgctcgaaaactgcctggaatctagatggaggatttacggatatagacatctgttgtcaatcgggtaattatgtttttactattaaaacaaaagttaccctattagccgcgtacagaaattcttcagcgtgtgggtcccgatggcgacgtgtcacaatttaccttttgcttaatcttaattggataattttaacaaaaaggtcaaaacagtggcatagtcgtaaatcctgtaaatttggtccctcccttttttaactcgccggctaagtttccgtcactcccaccacttttttgattgaccaaaggaagaagaagaagaagaagaagaatctgaagagagcgatgaagcatattttcaagaagctacacagaggtgggaatcaagagcagcagaatcgaaccaacgatgcagctcctccatcggatcaaaatcggattcacgtttctgctaatcctcctcaagcaaccccttcgtcagtcactgagacgcttccggtggccggagctacttcttctatggcctctcctgctccaaccgctgcttcgaaccgtgcggattacatgtcttctgaggaggagtatcaagtgcagttagccctagcgatcagtgcttcgaattcgcagtccagtgaggatccggagaagcatcaga

SEQ ID NO: 41251 - DNA, 326 bp, Arabidopsis thaliana landsberg
gccctttcctggatgccgcaaccgcgccacctggatggcggttatatccttcgcttttcttggcacgccccaacccctcatcgtacccgccatagaggatacgatttatagcgacaaggcgcgacagattaaaacaggagatgtgttgcaagtttcgcaacacaatgattctgaaatacaatttgcgacatcaggtgacaacgtgagacatgcccatggcgggcactctctccgtcactccgccgaactccagtccgtgtgccgctattcgcgatcccttcgaagggatcgccgagcttgggtgcgccggaaggtaagcgtcatag

SEQ ID NO: 41252 - DNA, 413 bp, Arabidopsis thaliana landsberg
ggtgtgtaatttttatcttacagaggaatgtagattttgtatctcggaatctgcttcgagggcgcggttttgccatgaaatcacgacaagattgaagttcctccatttcttttctcacttgattcaacatatcttgcatttgtgaccattgctctgcttcagctcttacttcatccgcaatcttcctcataactactttgcagtgtctagaacagtctttcttttcctcatgcgctttaattccctgcaaaacgtaaacattaaccttcacaaacttcatttgagctcatatatagactagagaattcgttttcacaaatttaccttacaatacatgtcttgtacagagcttgaagacggtgcaacgagactcgatccatattctttctccattctttccaacaaaacccctt

SEQ ID NO: 41253 - DNA, 1661 bp, Arabidopsis thaliana landsberg
ctaagggcttctgatcaacgggagcttctttaagcttaggaacaaccgatcttgccttctccttggcatcaagcatgacaacctgctcaagagcctcgcgagctctcttcttcgccaaagcagcttcttttcctctccggtcagtttcacacttagcggtcataacagctttgttcattgaagaagcagcgatcttagcggcgcataagaaagcttcggagagtgctttatcgacgaagcgagagccgttttcgtcgacgatagggcggaagaaggagaaggaattagggtctcggcaaggaggacagagataagaaaggtgactttcatcgccggcacagtgaatgtgagtcaaggagtggcaccctttaatggaacaagagacgcggcgaaaagacggcggagatgaatcgtacaaggcgaagcaaccgggacaaaacgacgccggatggttgcggaggagacaatgagtgcagaagaagcggagagatgcacggagacgtactgtgtgtatcacccaggcgtctgagcttccgcaatcatcgcatctttcggtggaattcgccgctgcatcggaagtcgcggaggttgacgtcgccgtcgttgacgatggaagattcatagtgtctctctggtctttgcgattttggaaattagggttactcctcttttcaatcgaggaagagggttgacgtggcactaatctatttgttaggctatgttggctttacttacttgggccaaatgattgtaactgttgagcccacttgaatatctagccacttgtttctgttaattctgactcggatgagaccaaagagacgaatgtggccagatattatagtgggctgatgagtaaggcccaataaaaatttaaggtttaacacctatctaccgttccataattcttctacaaaaggttgttgattgtattaaacagtgtcgcataaacttttaagagcaccgaaccgtattaaattcatcaaccagtttgtggtaaagatacaataatgtggatttggttttgtctctgattcaattttaaattgacaaaaatctgaattgggtttggtttatagttgagattgattagtttttttggactatccaaggaagtggggacgtgtttgattatgaggatagggacacggcaaagcgtgtcaacgtgtagaagttcattgtattttgcataatatacgtatatacattacatacataccgattcttgttcgatatattgtttctggtcaacattttgcaccaaattaaggaaaagacaaacaaaagcattttgcaccaaaaggaaacgcattattttcttctatattgttcatatagaatatgccagattgtaatagcatatgtcacatgtgtcacatctcttgtgccctcaaaaatcaccacgtgtatcgactcatcatctatcaccatcgtcgagaataatttacctgctgatcatgatcatcttctccaacaaatttgcttttgtgttgacgtaaagtgacgttttgataatatatatagcaaatgtatctgaccttttaaattgtggaagggccagttctaagaaaagaaagaaaaaaaatgagctagggttctctttcctaagttgttcatgataatgaggtaaaagattttgcgtatcttttatttttgtagag

SEQ ID NO: 41254 - DNA, 461 bp, Arabidopsis thaliana landsberg
tccatatttgtgactttactagattaaagccatcatttaatcaatagatactgtgtggattgtctgaggaggttagtaccttaagtagaagttgctggttttcttctggtgtaagtattgatgcttgctcttgtaatcaagtgagagaaagaagtacaagtttaaagaaaacacttctctctcaagagagagagatgagacaaaaccacccaaacacacaaatctcaacattaaccaacgaattcatacccaatttgagtaataaccatgggcctgaaaggctcaatgaagcccattacaaatatccagtgagcctatgttctggatgtaagttatcatgtaaccgattaaagacaaagtggtgcttttcttttgtggtacaaagtttgtgtcttttgtggttaattccgatcccgtgggtcacacgttatttcctcactcaccctataggagagagatct

SEQ ID NO: 41255 - DNA, 529 bp, Arabidopsis thaliana landsberg
aacagttaatattagcatgaactaatccagggtatttggagtcgagagaagaaacgaaatgtgttcaaactttgtttacctgatcaatcgttccatttggaaacacagaataaaaaagaagaccatctcctttccgaggctttactttcaacccaatacattgcttgtaatcgtatccggtacccatattagaaccgttctgttaaatggaaagcgtttgaatggaggaataaaaacttatagaaggatctttatgtaaattatgcaatgctatattataaactgacctcaaatgggaacatggtttcaccgccttcttcaacatcagataagtacaacaggaaggaggcaatctgcgtaaaatcaaatgaggtctcgggttctaaagaaagctataaatttgatagatttaaggattttaccctttggcttgattgtggtccatattctgttgggttgaaaacatcatagtgggaatcatacttttggccaagttcataccgtaaaatattgaatgactgccaaaaac

SEQ ID NO: 41256 - DNA, 746 bp, Arabidopsis thaliana landsberg
atatatatatatatttgagtatctttaaataagaactgtgtctcctagagacatcgaaagcttatatttttaaaatatctttaactttactatttttattgtggaagacacctataaaaaagttgttgaattaggatggttgttgaatctgtcatttaaaaatatattatttcaaaaaaaaaaaatcaatttaagattttcattttttatatttttaggattagctatcttcataatataagtcataagattacaattcacctaattcgtcccaaacatcaattgttagatcttaacttttcgttactatgatcacacaagattggtatagaagaacaaattggtgatagcgatctatttaggacttgattgaagtttcacgagaaccatttatcacgtaactggagatctgaaataggaagattcctcggaagctttctaatgaaaatcataagttttttgatattttgatgtaaaagataataatttttttgtcataaagattataattaattttattattttacaagggtaacataataatatatttacagtaaaagaagaaaaaattaccgtccaaatatttttactgacgtcactttattttacaagatttatcaagaaaaacaaaatgtaagaaaactagaaattcagaaaatatcaaagggtggttccgtggggaaggagacaacagctgtcattcataaatgccaaatttttcagattaatttatatatttggctgaa

SEQ ID NO: 41257 - DNA, 566 bp, Arabidopsis thaliana landsberg
catacatgttagattgacacatatatgtgctaaaataactataaaaaaaaactagtatccagcaaaatggcgtttctaacaagacatacagatagttttgagatggctataaatatgactcacactataatagggtgcggctgacacgacattaatgggaccggagtcatcatgtggggagagagcatagagagcagcctgatacaattgtgttgagccagtgccaacaacaatgaagcggtcttgcgttacagcattcccaacaaccttatgcaccctcacaatctctttggcaagctctggctcaagaaaccaacagaggttgttttcatctgaaaaatagctaagagattgccatccaggtatcaccattgttgtcacctctccattttcctgccaatatctctcatacaccgttggatcaccactgcatagagatatacacatcaagattagcatatatatacattctaccgtgtgacaggagttaatctttgagtcaacgagagctgagcatagaggtaaagaattagtgggtccttttatttaatggagaacataaaaca

SEQ ID NO: 41258 - DNA, 551 bp, Arabidopsis thaliana landsberg
ctctatgggactgtgaactcttactcattattcattaatggtgggttgtttcttgtgttctaggcttctagtatacatgattcaacttcatatgatattgattcagtttcacatttttgatttatttcaactttatattcttcttacactcattccaatttcatgtatggtaattgcatcagttttgatcgatagttacattaagaaaaccatttctttttacaataaagatactacaacaacaacaacaaaaattctgtctaggtctacgaatgtgcaaggtatgcaatttcacaaactcataaaaatcatcataagaagttctatgtaaaggggaaagaaaaacaagattataaacaaattgtgtgtttcatgtggaaactaaacaatggctgaatattaaaaaattattggactactttacataaaagaaaattacaataatgaaaaagaaaacaaagataatattcaatgatagggcattgactaaacgaaagaaaatggcttaaagactttaaagttgattatgaacaaccgttactgatttacta

SEQ ID NO: 41259 - DNA, 615 bp, Arabidopsis thaliana landsberg
  unsure (1)..(615): unsure at all n locations
tactccctctattggttccggcgtctcctgaagaatctaaagaaactcaaaggatgatcaagaacaaagacatcgtcgattaccatcatcatgatgcttcaaacccttcatcatcaaactcaacgtttacacaagatcatcatcacccatggtgtgacactattgatgatggagcaagtgattctttttggaaagagataatagagtaagtcctatcagtactctcccacatagattgaattttatagttaccacatgaatgcattcagtgaatatggacgatttggctagtctaatgttataattctccgttttgcaggcaaacttgttcggaaccatggccatttcctgaatagacaagattgaaaaatgattaaagagagagtatatttatttttcttgttatttgttgtcgatagagttaaaagcatatttattcttcactaatccttaccgtgttttttttgtaagaccatgtgtgtgtggtaaacattgatcttgtacaaacttgattacattactgtattaatacaaatattcgtgtttggtattactttcataaatctaatttatctgctttacaaaaaaatacanacgttgatttctttttgtttc

SEQ ID NO: 41260 - DNA, 391 bp, Arabidopsis thaliana landsberg
gtgtattttaatttagccgtttaatttctcaacctttcaatttcataggtgtttgacttgtatatgcccacacatggttatgtctttagtttttttttggtacaaactatcttattcctattaactaagatcgatatttaataaactctcaagtcaaaatggttatatcacaattcggtatcttgtttatgatcgatacagtatcatcattctactgaagaagtaatcgagaaaacgtatatatatgaaatcctacatataaatacgttttctcgactactaccacttcagaagaacgatgatgtgcaacttttccttcaccattgctattgccaacatctctgcaaatcaagccttagacgtccacttaactaatttgggttgcttttga

SEQ ID NO: 41261 - DNA, 767 bp, Arabidopsis thaliana landsberg
gcttacactatatatccagccggtatctaaatcagtgtttatacgggcaagtgacttctcacatcaaagagaaaaagatttgaaaagatgtatctggtaagaatgacgaagaatcagagaatatacgatatgtacactttctcatctacaatgtaactcttaacgaatacattcaactaaaaaaactagttataagtctttcagatcatgtaaacacaatctccaaagaaactacataagaagaatcatttgtgaaaggagcaccatccattaatctatgtagtagtggatcttataaactttttttttatgttaaatcggttatgtgaaatcaaatagtttttgaaaatagtgaatattttgttaaaatgaatatggagaatgagacactagacattggtcttcaaattttttttttttttttttttttttttaaattagaaaagatgtcaacgactttgatatagtttggtcacttttgctatgattaaaaacgttgtccgccagatttaaggaatgatattgtatattacgcccataaataaatcatactaacaaaatcgtattaaccccacattttcctaattctttttggcatcatctggttggcagcctttgaacattcatttacttttctttacccaaaaataataatatcattccttaaatcttttttcaataacatacaactaaaaaaaaaatattccaaaatacaacaagtggagcgcgtgaggatcaaaattcataaatgtcattcacaaaaagag

SEQ ID NO: 41262 - DNA, 480 bp, Arabidopsis thaliana landsberg
atgactagcaaaacaaaaacgtataaagcaacacatatgaaccacttaccacatttttctctataactttttccaccatattagcaaaaaaaacatggtcgaataacattcatttggtataatccataacgatcaaattatcttatcatcactacatttagctagagattttctagcctttctatttgccaaaccttttaatccattcttccttttaaaaaaaaaaatatttatttcttttcaatttttatgaaaaccgtatctttaactaattgttatccttgctaatacatgcatcaacattttcttaaagtttttggtcaaactaacacataagaaataagaaattgttttcttttttaaactcgcccttatcacagattttagattgtatgatattaaatttgatcttatcttgaatacttttaataacgttttatttactcttctaatattacaaagttactacactgttgcttt

SEQ ID NO: 41263 - DNA, 523 bp, Arabidopsis thaliana landsberg
tgatgacacaagaactatattaccacaaaacaatattaatgatttatagttcacacgtacattttactagatttgaatacaaatcagcaaaggttaagtactggagaggacgactaaactaaccttttgtagtcatcagacctagaaagttatgaacctaattacctaaacctaaaaaaaaattagtttaaagaaagaaaaaaaaacagcaaaatctaacacactcgtatttaatgacactttataagtgagaaaagatgtggcgaagagaagtgaaaagggcagccacgttaaggcatttaatttgaataataataagactaaaacaaaaaaaaacgtaaagccttttgaggttatgaatgcgaaaatggtccctcacgagtcacgacctaatctcattgaaatttatttagcattatattgcgtcgtgtcttattaccctttttttgcttttcattattacttaattattaataatctctatatatatttctccactaacctgtattagttaataaccttt

SEQ ID NO: 41264 - DNA, 433 bp, Arabidopsis thaliana landsberg
cttggtaagtctgacccgcgtggtttcctgcgcggcgtcggaggcggggtcctcccgcgacgagctcgtttcatcgatggacccagccatccgcaccgggcgtttcgcgcgtggctccacattgcgtgtgggcgcgcgaccgtgccgcggcgcgaacatgtcgacgagttgtgtggcaactccggtcgacagtccaaatggggtacttctgcaggtcgctctcgaaggccatctcgatgtagaggcccatcatcgcatggacgaagacttctaggttgactgaggccgactccaaccctgcgacatctgcgatcaccgcggcgattgcatcccaccagcggtggaacagaacctcaagtgtggaaccagtgctcacctggcttacgcggtagcaactgcgcccgcagcagcggatccagcttcacgaagtgcc

SEQ ID NO: 41265 - DNA, 633 bp, Arabidopsis thaliana landsberg
aatatcaccttcgtgaatcaaatttaaaacttgtgactatctaaattttaatcaaataccatatttgaaactcattcaaaatgatttaacttacttttccttatcattgcgaaaaagaaaaaagaaacttttacttctgatcgttaaaagagaaaaagacctaagattatatgtgtttgatgtttctatttaccacatgaattggttgggtgtagtaagtaaactattcatcaataataaattaatttcgatattttgtaagaataactaatcactgaacaaaacggtagtttacacttttcagtggcattggaatctcctcaaaatcgagctgtcacactcacctcccctgtctcctcttcgcttcggtacttccgaagatttcattttctagacactccatcctctctcacacacacagcaacaacaacacaataacaaaaagcttaatttcgaatttttgtcctaccgattttttattcaattggtgatgcaattactctaaactcgagctgagagagaaacataaagatccttttgtttcgtaacattaatcatcctggttttgttttctttctgtcctctatcaaatggcaaatgcatctgggtcttcactcatccttaattcctaac

SEQ ID NO: 41266 - DNA, 468 bp, Arabidopsis thaliana landsberg
gcaggagcaaacttgttttttcccatagtaacccggaggcacacagagacacttcctgcagcatttgttgcagaacgtaatgcaagccttgtggtactgtgtctttttacacctcctatcacattccgatgggcattctggttgtttcaaatacaaacaatatcaaaatgttaacactcaaaatttttttattactaataaaaacaacagaatctagtggaaattcattagcttttttttttactgttttgtgggtctcaagatagtgggttgctttgactgtatgaccatattaaggggcaatttcgtcaatatctaatatattttgagtctacggatctgaccaaacagtccacttaacacttcactatcaacttattttctgcaactgaaatgcttattttttttattataacacattaaaagatttcttgaattgttatattctcgcgattatgagattaaaaa

SEQ ID NO: 41267 - DNA, 609 bp, Arabidopsis thaliana landsberg
atgaccaaaactgccacgataatgaggttgattacttaaaaaataaagcataccatattcttctttcagcttcattatatgataccgcgtcagatagaagttctggtcatgtataggatgaacaacctaaaagaagaaggtcaacgtaagataagcaaatacatgcaaaactgtgaccaatcaaacttttgaacatgagaatgaaaaatgtataagcatgcaaagatagtttgtacctgagacacaggacagcagtagagatgtctgaactccttgtgatgtttctcaatgtaactttctaatttaggaatatcttctctacggaaaatgtcccaaagagctccatcatcagtttcaacattttggacttgttgtctggaattttcaagaatctccatcatttcctccttgttagctactgagctatacagctccttgagatcttgttcggcatgcttctttttcagatttccaattccaggttgcatattgggcacttcagatatgtgcgtcaaaatattcacctgaaataaccaaagggtacagatattaagatactaaagaaaaaaggttaagataaaagggagttaaacttattttaatttaaaa

SEQ ID NO: 41268 - DNA, 534 bp, Arabidopsis thaliana landsberg
cgtgcttgttcggtggtgcaagttcgagctgggggccctcatccgcggacgtgaccgtcccccgaggtttggcgtgtcgccgctcggacgcatcgccgcggttgcaggcaattggtccggcgggacccgcgattccgtgtagatgcactcacacggaggcgagcaacatttccgacgagcacgcggagcgacccgacatggccgggccctacggcaaaggatacccaacccgctctgaaggggtcaaaacgggtccggtcacagcctcatccggcccacgtggccgattcggaggtcgagggtcgtcgtgcccgcgagggtgcctcatgttcggaccgtccgcaagcatcggccgcgtttggcgtggcggtttccgggtcgagcggtagtccgctcccccggccggcacggggggtgtacgtgaccatgctgcgatcggtccgcccggtgcgcctgtcggtcatctcccgatcttgcccgcgcggtctcctgacctgcacggaccccggattaacccgaacggcgtagcagctc

SEQ ID NO: 41269 - DNA, 908 bp, Arabidopsis thaliana landsberg
ttatttttatacgcctctgaccttcccggttggttttaatttaaattacgcttctataaactcttttaccactcgtttactactagttaaaacttataagtagtaatatttattggtataaacctcattaatttcatattgtgggcataaatgtacgagtataagattagcatccgttagagattagtcacaaacattataacattaaacgttaacattatctatgttgtttttcatgattagatctaagaaattgcatgaccataacaatgtgctgttggttcagtgataaatcttttaggtggaagtgctgagttcgaaacatattgggatgaatctcttttttataaaagatgaatttaaccgagtgttttgagtctgaacttccaaatattcaaaaaaaaaaagaaaattgcatgaccataatttttttgtttataaatataaaaactatagtataataaaaaaactatagtataacaataggtaattttcacaaatagcaaaaaaaaaaatttattacactagtataagcatttgattgcctttctcttcaatttgactgcctttttctcgtctacaattttcactgattatatatttgagaatgttttacgctttaattaacctttttttaaccttttggaacattttttttgacaattattcctatttagaccattttcgtagagtaaacaagagaaatttgggtttccctcgaggtgttgctgtttgttggtttatgaaattgaaatgtgccaatcataaaaaaaaagaaaaaaaatgccaacgaaaaagcttatttaacaaacgccaacaccactattaaatcacattatttatattattaatttaaggccaaaaaaaaaaaaaacaaagtttgcatgaacgaacttgaggaaaaaaaa

SEQ ID NO: 41270 - DNA, 260 bp, Arabidopsis thaliana landsberg
aaaggacatggacaatacaatttactcaggaaaaaactgaccttacagaagttcaaacaatcaacagcaacaacgtccttaagggatccatgctggacatggcttatctggcggcaggcacgatgcattaccattggttcccagcttaaaccagatgtagcttcaagcacatttctcacaatcacaggctcgccttttacccaatggtgctgaaaatgcttcaaatcatcttgttgaacatcccatacacttggagagta

SEQ ID NO: 41271 - DNA, 973 bp, Arabidopsis thaliana landsberg
tagtggtccgagtctcagttgaatcgtcagagggtaaaacgggaaatttgtttctataagtttcacccaaaaaaaaggagtgaccttttagggttttgtattggatttggtctctctcatccttagtttaagtatgaggttctgctcccggaggattttttcttccggtggaagcggagccgatgatttcaaatctctcttgacgaaccactttttaaagtggtgatgaatcatccaatcatctcctccgtcaccaccactgccaatacttctgagcttcctcgattaaagattctactttacttggatctatatctccttcttcttcttcttcttcttcttcttcctctttgtttttgggttaagctctcttcttcttcttattcttatcgggagactatgatgattcttaagaagtcaatagaccagacattgtggtaacactctcctttcatggcggggctacaaggaagaaagagaactccttttttttctttgtaagcagccatggctgaagagttaatcctctaatttgtctgagaaaaggcgaatctgagtcctttcctgtgacatgcaatgattttatcaaaatcctttgaaagtgtttataagctaaagttttgatgcatcgttttgtagtagaatctaagttttttgagttgtgaaaatgggacagagacagagattctattaaattgatgatcttgtcttaaagagttcttcttattcaagtgttgtcacaccagtgtttcttccatcattaaaatcatatatggatgtgaagaatggggatatgattattgtcagatgattattaccgagaaaagttattagattctaaacccaaacaagatacaattaaaacggttataagaaaagaaaccgggaactgtgcttctagttatgattgtgcttcaagttaattgtggacccaaattctagattgaatgaaacacaagatcgaggaccagca

SEQ ID NO: 41272 - DNA, 652 bp, Arabidopsis thaliana landsberg
tagtcattatatatatatatatatatatatattgaaatcaaaaactaacattacgaattttgagcgtacatgccaaccaacttcgatgctgttaagattgttttttctgtagcttccagaggtaatccaaatttgtgacaagctgaactcctcttctgtttcaatggttgggttccacacgctcattgcagcctttgctccatacattttcggtggggttttattcgtagttacgactgcatgctgttattttccaatatatactatcaataattattaaaacagacaagaaatatattgttatgttattttatatataaaaaaaaaacagaatatctcattaaaaaaaaggtgaacattaaaagagcaatgactgcacatataaaattcaaaacttataactttctgaaaaaaaaaaaaaatcaatcatttatcaatttaaaacgaatggaatatatgattttttaatttggatgggaatatatgatattttggtaccatacatacattatgatgtttaaacataaataaatttatatgactatatgattaaggaaaacccataaatttgatatcaaatttttagcatttaacaatattatatttataaacatacgtggttaatatgtattttaaaccggaaattgaaatg

SEQ ID NO: 41273 - DNA, 599 bp, Arabidopsis thaliana landsberg
atatatacatatgttcatgagctgaaaacttgttttctattcgttttctctattgaactgatcttgtttatccttactcggaaattgcagggagatacaacatttacatggactctagccggatattaagaaaactcaggctaatggtgattctttgattaggtgtgttggtttttttctgtgtgtttaaccactgagtaatattactgtttcacataatcataaagacaaaactccattgtattgataacgttgtataaagcttttggaacaacataacaattctaggtttcccaagaattaagtcaaccagatctactcatatatatgaaacctttaatgtaaaaactatatacacctgagaagtgtgaccttgagtgtctatatcgcaactctacttccactatgagcatgtgactaaacagtctgttgttacaaacatatcctctgtctccaatgtccctctcaccgcttgataaaacttaacccatgaagatgaataagagtccacaggactgaaaaagaacgtaggattaggactgcttgcaggggaagcagtcaccaaatccaaaaccgaagctgcaggtttgagctgttga

SEQ ID NO: 41274 - DNA, 588 bp, Arabidopsis thaliana landsberg
gtctccacaagtgatgatgaggtcttatgcatagaattgtttaacgagtccttctaatataacaaacttctatatctaatacaattgtaaatttcagaggaaaccctcaaaggattgacacggcctcgtcaactaagcggattatatatgcctatgaacaggtatgttaagaatcagtgagatgctgttgctgaaattttggaggactaatctccgaaatgtgtttatttctgaactgactgactattactctggttttacagtgtctgatgtgtttatatcactatcccgatgtatggtatgactatgctgagtggcacgtaaaatctggttccacggatgctgcaatcaaagtatttcagcgagctcttaaagccattcctggtaaatctaatgtatctttttttctttatgtctatgaactagttgctttatgaaggatcaactattactttttgcgtacctgctggcttactggtaatcttatcttctatctactcttaagaagtctattttctctctgcgactcttttatatttttgactaagtgtctacttttcccactctcgtatgtcagattcagagatg

SEQ ID NO: 41275 - DNA, 467 bp, Arabidopsis thaliana landsberg
tggatcacgaaacagtttattgtaacgcgtgttccgtctgtaggcgacttggcaatccctgactgtgtcttctcacacaatgactcactcaaataattcaattgtatcattgacataccagcttcacaacattccaggacgaacgcaacctatatatgcttctggagtatgttatcggaggagagttattctcacatttacgaaaggctggaaggtttacaaacgatatgacaaggttctacgctgcagaaatcgtccttgcgatcgagtacttgcattcaagagatattatctatcgagatttgaagccggaaaatttacttctagattcgaaagggcatattaaaatcactgactttgggttcgcaaagatcgttgaggacaggtgagtgacaggaatttcagactttgatccagtttgtaattgatgaaagttatcatatataacgctaacctcgtattacaat

SEQ ID NO: 41276 - DNA, 1615 bp, Arabidopsis thaliana landsberg
caagttaggggtatgggagaaaaacaaattgaagttgataagcgaatcttgcgtactcaagtaagtaaaaaatatatagttctgcagtttttagcctgttctactagtgatatcctcttcatttgtaaagaaatggtgtgtgatacagtttgtgattaatgctttcttaagttctgtctttgtttagatttttctgtattggtccattaagatagaagcatcttctgaacgttttcatattgaattgggcagattggagttctcaaaaaggagttggaatctgtaagaaagcatcggaagcagtatagaagcaggcgtgttgctatacctgtacctgttgtatccttggtaagtacaccacagtatgttagacttgtaggaaatgaccaacacttcagtttacatttaaatgttttatacccattgtgtttaggtcggttacacaaacgctggaaagagtacactattgaaccaattgactggtgctaatgttctcgctgaaaatcgtttgtttgcaactcttgatccaactacgagaagggttcaggtcagtgaattttgttggaagagtagatctgcagccctcctttttcgagagacagttgtttcttttattatatgctacataaagaatacatatgctcctgatactcacattatctagcggacgacgtgttctatgtgatgtgtttaacgtaattgtattgtgcaacatgtacagccatcttgaaacttttctttcaaccaaactgtatgtcaatttttgacatgacattttctttctgtgtcccttttggtcagatgcaaaacgggaaggaatttcttctcacagatactgttggttttatccaaaagttaccaaccactctggtaaggtcctaatggataaaactgtactagagaacaaacaaatgttgacgcggtgtgtaatttagctgaaatgtgtcttgcaggttgctgctttcagagcaacacttgaagaaatagcagagtcaagccttttggtgcatgttgttgacatcaggtttggtatcttggttaatttgggtcaatcaatcatatgtcataatttcacctcctgatgatattatgcttgtaaaatgtttagccacccactggcagagcaacaaatagaagctgtggagaaggttatgtctgaactcgacgtttcatcaattccaaaattggtcgtgtggaataaggtaatctataatagtagagacggatatgatgatatgattgtatatctatttggtctcttgctggcgttgcaagataaagtaggaacaactacaactataatgctctcttacttactcctttcttaggttgatagagtggatgatcctcaaaacggcaagctggaagcagaggaaactggggatacaatttgattatctgctctgactggagaaggactagacgacttctgcaatgcttgttcatgagaagctcaaggtttgcatttcatcaaaatggattgaatcttttttttggggtcatgatgttggcccaatttgaaattttattttaaaaacttctgtaacaagaattcaatgggtttggggttgaaaacccttttttgcccttttgaataaaagggggaaccccttct

SEQ ID NO: 41277 - DNA, 605 bp, Arabidopsis thaliana landsberg
  unsure (1)..(605): unsure at all n locations
gtgatggttacctcatttcttgaaacatgagaaataattaaaaagcaaggaaaatggacatcaatatattgtcattgatttgaagtatatttttttcatcattagttatatcaatctctcttttactgtttatcaatctatggaaatagttttattcattattatatactagtacaaggaaaatatgataaaagttatagcaacgagtgtgcatgcaagtcactataaagaggcaacgtgcatggagcactaaattgttaacagtacacactgccgttttatatttagcgtcgtcggtttcccacgccaccgccaccagcagctcctcctcctgtactacccccggctccaactcctacaccaacatttgctccgcctccaacacccccaccagctcctcctccggctcctgctccgccactagctccaccactaccacgtcccgctccaccaacaccttcgtcaactgcaccaccaacggttcctctaacaccaccaccaacacctgcgccgactccacctnctacaccacccccagcaccgtcttctatacccccttcttcaccaacttctacacctgctnccgctccagcactaccaccagc

SEQ ID NO: 41278 - DNA, 579 bp, Arabidopsis thaliana landsberg
gtagcccaagaaccacgccgaggttttagggaaagtcagagatgccaaattattggtcccattttcaatggcaaaaaattccatgatattagccgccaataagatacttaaatgcaatcagccaataatacactataaatatagtttgccaaatcgtcgctataatatagttgaattggttcacattacagccacaccgcttcacgcatcaatacatttcagtttaatccaaacgattagataaatcaatccaaaattagacttttatttgtcaaaacttactgtattaaatagttagtctagttggtgtattctataaaataaaatttcgtataaattttacaacagttctaaaaccatcgggtttttaagatcttggaatggatccaactattttcacaaactctcacaaccattatttccttgttcttttaatccatattgttttctaaaaactgatcttttaaaatttaaagacagtaagtgtcttactacccaaaataaaatatatatatatacagttctagaataaagttgtatcaccaattagacactatttattgcttatatatgtgatag

SEQ ID NO: 41279 - DNA, 707 bp, Arabidopsis thaliana landsberg
  unsure (1)..(707): unsure at all n locations
tatgtttgtaaaaaaatcagatattttactgtcgaagggcaaggtatctattttgtgtagtttcaaactaaaaactcattattaatctgttttccagttccaagattattcatttaagttgttttttaattttatatatattcacgatagtctcaaacctttcaaattcatttcaaaaataaaattgaaaatcatttgctttttttttttttttgtgcaaatgaaaatcatttgctatgcagcgtttttcttgctcatatgtatcattgggctgaaaacatgaggtgggccggctgggtagcatgaggcatatatatatatacccaaaatgcccaaacttttctgcttgttgattttttttgttattataaattcacccaaaaaaaacataatttaaaataataccatatgtagtacgcatctgtcggtcaaagctaaagaccttttagtcaattgaacgaacgaccgaatgattaggtgagcgttgaagaacattatttcaaagcttatgaacaaaaaattcaaagcatttctactatgaatctgaataaatgaccaaacacatgcttatgtccctcctattattatgctctttttgtaaactaaacacacanaattatgaaacataaacatcaaaattattacttgaatattggataatgcctcaagaaaaataaaaacccaaccaaaaaaagccgttacaaaaa

SEQ ID NO: 41280 - DNA, 755 bp, Arabidopsis thaliana landsberg
gcattttaaaccagtcaaagaaggcgaaagatttagtatttgtgcagtagtaacatgtttaaatttcgcttgcctttaacaatatgaatgctttcacaagtttttgggttccatactatcaaacttgcatcatcagagccagtacaaattagtttacctacagtacccacacacagtcaaacaatacaattaaaacaggtagactcaattagataatccacagaagcatataaggtagaagcttatatcaataccgtcaggggtgaagtcaccacaagtaacatttagattatggcccgaaaacatattaagataagcttctttatcagcattccacatccatagagaacaatcttctgatccagccaacacaatgtgtcctctcggatgccatctcacccactgaaaaataccacacagtaagtactagatttggacctgaggatctcaattacaatgatgatataggacaagttatttatacctcgattccagcaccaggaccatccaaaacacatttcaaagtccctgatgatgcatcaaagatctgtacaacaccatctaatcctccagaagcaagtaactgtccatcatagctaaaagctaaacaagagacagagtccttgtgaccaggaagctcagcagcccaatctccattaccaattttccagagaaatgctttatcatctccaccttcagttgcaacaagtgtagcatctgttggactacaagccaatgcataaagctaacctgta

SEQ ID NO: 41281 - DNA, 502 bp, Arabidopsis thaliana landsberg
  unsure (1)..(502): unsure at all n locations
attttggatgtggaatgagaggtgtgatttggacggaggaggcagggatgctgttgagcaggtatagagagcaggacagtcatgcttgtctgtctgtgtgagatccaaagccagaagtggagcaaagcctcccaagcattgtacagaaaattacagtttgcaataagacaaaactgaaagcatgctgtccgctggtacccttgtgtccttgttgggatgacgtgcccacccccttacactcagttatctttttatcatctataggtggctgccaattctaataacccaagccagttaagtccactttctgcccaaatgtcccagtctgagtccgttgcccccaattacactttgtctgcgatgctttggagctcacacctgaagctttctgtgaccgagtctctgaggggtttacaagctccatccccatcccacttatctngtgttgcctctgtcactggggacctcttcccagtcagccctatgggactgcccacacttg

SEQ ID NO: 41282 - DNA, 592 bp, Arabidopsis thaliana landsberg
  unsure (1)..(592): unsure at all n locations
aaatttgtaagccaaatatatattttctcataacatttaaataaaattctgaaatttaggggaggtcacatgaccctcctttcttgtacatagatccgccggtgcgtgttatcctcatgtgttgcgaaagatctgtttcaaattttcacgtataaacttacattgtgggtcttctgctttgcgatcttttcttagcatgtgttaattacgtatgcatgggagaataacagactctctcgagctagctaattaatgtcatttagcgttttaatcgtacggatgttagcaatagttcttccataaaaaaaaaaattaactgaagagataggcgattgccttggtgtgactaactttttgggacgcttgtggtgggttggtgnnnnnnnnnnnnnnnnnnnnnnnnnnnnnnnnnnnnnnnnnnnnnnnnnttctcaatcctctgaggcggctacgaagatgtgtgctttaattctgccagatctaagattatggttacacgatgattaacagaagttgagtcttttttttccagcaagattccagtcagggccggtcctggctaaagctggtgaagtccatgctttaggcgcca

SEQ ID NO: 41283 - DNA, 264 bp, Arabidopsis thaliana landsberg
gcgcgacacgggatggccgcgctgaacgcgattctttcgtggctgcccgcggccgcagggggcggctatgcgttcccggatatctcggtcgcgttcggcaagcgccatggcgagctggccatcaccgacgacgtgagcttctgcgccgcactgctggaagccaagggcgtggcctgcgtgccgggctcggccttcggcgagccgcgcgccatgcgcatatcctacacctgcccgacggcccaatcgcagccgggcctggatcgc

SEQ ID NO: 41284 - DNA, 468 bp, Arabidopsis thaliana landsberg
caatgatcaaaggtccagcctcttctgcactgagaaatcaaggctttatcaatcatgtctggggaacatagagactatatggaccggaaaccaataagcatacctatgaaacatataaggcgtctcggaaactctgctcccttcctttacacattcttgcacccatcgatgattcactactactgtaccaaacttctttgcaagatcgtactttttgccctcaaatttccaacacacctacacacataaccaattaaacaaaagggtatgtcttcatttctccacagtggtaatgaatcacataaacagaacagaacaatctacacaaaccaaatgtgtaatagatcttgacattgccccaacataacttgctccagaatgagaaataagcttgatgagcttaaacctatcggatccatgataaccactcacagttgcaaccacattttccatacctacaaatatcag

SEQ ID NO: 41285 - DNA, 475 bp, Arabidopsis thaliana landsberg
aactgtctcctacggtacctgcacatagaaacagaccgcgacactattacttatttcttaattctgttttttaagggttttttctttctggcgagactacggctacgacgacgcttcttccgctttcgtatcttttccagcattttcttctccttcctcttcctcttcctcttcctccttcttccccttcatttttttcctcttcgcatcaattccctctggggacttcttcaagaagctcaccaacggctctccatcagacatttcatcaacagctttttccccatcttcattgtcaccattttcttcatcagcggttttactcttaatcttttttgaggtgatcttcgatattggtatctctttctcatcatcagatgaattgttttcaccattatcagagttggagttgctcaatttcagggccttgggctcagcctcatcatcagatgtttcattctcctcttcatcttca

SEQ ID NO: 41286 - DNA, 525 bp, Arabidopsis thaliana landsberg
gtaatcgatgaaaaccaagattctactgttgattttgtttcgactttgtagtttcaatcatcggaatcgtaagctcgatggcggaggttgtgttcggaaaacttttggcagctcaatcaacacgtgtccttgttgttgacgcgtgtgttgggagaattttattgttatcacttcttcagtttttaccgacataatgataagcttgtggtcttgttctcttttcatgtaaacctgataaggttgggctttgacccatgtactttgttatgaataaaattccttacgagaaaaaaaaaattttagctttgatgtagcagtaggcatatgccacgagctgaacagaaccaaccacgaaagccagaatctttgatgcctacacaccagaaacaaaaacaatcagttagaccaaaatttatgtcacagtttattatacttattcttccaaatattttgtgtatgcgtgtgaagaatcatatcaggcacaataatactacatcaagaggaaattaaagccatgtgggatag

SEQ ID NO: 41287 - DNA, 399 bp, Arabidopsis thaliana landsberg
atcgtcgatccttacttgattccacgctacttcaatcccatctacttcgtcgaatcccttaaaactgattatttgttcaagagagttaaagaaataatgaatttcatatcctctcgtagcacaaactatgatgtcacataacacagaataacaaaaacaaaaacagagattatgtaaagaaaaacagagaaagggatacactgtcttggatgcgcctttgcctattacttctttgtactgaaaggtttacacatttgaatgtgtcaagggaaaacaaaatggagaaacagggcatatttggtcgagcctattatttggtaacaaagaattaaaacaattatggaagagataaaggtgaagtagttacccgaatatatcgacaagttgggtcgatttcaa

SEQ ID NO: 41288 - DNA, 557 bp, Arabidopsis thaliana landsberg
aacaatcagagcactaagatctatttcttaatagcaaattgactgttttaaacagcttacataaggattaaagtccagagtaaagcaaaacaacataatcaaacaagtatctaaagcttagagaaaagactaaaggaccaggaaacaaaaattggttgatgaagtcaattaccaggagagattagaggaaaagggtcggtcttggattatggaggttgtccaaatgaagaaattgacaagaagaaatctgatataaacgtcggaaaaaagccttaaaggaagaaacaaagcctaaaggtttgacctttggggtcttactgtttacacagaagaagacagaaatgatagaaacgctttggctttggtttctgattttcctggttttattctgtgtcttgtggtctttgattaaagatgtgttaactctttaaagattcatacttttaaagactcgtgtggtgttaggttttacttgaaccaaaaaaaaaagcataaaaaaatgaagtttgttttttctgaagaagaacgaaacaaaaaaaatgattttgagagaattt

SEQ ID NO: 41289 - DNA, 403 bp, Arabidopsis thaliana landsberg
ataattcaaaatttggttcagccgtgcttttaatcaaaatctattatgctatattattaaaagtttatcattatactaatcactattattattatttttaatctaaacataattaatggcaaaaccaaaattatgttctggttccatcctcttctttccaaaatgcataatccatctaaactatcaatacgggaaaccacacaatcaaagggatgcagaaattagaggccaacacatggtgaacaaattttgattaccactcatgaacgaaatattaatgtgtattattgagtaatacctcaagtctgttaacaaagaaattaaatgaatttatatttagtaagaaaataataaataatacaaacggcctaatacatatttgccccctgtcattgacagaagc

SEQ ID NO: 41290 - DNA, 1336 bp, Arabidopsis thaliana landsberg
tttaattccccaccaactaaaaatggttaatctgttataagccaaatcatcacacacgaaataaaacaaactcatcgagtaaaatatcgtataaagacaccctaatattaataatttgtgaaaatagcattttgcaaataaaaagcttctcaagtttagatattttgtgcatataaatccaaccaaaacaagataaaaaggtcaaaaaaaataaagcttaaaatgtttttggaatttgaacaaagagccaagaagcttttttgggactaaccgggactcgaaatacggtggttagaagagataggagaattgccgccactactagtatccaccgttgacccggaatacgaaacccgacccggttcaagctcaaaccccaaatctttacaagctttgacttcttctaaatccatacacaatggccttcctcctcctataggcctcgtaacaaccaccactcctcctccgtaaccaccgtgactactctgttcatctccgacgtagctcctccgcatactatcaacccacggtggacactccggtttcaatctcctccttctcctctgattgttattcgtcttttgtacttcgttctcgctagcgtaagctttatcgccggaaaccggagaactcaccgctaaatatcctcctccaccgcctcttcgccgtctccgtctcggaggtgtcgccgggagagactgacaaccggttgattctttatcagaatctgaaaaatttagctcctccatggatttctctcctccgccgtggacaacacgtttctcgtcggaagcagaagactcaccgtcggcttcatcgccgtcgtagttggaacaaacggagagtcttgataaagaatagtgttgttcttcttcttctcttaagaaagacgccattttcgtatcttcatcaaaagccatagtaataaactctagtatagataaatgttgtatttgttgtgtctctatatattttgatgttatctgatagtatctgttttttagctttggattttgatttagattttgctgtttggttaaaatgttttgattaaaaaacataacgacatggagacctttatatatatcctatcgccggtctttgaatttccagttttagccccaaaacttaataaaatctgccaaatgttaagtttatcaatgaaaaactctttagaaaaccaattcatcgcaatggcaagtttttcaatgagcaaagaagactaagaaatacttgcaaaacgaatgcatagtaaatgcttcgttctttcacttaggcttggacgtttggatattcacatcggggtcaagtcggattctcttgattacgatatctt

SEQ ID NO: 41291 - DNA, 592 bp, Arabidopsis thaliana landsberg
tccgctgtgccataggccatattgcatcttggagaatctagttgaagaaacaaaagataaagccatggaagaagaagccagcaagtgtgagttttttagtggtatgagtggggggataagtagacttttgtctcgtagtagtttactagcaagccaatgattttcaatcttcggttttgtcttggtttactcttcggtttagttcagttccagtccagtattctccagccggatttgttatatttcttatttcttcaattgatcacatttcatattgtcttaaacctgagaagcaagaacgatttggggcctgtttccaactttcagctttcttctattataaaacatgaaaaatatacataacatgttacataataaaaggaagacaagacacattaacttcacccgaaattaatatggttcaaggggccgggagataaaatatttagacaaacaaaacagaaactttataagctataccaaaaaatattctacgatctggtcttttagcatctctggtttgtttttgaagactacacaatctcacttcttagagtaggcaagatatggatcctgtgccattggtagaaca

SEQ ID NO: 41292 - DNA, 715 bp, Arabidopsis thaliana landsberg
tgcagtttcttattatataagagaagcacccctttttaaaaaaaaaaaaaaaacgagttcacagaaatcatgaatggagtttatgacaaggagtatacaattttttttttttccatcgtaacagattagtagagctctttctgcatgaccctttttaggctttttgcgcctaatctcgctaaccaattttataacaatacttatcgttttttatccatgtgaacaaaaaaaaaattatagtgtttctccaagtcatattctgattttctgacgtctattatagtacaatgacgtagattaatttccgtagaaattatggaataattgtttgacaaaaataaataaattgtggaataatttaacttagaattttattaagaaaaatgtaacagaaaaaaataaacatttaaaaagtgtgtcctcgaaatgaattctaccagaaaacaattaattttttaacacgtacattgtgacgtcatgcgtatgtattgagtatagcaagttacagtaattatgtccagagttaattaaatattttccgtaaaaaaaaaaaggctggattcttgtagtcgtttgcttttactaatcgagccttgttttaaagcttgtttaggaaagtgattaaggaccgctccttaattatctgctttgtcatctataattagtgagcttttcgaaccactcgtagatcacgcatgtgcaaataccaccaaac

SEQ ID NO: 41293 - DNA, 225 bp, Arabidopsis thaliana landsberg
agcgcccagcattgtggtctttgtttttaatattccggtaagcaccatcggtttaatgttcggcgggatacccaatacgattcctgccccgcactggcctgccggaatcgattttgaaaaaattcgaacgctgctgcccagcgccttcactatcgcgtttctggccggggttgaatcgctgctctccgccgtcgtcgccgatggcatgaccgggcgccggcataa

SEQ ID NO: 41294 - DNA, 571 bp, Arabidopsis thaliana landsberg
gggtttgggggtttaagttaaatgagggataaattgacatgcctttgcacatgcattatgatgccaataccttctttgtttttgagccccacaatctttaagtaagacatgcaacaaacaagaagtcaacaacatcttataaaaaccatcatcatcatcatcatgatcaattcttcatcaccaaccagctaatctctataataaattacatctatgcaagccaaaatattgagtttgttgtccgacaaaaccacaagttatgtatttgcttcacattgaaacgtcaagtcgatcaagacataacaaatttgtttctctgttttttttttttttttttgttaaaatatttgtttctctgtttttcctcgtagacataacaaatctgttatgattttatgatacattaatatattcatatactctataacagaactggtgtgatagaataataaattcagattgataatcagatgatatattgtgtggaagagatggtcgggacaaggacatcaaaaggggtccatgagcttgaataaagactacattcctgcaaagagacaagagagaaaaa

SEQ ID NO: 41295 - DNA, 2017 bp, Arabidopsis thaliana landsberg
attattaaaagaaggaaaaagagttttgtataaatagctttattgcttacaccgtgtctgttaacataatggccaacactttatcctatgtataggctcgggtgtgtgttaattaaccttatatttctaatcaaagagtcccttaacccccttttagagtcaagggtcacatttggaaattattaaataattaaaatggtacttaatagtagtatatgatactgataatgtagttgaacaagtcatcttgccgtgaaatgtttagtaatttagtaaatgaggattctaagatgcgtaaaataaaacatgaataagacctataaacaataattaaataagtatctatacgtgtgaacaacaacactctaactatatctagatttaactccattgtttttctggacacgttaactgaacatggaaaacaatttttgaatgaagatcttaaaatttaatacgtactaattttacaaaaaaaaaaaaagaataaagagagaaaatagcaaaagatatatagtactatgattggctggacaaagatagagtttgcgcacccatgtggagaccaaccatttgaatgtttcatggcctatatatcctatacacaattcattatttttttggtcgtcacacaattcatttattaacgagtggaaatatttaataaactatggtatacactctaatcgcaatttagtccagattcataactcctatgagatggataacatattacttatttttcatataaattatatatatatatatatatatgtatataattgtttatttttcaaaaataacacaaagtagaataacttttcaatcctacgaaaagggtcagtttcagttttaccactttgaggtttttttccagcttctcatgcatttaaaagaaacagttattcagagaagaaattaataaaataatattaaattcatgaaaaggtaacaacatctaacaatggataaatactaaagtgtagaggaggggttagacagaaacatacattatcatcataggagaagttgatgtcctgaacgtacgtgaactaacaacgatatacattagcaggcattgatggttcatggtttcaagttttaatactgatttgattaagaaggaatattgaggtttttgaataacaaaaaaactgaagaaagagtctataatcacttatgaaagtgttaagacttaagagtaattatattgaggattttattctaaattatggaatattatcccagcactagttaaaaataacttatcagatgatcagctaccagatttttcattgctgttggtcaagtgttttgaaaatcttaaaacagaaatataaaagttttgaaaatgatagaaatagtagaagcctatccgtttgggtttcaatttaggacattttccacgggaaaatataattctgagtgttaaagcaataaaaacaatccgaatatgagagggacactttatcatattctttttttctaatcaaatatattaatttttaaaaaatacttaaatacaaaaaaaattaattaaattattaacttataaaatgtattgtaaattgaaaagaaagggaccacatatttttttattaattcaagcagccggataaataaagtttagacatggaaatgttattggtcactgatgttgtaattattatattattagtgaactaataataatggttttagtaggatagattattggaccggctaaaaaacaaatattccgggataagtgggatctttgttcctcacgtttcctccaaatgatcgatgttgactttcattgacttactctgtgagattcccctagccgtaggatatttgagtactcttcttaagtccgtcagattcggaggttcccaaatcgtggaataccatcatcccgaatctggtgcagatacagaaacgccattacatgagtcaacaacttttgtttttcactattattattcattgtttaacagttttatttttgattgttggataggaataaacatttggt

SEQ ID NO: 41296 - DNA, 510 bp, Arabidopsis thaliana landsberg
cggatccagtttctgtgaaccccatacatacatccaacaccaaactatcaccaacccaaagaaaaattctttgaaacaatcacaaacaaaacatattcttttaaaaccagaaccgcatactccacgagttccaatggtcttaaaatgggaccattagccaagtggtttctatggaggacaccgcctcatcctactcaggctcaaaccacaagtctaataacaactcatcactttcacaacagatggaaaagaaagataactgttagatcatgtcaagcttgacattcttcgtttgtggtgacacagtttagctctcacatttggatccgatgaagtaaccatcttgctccttggtgaagaagtatcattcatattctttctctgtaaagaattatctttgatatgtcttttaggcgtttctggtggtgttccactgttagctgcagctaaagcggtttctgtgtatgatcttctaggagagctttgcttcgtgagtcatagagactaagc

SEQ ID NO: 41297 - DNA, 658 bp, Arabidopsis thaliana landsberg
atcacaaacgactcatagtaatattttccaaatgagctctccggttcaaagatatacactccaattcaaagattgttacaacggtaaggaaagaaatatacaccggtgaaaagtgttatcacgaacgtggctagcaagtgtaagatcgcaatggtggaacaaacaaaacaatgaaacattcttacatttttaaggattttaacatattcttagatgaattaaaatgtcttactttgaaactcaaaaacattgagatataggttccggatggagaaatatggtacataataattatcaagaatatatagtacagttctaataacaacgagaatataatacatagttaacatttaaaatgatcaataatataaaaagatataaaacaaattaagatattaggagaaaaagaaatgagctgtaacaataaagggtctctatatcacttttatccacctttcctaactcctcttgaaaacaatgatattgatcacaaaacttaacaaagttttgaaaggaaaaataaacgtacatatcgttgttaatattttatttattatacttagctttttgttatgtattcaaaacttattttcatttactataagtaataataaatatagataaatttgaaatgaaaatttctaaaatatttttaata

SEQ ID NO: 41298 - DNA, 541 bp, Arabidopsis thaliana landsberg
tacgttttattttagaatggaaagtctaatatacgacaattggaaattacattgtaactctcacatattccagcaggtgcttgatgtgatgtgccaatttttaggtttttatttatgagaaaaatgtgtgtgtatatatatatatatatatactgtatttgaaaattttgatggatgctactttctctatctgactctattagaatgtcatgaccaataccagcaatggcaaaaacacggttcacaataatttcagatataatttgaactcttttgtaagaaagaagctgcgatttttatattgtaacgtaagaattccttgacaatacaaaagaagatgtgtagagaaaagcttgtcaaataattttaattataatgtttatagtttttgagtatattatagggtttaaagtttgaccgaccttggtattaattgtaaggagtattctaagaaaaagattgacaattaaaagtctgaaagaacagaatatttgagcttgtaaaaaaaaaaatagggagccattttgttaagaaaaaaaac

SEQ ID NO: 41299 - DNA, 1160 bp, Arabidopsis thaliana landsberg
aactcgtatctagctgaattaaaaaagagtggattgcgatatttattattacataataatcataattgtatatttatatagatagcaaaagaaaaaaaaaattagaaaatgtggacatgattacgtcattacaaatttacaagtacaccaaaaatctagccatattgcaaataaccaatttaaataaccatcgaatgtgttgatgaccttttttttgcattatgtatttatctaagaagataattagctaaatatggattaaatgaaattttggagatcacgaggacgttaggcataacaactaaaataaacccttttaaaattgtgcggtgagtgataaagcttttcgaaaacagccattaataagattttgttttttttcgtaagttttgttattgacgtaatatatttaatgttttttttttaatataatggtttaagaaactgtaaagacacaaatctaataaacggaaagagttgtttaatgctgattactggatagtttatgtagatattttatgagagatattacatgtcttttataggtaaaatatctctatttaaaaaaaaaaaaaaactatatctctagtttttctcacaaacaaagaatatcttatagtatagcaaattatatatgttttaaaatatatatatatatatatatatagtatatagcaaattatataattttagagctgtaacaaagaaaactattcttattctcagtcgataaataataatttacgcatatttttggaattgtgattttactatttcattagtagtttttgttttgaggaagtaataaaacaatagtttctaaaataatttactttgaaacgagaaaataactaatatccgtcatgtttattttgtctttaaattgattcattaagctgtaacagaaaattacagagtgaatacttaataccaagatattacatatttatgagaattaagtatacctgatttagctatatatatctatatctcatttgcaagactgcaacatttgttttctgcgaatatgctgaaagtcaaaacttgcaaaattgggatagcaaaaggtaaattgctatgagaaagtgtttcaatcttgatttgaactgttgaaggtttttgtaatagacgtcatatttaaccgacataggagactagga

SEQ ID NO: 41300 - DNA, 3300 bp, Arabidopsis thaliana landsberg
tctggggcccttttagttttctcgattaaggaaaggaagatctgaaagtgaacgcgaaatcacttcgccagcgttattgttaacaagaatcatcatattagtctccgtagatctgaatcaacgtcgtaacagtagcagaattttgcggtgaaacgatggttttggttacgtctgtgcgtgattacattaaccggatgcttcaggacatctccggcatgaaggttctcatactcgactccgaaacggtaaagtccgatctcgtcttcttcgattgctaatcttctctgatttgtttctggaatcgtggttcataatttcccttgtaaccggaaacacatcttcgtgattacttgtttattggattaattgttgaatttgcaggttagcaatgtaagcattgtgtattcacagtcagagctgcttcagaaagaagtgtttctggtggagatgatagattcaatatctgtgtcaaaagaatcgatgtcacatctgaaagctgtttatttcatccgtccaacttcagataatattcagaaattacgataccagcttgcgaatcctagatttggagaataccatttatgtatgattttttcatcttctaactatttcgagtttatcattgttcactcacaatatacaaaatttgatgttgtttatgttatgaattctttcagttttctccaatctgttgaaggatactcagattcatattttggctgattccgatgagcaggaagttgtacagcaagttcaggtgatttttagacttccctcatccatgatgtttttgaataggaggctaatgctaaaagaatgtttcatagcctatatgatggatcaatatatgtatagatttttagctgtctctgagaagttgcttggtttgtgatgaaacggccatacttgtggagcttagtatcccccctacctgtctttagttttctgatttaaacttatattgcttggtgcactcggcatagtactgtataatggcttgtttaacatagtctttgtggttttttatattgcaggagtattatgcagactttgtttctggtgatccatatcatttcacattgaatatggcatcaaatcatctatatatgatccccgcagttgtcgatccctctggtttgcaacgcttttccgatcgggttgttgatggaattgcggcagtgtttctggcgttgaaacgaagacctgtcatcagatatcagaggacctctgatactgcaaaaaggattgcacacgaaacagctgtaagtgaagttgtttgacaagctctcgtaaagttatttgttcccgctatattttgcatgcatgtgatggaactaattcccacttgtgtctatccaatagtctgaaaattcgctgtttatgtttcagaaattgatgtatcagcatgaaagcgctctttttgactttagacggactgaaagctctccgttgctacttgtaattgacagaagagatgacccggttaccccattgctgaatcagtggacatatcaggtaacttgactaaacaaaattattgtgctactctatgatataagatgtgcctcccgctgtcttgcttttttgtaagactacgacttactaattaacgagattttctgtaggcaatggtgcacgaactcataggacttcaagataataaagtggacttgaaatccattggaagtcttccaaaagatcagtaagtggttagtattctccaatgccattggtttttagttgagaacctttacagctatatgtctcttaaactggcaggaggaggttatatcatcagagcaagatgcatttttcaaatctaacctgtatgaaaattatggggatattggaatgaacataaaccgaatggtggatgactgtcagctggtggccaagagtaaccaaaatatccagacagtaggtacaaatatggctagtcttagactattctctgcaaaaacttttgtaacaacagtttctcgtgctagtgacaattatatatctgtgaattcgttggttgtacagaggatatggccagatttgttgacaactaccctgagtacaaaaagatgcaaggcaacgtttcaaagcatgtaactctggttactgaaatgagcaagctagttgaagcaaggaaactgatgacggtttcacaaacagagcaggacttggcttgcaatggtggccaaggagctgcatatgaggtagtgaatatctgtggtgaacattcacttgtagtcgcatatattaaaaaatagctacaacctgcagaagttcttactgaataatttggcattcaataatttggagtcccatgcgaatgtaatccagtgaacctgcagaagttagcgaaatatgcaaaattgtgcagactctgctgtaagcacggagctctgactctctattcatgcttatttgcaggcagttacggatctcttaaataatgaaagtgtgtctgacatcgaccggctgcgtttggtaatgctatatgctttgcgctatgagaaagaaaatcctgttcagttgatgcaattgttcaacaaattggcttcacggtctcccaagtacaaaccaggggtacagtcagactatcatctgtttcctttcagtttaaattgcatctctttcttgtggctttattattctgcatctcttttaaggttgattttgatctgtccctctgctactactatacttgttaacctatctgcaattccgtccatagtagttttaccttttcgtttttatttttgaataacttgataaaagtaccctcaaatcatgttataactttctggttgccatgcaactgcagctagttcaatttctcttgaaacaagccggtgtggagaagcgcactggtgatctatttggaaacagagatcttttgaatatagcacgtaacatggctcgtggacttaaggtctgtatctgagttaactcgtctccagcaacattctatatctccctatatatatgtcatgttactgacatcttgaaaaatacagggtgttgagaatgtctacactcaacatcagcctcttctgtttcaaacaatggagagcataactagagggagattacgagatgtggattacccatttgttggagatcattttcaacagggacggtatgtgcctctaattttttcaatttcttaaaacaggtaacttgtttgatagttacagatttctgcaattcgtgaaaacttacataactaatcaaaaactgcaaaatttctggataaacaggccacaagaggtggttatttttatggttggtggaacaacatacgaggaa

SEQ ID NO: 41301 - DNA, 634 bp, Arabidopsis thaliana landsberg
tgattgcggtaataattatctaatgaaaacatttcaaatggtgtgatgaatttgttttgatgtgatgttattcacccactccaactacattacgttttattttgattttcttatacttttttcattgcagttcacttatttaatccgtttgtacttcgaaacatatccacacaaataaagttttaaaacgtcacaaatgtttagtcatttaaagatatactgtatatagctttggtaagatgagtctaaactgaggaacatggaaattcttgccaaattccatatactagatcatttgcaagtagttaattgcaactctctatggttgatgtgaacaacgtaaatgacgcacaaggtttaaaattaagatttcatagaggagcttatagttttagaagttaagaaattttctgtgtggagtatttgttacatcgaatgagacaagagacatgattatcgcatatgagaggataagcaaatagtgttgagccaaatgggtatccaagagccagaaaaaaaaataaaaaaaaatctaagattattaaaaagaatttttataaaaaaaaatcgacactcaatgtttggaaagttggctctttagaaatgtagagtcactataagagaaaagagggag

SEQ ID NO: 41302 - DNA, 736 bp, Arabidopsis thaliana landsberg
aagctaatattatactaattctactcattcttatttacatccactcacacttttactaatcgaatttgtattatatgttgatattgagagctttaattcctataaagcctaaataaatatttgagtgtgcaaatcatacatccacaagctatgagtttttttcatggttaatttttttttttaggtaagatcatggttaatgttttgaactatatcatagcagaaatatattagtttttattgtctttttttctttgcgcgcactgccaagaagaaaaatctagcctacacctcttcttcaactgcccttttgctggcaaaatttgggaggcagcactttttaaaacccctttcaacccttcacgaataacaagcttgaatgggcattgaacggtcgaaattgttggtgaatcttccaccatctagaattgggattgaactactgatcttgtggttcttatggactatttggacttgccgtaagaagaagatattcgataagaaccaggtctcacccacggaaattttgtccagctagttgtaaatcaacaagcctaaaaaacaaaatgcttatcaacacattctaataaatttgtttttttttttccaattttggttattgatttctttagaaaaagttccaaaattatttatttttgtgtaataattatgttggactaaattctagaggaattcaatgttctttcaattatttggacgctggtttttggctttc

SEQ ID NO: 41303 - DNA, 710 bp, Arabidopsis thaliana landsberg
acatccacagatgagtatataacatatgtgtgtgtttattataattatgagtgtgaagaagaagaagaagaggagacgggcaagtctgtggttaatgggatcgaggcttgtttgtattcatcagaagctatgatatgcgtgagagtttgtggggtttacatagatagacagattcagtgaactgtctcgtactgcattgtgaccctctccctaattaatgatcttcttcttcttcttctccttctccttcatcttcttcctcttcacatgacgtgactaaccaaaaaagctgctcctcaattttcattataacttcgtcttcttctgcattaatttctctttggattctaattataagtcaaagccctcactagatatagagaagtcgactgagggttacaatacacgattttgttttgtttttgttgttattaataaagctaaaaatctaaattatatatggatttaaattatctttaaatatttaatgtcatctaatctaagtagttgtttgaatcattacaagtgtagtcctacattttttcatataaaatagattaaaatatctaatgtgcttttaattttcgctatagttatataacactttgattgcatttaactaatgaaagtaaaaataaaataacttacactgaaaaaaagaaaaatctttcaaaaaaaaattaaatccgtatacataaacagatttacta

SEQ ID NO: 41304 - DNA, 1008 bp, Arabidopsis thaliana landsberg
gtatactatgtatattaactatctttttccaacaaaaaacacctaatttattagtttattttaagaatattttacatatagataataaacattgcatagcttaatgatttgtgagtttcaaattttatcattcatatgatttcacgggaatcatgatttatgtttaaactccgccattccacgattttattggaaaaaaaaactagaaatttccccttcatttcccctgtaggtcttcgtgttctaaaatgatagtaggtcatttttgtttcatttcagtgttaccaactagagtcataattaatatagattatatagaccgttttacatcatcattgttttcatcctacaaatgatattcaatacattatttgtttttccaactagtagtgtattatataaatccactccaaagaactataaccgtaagtttaaatttttatagagactctagcattcgcagcactataataatcaattgtcgacaactgtgaactgtctcatgcatattgaactgtactaattacatatggaattaaacaatgcaaagttcacagatttgttcaacccacgcgttttgtattttacctttcttcaattcctcgacaattctaatatttgttagctgtatacccataatgttactatgagtgtaatataatatttatatttaaagaaaggctgtattttagaaaaaaattagtagttaatttataagagaatatgtaactcttgagattgagagataaaaatacaaatgcaagaggctactgaatttttatattttctatgtatcgtaaggtgaagtggtgatatgtcccacagttctaaaacgacaaaacaattctagtgaaacggtccatgtgattgacttgacttcattagcttttgttccaaaagaatatgaatattaattgttatttttgttgcaaaaaactaaccatttgtagataggaatgttgtgaagcttttgttgttgtttaatggaatgatgttaactttcacatt

SEQ ID NO: 41305 - DNA, 660 bp, Arabidopsis thaliana landsberg
tctgtaggtagaaggtcagtgtctgactttggtcgttatcatcttaaacgtctttgattagggttttgtcttttttcctcggttgcctctggattttgcagaagaaacgtgaatagatagataggcttgagaaggagtggcaatcagagatgaggagtttcaagggactaatggtaactgataaaatgacatccaacaaagacattgcttcaagcaacaaatcgcttcaagaacttgaagacgatttcatgtaaaagctctgaagaaatgagaaacaaaacaaaccaagtcggtaacattctgccagagatgatctggtaccgtccttcaaagaaggcttatgatgttctactcgccttaactatgatgttgatggttgtccggttctatgttttctttaaaaaaatcttgaatacctaaaaccctaatctggttcttggactccttggtccattgaaatgtttcaaaaggattgaatctgatctgtgggaaaaaggagagcattatattctatatataacacaggtgaaccagtgatctggtgcaattatggtttactctgcattgctgtgtaacctgaaatttgtttactaccccataaagcttcatgtgttactctgcattgggttggatttttggaatcactttattcttgaccat

SEQ ID NO: 41306 - DNA, 633 bp, Arabidopsis thaliana landsberg
tgatgattataacatttatagagtttgtcttaaatgttcgaaacttcaacacttaggaaaagataaaccacatgctgctaagattattttggcatatgtaatatatggaacatctaatggatctttcaagtattcacaaaaacacgattgttgttctttcagttatgcacaacattccttcgaatgtgggtttccggttgttaccgccgacttgcatatttgaagatttgccataacgcatgtcgcgttctcctctctgccagatatcattgttttagtcagaattaaagataacataatgaatacgatgaatactgatgtaatgaatttcatgtcttctaactagtgactcccgtctatatagttatattgataatgtttgagattttgattatgaattgttctaagtgaaggtatatataaatgctatggtcatatgaaaagatatgggggtaatgttttgcaataggcaaggattttctttttttttttggaaaagctcgtggctttttgtcttttttatttaacttttgtgctttatttaggtgacacactagttaatgaaaatgtgaatttttataaatcaattgcgaagaacgcgagcgatctttattggaaagatttagttacata

SEQ ID NO: 41307 - DNA, 659 bp, Arabidopsis thaliana landsberg
gtgatattcgaacaacatgagtatccaaacagttatatatgtgtaagctgctcaaaatgtattatgttcatgatactatatagttttctatcatcaaagtggaggtattctttcggtgttaagatatcgcactggctgattttgtaatgaatggatgcattggtgttttgatgtctagcacatttagagtatagtttatggactttaaggtctttaggattagagtatagttttgactaaaggttcacaaattcgaaatttatatcttccttttgtggcaaattcatatccatttctgatggatcatatgatgcaaaaaggatggattttgttggatgcattcaaaaattgactatctttcccggtcttatggctgtgcaggttggtgcatgtttggtgagccaaaatggtgtaatccttggtaagataatacgatcacacttgtgttttgatctctttgaacaacatgaagtgtggttgtatagtttatttcattttgtcacttagctggtacatgcgagacacatataaacgaggactcaaaaactttcatctttcatttagggattggctataatggttttccaagaggctgctctgatgacaaacttccttgggccaaggtattaccttcatctgaattctaagaatatacagaa

SEQ ID NO: 41308 - DNA, 514 bp, Arabidopsis thaliana landsberg
  unsure (1)..(514): unsure at all n locations
ttttattttgttgtttcttccttcttttccttcggtatatttcgcttatagcagaaaataacacacacatatttatatatatataacgatataagttataacacaaaatatgattgtatgtatatcaaacaactgaaagagcaaacacgatttggagactcgtcgttcagctaaacaaaaaagacatcaaccaaaaacaaagtttatagcatgaagccatgaacacaattcagctctgttttgtttcttttttgaagaattcgatttgcatttttaggttttgtcatnnnnnnnnnnnnnnnnnnnagataaaaacatatatgtaaaataaaaaatgaaaaacgaaccaatccgtgatatacataatttagatatgtattatctgcataagaacttctgataacttaagaacacctcttacaatttgggtataaactttaaactcaagcattagatttagaagtcgtttacataatttaactaagcaaacgtgtttgtattagatcccaagaat

SEQ ID NO: 41309 - DNA, 1754 bp, Arabidopsis thaliana landsberg
  unsure (1)..(1754): unsure at all n locations
attagcgggagctttccatattaactacatcataatcaaagattcgagagaaaaaaagtgaaacttttaatcagagattaattttgtttgaaatggatctaaatctaaaagtggatacagacccgaaaccaaaggtacacaagacgtcgttaaaataatttatacacaactctctcaagcaaaaaaaaaaaaaacaaagaggaagaaagaaaaaagcttcttctatcgattcaacattgaattataattttacagacacaatattcttcatctaccacccataggattttcatttcatcccaattgtattcccccacgcgaccccaaactctaaatacgtacattgacatacacttacgtgtacaagaatacgtatagaagtagcttctattggttaacctctcgagctgcaaatcaaaggtgatctgaagtgacgcccgttcttctcctgtcactgctgctgggcttaggtcgttgggaaggacacgggcttgggatagcctccagagtggaacgaggagacagacggttcacggttcctgttagatcgggagaccggtactgttgttgctgctgctgttgcccactttcactggagaaaaagaagtacgtgtgaagaagctgtagaaagccaagcacacacaaacaaacaacagagaggcaaaaacaagaacacaggtttcacaaacatgtttcaggttcaaaaaacaaaactttatgccaatgtaactgtgatgaatgattgattacctctctgaggatgtcatgtttctagctcgcgggacctggtctagtttgaaatttggcttctcccttctactgcttggttcctgtcaatttgcaggggggggatattttgttatttatgacatagggcggtccatgagagagattcacgcttgtattgaggttttgcttaccgttatgttcatcccattaaataattgagagacatcactgttgcttggtgaggttggttgcaaagagttctttaggaaccggtgttctagcaacatagatgcggttggtcgctcagctgggtttctctggaagcataatctcaggaagtctttaccctcaggtgacattgattcaggtatcggtgggctatctctcatgaccttgaacatagctgcagcctatgataaggcaaagttgatacaaagaactttttagatatcagaagaaacaaaaaactctctttagtagaaggcatatgtgtatgcttaccccttcaaactcactccaaggaggcttcccagtgaacatctcaatgattgtacatcctaaactccatatatcaacagcaaaagccagatctgggttgctatctttttgcatcacagcttgcatgagctgtgtgagtaaacgtatatattagtatatatatatatatatatatatatatatatatatatatagggtttatagagtctagtttatttcaaagatcatagaacaatgaccacctctggtgccatccagtacgggcttccctttaacgagagatcagctctttgtccagtaagctgaagaatataaatagcaactttattattataaaacggaaactaaacaaagagcatgatattcacattcgactcatcacttaaaagacaataagcagcaataatactagacaggatatagaactcacgtgtttagccatgccgaaatcagcaagcttgacaaccccagaagcatcaacaaggagaatagcacctttgatatccctgataacanaaatagggaaa

SEQ ID NO: 41310 - DNA, 574 bp, Arabidopsis thaliana landsberg
gccggtggcacgggtgatggcggccacgccttcgggggcttcggcgtgggccaggtggcggaggatctgaatggttttcaccacggcccctacatccttggtgctggcgctcttggtactggcttccggtgcggtttcgttgtttttcatattcagtattcaggttgacattcagcggagtgaatatatgctggcttcacggagcgcacaaccgctgccctgaagtcgccggttggtgcgtccacgtcactgcactttgcagcaaaggtcgaacaagaataaaggaggacctacgtggcagatctccccgagtgcgtcgttccgggccccgaggcccaatacctcgccttcctggcccagggccgcttcatgctgcagcgcagccgtgccaccgggcgctacgttttctacccgcgcaacctggtgccgggcagcggcgagacggacctggaatggatgccggccagcggcctgggcaccctctacgcgatcaccgtgaaccgcgcccgtggcggcgactacaacgtcgcccttgtcgactggacgaaagcgtgcgcatgatgtcgcgcgtcga

SEQ ID NO: 41311 - DNA, 1646 bp, Arabidopsis thaliana landsberg
actttatgacttgccttatgttttaagttttatgtggacagagacgacagtcgtacgtatggagaattgtacattgtctcttctggcgaatttgacaacatagtcctttaatttcttatgggttacattactaggatagtgaaatcatgagttaaatgtgcaggatgggatgtcatggctgttgaatccagcggatcaaaatctgccgttgattttggcggatcaaggattcgatgtgtggatggggaacacaagagggactagattcagcagaagacacaagtaccttaacccttctcaacgggtctggttcagtgaaccactgttttaaccagttgattacgtatatatctttactaaggaaactgatatttaacatcgttggcacgttgtggacttaggctttctggaactggacgtgggacgagcttgtgagttacgatctgcctgctatgtttgaccatatccacggcctaacaggccaaaagattcactacctcggtcactctttggtgggtccaacgttatcaacatatttttctctgtttgtttttcttcatatagtaatcttctcattattgaatgaaaaatgaaatggaaattgtcaggggacgttaataggatttgcttcgttctcagaaaaagggttggtggatcaagtgagatcggcggggatgttgagtcccgttgcttatctcagccacatgaccaccgtcatcggcgatatcgccgccaaaaccttcctcgccgaggtccctagcttctcccttgtaatacccttttttattcttatacaaatatgtgcctatagttatgaaaataacttgtttatcgtctttcaaaaataggccaccgccattcttggatggccagagtttaacccgaaaaggtaaatcttcacccttttttcttaaaatatgcttgttattaatggcttgatttgattacgtaaaatagttaaacaacatttgcagtggattagtaggggattttataaaggctatatgccttaaagcggggatcgactgttatgatttagtctctgttatcactggtaacgctacaactaaaaaagtccaccaatctaccattgatgaattaattacatatattaattaacgtaattttacaaaatataggaaagaattgctgccttaacgcatcaaccattgatctgttccttgccaacgaacctcaatctacttccaccaagaacatgatccaccttgctcaaagtaagtgaaacaaattcccattttttaaaaattattttataaaccttaaattgttcaaattatttatttgtagcggtaagagacaaggagttgagaaaatacaactatggaagcagtgatcgcaacataaaacattacggtcaagcgataccaccggcatacaacatatcggcgatcccacacgagcttccgctttttttcagctacggtggtttagatagcctggctgatgtgaaagacgttgagtttctccttgaccagtttaagtatcacgacatcgataagatgaatgtgcagtttgtgaaagactatgctcatgctgatttcatcatgggtgttactgccaaagacgttgtttataaccaagttgctacctttttcaaacgacaagcttgataatattaataccct

SEQ ID NO: 41312 - DNA, 453 bp, Arabidopsis thaliana landsberg
agctaagttagtaaaaagagagatggtgttgattggtcattaatttatacattattgttcaattgtaaaaccatcaacctttttgatgcttataaaacgagacaacaaatcctgcagactacacattataagaaaacgagagaaaaagatatactatcgatcaattgagaaaaagggtctgtacggtttagtaatgctaatgtacttggtgggtagtggctttagtcaaggtataaataaccatcccatatatatatagattaaattactataatcttaatgaatattatctctttgattgatgattcattgattcaatgtgtgtacgtaggggaagtgacatggttgagtaacgaagttgaatggcgacttattctgaccacgactcaacttcctatcgtggttacggtaacatcctcgttgtgcgatgaccggtgcactatattggatgat

SEQ ID NO: 41313 - DNA, 505 bp, Arabidopsis thaliana landsberg
gaatagatatcttttccctggatcttcaccttataacaccttcagatcatgtacaaatcctcactcatttgatgtcgataatatcaggtatgattattattaatagttgaatacaatctctctgattttacaacgataaaattcttgggtttatctgactgaaaacctcatatgggggcattttgcagatttcttggaacttctggtcagaacatcgatgaccttggcaagtactcagaggctaagagcaagcttgattttgtggaaagaacgctgaggtggagacatcttgccccaactgcacctaatacactcggtaagaattctccttgccctgcaagattacttttttgaactaagcccataaaaaaatgatcctttgagttctatttagttttgattcacttgcgtacaggttgttatcctttcaccgatagagaccctttcttgattgaaacctgcccgcatgtctacttcgtcgggaatcaagataaatataacaacc

SEQ ID NO: 41314 - DNA, 522 bp, Arabidopsis thaliana landsberg
  unsure (1)..(522): unsure at all n locations
acaacatctaaaaatgaattaattgaaggatggtggtacgaggtttttttcaggttatatttttataagaaaatttcgaaagtaatattggaccggattttttcatttccaacatattcatcgttaccattgaataggtagttctttattaatattatataattttaagttagaaatatctattatatactagtatacagtaataatatattgtacatttttagcaatttcacactttctatgtgacttgtgagacattcaggactcaacctatggaaaacatagttgcattattggtttcttatgtttgtgttacactaaatgtcattttcagattaatttcatagcgtgccagttccatgtgttctgaattttctactaaaaaaacaaataattgctaatttaaaatgtccttggcaagtggtgtgagtgaccacaaatcgaaaccataatttcagatgtgacaatattccatttataagtatacctgccttctaaaaattgngattgctttgattcata

SEQ ID NO: 41315 - DNA, 410 bp, Arabidopsis thaliana landsberg
tcataacaatcttttaccactatagatctccctactcctttctcacaattttcctttgttttaacaggctagacatatggtcattccctacttgccaatgctaatacctccccagaactggacagggtatgagatcttttcaccaataattaggacttatattgttccttccttactctggctatatagatattctttcttgtgtagccgtcatacaggtgatatctacagtttgctcaagtatgtttctagaattgctatgtaacttgacagtattttacaggtatgatcaaggggctcattttttcttgccttcgtacgtcatgagaacacatggagctaaacaacaacgcactgttatgaaacgaactccaaaggagcaactggagccagtatataggtctgagtcc

SEQ ID NO: 41316 - DNA, 689 bp, Arabidopsis thaliana landsberg
  unsure (1)..(689): unsure at all n locations
tacaccacaaatgatgggttattcactagcttcatcgatatgattccatgcgaagcttagattaaaagagagagaaatcaaaacataagagaccaaaccagagtactgcaaatcaaaaacttgagtctttctagattaaaccgacgcaaatttcagaaataaatgaaacagaacaaggaaagaaagcaacgagaataacagaattattcaatttcccagacatcgatctcagagacatacttttttgtctcgaattaaaaagaagtcaatttctctgaatctctcatcaaaaacaaacatgcaaattcaactgaagaaaaacaaaaacgaagaatgaatttacctcaattttgaatctgattacgagattttcacggcatcgattgataaaatcaaatcgcgattctcaatctctctctctctctctctatcaataagcgaaattgagtacttggggctctacaaatgttttgggtgtgattgaaaaacctagggatttgcagcgccggcgagagagatcgagagaggtataaataggagaggagagagagaggctttttttgaagggagtggaaacgatatcgaatctgaaaggagaggtgaggaggataaaaaaaccaagggtaagacgactggtttgccacacgtgccatcagaatctttngcacgtgccactctataccctttaa

SEQ ID NO: 41317 - DNA, 186 bp, Arabidopsis thaliana landsberg
ctctttttgcttttctacgaattcagattcaaaggaaaaactttgggtttgaggccaaacaattaacaaggaaagttcagagtgtgctcttctcctaaacacttttgtcgaccattatacttgcagataaatggtcatctaatatgaagatgtatcttccacacgttgctcaacacaacatgacga

SEQ ID NO: 41318 - DNA, 626 bp, Arabidopsis thaliana landsberg
gatcaattttccagtttggcgtcgggagcttcgcggtggcggaggaggaggccgtggtggcggtggaggtcatggtggaggaggtggtgaggattttggtaacggatgtagaagcgatgttctacaaagtttcttgttcatggtttttataagttattggcttttagtgtaatataactgaatattgtatatagattttgattatgttttcagtgttactgtttgatttgctgtaatattggtttcactttttctttcatatccttttgtattgtgtattagggtttattctgtgtcttgcacggacgtttgtggattttattgttatatttgtcaatgcttatttaatatgtaaaattatgtaataaactaaaattatttatggtaaaccaaatagcttttttgtgtttagtagggattctagatctttctcaaagttttgaatttaaagatctcttggttcaaatccattgtggaaaggtttatgataaatgttggtaaagttatagccgtatgagaggctattgagagctattagccattaatcaaactaatgaaaatcaatttacaataaccaaaaactgaacaaatgatttttttttctggggatcctctagagtcgacct

SEQ ID NO: 41319 - DNA, 766 bp, Arabidopsis thaliana landsberg
gctgctttcgggaagtatgtgacattgaatgacatgctatgcaatgcattccaactaagataaatgttggagagagcttgaaaatatttgaacaaattagagaagtggaagggaacttattaatgaatttgccattctaatccaacggttgtggtgaagacgctccaaaagttatcgaactgaaagatagtgcgcaatcctccctcttcgttgcaagcaactatgatcaatgtgatgcagcgcactgaaaatatacgttgcatcacaatgtctaaacagattcatttagacgagttagcagagtaaaaaaattatatattcaaattaaatgaaattagatttagtggtacttgcaaacctaggatataaaatatccacattatctcaaaacttctaaagagttgtaagaacaaacttctctcaacaaaattgactttttcaccttcatataaaaatatgaaccatgaaataaattaataagtgtccattcaaatgttctcaagactatttgaagattcaaaaaaaataaaaaaaatgttctattgagctaagtactcttttaaacatattaattcaaattcagttgtatataatgatagtaggatctatgtaagttctaccaatacctcaagtctgtcatgttcagtgtcatcttgagttgtattgtaaaagtaatcagcataatcaagaccagaaaagggaatcaaatattaaaaagaaagtaaaaataaatgactggtgatacttgactatagacaaatccatt

SEQ ID NO: 41320 - DNA, 382 bp, Arabidopsis thaliana landsberg
ctcctgagaaaaatacccaatatcaccctgtggggcgacgggcagatcacggtcaacgggcgtgaggtgaaaagtgtactggtcaatggcaagcccttttttgggggggacatgaagacagcaacacaaaatattgcaaaaaatgccctctccaagatacaggtttacagtaccttaaaagacaaaagtaatccgcttgattccacactggaaatgaacctaaagcttaaaaaaggcaaggacatcggttactttggaaaaataggagcaggatatggcaccaatggacgctttgaaggcgatgccagcttcaatatctttttcccaaaaatgcagatcgctattgttggtgccagcacacatcataaacacctacatgcaa

SEQ ID NO: 41321 - DNA, 488 bp, Arabidopsis thaliana landsberg
  unsure (1)..(488): unsure at all n locations
tcgaggccaactcggaagcgcgggtggctcgaccaccaagaccctgaatcatgacgagtggcgacatatcatgctatacgtattgaccaaccttgaagaggtgacgccatacatggaacaatttcttcatgaattctggcgtccatcaagggaccccactccacaggaatatgacgctcttcttagaaagggtgcgcgaaatgggttgcccgatttcatttcctggttcaaacgtaaggtacgtgcttagtttgtaaaagagatacgtctttgaactcaatttagcatcttttaactttgctaatacttgcagggccaaagagatccgtctatgagtgccgagttgagacaagtagccaacggctttgcttatagggtcaagaaatattctgggtatgacgtcaatggataccgttntcgcacaacacactacgaccaaagtcgggccaatcggaaacaacgtgttctgaagtcttacgcccgggctt

SEQ ID NO: 41322 - DNA, 551 bp, Arabidopsis thaliana landsberg
tctataaaaaaaacaatatttatatactttaccgtaggggtagctatgtataactcgtttgagatattctctcgatatgttacctaaatcgatttgattccaaacaaaaaattctggctaattaacctgactaatcatggattggaacagatatacaattcatatacagagcagtactatcgtgtcttgtctggttaattatccggaccggactaaacacccgtttaatgtgaacataaccaaagcaatcaagtatctgagcttaattaattattactgttgattaagttaatgattaattaggcaaaaaagtagatttgtatgctgctcacatgggtttgcgtgaaataatgcttttaaccatctttttgtctctcctatacaattcgagctaaaaagctaagtcgtgtcctttattttattttatttttctttacattgctcttttgctgttatgatctatgaatggtgcccgagatgttatctatctaccattttaaaacacaattgtctattttcttttctaacgacctgacctctaaacccaatcg

SEQ ID NO: 41323 - DNA, 695 bp, Arabidopsis thaliana landsberg
aggggatgggaatcacaacgccaattgcgcatttctttcctccttttataatttacattttaaattggttaaagggttctcgaaaatgtcgggttggtaaaaaataacagtgagattagctacaagaaagctgactttgtttttcaagcaaatcatcaactgtcgcgtcgtaccaatcatggatccaccatgttatttgttatttttttgtcggcacactagtgttaatttgaattatttgatatattaatagcagaaataaaatacttcttacttgaagagcttaaacatattttcattacccgagaatgttggtttatcaaatgtgtatattagtggaaatgacaaatacgagtccaatagttaacgtaataactacccttcttttggggttcaaaagaactaattatgttgtttggagatttcgggaatacgagatcgaaaaatctatcttatttggatttgctttgattcattcttagtgtaaaaaccaaaaggaaagctaacctgttataaattttgatttactcaatatctaaacagaaaagcaatttgcacaagtaactttaactaatcttgtaacaaaaagacacaagttaaagcaatgatatactgtggatacctttttcaaacattgggtaaacttttttggggcgtaagggttatgttcacccacactatgggagtggaaaaac

SEQ ID NO: 41324 - DNA, 494 bp, Arabidopsis thaliana landsberg
ccccagtttcttgacattgtttcccatttgttgctgttagagcctttgatccatacttggaaaatataaacatgtctttttccctttatgatgaaaattgctaaatgaacccctaggtttcgtatttcacctaaaaacacccaaagaaaaatgaggtgtatttgaagacccagagcgctagttatgtaagtccatagagtcaaaccatatcaagtatatgggctttatcaagggcccaatattgtgaagtaaaacttgagaacaagaatgaatggcccaagttagatctcatttcacatgggttagaccaaactattattaattttttttttttttgatagggaaactattattaatttttaatcattgcaaatttcatagttatttgccaaacaaatttaaataataaaagtccaaacataggggacccgggaagaggtaaaagtacatctgatatctctcgatcaattgagcttacacaatccatatgaagt

SEQ ID NO: 41325 - DNA, 482 bp, Arabidopsis thaliana landsberg
  unsure (1)..(482): unsure at all n locations
gataccgcggatccggcgtgtgccgtgggcggactacctcggtgcttcgattggcggtatggaacctcctctaatgctagccgttgtaccaatttcattttgtgagtagttgaactagtggagatacaccgggaggggaacggattcgactatcaccggcgagctgcgccaccgtgggtgtacctcgccgccgcggttcggtatttaggaaggtgattggggaggctctctctcgaccgttgatcgtggggtgannnnnnnnnnnnnnnnnnnnnnnnnnnnttttcgcactggttaaccggagccgttgatcggagcgtgaacgggtgagatcgtgccctcgcgttatgtttgcggatcaatcgagggccgttggatctagatccaatagtccatatagcataccggttcagatgaagatcgatttaatccgtgtcgtccagatctaatcctacggctgagaaccctagataccccttcgc

SEQ ID NO: 41326 - DNA, 598 bp, Arabidopsis thaliana landsberg
  unsure (1)..(598): unsure at all n locations
aatttagaaaaccagaccacgatttcaactctgaggttttcaaagacgggtgtcgatgagagtttgatccaaaactgacacttcgatcggcgtgatatacacaataagttgttacaaattacagatgagttatacaaaatgttcttgaattgatatgtaaagaatgtattcacaaagggtcaaggtttcaaaagagtttttgagtggtaaaatacatttttttatatacgaactgcgaccacatatttgggtatctgagtagaaaaatgattcttgtccaaatgcattcttacttggagtagaagatcgtttggttgactaagaaatgtttaaaattaatatagtaaaatgtgtaacactttgtaaataaatatattttgaaatatgtttagctattatcaaaataaattaactatttttatatttcatagtacaaaaaattgttgtttatagtaaatagtttatatagcttccaatactaaacatttggactaanatatgtaaaggagctttaaatatgtggaatgaaatatgcatttgaagggggcaaattatttttcttttgaatataaaatcatatttaaataatgaaagggag

SEQ ID NO: 41327 - DNA, 688 bp, Arabidopsis thaliana landsberg
  unsure (1)..(688): unsure at all n locations
ttttatttatgagtataaagctttcattgtcacaacttttaaatgtcctcaaaagtgtttaaagagacaaaacaaaaacgaacctttcatgatctgttgaccgcggatacaaatctcaccaggttggttgtatccaagagagagacgtgtctcaaggtgaaccactttaagctctgcgtttcggaccacagtcccacatgaacctgattttgtcggtatcggttctttagcgaacccaaggctcattgacaacactggtcctgcctccgtcataccatatccctgtttttttatataatccactcgttactagttactacctctctaattacacttttggcaagtactaattcgcaaagattaaattattagactatacgaggttgctgcaacaaaatataatacggattccctatatatatagaaaaaaagaagaataaatactttaggttacatatcttttctgaatattttttttttaaatctaattctaggttacatagactctgacagtgtagaaatgctcttatatattaactcttgatgatcctttgatgtgtgtgtgtgtgtgtgtgtnnnnnnnnnnnnnnnnnntgttggggctagatgcacccaataatgattccatcttacgatggctaagttttcaacctagtaatcttcttggaataggaattaaattggctta

SEQ ID NO: 41328 - DNA, 657 bp, Arabidopsis thaliana landsberg
cttcagacatgtattctgcacccaatattcctctttatacatgatgcacagaaaagtttttcgcatgtcctacaatctattaagtcagcaatatgaccacaccattcacaatgacgttccaaagagtcatcaacctgtaggcaaaagtcacgttttgattagaaagagacaaaagtcaacgttttgattagaaagagacagatatagcaatattctttagattacggcaacatttctatgtgatctctaaataacaaaagtaacatgcaccaaaagaagtccgttactcaaaggaaagcagctgaatctactacggcaacagaaaatctttccatgtgccagtcccccagaatttgcgcacattgaatatccaaaccagcaatcatattgaagctaaccaattaagggtggctaaaaagcagtccatgaacacgattggtaccttttaatccctttcagaaaagaagccatccatgtgatatgctattcaccacattaaagaaatctaatttctaactaaattctgacccaaatgcaaaaacaaagtaagtcacatataattggaagaagaaaaaagcataccttagaaactcaatcttcaattgaacgtttgcaatccatgcaaactattacttctaaaaggggatgactatgcac

SEQ ID NO: 41329 - DNA, 848 bp, Arabidopsis thaliana landsberg
cacagtaccaagggactggacaagcagaacatttcttaaggttattggtcttgaaacatccgtcacatcttgattccgaggatgtattattcggaacacatatatatggcttttggcttagaatcacttctcctggaagaaacacaggaatcaaaattagtctcagacgaacaaaaccctaaaccccagcgaaaaagaaacgaaaacctggacgaaaatctctggcagtgaatagagagcggcctttctgtgggagattcgaaacgcttaagcagcgatcttgaagaaatatctgcaaatccgccattagtgaagcatccattggaacttacgagagctttcgagaacaacggtaactttgaatttgagtcccaatcaaaatctgaagtttacaacaaattagggtcggttttggtcagccacgcttttaaacccggaccgcgagtgcttcttttttttcccaggtttgacggaaatttgattaattacatttggatccccttttcttgctttccacaatttgacggaagtttgataagttgcatttagatccattttctaattttaaaattctgattgttaatttttcagtttcgttggtcactgaaaacaactgattgcattttggagtaatcaatttaaagtttgaaaagttcaaaagtacaatttataacacagaaaatgttgcaaaaaggacagaccaaaaggagttataaatacataaaggttacatatttacaaccctaatgagtaatgttagcttccattaaaataaaaacacgtaaatacatattataaatttactttgaagttagaaccaaggatgccatgttggatccatcatacat

SEQ ID NO: 41330 - DNA, 670 bp, Arabidopsis thaliana landsberg
agtaggtcaatcgatgttcaggcgcaactggaaatatcaaatctcaaagtaagtatggggaaattaaatatttctcacctgcctaagagaaattgggaacgaagggatccgcaggatgagcctgcagactttgttggaagctctcacaagaatcagattcgcctctctctcaagcaaaaacgttttttcgtttaatattctcaaattcaatttgtgaaatacagtactaacatttgttaaattatttgtaaattttctcggtttcgccgcttcaacactgaaaatttgcatattttatttgcaaacaatacatacacgcatatatcgttaattttcttcttcttcttccacgcacactttatttactgctgaattcggattgagccattagtcattactcactcattactaatttccacaaacctttgtatcttcatcgcttaagactataattgatgatgggattttcggatatatgaacttgaatcccatgggggtccacatatccagatggttctacttgcaaggcttgcatatctaaatggaatgaaaactcgtgtgatttttgtcaaaaaatcgccaacaatataaaatggtaagtcagtgggcctcagaaaaatccattagaaagcctagaccaaattgtggagcggtctagataaaatcaaca

SEQ ID NO: 41331 - DNA, 660 bp, Arabidopsis thaliana landsberg
aaactgccatagatctttaaaccacccatattccaatcaattaaagttttgagtcaaaatatatagcactatatcactaaaattcatggctatcttctcttttgagttttgccaaaggcggctacaattcaaatccgtggttgtggctgtgtgacaaaatcgtgagctcattcgacatgatttttgttgttttctaatgggccttactaagaacatgtttagaagtctagcccaattcccttaattagcttgaattgcatagtatataagggcctgttactttcttagaagtcaactccctttggtctgagactctgagtcgtggcagtaatgcattgcgagtacattattattgtgtatatattttggtttatattatgttgttaatatttgatttgataatgagtattctagtttttatttttgtgattatcggattttaatttaaaaatgtttactgtatgttcagaccgtctttcgcggattttaaatctggtatgtgtgattgtaaagaatatttccttgtactccttgatctatcattgagaatcccggtgagttagctctttggggtgtcttgtccgatccatatatccaatccgaaccggtgcaatagaaatcgtggtccagaacaagaaaacaaaatgtgacattttcata

SEQ ID NO: 41332 - DNA, 495 bp, Arabidopsis thaliana landsberg
cagtagtgcgacacacaaaaatggaccctatagcatatttaactccaatctgtttatctcaatatttagaacaacagtgaacattaacgttaaaaggtaaataatatattacacatactaatttaacttctagtaaggaggatcttgcatctggtgttctttaaaataaattattaaattatattttcatacctaatcttctccctattatcactttcatttagatgaaatcagacctagctttgatcaaacgtctatcagaagactagaaaagcagcgcggctgtgagggtcctcttaccttgtaagtcgtctccctcttcttctacggattgcttgtgtcctctcagtatcctaggtacgtagccacaccgatggcgtcaaggatagaacttggaactcatgacatctcatatctctttattgattagaaaattaggggccctaaaaaactatggccatgtgccgtcgtgccacatgcgctggccaaacgaca

SEQ ID NO: 41333 - DNA, 357 bp, Arabidopsis thaliana landsberg
  unsure (1)..(357): unsure at all n locations
agaagacagtcatgtgagaaaacgacgtgaccttaactacagtccataaagtccttcatatgtgatggtgccaggtttttattataatcgtcttatatccccgcgtgtgagcgagagagagagagagagagagagagagaaaggatccaatcctaannnnnnnnnnnnnnnnnnnnnnnnnnnntttgcagcttttgtatagatcaagaaattgttgctggaactgggtagaacaaatcttttgtactttccactaccaatccaacccctatttggggcaggagaacctttacaattttaataaaaatgggcccttttggtccctaacaaactcgggccacaactccaataattatg

SEQ ID NO: 41334 - DNA, 925 bp, Arabidopsis thaliana landsberg
tgttttttacttcctttgccctccagttgtggcctcgctcttgaatgttttgctaacgaaatttatttttttttgcagtttgaatgggcttggcagcatccgagagaatcggttgcagttagagaagctgctgcggctttcaaatccttctctggggttgctagtaagatcaagcttgtatatacaatgttaaatcttccagcttggaataggtaaggaagcttcttgttgttgttgctatgctttggtatccattttcttataacttatatgtctctttgtgtcttgttgatcagtttgaacctcacggttaattatttctcgtcaaagtatgcacaccacggaggtaaatctccaagtttacctttacatatgaaagttcaagtttgtgctatggaggatcttcagtatttcacaaaggtagatgacagttctcaacccgaagatgaagagagtcccgaggttaatgaagaggatgatgatgatgatgatgatgatagtagcaacctaagccagcctgggaattcaaatacaagctcatcggatgaccggcattttgaaaaagcgaaagaacctgtaactgtatttgatgaagaagacagattagcaaatttcagtggttttggcttattagatgaagaagagactgttgaagatgaagtatcacatatcactgttggatccattagagctactgagaaagaacccgagactgtattcaatgacagattatcacgcttcacttgttttggcttagtagagattgttgaagatgaagtatcacatggaactataggatccactgaagctatggagaaagagtgtaggaaaagaaggaaccatatcacctcaacgacgactgaggttgatgtataggtgatcgatctgatgactccatcacccagctgcagagctggatcatcta

SEQ ID NO: 41335 - DNA, 479 bp, Arabidopsis thaliana landsberg
tttaatagatcatgtgagaaaataacctaaataaataattaattcaactttaagttaaatcataatataattagggatcatattttagccaaactataattataaacatattaactttgattcagagaggttaacctactaaacgtaggttagatgaatatctaactataaaagtatgatatatggtatgattaatgtttttagtacgtagagaatatttttatgaagctaacgcaactggaacggagtaaaacggatttaaaatgagtaagttatgtcataaacaattttctaggtttcctaattatttattttaactctgtaaaggttgccaatggtatattttaaaagtccagggaccctattgtaagttttgcctactagcgaggacggcgggttcattcttgaaaagtaaagggtttctttagcaaaaaggccaacacaaaggggtctcagtggttttcggccgcgagatcaac

SEQ ID NO: 41336 - DNA, 822 bp, Arabidopsis thaliana landsberg
aaacaagaggcggattttaaatgaacagagttactttttatcaaaataagactatccacaccaattgtttgatgatgataataataattaatagtcaataaaacgtgttattaaataatagaagctccacatgaaacatgcactatcggttacttgtagaagtaatacaaaccaatgacgtggaagactattgtaattcgatatctttgacctaacgtataatggtgattaaaactaatgcttgataaattaatggatagtgacgttagctggtatcctccaaagaacaaaaaacccaatgtacatattttaaacttttgctatgaaaggcattaacttttctgataatagaacaaacgggttaaaaagttacatcggcaaagtaaattactgatcttggtccgaccttcttttaaaagattaaacaaataaatatctgcaattgtgaacatattaatggtgaatcgaattacttctataaaaataattgcatgatgaataaagcatcttctctccgtttcatggggcaatgtttcaaggagtttcagatcaaggttttgtaccaagtggatgtgtctttcactagttgagatcagatcattcacgtttttaacttactctaaccatttttagtaattgtatacagctcaaacgttttgtggtcaaccttatactttaacagaagattgttttttacaacacattaacgagtctgtgcacacaaaaaaataagatataaaaaatttaacgagtctattatgcaaatggtgcataaaagttttttaacaaaaccatttattaacagatgaacagaagaaagac

SEQ ID NO: 41337 - DNA, 694 bp, Arabidopsis thaliana landsberg
  unsure (1)..(694): unsure at all n locations
tcacgccataaattgcattgtgcttgggttgattgccaaataaattgatatttttttggctcgagtttaatcattttagtacaaaaaaaaatatgggttcaaaagatgtaattccaaccgtttatagaaaaagaaaacagaaaaaaatatttgtgggaatttattaggcccaccaatgtcggagagctgtggtagagttttggtgtctggtctagattagaaaaatggttcaatagtcaatttgagttgtttttgacctgactcgtccgagtggtagagttttggtcttggcaccattttcatcagtccgagtcaaatcatctttctattaagctaaatgtacttaacctggatttgcatccagattcctaaaattagaagaaaatgaaagtggaacataatcaggagatgcactaactaaattcaagaatcaagagctaatagattgtacaataataatgttctccggaaagataagctttccaagctatccattaacacaagctttagagattcaaacttaaatgtagtttaaattttagtattaatattgattttttaaaggcgacaaaaacatagaaattatagttntatggcttataaataatagtgactaagattacaacttaaagtactttaaaaacatagcctattaataaaaaactggatataagcgaatgcgctattatgaaac

SEQ ID NO: 41338 - DNA, 631 bp, Arabidopsis thaliana landsberg
ttaaatcttagggcttctgggcacatcctctctgcaaataaggtttgattctctatgcttcttatgcctgtaaacccatatggattttcatgtgtatgtgtgtgggagagagagggaaagagggaaaagggaaaaacctgctcgctagagacaacttggatagggccaatattcaccgacacatattttcctttgcttgataaagtctgctttacacaatcctaaaatgggggaaaaacatatttgcaacattagtaggatactcgtgttctcggtataagaatattgcttgaaagacactacatagaaatatactcttatttgattatttgataaaattaatagttcacatccaaacataacaatatgacagaataaacatttagcagctatactgcagaagacaaagtatagaccaaagcaagagaacaaaagtaaagaaagcaaagtagtgcacttgtatacatgttctgtttgtaattatcaagccagtggccaaaatattgtatagaagacactagcaaatatcgtatcaataaaagatagtataagcccgtaaatcatctagatactttaagaggacgaaatattacctcttgcatctgtcgtcataaacagattcacagcacac

SEQ ID NO: 41339 - DNA, 807 bp, Arabidopsis thaliana landsberg
tactgaaaaatacgtaaggtaaatttacacaaaaccaggggttaaaacaaaaaattgtcttcttctaccttgggcttgtgcccatgtacagggaggtcggcggacagggcgcggacgaggcgagcgaggtgcggacggttcagccggggcactgcgcgggcgtggacgacggcgtacggtccgggcagggcaagggcgcggccaagcggagctccagcggacggtgtgggcgtggtcgacgacgagctcgggagtggggagagcgtgagagagagggagctcggggagggagagaggagctcaggcaattcctatttatagagagaggaggagaggtagagccagggagggagtaacgacatcggtgtcttcaaagccattaatggcagtcggtttcttcactaatgaagagagaacgtgggggaggacggagggagagggtcacgacggtttccgttgctggatccgaacgggcgcgatcggggtcgggcacaggtgcggggcgcgcaggcacctggcggcagcgcttggaaggaggaaggagaggagaggagagagggggccgtggtggggcccacctgtaagagagggagggaggagagctagggggcgtggccggttgggccctggtgggccgaaatggccggtcagctagggtttctttttttcctttttcttttcttttcttttctatttaaaaatataaataattatattttaaataaattctaaaaatcataataattatgtcagaattatttataactacccctatttatcccctggaccaatatttatatattaaaa

SEQ ID NO: 41340 - DNA, 278 bp, Arabidopsis thaliana landsberg
gttatataaccatttgaatttaaatttttagtatatttatatgtgagttacgttgtagacgaaaacatatagcatatatatctttgctttgttatcttaagtaaagtcgtcgtgactgggagtggctaagcctgtgtaagacaagcaactatgaacaccgtgcgtacattaaaatagtaatttctgattagtttttaattattcaaatagtacattagaaaaatcggatagtgatatttattaaatttgccaaatggactttctgcgacaagcttaag

SEQ ID NO: 41341 - DNA, 868 bp, Arabidopsis thaliana landsberg
tgaaggtgggtctggggaaagtccaccttgttcagatgtatcttgcaaaggtccatccagtgcaggtgcatccattggatgttcactcgataatggtgcatctactccaagttctcccgatacatttctttcaaatgtatttccatccgataaatcttcaccggatgcattctcacccgatgtagctgcactagttacattaccatctggtaaagatccatttgatatatctccacccattgtagctctactcgatgtatcccccttggtaaaacttcatccgatgcatattcatccggtatcagtccaggaattttcgaaaagtctttccctttagtaaaactacagacaattgaatacatgtagttatagaaagaatggatgaattaatcttgaaagtttggtcgatactgtttcatagtgtctgatattgattatactacgtttaaaaggtagacgatcctttttaattatggtcgaactaacgatcatgagtttttactgatgaaccattaaactactaagtaaattgttcaaacggaacactgataaatgttatatgaatgctttatttggtccaaattatttctccaaagacataatcagtttttcttttcttgctttgtattgctttgttttgttttttggtaaaggaagacgacctgttgcacatgtagttcacgtattctatgactacgctcccgcctgatatatattcataaatagagtcacaaatcatgaattgtagacgttaattaatttgtctatgctctcacatacggtatttagtttgaagttatacaggtataatacaacggtaaaaattcagatatttgtcgcaccatgataccccaaatgctagataacg

SEQ ID NO: 41342 - DNA, 525 bp, Arabidopsis thaliana landsberg
tgtaaaaaaaaagttatgtagacagctgaaatagcccaacaaaagcccaatagtggccttaacttaaaaatccatattggaattggaaccactgtattcttcagtatttagttttttttttttttttttttttggatttggaagtagaaccaccagttcttttttagtattccgtatttaattattgtagcaaattatacagatagaaaatttattaaggcccattgataccctatgatatagtttttggaagctcaagtaattttgtagtcgtattatcttagagcatcgcaccattcataatttacaaaaaaaaaattcagctgaaatagcccaataattcaaaagcccaataaatccacatttttaacaactgtttaatgttttccgtatttaggcttagctattgtattttgtaaccaatgacaccaattatacaagcgaaagttgatagattcttatcttaccagatcttagtaaaatatcttgagatctccatagattcagttagggtttcatatgctg

SEQ ID NO: 41343 - DNA, 551 bp, Arabidopsis thaliana landsberg
atactatgactcaaatgtaaatgcatcaaatctatccaaagcatctttaaactacttaattttccaataagcaagccatacatcactctcaactcacatagtgtcacattcttgaagcagatttatgaatgttctcttcactccgattgaaaaaaaaacaatcctaatcaagctggacatgaaagatgacaaaatcttacctaattttcccaaagctagagaagattgtatgtgtaaccaacatagaaggcttcgatgaaactcgtggctcagcaaaccatcttgatggcacacctctaagtataatcgtatcagcctctctccttccttcccttgaatgtcctgcaaatcacaatcacatcaattaccacgaaaaaatcgtaaaatcaaaatccaaaattgaagaaccaagattaccaaaagcgtaaaactcctcccaatccttcttcaacttctcgaaatcttctgaaatcggaagtaccacactaagcttatacttaactccttccaaattaagctcaataccattcatcttctccaccaaactcttt

SEQ ID NO: 41344 - DNA, 256 bp, Arabidopsis thaliana landsberg
ctccagaaatggtggggggctatggcagggtatacattgggaatttagcctgggacacaacagagcgtgacatacggaagctcttctctgactgcgtaataaactctgtgcggttgggtaaaaacaaagaaacaggagagtttaaagggtatgcgcatgtggatttcaaggatagcgtgtctgtggcgattgcgctgaagctggatcagcaggttatttgcggaagacctgtcaagatatgtcgtgcacttaaaga

SEQ ID NO: 41345 - DNA, 432 bp, Arabidopsis thaliana landsberg
tatacccaatgagacgatagttgtttgtcatagtgagccttggttttggtatccaccattgtttgagactgtaccttgtcctccaactggctgcgaagatttcttatctgtgattggtagaacaatgtttgagactgatagagtcaatccagagcatgtgaagcgatgtaatcaaatggatcatgtttgggttcctactgattttcacgtctcttcgtttgtacaaagtggggttgattcatctaaggttgtcaagattgtgcagcctgtaaatgtcggtttcttcgatccttcaaagtataagcctttggatctgatggcggttggggatttggttttaggttctgggatgaagaatgggtttgtgttcttgagtgtgtttaaatgggagcagaggaaaggtcgggatgtattgttgaaagcttacttgag

SEQ ID NO: 41346 - DNA, 2376 bp, Arabidopsis thaliana landsberg
atctctacctctattaatgtttacctgaaacaaaaccagaatgactccatccagcagcagcttgagtaataacagagtcgtcaaagaaagatacaagctttggcaaagtaatgttgaggatgtctccatgtcctaactgaccagagcttcctcttccccatgtgaagaccttaccacctgcaaaaagcataatttaaatgtttacttggactaaaaccaacaacattcctttgatcagagagattttgggaggtttaccagaagtcaaagcgatgacgtgagcgccgccacaagcgagcattgatatggaaggaagtgatgtcagagagagaagctgcggaagaagctcgtcttgcagctttgtcgtccctaactgtccgtccgtaccagcaccccagctccatacttgttcttcttcttcttcatcagcttgagtctcaccgtgttcggccattctttcaaaccgcttctgacagatttctcagtggaatcaatcaatctgggtttgttttaattgttggacgatacaccgtgattgaaatctcgtggctagttctgtctccggttgacctggtcgtgacactttctaataatcggacacaaataccacgaaatttgaaccaaagtggctgaaacgatgccgtagtgaagtttattagggtttttggcttggggattagattctaccagggaatcgaattgttcatgtgaaggaaacagagtctggatttgatttgtaacggtttacaacgctatgtagctgtacggagactagcatcaactattagcacgtccacaaacgtatggcttgcttatggcaatgaaaaatcaaccaaaccagtaaccggattaagaatttttgtcgatttttacttgccggttgagtttgaatcttctacccattttggaatccttctctttcttataagttacaatcatacaaataaacaaaactcaactcatttcacaacattcgacaactgagattaccaacaggattagctaaactcataaaattgccaaaatatgtaaaagaatcaaagttactataattgtagtagaatggtgttaaacgatatcgtcgtaggttactatatttctctgtttaacttcacttgtcgtcgccggagatgatatccctccatctccactaattcctttagtattatcacttctcggattaacaatagctgacgctaacctactgcttctcccatgttttctcaaaggcatcacaggtcgtaaaagcttcgacgaaaacgacgacgttctctcctttccttctctcgccgtcacaccttccttccacttcaccaatggatccgtcgcccaaaccacctccaactgcaacaaacaattacccaatcaaaccctagttcccaaattttaaactggtaattagatcaaatcgatgaagtgatcgagttacctttttggaatcgatggagataccgaaagaaggctcgtgactaccagcaatggcggcttctgctgactcggcggttcgatacgaaacggagccaattccgtctttatcgattcggattcgggagatttttccgttcatctcgaatcgagattttagcttcagatctgatcagttggcgggaagtcccataactaccaacgccggtggcggcggagattcggtgatcggtttgtcgataatcttatcgtgctccgatgacgaaggcgcccatggtcgccggcgtttccaaattcgcaccggtgtgtgactgtttgtgtagggtttatctctcttgcggatcatactcgaacttcgctgtgtcacttcaatttttttctacctttgaaaatttacaaattaaattggggttaagcttaatgggccggattaacatagcctcaagggccacatagtaactggactgtccatccgagtgtataacagataggttgcttgaccccacaaaatccacatttgttaacccacacacatattgccgcgtgtcgttagatgaactccggcaggagtttacatgtgcggagctcgcaggttctgtgacgtcagatatttggatgtgagtcatatgatccgcacacgtgactttcaaaggttcttgtctgagttttgaacatcttccattggtggtggttcggataaagatttgttgtgataaggtttatattattgcataatggtaatatatattatcagcatactgtatatatcaaatagtgccagtccttttctcaaatgaatcaattctactttcttctactagttgctgaattattgactaattggaatgtgttcactttctaatctcgaggttctcttggtttatatgaaaatgtagcatacgaattcctgaggtaaataccaaaacgtccatatcatttaaaaagcaaaca

SEQ ID NO: 41347 - DNA, 746 bp, Arabidopsis thaliana landsberg
tttgacaaataggcattcagaatttgaaaattagaccaaccgctccattacaaaaacatgtaaccaagtcagtggtcttgttctcttgtgtttctttaatatagagaaagaagactcccttgactctctctcacagctagtttataaagaaacgtttcttgcaaaattcttagcaagagatacacgtcagttacttatgcaggtttcgagaaggatcccatctggtgaaggcgtagagatgccaggaagatccgagaccaaccggatcagacggaggagccacgggtcaggtctgagggttcgggtagcttgcacttgctcaggacggcctggttcaacgaagtgtgcacggcacgggtttgtggtgccaagcgatgagaggcttatgcggaaggcgagtgacggaagcagagaggtgttgcgaagagctttgacacctccgatccggcggatgaatctccggtggttaaatttccggccaacacctagccgtctctgtaaaatgtcttctgtttgatcatgaaactgggactcaaaaaatcaaggctgagaactttttggtttgaatgtaaatagagctcaaagcttttctttttcttgtaatgttggaaatccaataagaatcatacccaattgcagagagttgaaactcttagcactctgtttatggacaagaaagtcttagaacgttttggatgtaaagaaagaaaaagaatcaagtggattcgttgatgttgttgttttga

SEQ ID NO: 41348 - DNA, 449 bp, Arabidopsis thaliana landsberg
  unsure (1)..(449): unsure at all n locations
gtctgctgctgcctcctctactacagcctnnnnnnnnnnnnnnnnnnnnnnnnnnnnntcctctgacgcaggcaccgcagacgcagcttggtcggccaacggcagcacgtccttgcccacggtcggctcctgctgcggcagcttgccttgctctgctacagccgcgccatccacggagacgtccgcggctttagcactcatcgactctggcggaggaggcgtctctgcgatgtcatcaacgtggtcgtcaggcgcaggtgtctcagacggcgtgccgttgtcctcctcgtcagcgtcgttgctgctggtttgcttgtgctccaagtctgtgcaggtacagcaacagtcagcatctgcacctcagtgcccgcatagcatcaaggggcccacatcacaaacaggcgtttcattctgcgtgaaagttgattgcgggtcctgttgcggatgca

SEQ ID NO: 41349 - DNA, 532 bp, Arabidopsis thaliana landsberg
tagctagttacagaagagagacagacctgcatgaccgagactagcgaaattgaagacccagtgagctgggggggactagacaacttcgagcttgggttagcagaataagctgatggagaggctgaaagaactttcaaaacctaggaatggagcatgaggtatagattagcaaaaagttaattcccagatcaatgtatagttattcatatgaaacattaatcttgtacttatagtcatctactcaatgcaagaaaagagtatgatgttcgacttaccagattgttagtagggttcaacgaatgtgcaactcctctgaagagcacgggagcctgtaaatcataaacacgaacacaaaatgaacttaaagtgtcactcaaaaaacccccaacacccgagatttcatacattatcttaaatccaaaaccatagaagaagcacttgtgaatataagtcatataactcagctagaaagcatggaagttacctcaataatggtttttcccaaaatgacatcggatttcactaaatcgtc

SEQ ID NO: 41350 - DNA, 553 bp, Arabidopsis thaliana landsberg
gagagagagagaagtagagagcttaccatcgctgttgggagcaggagctggagccagcgattgagcgcctgcgagagataagatgacggcgaatacaaaactgaacaacgcgaatccggtgacggagtttctcgacgccatctcttggtgattgatccgacgaaaatgatgatgctcgagagaaaaaatcgagagctctgcaggtgaaaaactccggcgagagagtgattctgcagagacgacggaggagagagagaaaacggtatgagaggaataaagcaagaagtgtaaggagacgacttgtttacggtgttcttatagtatgaagaccggttaaaggttaccggtttcaaccggttatttatccggtcaaatctatttactagtcaagctaattaaacaaaaaacttcaagaaagcatgattttcctcgaattttcttttattctttattgaccattcctcgattgttcttttttttcctagttttcttgtcaaaattgacatttttttttgaatgaataattgtcaaaattgacattactatgtttcta

SEQ ID NO: 41351 - DNA, 536 bp, Arabidopsis thaliana landsberg
  unsure (1)..(536): unsure at all n locations
cctgatacgatgaccttctggatcaaaactgaaggaatccctgctgaattctggcaggatgaagtgctgagaaattttggtgcttccattggagcagttaggcgagttgactcttcaaaaggaagactccaaatctctgttaaggcagacgtccctttcaggtttaataagaatgctcaactcccaaatggtgaagtagttaaagtaaaactattttatgaaaagctcttttgatggtgtacctactgtcgccggatctgtcacgaacttgaccagtgtcccnnnnnnnnnnnnnnnnnnnnnntggctctaatggcagaggatcagagacataatcatctcgacggatcaattgatggtcgttcctagtctctctctctcagtcaaggaggaacagtggttcctcgtaacggccctggtgagcgggttgtgtctctccctgaaggtcctcaaacctgaaagtccaatccgtcttacggacccaatcgtttggcggcgaacaatcctcccctgtccaagtcttctcccgctttggt

SEQ ID NO: 41352 - DNA, 199 bp, Arabidopsis thaliana landsberg
ttgtgcctgaagctgtgctggagactcgttacaatgaggatggactcttagaagcgttggtacattggcaaggtcttccggttcatgaggatacatgggagatagccaaggacttgaagaaacagtttccaggtttagcgcttgaggacaagctgcatgttgaaggggggggggagggggtattcataccccctcatta

SEQ ID NO: 41353 - DNA, 1014 bp, Arabidopsis thaliana landsberg
atgtagcgagcctcacgtgaactgaatagtatccacataaccagcagtcattggtcgtgaatctcacttaattcgtttcgctttgatgcacgtatttcgaatgggacatagtatatacatccatataagttgatcaactatatagtaagatacactgatattaaatttcaagatatgagatagacctagggaatgacatgtcgaatttgtctccaaaagatatgaattgaattatgcttctcagtaatggaacgtggcaatacctttatcactcatctatatatggttgttccccaaaattatttcttcatcaaacgagaaaaataagattgtaaatgtaaatgatttgatcatctcaatgttgcattcaagaatagtatctataatatttagttataagcattaggtattaggtcaattatattcaactgagtctacgaatcgaattgcatattgcgtaaaaaatcaaataaaagaagctagataaatgaatatacgtacgattacgagaatgaatgtgtgtttcttcgatttggtagaccttcaacaaacccaccgaattgatggtatccatagatttcttatcagttatcagtcatgggagagatttacgatctcatatatatggacaaaatatatcgtatcagcattattattgatttattgtttagttaagttccttttttttttttttttcctttttttctttgaaaggtttgattagcagttttgtccgaacagaccaagtatatatatacaataattgtgattgtgttaggacattcaaaatcttccatacagttttcgaattaagttggtatacaagtttttcaaatgttaaatcaaatccaactaaactagatttgttaaggatacataggatcatctctctttaatatcataatattcctctatctcctttatggaacattctatatttgtacaatcctattgtagcctcctctgtacttgtatatatacttgtgtaaagctattcgtataatataagtcatt

SEQ ID NO: 41354 - DNA, 681 bp, Arabidopsis thaliana landsberg
actttaccccaaatcataacagatttttctacaatcaactatttttatatcattttattgtttgtcgacttgatttgagatttctttggaattgcaaaagcgattgttcatattaatcaaagtaatttcgatattatatttatttatctcgttcaaagtattatgtatcagacaatgaaggtaattatgatacgtctatagcaagcttatgccaagacattcatatctgggtgggcaaaacgtaaatttgggtgtctataatgtaatttcaactctgtatgtgtctttttctttccatcaattctgattgtgtctatcctctgggataattgaacaattgtactatgactttaatcatttttaatcaatatatctcaatttcgacgtaaaaataataataacagatgtataggacaatcaaaacatttgataaatattgatacgttaatttccaagcagataccaaatagtaaattggtttatttttttgcttatacttgtatttaaatttgacaacagcatacaccagaaaaacatgtgccaaaagaaaaatcaagatctctacaatacatacggcagtcgccttctccgccacgacataaatatggtgcatgctcgaagcattgtctatcctgctgctttattcccaaacctatttattgattaaaatgattattaaaa

SEQ ID NO: 41355 - DNA, 490 bp, Arabidopsis thaliana landsberg
tacaccactatacctctgtggccgtggacataagagcttgagctaggagttcccattgatagcaactctcttcggttgtgggatccagtgatcttctaccaaggaacgataaaaccattcggcctcccgggaccaactcctcagatcgtgacctcaaaaaaaccaagaaatcagtttggaattgaagagcataagctttatgtgcactcttaggacttgtctttgatatgtatattttccccatgttttctaaatcagctgttattgtcctgtcttccttctccgcctcacgacatggaaccttaaaaatatatggatgataattcaacttgttagcaacttaacatgtctatatgtgatatttttgataaaatgacaagcttatctggaccactaggtttctggttttatgttgggtttctcaaatgagaaagattcccacgcactaaatttcgtttaataaaagttatattacttgcgttatattttt

SEQ ID NO: 41356 - DNA, 499 bp, Arabidopsis thaliana landsberg
  unsure (1)..(499): unsure at all n locations
tatagctacctatctcggatctctgctctgattgtcatgcagaatttattgttttttttcgacgatattatatactaatattttaaaatgttcttttgatgcatcttctagtgtacctttacgaaaataccagaatgcaggtgtattaccatntgcgtcgtcaagtcattcagggtggtatattgactcgaaatagttgaacgttttttcagtggacattttgatgtagtgaatatagctacacattattcacattgtatcgccacaatcattttttttaagactattttaaaatattaatataggaaaatatgtggttacttcttttaaaatgtttgtcgagattgaacttaatgaatcttagatcttccactaaacataagaatggtttcgtaacattaatattttgtttcctatatataatgaaatgatattactactctatcatattccgtaacatctatttttttaaagtgagttttttttcacctagtttcag

SEQ ID NO: 41357 - DNA, 463 bp, Arabidopsis thaliana landsberg
tgtctaccgactgaaaagtcttacaagtatatacaaacctactaaaaagcttaaaaagtgattatgatcaaatatgaaatacgaccgaatagattgaacaacccactacgactattatttatactatagaatccatcgttaacttagagccaaccataaagctatagtctgaaatatcaaagcgggccatgtcggagcagattgaatcatggtccacaaacttttaattctaatttgcagtatatataatagacctgacgatatcgaattttccgaaatttctcaaactttttgtaaatagtaaaacatcaaatttagtaaattaagaatacattttgaatatgacatattacaaatgaacgacatattagatactatagtattgtgtctctttaaaaagatgatatttagaataaaatgcttaaaatactattcttaaatttgacgtaaaagttaatacata

SEQ ID NO: 41358 - DNA, 485 bp, Arabidopsis thaliana landsberg
tatcacttatagcaaaaacaaaatgtcgacaaggaaaaaaaatcaagagaaagattatcagatctaacgagttttattattgtttaaaacatttttttttaattattgtttcaaacatttttgtttgatcaattattgtttcaaacattggtgtcaccatttgaaagctttcctgctggagcactcatggtcatggcaactgttttcgtcttcccgtccattccatagcccatctctttatctcccaattgtcctattaaattacatacactcttcatatattaataagattctttagttatcctaattaatctcgataatcactacgatatttaattatttacaaccatacgtccgttgcatgttctaactggggttagtgtttaaatttcctggacagatcctacctataattaggcccaattatatataattcggcccaactttttgattcgattaaaccaggaaaaaaaaatcttaacgaa

SEQ ID NO: 41359 - DNA, 404 bp, Arabidopsis thaliana landsberg
  unsure (1)..(404): unsure at all n locations
ccccccccccccccccccccccccctccccccccccccccccccncccccccccccccccccccctcccccccccctccccnntcccccccccccccnccccccttttttaattgtcccccccccccccgggccnccaaacccaccncccccccccccccccccccccccccccccccttncnccnccccccccccccctccctccccccnccccccccccccccccccccccccctccctcccctctctcccccccccccccccccccgccgccccccccccccccccccccccctcccccccccccccccctcccccccccctcccccctcttccccctgcccccccctccccccctctcccccccccccccccccccacccccccacccccaccccccccc

SEQ ID NO: 41360 - DNA, 514 bp, Arabidopsis thaliana landsberg
tgcgtgactgtgtgaagaagagaataaaacagagagatatcctcgtggcttgtgattattgggtggagatagaagaaagaaataattaagaaaagagagatatacacgtgggttgtggtgattgggtgttgaagaggaggcggcgacacgaggaacgaagacgattccattatatgtttttgtcgactgtttgtcgcgcgaccctcgtcaggcggtttcagggtattgtacttatggaatctgggccgttggattgtttcggggtattgtactgattgaatatggaacgttggattatgtttacgatcagatgatactgatcccatggacagggatgtttgtcaggttgcgaaacaaattctgatttacggattgtgccatcgtaatgatgttactgaaaagttttttttttcgggggcgatagccacgttacttttctccaaccgtgactgcaaaagtttctgttaaagagatttgaaatgtattttttttagttactttcttttcgtgattg

SEQ ID NO: 41361 - DNA, 276 bp, Arabidopsis thaliana landsberg
aaagggttttttttttccgcaaaagggacggggtttcttaaaaaaaaaaagagataaaattgtataaccgcacaggctttttttgggcactggatagcggtccacaaagggatgcaactttttgaccctttcttaaaaaataccaatgcccacgcttttttttttgggggagggaaaaaaaaactatggggggtcccgggggatataaaaaaaggggaggggacccccaagatatcccaaacccacaaggtttttttgtttttttacggggggaaa

SEQ ID NO: 41362 - DNA, 212 bp, Arabidopsis thaliana landsberg
ttgcttaagcactgaggtgcggaatgtggagaagaagccaagcctgagcgcaatttatatgctactggccagaaccggatgaggatcacggattcctgaccgcgctggcaggcttatcgcgcgggcgggccacagcgatggtccggtggccgtcgattaaccggagaacgccacctcagtgaaacaccgccacatcgccgataacttctacc

SEQ ID NO: 41363 - DNA, 485 bp, Arabidopsis thaliana landsberg
tttactgtatattttctttttctttttcaatttcttttttgctaaaatgttcattttttcttttcttatttgattctgatatgcatgattatttcagggaaaatatctacatatcattttaacaaaaaaaaatacaaatccattctataccatataccttacattgggaaaattataataaactcaagatatatatatacatatacatcatggtagtagtagtattagtacacatttaatttcagcagttgcaccaacaactgagtaaaggacaaaaaactataaaattttagcatcttctatttaaatcattacatattactagaaaatgatgtggaattctacaacaattaataataaaaattaaactcactagagacaactttcattaaaaaaaaaaaaagacttgtatcacaatcatattaaagaagaaacacatttccattattatccctttataatttaaaaaaaaacctccattcttt

SEQ ID NO: 41364 - DNA, 176 bp, Arabidopsis thaliana landsberg
aattctcttcagaccaaaagcaagaattggaaatttccatgttgttttgcattccaacgtctctctttctttgtggttataaacataaaatcattgggatgatacatatttcacctaaagctatctggttctgattactctaattcttgcattgtggaatatgataacattatcat

SEQ ID NO: 41365 - DNA, 155 bp, Arabidopsis thaliana landsberg
attgctcggttttttgcgatggactggactccactggggaacaaaatctattgtactacagctaacattgatacctgttatgggcggcagcattatagaggatgaacaggatcaacagtcagatgggaggctagctggccgagcctcagtaggat

SEQ ID NO: 41366 - DNA, 1111 bp, Arabidopsis thaliana landsberg
gattaaaattaaaataatatttgccacaaagctgaactgttttcttttctttatatggtttctttaactttttatcttcagtaagtttcaaataatcaaatagtattaaaaatcttttactgtacgacaaaaaaaaaacatcttttacttttagttctttagtcagtaattgtctgtaggggacacatttccccaacatatcacttggtttgtcactggaaccaaaattaaatgatgttggccccaaaatgattgaaccgggtttaattgaaatcagacttggtttaattagaatcaatcacaatagagaaaactggaattcttgtaggtacagtgtattacagatgcatcacagctaatagttataaatacaaacgtggtgtgttgttctgactcttatctacaaacacttaatctggacccaaccaaccataaacaaacccacactggtccattggtccacatagtctcttaattcggtttctttagcaattcttcataccacaatccatgaacagaacgtgacactgttgccacaagaacaagaatgtctgaaacctctatgaccttgtccgagagagaagctgctccgatctttcttagcattgtttccaccaactgctttctcttcgtgttgtttccggccaaaaccgcggctctaatggctaggtatatggtctgtgatacatgtgtgaacactgcgtctcctgcttgtaagcttttcacaagcatgtttgcgattacttgtttctttgtctctgcatcgttagaatcaagaagctcggagagtgtttccatgatttctgaaagacctgcatcaggttttgcgtctagcatctcgtaaagacggtttatgcaagtccgtgtaatagcctccatgtcaatcgaggatgagttttcgcttactagtgtttgctggaggatcaaaacacttgaagaagaaagaaacagaacggttaatatgagaattatataatcaccattttgagtgagacagggttcaagaggtaagttttgtcactactgacctgatggagacaagagtaattttctggatttgggattgaacatctctcagcctagataggttaagttgaaatgtatcagggac

SEQ ID NO: 41367 - DNA, 468 bp, Arabidopsis thaliana landsberg
  unsure (1)..(468): unsure at all n locations
tgggtttatcggtaaatgcagtaaaagattgacttattcctcacatttctctatattaaaccggataatcttataattaccggtgaacaaaatctctacantaatatttacaagaaaaaagaaagaaagtaacagactacttgaaaattgtagttacaaaaaagaaaagaaggtaatcacacaacgttaattaattttcagttttagaattaattatatttctccaaaatgataattatataaaacttttatactaaaaacagaagaaaaaaatgtcaaacataattttaaattatatacattatttaattattgtaatcaacaatttaatattaccggccttttctctctctatctctataagggttgactctaaagaaaacaaacgcagagattccttctctctactctnttctctctctggctctcactttcttcaaatttcaaatattttgcgtctgaatcaca

SEQ ID NO: 41368 - DNA, 557 bp, Arabidopsis thaliana landsberg
cacaattgtttaataagaattgatgaatggacaacataaaatacgcgtatcataccattttttgatattcttcttgttcgagcgtatagttgagcttaacaactggattaaggtgtttttatgttactgatgtgttcatgatcgctttgatttcttagcttaataaatgcaactatagtatagttaatggaagtattttactagatatgcaatatatttaaattaccaacaaaccaaataatttccacaaaaaatggtcgcggaagaaccacgaagcgtagataacgtcatcaaaggaatcagtacagtcaatttgtactttccagtgtaggacgcacttgaaacaacactgtttattttgcatcttttcgtaatatctaactcttaacaaaacttttcattactttttaatccaatgaagttaatttacttctgacattttttctagttgtcgctgctttcttttgttgtgacgcgtcttgaaattaacttgatatgcttaaaaagagatttgattcgaaacttcgagttaattcatcaacctttgaaatgtttat

SEQ ID NO: 41369 - DNA, 521 bp, Arabidopsis thaliana landsberg
  unsure (1)..(521): unsure at all n locations
aaagtcaaagcgagtgggggacactaatatatatatataacgctggtcttgtaataaagtagaagattacaaagaagaaacagagagaagagatcatgaagagaaagagatacgagatggagaagaagaagaagacagagattcaaaccgccattgaagagctctctgttttcatcgtaactaaacctgcagataagactgaagctacacatatacccttgaggcctattctctccttctgcagcttaatcatccaagttcttggtatctttatttctagttttcgtaggaaattatattattttgattaattgtttcatcgattttatatattttcctgagaaactgaagttcaaggacaactcaatgattgtcattgtcctgagctgcttgtgttttggtgcttgcagataagataggaccgacaatggctgttcttagacaagacattgatcaaaatattcaggtaactaaagataatgtaacctcatgcatgcatattaagacaagacanaagagct

SEQ ID NO: 41370 - DNA, 660 bp, Arabidopsis thaliana landsberg
gcaagacccggaatttgcatttgcagtctcactggaaccaatttataatgtttctgttggcatccaggtaaaagagccttttccagcttttatatttcatacagattgttgttactaaacctctgtgtatattcctatgcatgttattttttggaatcttttgttaccttgttctctgtttgtgtgctttcttaaatgtccattttttgtaagtaaccttttgttaatttttttagcaagaactacaagagcttatgaagtgttgtatatgtctcctgcaagctattgatgcgaaaaaggagaaagatgtgacttcttcagttagaaatgaaatcagaatgcgtatacatgatgtcttaatgactgttacgggagccatggatctgtctatatatttcagggttgttactagcttgcttcagcagcagacagattataatgggacgaaaaaggtatatgttattaccatttagtaacagaagttttcgtagtaattttgtggctataatgagtgaacatatttctacgaaaatattcttccttttgtttgcatggaagtagcatttccatgtgaatttccttgggaatgtacagatcctttgaagttaccttattctttatcgagaatttgcttgttggcttaatgacattctttgatgc

SEQ ID NO: 41371 - DNA, 212 bp, Arabidopsis thaliana landsberg
taccaagaagtcaatgggattttgtgttccgaaattgaaatgaccattcaatggaagtagaactacgtggtaagaaagcaaaatataaaaccttgatgagcgaactgaaagaacctacataaacatcaaaactttcatgttccaaacaaatctcaagacatgtccactactgagtatttaatgtcaaaaacagacaagactggaaagagtaa

SEQ ID NO: 41372 - DNA, 586 bp, Arabidopsis thaliana landsberg
taaaaagaaaagaaccatatgattgaaacaatggaatatataaaaagacatgtgataaaataaaatacaaaaatagtcaagaacagtttaatggattttccttgcaagtcgtcatgctcatgaacctgttctaattgcatgcttacatataaaaataataaaaccaaaactcaaataagatcaaacaaaatatcaaacttttgatacaattttaactgtcttattatattttggttcttaatcctttgtgaataaccataattagttgctagaaacaccttgcaaatttcataataaaaagtgattcctaatttatgtgagaacagaatattaatagttgtaagcaatgcaaaaacaataccaaaacgattattcttgatgaaaagatggaaaaaagctaagcacaactaatgttcaaatttctaaaattagttaggcagtaatctggcatttaaacatggtgtaatacctagtaagccaatcagagattaattggaattttgtttttcccgtattctcgttgttagtgtaattgtaccacttctagccatttataaatattcaaaattaaaaaaaaaaatatctt

SEQ ID NO: 41373 - DNA, 183 bp, Arabidopsis thaliana landsberg
ctactccctttccggtttcccttcctcacttgacgatatagagtacttaacttgcctccgttacttttcctgtatctcgctctgacaacttctttctgttgttctgcatgtagcagccttgggcacgagctattggttgcatctttgatcaccgtcattccctcatcgcttgcacagaccata

SEQ ID NO: 41374 - DNA, 2153 bp, Arabidopsis thaliana landsberg
ttagaaattactaacatggcgtacctcgtgcataagattagggcttccatgctaccatcaactacgtaatgaattcctctgtttttatttccattataaaataaagttatgtgaaccgccaatgccattatgaaaaatccaacagcatccattcctcgcactaaatagttatgatatttttttggacgaagaaatatctaaacgtatgtgtatcgtattcattgatctcgccgaaataatgttgtcatggcttgatctaactagtagcaacattacataatatcgtctagatcgtgcatgactccaaaagaacttgttacaaaaataatactggtaaataaacaagacggtccacaagctctagataatagtttagactttggtctggcattttcccattattaactgagaaaggtagaaaacaaaaagaaaaccaagtggtattggtctaatggttttcgcttgatcatgaatagtcatgtaggtgtaggccagagattcgttcccctcaaccggaaaattactaaaacattccagttgactagtcgaaatggtgttatgctttagatccattaaaaaaacggtgagtgggctactcgaccgttacactcacctgaaggattagtcttggctataaaagttgggattagttcctggtaatgaaaaaagtaatagaatgaaatgtgttctcttttcacttgttcacatatatgttggtagatgaaaacaatcaataagctaggaccagttttgggcctacaagaatatgaggttggttttattatgggctttaaagaaatgggtccactaggacccctaaattctcaaacttacgcaaatttaaccatacaacatcaacgttcttcatatttgtttacttgacgcagctcgatatttcactatacatcatttcactgtccttttacgcttgccacggttgtctctaattattaatcggcacccacctaaccagtaaccactacacaaacaatgttcgtgcattaaatcttgcattacacatgtatgtacattcatgtttgcacacttttagatattttaaatttctcgattagtgagtgactaagaaaatcccatttatttgtgagcttaaatgaattgcttgacctcacatatagattatgtaatcatatgttttttttttgtcatatagtcctatataagaatgttaaattaaattattcataagccgttacgtgttcttttgaatagtatctgtcattagcatacctacgattcgtactttggattgtactaagacatttaataattctaaaactgtttattgcatttttttatgccgtacttgttttgtattgatctatcatagtctaatactattatcttactaatacgataatatatcaatgctgctaaactaacgaatttaaaatgttttattcattttgtatttttgtgacaaaaaatgcttattttttgacaaacaagaaaatgtttattcatttatcgattgatcttattcatcaacatcttcgacatatttcttccataaccaatgctgtctccaaagaagataaacctcttcaatcggaacctgtttcgtctccggcaacagaaagtaaacgaagcttcccatccccaatataagtccggcgaataaaaggaatattccgtacttgagatggcacagcgacaccaggaaacactgcgcgattagagccgtgaagaaaaggttcacgcacaccacaacgctctgaccggctgatcgagtctctagagggaaaagctcgctcggaactaaccatcccattggaccccaagatcgaccatacgccaatacaaatagacagataaggaccacaagaatcagaccgagcgattttggtagctccttaccttccccaaacttcaacgctagtgttactcctactacaacctgcgaaaaaatgaacatatttagggtttcaccggaagttacttgtttagcaagatataccttgagttataatgtctactagttttaaaacaaattatggatggaacagtacgacgtttgttcattgttgtagccttcaatgtcaaataccttctaagggttatgttatcatcatatataaagcctagtatgatagtgttaaatacacaatggcttgtacatccggtgaataaattct

SEQ ID NO: 41375 - DNA, 1767 bp, Arabidopsis thaliana landsberg
atgttcgcgaggtttactgttgcggctaccatggcgatttcttcttccgacgaaattggatgcttttcttatttttgccctcagattaatttacctctttttatatcgccgatattttttgttctttatttataaatatcaataaaacaactaaatattcataagaattgattaaaattctttgtttttaatacatttctgtagtttttattttctctagtaagtttacgaccttttatttacacatcatgataaaattaacaacaacaaagaaagatgaaaatgattggacaaaaaagatactactagttctttgatgaggccatttaagactgttaaacagtaacagaaattattcaacaccccaaaatggggtttgtgtctgcaaaatccaatctattgaaagtacacaaaaacaaaacatgtgctttctgtcctccacctcttcctgttagaccatttttcatttcaagatgacccttcgttgtttggctcacgaatctggatcgatgttttcgacaagcttgcttccaattcatccagctcatccatgtctaggtcatcatcatcatcatcgtcatcttcttcttcttcattgacttctttcgaactctgttcagcatcaccactactcttgcttgtccctgcctctgcttctttgttctttgcctgaaaagcaaaaaactcaagattccattaacatgacttggttgttttaaatgatgagtgagtgagagagagagagagagagagagaaagagagagagagagctcaccttttgttcagtctcttcctgctctctttccctctcgtattcttcacaagcctcagcatcatccacaaacaagcttgcattggacagaaacagctcccgaccactgaggttacaaatccacacaatgaatcagcttccaaggacaaaaatagagtcacactggagatggatatgtaacagaatgatgaatggggattacctcatacggtcgttcttagctctctccgcttgagaagcagccaaaccggcatctctctcagcaattttcttcctcttccattccataaatagtgcaggagtcatttgtgttgcggtttgcagttttgcacgctgaaacatagaacaagaaaacatgggtctcacaaatcaagtaccgggtcctagcagctatgagggaaacttgaggagtattttaaacctcgttttcgatttcgtcctcaactgccagcttcttcgatgactcctcttccaagagggctttcatttgagatttaaggacatatccaggaggaagcgcgtgtctgtaatgacactctttgccaccattggggcatgaccagaaccacccatactgtttcttttccacagcatccagaaaatacttgcaaacctattatttttcagtaaacacaaaaacaattacaagtcaataaaactcagcgagacaaataactcatgtgtttaggataagtttatgagatgattattgagatgagacgcagagatattatttcttttagcatagacgtatatagttaagaaacatttatttcaaaattatgattagcactaacatcaccaaaagcatgagttcttgtcaggcatgaaccaagtgcgcagaaaaacacaagggaacaacgggaggcataataacatctaagaccctaatggctcttaatatgaaccgtgctattagctaaaggaagagaatcgtaaggcgaatgcacatcagctaaaggttaatcacagcaagtgcaagcaaaaaaaatgc

SEQ ID NO: 41376 - DNA, 705 bp, Arabidopsis thaliana landsberg
taaagttcatgtttcactttcatgagccgaatttgagttgagagcatttgaacttgattttgtcttccgtctagtaatccgaccaagtaagatccactccactactcaagattgtaatcgctggatagtatggtcgtactactcagtataagacggtcacgtaacgatcaaacatgcatcagtcaacgagatatcttaaactgtgtgttcggtctttgaccactattggagcaactagcaaggtatgtcatccatactcttgagagttccaatatttttaaaagtatatcagatttttatgtggtttcattcttacttctcttaatttaagttgttaaagttatcatgtgtcgtccttttctttttgtctatagttttatttaatggtccttaaaattcttgtgccagccacgtaagaatgtcggtccgaaaacgtaaacaacccttcaagaaaaccaagttaaacaacacatctaaaatgaaatatattatcaaatctttcaaaccaccaaattattttcaaaatctcctcaaaagaaaaaaaaaagaaaaaactagatatttattataaatttaataaagtacaaacaactcccgcacaacgtccaccacacacaccattaaaccaaatgcaaaaaaaaaaagttaagaaaactcaatagattgaaatctgttttattaattattgcgtagtcaaatttaaat

SEQ ID NO: 41377 - DNA, 1176 bp, Arabidopsis thaliana landsberg
  unsure (1)..(1176): unsure at all n locations
aaaagttccagatccaatgtttgtttaacatatgtactctgataaattatgtcattcgatgaaataattccaatgtaagagttgttatcaaaacagagcaaaacatctgaaaaataactagttgacttgtttattcttattcaggataagtttcttattaatcagtttatattgcagtcgctttttccattttcaatttcacaaattttctgttaatttctcatacagattgtggcttgcgacctaagaaacgaaaaaaaaaaaaacctaataaacgcacaacttcagaatgctaatctccaaacatgaggcactgaaagtaaaactagagatgaattgaaataactttggtaaacatttgacgaatactatcatagcgctttttccgcaacagagattgcagaatttggtttgccgatggatgtatcgccgcccaaatagtccaccggattcaagaagagacaagagcgtaaactgaagaatcctcctctctaggatcggaaacctccgtggttgagagtacgaccgattcacagaggcgataatgatgtacgaatcggatatccgatcggtgtcattattttatttttgccctaactcgaaattaacttttgactttttgagtatttgggatttgatttgttttatattttaattgataaaggaattaaaaaatttatgtattcatatacgaataacttatgtcaatacaaattcttgaaaattattctctttgaagtcgcagtatacttgatcaaagccaattgttttaggtacactagatttgacgaaaattnnnnnnnnnnnnnnnnnnnnnnnaaaacttagtaactttacatatcttcataccaaatgaaaacttacttagtaaaaagtaacttgattcataatcaactcgatgaaatctcttttagttttatgaataattgaataatgcatgtttaatatttattttctattatacttaacaacactgttacttgtcctaatcaattaaatattgtttgttagtaatcttttgaattttatttttaattatgctggtgatattaattccgtgtcgtcggtaagttaataattggatgaggtacaccgtaccattcaacattttttcttcgtatttatatatagaaattggttacactttaccaatctcaaattataattcactccaac

SEQ ID NO: 41378 - DNA, 905 bp, Arabidopsis thaliana landsberg
ggcacagggaaattaacacagctatttccaggtgctatccagcacttgacaattcatagccaatcagttttttggtttttttttgttttttttttgctttatatcacataattcttttatagtctatatatgaaaaatatgaagccagaggccgagtcaaacgtgagtaatttatttttgtcaaagtcaactgtgagtatttttaaacaattccttttattcattttacttcttggaatatattcaaatctggaagatgccttttaaattcatttttacgttggaaaacaaattttcgtagaaagtaggaaaaaaaagtaggaggaatatttaatttacttgatgtaaagaaatagctaaaactgtgaaatcataatttgaccgatacgattcctttttggagtaatattcacactccgtgtgagcttggcgtttactaaaactagaaactaattgatcagtcaattttatgaaaatgtctcggaccatattctatatatagatatatgatgtgtccatttccagtcatttattccagctgacaccatcaagccttcccgcctacgcctagtgcatgaaaataacactctcactgaactcgtatattttaataaatagcacgagtcctttttgttaatgatgttaaacatatcaaatttgatcaacatgaaaataggtaatttgattgatatgaaaaattggacggtccaaattcagtgaagggcatgcatggtttgtctccatgagatcaaagttgacattcttccaaattaaatgtcatgatttgatacgaaatgaatcggtatcaatacaaaagatcattatctcaatgcatgtaacattcatgtaacaatacatctaaaaatgtaatgtaaaatatatgtggataaaaagggtgacctttt

SEQ ID NO: 41379 - DNA, 505 bp, Arabidopsis thaliana landsberg
atctttcttccatttaattacattatttcgaagcttctttgtttacttcttacccccaatgtccaaagtgaatcttttataatgaaagttgagatattattctctctgatttgataagtagactgtagtacaattgtacaactttagttttcagttatataatattttctcataaaaactaaagaagattatagtaattaatgaattaagactcaaataatgccgaaaacaacaaccatttatttctgaggattgttaagtaactagttttttttttgaatttatgagtaactagttttgataacgattttggacaaagtaccattcgcagttgtacgtaattgtattctttttggttaaataatgtgtcatcgagtaaaatatcatgttatcgagttaaatatcactcacatatcaatgaatccgaagtagtattgccgtataagatatcgtgaataggaataaaatagtgtaccattagataaaaggagcatgttgtttaaac

SEQ ID NO: 41380 - DNA, 318 bp, Arabidopsis thaliana landsberg
tctttcccagaaatgatttctgggccttcgatctgattcccgtttgagctttcagattggttcagcggttgagaaagcggagatcttgagggctgcttgctttcttcgatttctcgagattttggttttggtatggttgctgagagcgctatttgaatgtcctccactccaagggcttcgtttccgccatgaccaccaagcgagcctatgagcttcgaatccttttcttaccccactactcaatctttgcgtattcatctctgggaatctatttttagggatcgacctgtgtcacacgacccaacaccgatctactgc

SEQ ID NO: 41381 - DNA, 593 bp, Arabidopsis thaliana landsberg
ttctggcataagaatgaagggatacaatgctaacttgtgagttcctacaaaaatatgttgatgatgcgtttcttttaccactttgaaagtcgaaaatttatatgggaaactagacacgatcatggtttcctacatcccaaaaatgagaaagattcaattaatctgaaactataattataattgatatattttatattaagaaaagttggtgcgcgtctaatagacatagaaagtataaaacatctttgttaaagaattttataactattggcaataatggatgtatgtaagccaccgtttaatcaattattagacaccaaatcaacacataaatcctatcttttagcatacagatatatagttatatacatacacattggcaaaagaaaatgtcaaataagatatcgtttagttttatataggcaatttttttataaatattcaagaagttaagttatctacacatttggatatgacaatacataggctaaatttatcgccttaggagacctgaaataagtatgttgattagctgaatgcaaggacatagatttgaaccatgttacaaaaaattcaattgacattgaatctca

SEQ ID NO: 41382 - DNA, 477 bp, Arabidopsis thaliana landsberg
agattgtaaatctttaaaaggcagtctgaaaaatattcatgttgatgagattttattcattcatggttgtaaggaatcattatgtaaagtttaggataaggacgttcaaaatcatataaaaaaactctacgaataaagtttatagtctatcatattgattcatatttcatagaaagttactggaaaacattacacaagtattctcgatttttacgagtttgtttagtagtcgcaaaattttattttacttttgagtatacgaacccataagctgattttctttccaagttccaataatgatatcatagtgtactcttcatgaatgtttcaagcatataattataacgttcataagtaatattctactgcatgtttgttattataaattaactaataatcgaaccgaatgaagttttgaatgggaattggtggcgctcacgaacatgagggactcgggccattcttaaagcttaaaat

SEQ ID NO: 41383 - DNA, 460 bp, Arabidopsis thaliana landsberg
gcttgtgcccaatgcactgtgagactctcccagaattgggtacaaatttgagtctcgatcagaaacaatagacttaggtatcccgtgaagcctgactacttccttcatatacaagggaaccaaatctgaagctgaattcgtggtcttcatgggaataaaatgcgcagacttagtcaagcgatccactaccacccaaatagcatccctgccacgaggggaacgaggtagacccaccacaaaatccatggtgatatgctcccatttccactctggaatttctaatggcttcagcaaacctgcaggccgcttatgctcggccttcacgcgctgacatacttcacaagcggccacatacttagaaatgtcaaccttcatccgcttccaccagaagttttgcttcaaatctcggtacattttggtttcgccaggatggacggtgtaaggcgttttatgagcttct

SEQ ID NO: 41384 - DNA, 544 bp, Arabidopsis thaliana landsberg
tcgatataagtatgcgggggtagaaaaggcttacagctctgagatgctgaggaattttgaataggccgaaggctcagtgtgcaaggagtcgagcaccagcacctttccaaccttaggataaatgaagaagcatatccagtggtccctatacgaatcaaacttgtgatacatgtgtattgaaattattaattttatttatgcaaaatcacacttacttaaagttgtacggggccactatggattccctgtcttgaaattgaagcattgcgtgtcctatgtaggtggcgtatcttgcttcaaaatccttcttcagatcttggatacgcacctcaatttcttcgtctgttagcccctgtaatgcttcgttgccttttccgattctaaaagtgtggttatctcgcatatctttattgggttgagatacccaacccttttactggcactagcattgggattggtacataaaggatctcctgctgatcatgttgcattctgcaacgcacacgtgcatgtcagatattgaaaatttaatcacttacttata

SEQ ID NO: 41385 - DNA, 574 bp, Arabidopsis thaliana landsberg
cctacttttaattcagatgattgctaacaattactgggtgggtttatcgttttagtagttatcgatcacaaatatgaaaagttagcgatactaaaagctgtgatttcagcatttcttgtattgttgtttcttactaatcgtaattattttggtatcgttattgttttgtaatcggaaccgatgattacaaatgaaataggtattggtttcaacaatttagacactatgtagatgaatagagatgatgatgatggaaaatgtgaagaaggtagttggataaacaaaacaaaggtcacatgtaaatgagcaatatggatggaccaaagacaaatgacatgttcactttacaccttcactttctttctttccctcacatgttccctcttgtctcctgttttgtaattgactcatttaattgttttatttagagagtgttattacatctctcaactgtctcgtgactgacccataatttgcataccagattatccggcataattaccggatttgtcgaagaacttgttcaatcatcatttcttcagatttgcatattttgaaaactatagatatacat

SEQ ID NO: 41386 - DNA, 412 bp, Arabidopsis thaliana landsberg
tatcacatcaaagaaatttacattagaaacaacgattattatcatagttaaaattttaattataactaaaggaatcatctttatgtaaagaaagaaaaagtcatccaaatatatttggaattgaacgagtgtaaataccgtaaagtttcgaagtggacacacacacgttatagaccacaaaaacaaatatctattacttttaatatatagtttcgctatctgaatttttaagtttgtttataaaattctttaattagaagagataaatgacagatagaagcaattaatgaattaattacctctttaggtggtggtggaggagaagctttcttctctccttcctctgtcttcttctcttcttttttctcaccgcgtttctcaacggtggctggtttcttctcagccggtttct

SEQ ID NO: 41387 - DNA, 815 bp, Arabidopsis thaliana landsberg
aagttcataaggattggaatcgaaagatccaatgagtaaggttctcacctcaaaattgatgaaagctaagacttgagggacataagcaagaatggagaaaactacgttccagtgatgtcatcaagactagatgaattgcattgcagttctaatgtgaataagattattcacttattagtaataaacacatcagaagttgactaataagattattcacgtattagtaataaacatatgctatgctaactttaagctttatgttcttagaaaatttgagaaaaatgacccaaaaaaaaacaataatgaactcaatgaccatataacttatacggcaggatcctgcatataattaacccaaataataatcccttaaattggtaaaatgtggatttcaccccatcctcccacctccctcctctttctaatgttaaattgttggggcaaaattgatatgtaagttcgtctatgggagggaattaagtttccgctgagtaataaacaaacaagtgcaaacctaggaattcaacaccaatgtaattttttataattttgtaggactctttaatagtcaagtcagtatttaaaccacaagagtcggtcagaaaccagaaaaactagaaacaagttatgtcagttctaagaagagagatgtgcaatgtattcgggaatcgggtatatcatctaacattttagccagtgaaaaaagagaaagatatgaggatttttccattgttcagtaagctaagagaagacaatttcattaaagagtcgaatagaatggatattctcatgaaactgagaaaggtaagtttttt

SEQ ID NO: 41388 - DNA, 573 bp, Arabidopsis thaliana landsberg
atgtttttgaggttgaaagtgcagatggtgtgtttgttaggttagtgccgtaagaaactctaagaacgaagctacaaatgcaaaatctgcatgtcaaatagtatctctcttttagtgacaaactcacatatgcataaaaaataaactatattgatcagatttcagttgttaaccaaattaatcttatttgtttaaatttttctttcattttttcatttcgtttggaatattccattccattttcagatatacaaaacaaacaatcaatataggtcatttggttttaaataataacagtgatatataagtcttgctaactggcaatttgaacagataaaagtatcatgatatcagtagtttggtcttaagcgtttttcagagcaacataattgtaaagttttatttgatcgaattaaccaaatttagaagttttcttttaccattacagcaccattttattttgctttttcgaacttttccaaaagccggactcgccggattattctgatattaggttttagagtttacgatatatataggaattgctatattaacagaaacatataatattag

SEQ ID NO: 41389 - DNA, 786 bp, Arabidopsis thaliana landsberg
accacatactaatagttcattcttgatatatcaacattcattttcaaagatctcaaatggttatgacttgtggttatatatataccaacgatggataaccaaaagtaaacctcgtttgcttttgatcttataacaataattctctttagatgcaagagaattatattattcggttaaaagttatttatattcacgatactgttaaacggacctaaattcaggtttgttaacaaatttaacatgtgtatgttatttttaagagtaaattaaaattgaaacaataaaaggtaaaaaactcctaatataattcaattttatgtatattatatgtgattaaataagttatatatccatttgatagatgcatttatggatgtgtgtgcgccgaatacagatgaagcagaagagcagtgatgaaaaggctcctcgctttctaattctatcagacagataactttattttaattgttttttggttagaaatttttgattcccaacaaatcatatttaatttgatgttaatgaacgagccaaatgacgaccatatcaactgcagctgtagtactaacaagggccccaacttgcaattacggccggccaaaatctgccttgagagtacgatattcattatggtatttacatattaatttagacaaattttagattaaaccattttcagaatctaatcttaaatctataaagatagtgtgtgactttgttaatctcgtacattctcactctatacattctcaacttaataatatcgcatactatacatcgtgtata

SEQ ID NO: 41390 - DNA, 403 bp, Arabidopsis thaliana landsberg
ctgtgattggggaacgcggtggcgaacttgacagcaacgtggcccaatcctcccagcctcatcaagcagatgtgcttcctcggcttgttcaggccgtggtacttcatggggtgagacacggtgatgcctgcacacagcagagtcacatcctggtccagcgacatcgcgtccagtaaccggaccatgaaccgctcgtgcaccaacacgtcgctggagtatccgtcgtaggtgacggtgatgtcgccgtcgacggagttgtaggtgaaggtgacgggccgacagttgttcttgaagccctcgtcgaagatagacgccgcggttgagtactctcatcgaacacttggtggttgtgtcgacgagtacctcatcctctatggttgaggtagctgctgccttgatagta

SEQ ID NO: 41391 - DNA, 1074 bp, Arabidopsis thaliana landsberg
atgatgaaattgcaattaagctagttgctaaactagctccatatttctgatttctttagaggagattgggattaggcaggaacaatggtaagtcaaacacacctaagcaaatgaaagatgcaagtactaaataagggttgttaatgtacgacggatataccttgacttcaaggttctgacttcgcaccttgcggtccaaacatctgagtataagaaatacaataaatttctggcagaaatcacaaacaaatgcggaaattggcaatatatattacataatttatcttactttgctcggagcttcttgttttcttccatcaacttgacagtttcaatatcttgtgactgacttgctgatccatgaataaacttcagagtgcaaaagacaatgaagttagagaaacggaatgggtagatgcagtcacaaactaaagttactatcatgttttctatgtgggcacatgtgcatgggctatcacataagagaaatgtcatattttatcacaaacagcgcttagatgaaactctagtcagtaatatccacagttttgtcagcatctctaggtattggggttaaacatgttgcacagaaaatcaaagagaagaaacatatattgaggtacctgttcaacccgaatatgccccgggacagtaaagtcatcattcccaacctttctttttaacgctgcacttgctacagaatcaggatgttctttcctcttctccaacagcactgcaataataatgaaaccatcataagtcagcatcagagagagttcggggaaatatacagtacaaaacgacgtccaacaaaatgatagcagaagcacttgcaatcagtttggaaaagtgtgtcagctttacagtaagatgatattgatgattttgctttattttcttaagtaagtgagttgaaaaagcggcaagttgcagtcactagatagagcattcacagcactatcattgtcatgtttctgaatttgagcatagtgctggaccaatccaggtcagactccaatattagaactctagctctgttcaagtcaaagactaactatgatcccacttacataa

SEQ ID NO: 41392 - DNA, 111 bp, Arabidopsis thaliana landsberg
cggcgtaaggctctgaacatcagcgtcgaaacctacaagggtgaggtgatcctgattgttttcgtcgaaaacgaggcacaagtgcgtcgcgtagtgtagatcgcttccggc

SEQ ID NO: 41393 - DNA, 422 bp, Arabidopsis thaliana landsberg
acgcagcttcaagtctctttatttctatcggtcgcgcgtctctggtgaaactagagctgtttcgaggcaattcaactctcgatctctggagacgaaccagatcgaacatggaagaatcttcttcaaaatcagtggaagatttaccggctgattgaagagaactccaaggaagatggcgtcgaacgcaagggagagtaattaccggaaaggtttggcgatcgggaagacaaatcacgtggaagaagatgagctttcagctttcacagaggagacttggagagtgagaaagatatagaggtgctggtgagtgtgtaaaatcaatgagtagagctggtgaagtgggcctctctctctgattttttcttaatgcgaacacttcccactgggattttttaagcccggtccaattcttactttgtaaa

SEQ ID NO: 41394 - DNA, 517 bp, Arabidopsis thaliana landsberg
taatcctgtcgaataattgtatttcataataagattaactactcttgtgaaaagaattggttcggttacatttcccaaataatctatagtcttatgtttctacatattcatcagttgtcatatcaatatatacatcatttgattgtatgtttttcggtgacaatcatattgatctattgatatttcagcataccagtaaagtccaatagcacttcctaaagtggtaatctcgtttgtgaatggacagagatacatcatgtactgatctggaacctaaatcatatgtagttaatgtctcaattgattacccacgaaataaacagcgtcggtactaaagaatttcttcaaatgcagtcttttttcttttgtttgtttgcaaaataaatacaaagatgcgactatattagccatataggttaaaagtgtataaaaatagagtatataataagtgatagaggagtcagatgcatatgataactctgcaatgcagagatgcccatggtagaaactcaagaaa

SEQ ID NO: 41395 - DNA, 419 bp, Arabidopsis thaliana landsberg
tgcacatatgcaaagtgtattgtttatgtacggtccaactatttcaacagtttcgatctttttccctacttctagtttattctatgtggtaggagtcgtccaatatactggttggaattttttagaaaattgttagtatagtatttatcgatgacaaatcttctttcatttttttattgaagtttcttaaggtcgagcatccaacacgggatttgcatatccatcaacacatgtcagccatttacaaaagactgaaatatactggacgtgaagaatcgatcggtgtttcttggatgcgtaactattttgagtttattcaatacaaatccaaacaacctaaaggaattagttcacattgttactggattatgcagaaaaactagacataatatttttcactcaataaagttttaccattg

SEQ ID NO: 41396 - DNA, 624 bp, Arabidopsis thaliana landsberg
  unsure (1)..(624): unsure at all n locations
gttggagcataannnnnnnnnnnnnnnnnnnnnnnnnnnnnnnnnnnnnnnnnnnnnnnnnnnnnnnnnnnnnnnnnnnnnnnnnnnnnnnnnnnnnnnnnnnnnnnnnnnnnnnnnnnnnnnnnnnnnnnnnnnnnnnnnnnnnnnnnnnnnnnnnnnnnnnnnnnnnnnnnnnnnnnnnnnnnnnnnnnnnnnnnnnnnnnnnnnnnnnnnnnnnnnnnnnnnnnnnnnnnnnnnnnnnnnnnnnnnnnnnnnnnnnnnnnnnnnnnnnnnnnnnnnnnnnnnnnnnnnnnnnnnnnnnnnnnnnnnnnnnnnnnnagttgagacttcaattccacaacagctgcatcatgagtactcgcaatcagaatatcatccacatacactaaaaccaccaaataatgaccattagcttccttcataaacaaagtatgatcaccgtgacatgtttcaaaaccaaaacccaccaaagtgctcttaaacttcaagaaccattgacaagaagcctgttttaagccataaatggacttatgaagacgacatacaacatcaggagaaaactttacttccatcaactctccataaccaggagggagcttcatgtatatctcttcactgagatca

SEQ ID NO: 41397 - DNA, 365 bp, Arabidopsis thaliana landsberg
cggccagggggactacgggatggggattaaggccgagcgagccgagagggcgcgctggcgaccagaaaaccacgcgagcactagacagggagaacgacgggctcgatagcgtctgcgaccgaagcgagcaccggagacaagcacgacggggcggctaccggcgaacaccacgacgcgatgacaaaaacagactgaaacagggagccgagcgccaaggacgagccgagcaggaaatcgagatccgagttgggcgagtgggaggaacagggagctgggcgaccgagcgccaatggggatggggcatgtgcgtccctgcgaccagagggagtgccgcggctacaggggcgcggtttggccagggagga

SEQ ID NO: 41398 - DNA, 179 bp, Arabidopsis thaliana landsberg
aacccgtgcatcgaaactgcaccagctagcatagttggatagcccatgaacatcatgcaaagtgcctaactacgtgcaactatgttgatttgctcgccgatttgaccctctccatttgacccacctttcattgcctgctgaaggcagccacccggtcatacgacccctcgtatcctagt

SEQ ID NO: 41399 - DNA, 989 bp, Arabidopsis thaliana landsberg
ccttgcatggttcagacgagtgaaagtagtaattaagaagatgattagttattttgtataagtaattatattaagagagttttgattggctttggagtattttgtgtggtgagaagagtgaaaaagtctatgtttttcgagtaaatgactttttttgtaagtgtaaatatgaaatgatgtgttttggtttaaacttctctctgattttggatttttttttttgtttgtttttttttgttttttttttttgtcttttcttgagcatatgtacacgcattgttattcttcagattttggatgtttagcaaataagatattcaaaaaatgcacatgcatgcatgagagatggcatctgaaactaatataatgaaacattaaagtaagcatatgtatttagctgtcttatacagattctcaaaatagatgtagacgtatattattgagaattgacaaaaaaaaacgtatattattgagttgttgagtctaattttttttgttgacactatttaaaaccgacaagcacgtcaaacagatattagtaatagtatatagggtcttcagacatgtattcgtttgccttaaaattgtattttaaaaagatcttcttctttttttcatcaccgttacctttattataaaaccaagaagattaatatatagtgaaatccgtaaagacgaaaaattaacgtagttcttatattgaagatgaactaccaaaatctaattaattcttatgtgattttgttaatcattgtcttggaattcactatataatgaagttcatcatctctaaggaatggttttactttggtccgattctttcgacttttggtcgttccatttctcattgaatcaaatctatgcccaaaggtaaaacataatcttctacagtacttttagatatatgatccaaattctcatcgacctaaacttataagtcattgaattcaactaggctcgtgcacatagctgggaggcaccaaataaac

SEQ ID NO: 41400 - DNA, 869 bp, Arabidopsis thaliana landsberg
tatttaaaaagttggctttgttgtttaccagaggagttctgtggggcgaaccagcggcaaagagttgcgttggacagaaggaaccacttttggggacaaaatatccagcagagattgccagcagaagtgggagttttgaagagagcactcgggaaaatatcgaaaccggtgacattgctagacattacgatgctttcgttgcttcgcaaagatgctcatccttcggtttacggtctaggcgggcgaaactcctccggtgactgcagccactggtgtctctctggggtaccggatacttggaatgagattctttacaattatatggttgagtaaaagaaataaaatacggaaacatcaattatagcatttgttattgtgattgatcatttaaatctgaataaaaggtccgtttctgaattttgtaatcatacataggttattagaattaaagaaatcgaatgatcaagaaaaataattaatctaaaccctacctccgtgtagtgtaagtgaacacaatatgaaactgtatagatcaaaacttctatagctaattcatttagtaaggtcgtttttcaactgatcgatagtttgtcaacaaagcacattccaattattaaagtttcaaccaaatctctacaataattctataaaaatggaactgaatgaagtcaagttattatcaaattcgatcttaaaaaatcatattcgtatgaatgaagtcaagttattatcaaattcgatcttaaaaaatcatattcgtattcgtactctctttatctccatgccaaacacatagattttactctgttctatcatgagcacctaatatttttgtaatgaatgtatcatgagttgaacaaaagggtcct

SEQ ID NO: 41401 - DNA, 371 bp, Arabidopsis thaliana landsberg
cctataatcagtctatgtcatcgcactgcactttccactctttatatctctcgaagagctttactacaggacatggctacacaggtgactgttatgtctttgattgcgttttatgtctgtttgtcattgaatggtttctgttatctgaatcttaactggttctatttttatgcttatcccattgtgattataacatgtttacttagcgaaaatagtcttatttttatgtaatgtggtaatatacaatggtatctgcctacaataagaagctaagatctcttcaaggtcaagaaaaaaacaatgttacgtgccaattgctaatgtagcttttattgattcgtggctgtatcggtttttcttaatacataccc

SEQ ID NO: 41402 - DNA, 109 bp, Arabidopsis thaliana landsberg
  unsure (1)..(109): unsure at all n locations
taccgagtatctcgaagctccaatggcatgcatttacgatcacttcgcagtagcaaactcgatctcaaagattttaagngntacgaccaagagccaaggcaaatggtcc

SEQ ID NO: 41403 - DNA, 238 bp, Arabidopsis thaliana landsberg
  unsure (1)..(238): unsure at all n locations
cgcccgttagggcgcgcctcgaagcgcgcacggccgtcgtcgccaacgaccacgttggtcttgatacaaccgaggaaggtgaagtgaccgctttccagccagcgcagaaattcaccggcctcgacaccgtcatcggtactgacgcccggcgcgatcgccgccagatggccggccagttcgatggccttggtgnnnnnnnnnnnnnnnnnnnnnnngacccagcgcaagtcaccgagca

SEQ ID NO: 41404 - DNA, 264 bp, Arabidopsis thaliana landsberg
ttccttattgtgttgtttctcttcatcatcgtaatgaatcaatattgtcattttaccgagtcaaaaccttcacgcttttgttgttttgtttcattcataaagattgagttattgttttttttcataaagaatcatcatagtcacctttttgatattttgttgggtttgatgaaacaggagcaacaccaaaacttgttcttaagatgatggatgtgaaaggacctaccatttcacatgtcaaaagccatctttaggtaaatagta

SEQ ID NO: 41405 - DNA, 539 bp, Arabidopsis thaliana landsberg
caaaaacatactacaggggccaaaacgtagagaaactaaaatacaggaatccagtaaatattataattcctcgcagttttgccactaaacttctcatcttgatcaagtataaccctgcttgtacttcctgaaaatatcctcagtttccgcattacggaatgcgcagcacccgataatgtagaccattaatcaatccgataagcgccaagagtagaaagatatccgcttttaaccaatctaccttaatatttgcgagcaagccggctttacaagaatcacaagtgtaacacaaagtgttttggtcattgctccaatttagacaatccatatcagcagacatatctatgggacttatccaataagtaggattaacaaatgtgaatccacattttgttgggggcttgcagcaaccagactgaaagtaaagaaatggggttaaatttaaataatataaaatattggggccaaaaaagtagttcggcgtgactgattaagtgcacatagtggaagaatctagaaagttgggacgttttatatta

SEQ ID NO: 41406 - DNA, 406 bp, Arabidopsis thaliana landsberg
agctccccaacccatctaatcaactattcaaattcatctttcttttcagacgcaacaaaatatcttcaatttagttttgttcctcttgtaaacttaaggatggactacagatttggttcgcctttcggatctaatttttttttctttattcaaattatttcaaaatacaattatatataatttattttttgtttgaacaaaattttacatttattccgaaaaaaaaaactatgcaaaagaaaattttaatcctaacttctcatcatcctcaaaataatgatatcaatatatccgcttcattagtaactgtaaccttcttcgatcaaacaacttatctgcaaggacctgactattttcatttatctaaccattcccggtaaccaaccaaaaaaaaaaatttttactt

SEQ ID NO: 41407 - DNA, 353 bp, Arabidopsis thaliana landsberg
  unsure (1)..(353): unsure at all n locations
aacaacgtgtgccgcacttccaaggccactggaaggttcacggacccaagtaagcttaggccctcccgatgttcgctcgatcgtagcctttatgtcgacaggtcttgatccgacctttgcctgccagggcctcctcttcctcggcgtccatgggcgttccctccccgccgaccgccatgcctaccggggggtccgattcccaccggcatacgcctgccgagaacgtcgccggcgatccatcagcagccaccatggatgcttcttcctcgtcggtcgccatgcccgccggcgggtctggtccccatgagcatacatctgntgggagtgttaccggcgatctgccaatggctact

SEQ ID NO: 41408 - DNA, 849 bp, Arabidopsis thaliana landsberg
cgtctcaaacacaaaaactaagattcactaagctatatcagtaaccaattttacaaacataccacgtcaagatgaagctctccactaatatccatagcatcaacactaagaatcgaacatgctagagcaggaaacgtaatatcaaactgcatcatcaatgaaacttatcagacatctctaatcaaatataagcacaaaccaagtcaaaatcactattaagtaacattacgttgatgcgtaacgtctctccccttgaagtatctactataagcttcgtctcggtgactgtatgaagataaagacctaaacaacagaatcaaagaatttcaaaattacgaaactggatatggagattcacaaaattggaagcgaagttgttaatacgtacggagctcggagaagaagagaaggaacataacaacggaggagaggagagtgataactccgccggataatgtacggctgtaaaaatcttcattgatcttaggatatgcatctagattccgcaatttattcaagatcccggccatttttaaacacctccgggaacgaaattgtcagattcagttcaccggattcaaatccagcaccgaatacgattaggtaggatgttcggagacaaaatcagacgagagaaacgtcgtcggaagcgaaaattcttccgacgatgcgtgaatagatcttggagagagtgatcgatgagatctttgagtcgttcttcttcttcttcttcttcttcttcttcttcaccgtctcgttttttctccgtcggacggaggagcgttagacggtctacgtaaacccgttcgtgtttgccgtctttcgcttcatgagtaaacgacgtcgtta

SEQ ID NO: 41409 - DNA, 642 bp, Arabidopsis thaliana landsberg
caatggcaaacgctctctgcgccaagaatttgtttcactccctttagatcagacgaaaataagctttctatcgaagatatgttccgtgcactaaagccagctattttggttctccttaaaaatggtgttaaagtagttatcgtaactctcggctccaatggagctctcctatgttccaagggaaacccgaaaaaggctctgaacatagacagaaagtttctaagaagtggagaggtcttcaaaagagtacagtctgtatgttcaccaaaccggttttctaaattgggatcgaatcgcagcccgagtcttttcgcaatgcatttcccaaccatcccagccaaagtcaagaagctgactggtgcaggtgattgtctggtaggcgggacagttgcatcgctaagcgatgggttagatctaatccagagtttagcggttggcattgcgtcggcgaaagcagcggttgagtcagatgataatgtgcctcctgagttcaagttggatcttatatctggtaagaattagttgtgtcaatatgaatgagaatgaattattggttttatgggggctgaaccggtttacgtgttgtgtttggtttgaccgtacaggtgatgcagagttggtatcaatggcgctaagatgttg

SEQ ID NO: 41410 - DNA, 661 bp, Arabidopsis thaliana landsberg
aacagaattatctagccaaaggatcagtactaaatggaaagactaattatacaatagaagttaggacgaattagaagaaaaacagaataatgtagaaggcatgaattgaaccaataatttactgacacgtattaaaagaggtgggaacgggcccacacatggagctgaatggtcggctttgattggctttaagcatagatgtcggtcatgtgggccattagacacgtcggctaaagctagattgcagatattcttcgggtaaattactaacatgccattactcctctaatcctaccgttactcgttcatttgtcttgtgctgggcactcccttaatcctttttaagaactaagacgttaccaaaagagtgtacatgcagcttagcaaattttaattgtgaaatcaatttgctttcataagtataacagtttcggtccgggatgtcgctttgtgccttgtatgataaccgaccaaagggtcttccttataaaacttaacagagggggcatttgagaacgcacactttcggactttgcttaaatccattgaatgatctgaatcgtgctcggttgatagatttaagacggagtgccacttgataaattgagacgcttgatgaacacgcatcccgtaattaacagaccgaattttaaaaaggtta

SEQ ID NO: 41411 - DNA, 267 bp, Arabidopsis thaliana landsberg
aagttatattttgctgcaaataggtcgtgcaaatactgtttgtgcgcaggaaaatatctgattggcgcaaaaaatctagccaaaatctttcaattaacaatggcatggccatcttacttcaacgtcataaggacattgggctccaaggatacatcgttcctaaatatggacgacatatagggccattgccataatcgggtggaggataaggcaagatttcacgaccttcccacatcaacttggatatgtgtattattggacaacttg

SEQ ID NO: 41412 - DNA, 105 bp, Arabidopsis thaliana landsberg
gcttcactcagcttcaacgtatgggtataggtcttgtgtttttcatctttgccatgatcactgcaggagtgttgcaggctaataactatcatatccaaaacactt

SEQ ID NO: 41413 - DNA, 812 bp, Arabidopsis thaliana landsberg
gttgttataataagggcgggttaatatagctaaccacattgtatgcaatttgagaaaaaacttgtcttcatgtaacacccaaattctgaattgggaattggtggaagaaatctaaacagagtgtcattgggacagaagaaaaatgaggagaaaaagaatgtttgttttaaaggaaaccatttatacatctcatgaaataaataaacaaggagaataaaacttaaactagtaataatataaataatatggatgatattcacccttggatttcaattggtggacgtgaaaaatttgaaaactaaaatagaagtataaatttgaatttggtatggaaaatagaaaaaaataaaagagaagggaagaactccgaaagatattacataaaataaaatggatatccttcacacttatattattaaattataccattcaaactgaggacaagttattcacaaagtttgaatttaaacttgaactcaaattggatttgaaaatggagaaaagaaaatagaaaataaaaagaaaaagaataaaagccacatgggccgacctctactcatttcggcccacttaaacaatccaacctgcgcgcacgccaaattcctccccgtggcgccgacaggtgggcccgcctcgtcagccttacaccgcgcggacgacgcctgttaacccactgccttgtgggccctactcgtcggtccccaccgcactcgctcctccctcccttcctctagtccgagggcccgcttgtcaggcccgtcttcaacaacttcgccgaacgcgacgggcggaccgcgcgaactcgccgccgg

SEQ ID NO: 41414 - DNA, 574 bp, Arabidopsis thaliana landsberg
gcaggtcgactctagaggatcccaaccgttacgcggttcttgattttcttcccggtttagtgtttctttgcacaaaattaaattagttacgaatgtcggatcaatgaatctttatctatggagaactctccgagctgtttctctgaatggacacgtggagctcacaaacccgtctaccaaatgtagatacgttttcagctcatgacacgtggccacattgatgctgctcaagtgcggcgagtcacggctactcagccgaagctccttaccgatttcagcgtaaacccacggcgtctcctccacgcgtctctgtatccagctcggcattatcgacgctgtcatcttaacgttatcttgctctctgttttctaaaacaactccaggaactttggtgatgacgtcgtcggagttcacgattcttagaaccttcgtgccttgcttctcaaggagtttccgaaagcatgtgttttcgacacgtggacctacgaatgatattacggtaaccataggcgcacgtctaagcgtcgctttgatatcgtaagctgatcgtgtcgagatcgcatcgccaatgctg

SEQ ID NO: 41415 - DNA, 1312 bp, Arabidopsis thaliana landsberg
atgtggaacttgagagaaagcccaaagggcctttggatacacattaaggcttaaaaatgttttaataaaacaatttacatatttaaaaagtaatgatttttcaattttgaatgataaataagacaatcctcaataatacaatagtacttaagttttaagctgtaagttttccaaaattaccattgttttattattcagatcatcattttatttgacatccctgaaaagcaaatatttacttttgagtttaaaataaaattgtgtttacttaaaaacagttttatcctaaagagtaaagacctaatctcatagtaaaagttgacattacttactgtataatcaaaaaaggattgaactagtagtttctaaagagaggaacaaaacaactgttcaattttcttcagatgaggattaaaatccgttattattttaaatctcggggactacaaaatttgactccgaatctatgatttactaaaaacaaaattagttaagccaacattttaactaacctaatactatcatttgaacacttataggtatgttaactgatttcaaaattatctatatacaccttttgtaatggcatgttttccatcaatgtgtgtgaacattgaaaacataaactgttgaacatctaacccatttaccaaaaacaattcagacaaaatttattttcggtttagtcgttttttttcgttttcttaatttcaaaataatttactgggaaaagaaaaaatcatcattacgctcatgtgaaaaaagatcgttcattgtatgggttttggaagttggaaaagtaagcaagcaatttataccctattggccattatatctaaccgagaaacaacaagctctttaatttataagttggtgtggttgccttacacaaaccccaagctttcactacacacataaccaaaatcatagtttgaaaattctgacatgtcaaagaagcatctcaagccgttggagacatgttttgaagatgaagaagatgatgttatttatcttcctccaggtcttgtgaccggtgcaagttccaagaagaatgaggagttttgtggcggctccggcaaggtacaaccgtctgagatgaagcgtcggagtgaagggacctcaacggacatgacttcgaagagagccaagaaggtttcagcagaagatgagaagaaagttggagaatggacaaaaaacccatattttcaaagactgtggagtgaggaagatgagatagttatgctacaaggaattattaaatttgaagatgttacagggaaaagttctgttgatgatagacacggatttatag

SEQ ID NO: 41416 - DNA, 318 bp, Arabidopsis thaliana landsberg
aaatatgttacaattttaccaaaaaaagaaagaaagagctaaatcatgctaatattttaccaacaaaagaaaagaaagaactacatgtataaacatgttcataacagaaacaacaaatcatttcatgcctttttaaatacttgttctttattttatacgagtataactactttatttctaaataagaaaatagttgaatggaatctacccatgaattaaagttcccaaaaaagaaagactagaaagcaaatacaaaattttaactactaagtatgttttagtatggactgtatcatgatttaaaacaatatgtctgag

SEQ ID NO: 41417 - DNA, 899 bp, Arabidopsis thaliana landsberg
catagatatttaccaatggtatttttatgaaattacaggcatcactttttttgtcattctacacaataatagttctaaatgcatttcaatagtttcaagagataatgattttttacttaaccaaaaaggagggtaagcccccaatgattgccgatccatatcacatcattgacacgtattctgggctataataaggcccaataaaagaatttttttgtgaatccactatacaaatcacaagttcatgagaaaataaactcataatgtacaacaaatttaatacatataacatcatttgtaaatgatcaaaatatatcaaaatagatagtttgtatcgtatttttaaaaatttttacgtggaactatggccccagtttgatggacaaaacgtgataagatattccttggcggagcaagtgaccaaaggaggaggtgtgtcgtaggcataactgtaatagttgggacaagcttctttaaacaacatagagtacgtgtttcttttgcacttttccggcattccatatgcattccggcaacaaaatctgtcgttatcaaacgctaaacatgcactcttgcacgccacaactcgtccctcttcgttcaaaaccttttaaaacagaagattgtattcaaatgagtataagtagataaatacaaataactaaggattaaatattcacttataacgggtttctgtttatccccaactctcaatagctctaactatgtttcattgtttgtatctaataaagcaagtcgtcgtttcaaaattaatatttgtttaaaagaaaaaagaagaagaagcgtggtttgagctattatcattttgatgatgagtcaactactatcattacttcagatgtatattttgcaatgagcattgatcgacttgaactatg

SEQ ID NO: 41418 - DNA, 1727 bp, Arabidopsis thaliana landsberg
cgaaaagatgactgctaggacgtttaaactgtagtgtaccttcaaacgttcttctgttttctctttctcatccaatgcttgctttacttcatccttggtacccatactcgaagatatctgctcgcgaagttgcttcaactgctttatttcacgcatgaaaccttttttttcattcagagataaagttgtgtgctgcatcgtatgttccatattacgcacctgattggaggcagagaaataagatagattagcataatcaaattagacaagctaaaaacttgaacaaaacttagctggaaatgtgatcattgggagtctcacccttgaatcaatatcatcaacagacgcagcacttttaacccggctaatcatagactgaagggcctcaatttcctgccgttttgaatgcattgcttttcttgcagatctctcttctgccatgaccgccttgtaactgatatcatagtccttacatattgcctagaaataacaatttcaaaaaatgtcagaggcaaatttagaacaaagatgttttaccatatgaaaatctcaaaagcgtttcttacgcgtatcttctggatatccgctctaagagcatcccgattttgtgttttctgatcaacctgctcttcagcatgcttcagttgctcggctaacttttcatcatcatatctaggaactctaggcagaaagtaaaaaggtcttttctctatctctgccgctacagtaagcccttcagaagcatcaagtacagaaacttcaccggtcgaggctactttatcatctgttctatcaacaacatttcctgaacacaacaatttatatatactgtcaactccatccttctgattctcaacaagagaagtacatagcctaatttcatttttaattaacttattaccttctttgttttcagcaggttggctgtccacacagtctttagctcctgtatgtatggtatcagtagatgtaaccactttagattcaagatcctgtgcacaggtcttgatttcagatgcaactgaggcagtagcgacttcttcatctgtatttatcgaagatctttctttgacgtccgattcttccatctcagaaacttctttaggtggtatatcctcgcgcacagcaacaggagtagtctttgtcacgttcacttctgaaccacaattgacttctctgtctatttcaccatcttcaataatggatggagctacatgtgcttcagcgcattgtttaattgattgagcagcttcagattccatggcaacagcgtctatttcgccagccactcctgctgagctttctgcaaagtcagagacagcagttttggtatccaacaagctcaatggttcgtcgatgtttgtagagagagtctcagcactctcatgtgatgcattcccagaaagatcccctgtaggtaattctttcgcttcttcagcagaatttagacaaacatcaccaccaacatttaagttcccctcgctattgtctccttgaactttctcatttggagcatgttttacattcacatcggtaacttcttccaactcagcactacaatcatcttgaattgtctggttagtgtcaactccatgatcctctgataaaccttgacttttggtgtcatcgcttacaattacactcgtgtcattcgcagaagacacaacctcatgtagcgcatgggatgggagtttttcaactagcccagatatctcatcactttctga

SEQ ID NO: 41419 - DNA, 147 bp, Arabidopsis thaliana landsberg
gcttggagtacatgctcatcagatgattgcatatgaacttgttggaggagaatccggagacgacgagaagacaatggagctgctttccggacggaagagattgtctggtggtgcatgattgaataaaaggggtgaagagagaagtgt

SEQ ID NO: 41420 - DNA, 137 bp, Arabidopsis thaliana landsberg
tcttctaatcagctcaatgagcatatatctattttcagtcttcataaattagctgcaacagagccagccatatgattcttgttgctactaaacctaaagactctcgcggaagcagcagcgatgagatgatgatgaat

SEQ ID NO: 41421 - DNA, 1770 bp, Arabidopsis thaliana landsberg
ccaatatttactgcttatacactgaaccggatgaattcaaatatttctaaaccaactcccacaagtcggttaaagagcaatcctaagctgactacttgtgataaaccaactcccacaagtctatcacagaattcacaagtagttgctgctgcgtgttgtgctgctggtgtattccaagtgggataaaccacagacggaatctgttagttttgatttcatccgtgctgagacgactttgtccactccaacctgatcaaaattcaccacttgtgatagtaacaaaagtagcaatgatgaatggaaaaaagtgaaatcagcgtgtagtgcaatgtttcagaatcccaacaaaacagtaagaaaaataacagatttcattttgcgaagagaccctcagaagttgccaagtatcttcaacaatggttcctctaaaacctccacggaaataatccaagagggagccccattttatcaccgtgccagattactaaaatgttcatcactgggaatcttaacttagtttcgaaaacatatcagacctaatgtctcaaatcatttgatcaatacttaagtaaaaccccaagtcattcttgacaagtatataatgatttgatatcctgccatgtctcagggttcttagctcaagtgttgagtgatatacctaagtttagtcgaatcaaacctaccaatgctatctaacatgtgaataaagctgagagactggttttggttaccaaattataaaaaggcttcaagaagaagtcttgtggagagaacgaaagagacgatgcttcttcctcttggagtgtcttcctcgacccttcttcatcacatatggcatgaaagtcacctgtattcatgacacacaacatacatgtcaaaagagttgaatcataacccaattaactcttaattgagattggattatacagaggtgtttaacctgagaattgttccggattccaacatcctgaagaacagcattatcgtcaagcaacttctcattattacacgaaagacagaagtttgaccatacatgcttcctgcatattcccaaaaactcctctattaaacaattttactgtattcataaatgttacttgagagaagctatttaccaagaaatatggcgatgacccatgtttgcttgctccatttcgttaactttcttcttgatcaaaagcttcagatctttcaaagtagctgaattcatgaccgccacatctgcaatgaggaagcaaacaagtaagaaacccatgtaattttacaatgctgcacaccacttgttcgacataatgcccaaacgaagtatatatgtaccaagggaggagccgtcgagcttgacgacggagagacgcatagcgcttcccttctcaaggctgacaagagtgacgacatcagaaagtgttggattcctcggaacgtcggcgagaatcggatcagcaaggagctgagagagaaccgatttaagcttctctcttttcgtctcaacatcgtaatcgccgctctccattccgtagggtttagggtttgtctcgtctaatgggttacgtttttattcatttgttccatctcacacccaagcccattaaccattcttcacgtataggcccaattagataaatgattatgtaatatgtactctctctttttttgcaacaaactctgatttattttaaattaccaaattgtgtgagatgtttacattatcaagtccataaatagaaaacataccaagtcaaaaggtatcggcctccatgatttggtcattct

SEQ ID NO: 41422 - DNA, 523 bp, Arabidopsis thaliana landsberg
  unsure (1)..(523): unsure at all n locations
tggatagcaagctagattaggccattactaccatgcaaatggtttcaaatgtctaacaatttttaagataactccatcgagatatgacaacgggaaacaaggatcagacaggaggtttggggaagatggggacttgggtcaatgattttaaattgatcaatcgaaccgtgtatattgaattggctttttggtcagattcgtgattagggttcaattctagtactttaccggatttcattttgaaattttatttatttttattaatagtctaaaagaatgctatcacttatttgaaataaataaataaaattataaatttggttccgctcgtgaaagaaaaaangaaaagaagtttggtaacagaagaaaaagtgaaggccgatcaaatatcaaatcaaagctccacctttgccaatctcgtcttggacttattcacctgtactctttcttattttggtatctttgcaattttctttcctttttcatgatagcaaagattaaaacactaaaataactaatatat

SEQ ID NO: 41423 - DNA, 452 bp, Arabidopsis thaliana landsberg
cagcaataacaataatttccacatagatcttctcaacacagtcgaaagctgccgaagtctaaatccacgaaagagtatatttacaaatcatggctaggatgatcggaccattcgaaactgtaccggcgattcttgtttatccgatgagggtttcagcttcgccttcgctggggacaatttatgaggaagacgatgagtaaaatttcaacaagacaagatcaaaactcgagtgtttttttgtgttaatccattttaatttcgaattctatattgatagtgctttctatttcttggttgaattctagtttaaactcttttttatcgacgttatgatctcatatatagtcagtcataagataagatgtttcttaatgacgatcagtgcaaattgttcttaataaatatgagaccatgcctgcctagtgctactgataatgatttatttgttttat

SEQ ID NO: 41424 - DNA, 305 bp, Arabidopsis thaliana landsberg
cttccactcgtatgatctcctccattgtcccctccgccgctccttctcccgccgtagcccccaccaccgacggcgacgtagacgaaaacgatttctccgccttcacgcaatggaacatcttaaacctaacggaccttaaaagtacctttaaaaacctcccggatttctctaagctcaacatctcatcccttcacgtgtcacccgccgatggctccgtctgctctaacaccgactacgccgccgaatgcatcgtctcaatcctcccactcctccgtgacttccccaaattccagccaaaacccatc

SEQ ID NO: 41425 - DNA, 518 bp, Arabidopsis thaliana landsberg
acaatgaccggcagtcccgcagccggagggcgcgggacgcgtatatgcgtacaggtatgaagatgcaaagacggattgccaggcagtgtcctaaaggcagggtcagcggggccgctgccatggcattgcttttaatggcattgcctgggatgctctatggacaacagccgcttcccggtgtgcaaaaagggaaattgctttatcacagcgcgctcgcggacagcgccgatttgtcgggctgggtgatggaagggccgggtactttgcggttccgggcaggttggatggaaatgtacgcgccccgcgataaatgggattatgtcttttggtgcccggtggttttcccggctgatttcctggcgagctgggaggtaaagaatctgaagtctgaaggattggccatcgtcttttttgcagctacgggagaaggggagaaaagtatttttgatccttccatgcccaaacgggacggtacttttcgctattataacaaaggccttattgattgctatcatatt

SEQ ID NO: 41426 - DNA, 372 bp, Arabidopsis thaliana landsberg
  unsure (1)..(372): unsure at all n locations
taataaaaataaaggaaaaactgggaccgagtttgtgactcagtgagtcaggccgagtcaccaccgcatgcatgcatagattgatgattaatgatgatgatgatgtatgatgcanataacgtttgagctaacggtgaagcagttgatgagctttgatccaggggaatggagtgagagtttaaggaaagagtatcttcttgtcatcgaaggcttcttctctcttcctctccctctcttctccaccacttaccgcaaagccatccaagtatatatttcgtttcatttactaattctttcttatttcaatcatattttgagaatatatatcctaatatatgtgtgtgtattttaagcgcggaggaaggtggcgga

SEQ ID NO: 41427 - DNA, 592 bp, Arabidopsis thaliana landsberg
tttatgtaaacaaagtttaaatggttgtgtagaattaaagtgtaacttttgactaaaatttttgtttaattttattttttactgataatcaatgaaatgacagacttctgaaattatttaacgacttttaagttctctgttataatagaaaccataggctttaaatagccaatacaattgatatgataataatttcattccactcactcatcgacagtatcatttgtataattcaatcttgtttttttttgtataattcaatcttattatacaggcataataattttttttatcattgtaagtacattcaggatatataatgcatcattcaatataatcaaaatatactattttttaattacacaacgtctataatcccacaatactgcatatttcatttattatatataaaaaaaaaattattttgccttttattaagtaaagttatttctgaaccaatcaaaacaacatagattttttttttctttttcaagatttagcaatattcccatagaactatagaaggcatagtttttgagtcacagtctcaatgttttgttcggttgcgataattgatcaccaacttttaagc

SEQ ID NO: 41428 - DNA, 766 bp, Arabidopsis thaliana landsberg
cataatgcattacaacctggcaagcctagtcgtagataaccttctcccaatcaataaataggtgcacagtcaactaaccgaagcatactacaacactacagtaacgatggtaagaagttaaagatatatacaagccgataagaaggaagataggaagtaccataaagctcaatcatttgaatattggtacgtgtaatctccgattttgcattcctgttacttagatttttcacaacttaacagtcgccttcgcgagcaaatgatcagacagactggaagcaagagaagctgacaccacacaaaattttgaacttagaagaggctatataccatcgaattaagagttctatatacgactaggaaaaaaatgacattgaatatatcatttgaactagcatcagtttcacaagaattgacgcaaacagctgaaaaccatatttctaatatagataaggaaagctaccactcaagtctcggcagattaaagttggtttcaaattagctaaatattgacattagtacagacagtacccagcaatcatattgactcaattttatgaacttaccaatgcatgtaacagtcttcttcctgactgtggcttggttacagcccaattgcaataacaatgtattcaatagcttctcgtgatcatccgtcattaaaacttcatatttttgaacaacatcacacatgatctcaagacattcacacttgatccctgagctcattcccttcagcagtaaatacgcagaaaattagttactt

SEQ ID NO: 41429 - DNA, 545 bp, Arabidopsis thaliana landsberg
tgttatcatgttggagtatgtaaattgtttcaaaaatgaatggaacagaaattaggcaaggcataaaattgagaaaaagggaataattgtatatagtgacataaaatgtactcgtatgtatcaacattatcttggatactattccattggttacaaaaataaaatcttccaacttggattttaatcgtattcagtaattgtgattatcttagctggcaataattatattgtctctctatgttttggaaattaatctggacttcagcttaaaattcttaaattattaacaaaataaaaaatgaaaatagaacgtgttgagtgttcatgtaacgtgttttatggctatatatgggtggggaagaaaccatggattgttgttatttaaaacagtttcttatgtcaccgattaaattataacatggggtagttgacccgatcgaccgagttgattattattgccgtgccctctatttatctacatagttacaaaatctcaatgatcatccttttttctatggcttgaacactcattgtgtataatattt

SEQ ID NO: 41430 - DNA, 543 bp, Arabidopsis thaliana landsberg
  unsure (1)..(543): unsure at all n locations
gccactcctccgacatcaagtgccacagctgccagagacttggccatattcagcgagattgccccagcaaacgggcatacattgctactggtgatggtgggtatgttagtgcttctgatgttgaagatgaagatactattggagctaacattgcagagagttatgatggtgatgaagaggttattggtacaatagcgaccgagacctataaggccttgattgtgcaacgagctttgagtgccacagctagtgacgacgacaacagacagcgccacaacctcttcaannnnnnnnnnnnnnnnnnggactgccgtgtacataccatcattgacggtggtagttgcaacaacttggtaaacgttgaggtggtcaagaagcttggcttgaccacacgagagcatccccacccttatcacattcaatggtttaacaacaacggtaagttcaaggtaataaaaccagcaagggtgcatttttctattggctcttaccatgactttgctgatttcgatgtggtgagtatggatgcttgctctcttttac

SEQ ID NO: 41431 - DNA, 391 bp, Arabidopsis thaliana landsberg
gtctacggttaaccatgcattagaggaaattattcttgaagaccttctattggagcctcctgagactgaaagttctgtcgtccgtacagaggtcctggatgatgtccctttagctggtaatcctattcggcaagagataacctagacagtttctcacgcttcatcgaccttggagggcggcctagctcacggggacacactgtctcttgacgttaccggccaaggtcacccagctcctgtgggtatgatcgagggtgctttagcttttggaggtgccactgaggataacccagcccccgagggtggtgctgaggatgacccagcccccaagggtcctgagcctggttcctcttcggccgcctcgctggacgtcgatgtcggatcaccacag

SEQ ID NO: 41432 - DNA, 922 bp, Arabidopsis thaliana landsberg
cattcttaaatttaagagatggtatgatgttttcgttgttctgttaattatcggcacagcatcatttaaacaaaaaaaattgagttacaaattaatggataaaacaaaatatttacttatatatgtcgtgaacatgggaccaacctgataaaccatggtgaacaatctccactttttcttctttgtaaattcatgatttcacgtttcttgtatcgtttttgtatttataaaggaaaatctaaaagtcatcttgtgtgttcatacttttttgtatcccataattgctcttcatacttttactaaaaagagttatgagtgaaagatgtccaaggatgtgttccaagttgcttcaagttttgccacacaataatgaaccttttgggatcacataaagttactaagggatataaataaatgcaatttagagcacacaaactattagaaaaaaatagttgacttgctacgatacgaccagtcaattaaccccctaaatggcctttcgtatatcaattagaaaaaaatattgtcatctacaatttgttacgtactcactatcaaatttgaatcggcgtaataacacgatgtcatcactagtagaaagtattactgttacacattccaaattctgatactaatacttggctaaaagattttatatcaagatataatactttcttgattgaataaatatgatataaaagttacaatttccaacaaaaatacgtccaagtaaaatttgatttctaacttcaacggccaaaaacaattactactgaatcacatcagttgatttgtaattttgtatttagaatttgattggcgaaatagctataaagatgattatttttcttcataacactcaaaattagaattgtcatgttaaatgttagtacatccatggatatagtttacaaaaaaaaaa

SEQ ID NO: 41433 - DNA, 524 bp, Arabidopsis thaliana landsberg
caaagaatatcttaatctaatattgtaatacgtacttttaaattttcagttccaaacacaataagccaaaaataagatttgataattggggtgatgaaccaaaattaacaagagttttgctgtacaaagagggatcctttaataaaagaaacaaaatatcagaggcttcttctaaaaatgttgcaaccgaaaatttaaacaaagttgctctcaattcccaaaagacatgcttgttgtaccccaaggaaacatcagggcaaatagtaaaagaaacgaaggcattggaaattgcgggattttaccagattgttgaattacgtctcctcccctaacaaccattatggtcacaccttcatcaattcctgtggattcatatatgtgtgtagtaattaatggctaatcaatccacaagatggatcagatacaaaagtagactagaaacattgacacaaaactgttaccttttctttctgtttgtagagctcctctatcttcttcatgtatacatcaattagtttctgtca

SEQ ID NO: 41434 - DNA, 556 bp, Arabidopsis thaliana landsberg
catggatttgacaggggtctttgggatgaaatactaccggtaagacgatgatgatcgagattaagaaaaccatcatgatcgtccctttgctttgatgaggacaaagacgagattagggtttcggggagattggtcatgagattgatggaatcttgaggatgacttatgaatgaagacgggttattatgaaggaaggagtttagggagttatgaccaagaaatggagacacaagagaagaaggagaagacgaagacgacgaagatgatgaagataaggtgctgtgactagggaaagagaagaagaaacctagatggttggtattaatagggtttatgacggtttgtgattcatcaaacaagcttattccttggtttatcgcacccatctcgcaaaagcttgacgaaggtgagattgtgtgtgtgagacagtgagagagaaagttttttgttttgctggatatttttgttggattttgggttgaagaggttgagacaatccaatccatccatgtgagtggttcggattaatatataaaagttggataatgaaaaggtg

SEQ ID NO: 41435 - DNA, 126 bp, Arabidopsis thaliana landsberg
gcccgtcgtagggtcgagtgcatcgaggattccaccaccatcaggttggcgcgggtcgtgatcgagtacacggagtccacgaagcggacggtcacgtcgccgtgcgaggtgatcacggagtgttta

SEQ ID NO: 41436 - DNA, 398 bp, Arabidopsis thaliana landsberg
ataatacttactaattgtgtttcccttcatccaaacttttctgcgtgtattattattatgatacagatttgatattaaatattacaaatatcttatttgtttgcaatattattatataagtaaagatgtatatcataacgtatgtatcctttatgtgtctctattataacgtggatcaagattctttcttatcttcatcactccacacattttcttgtcttcaaactcacacaaagaaaagaaaagtctccaaagctcaaaaaacaatgactcgaccgtcaagattacttgagacggcggcgccaccaccacaaccgtcgaggagatgatcgcagcggaatccgacatggggtgatcttgtcggctcttctttgcgctcttatctgcgttgctggtct

SEQ ID NO: 41437 - DNA, 552 bp, Arabidopsis thaliana landsberg
acttggtatttctagtataatactaaaattcagtttgtacacataatcgtgtaattattagataatcatgattataaatgaatgaaacataatcttagttaggataggtacgaccatgcacaatccatgcctttcaattcaaaaaccacaaggtgatcagatctagaagataatcatatacatccaaaatttaattaagagacttgatttgtttaaagaccacagaaatacataagtactacagctaatcgatattaataattcagattatgtgaaacatgttcagtagttgtaccaatttaaaattcaaattatggtctggtttagccttttaattaggcaaataataacatgggttcatgaaatttattttttccccgatatatcacatttggttactaattaaacaccaatatatattattatacacatgttttaacattgttttgataaagaaatcacattttcccttctcaaagtcaactgtatatatcatgccgttatgttcccgctaattatagatgatcatgccatagtttcttccggtaagat

SEQ ID NO: 41438 - DNA, 569 bp, Arabidopsis thaliana landsberg
gctacacacaaactctactaaagaaaaatgatcaactaattagtttttgttgtgattattgttcaagtatgtgaatatagcaatggctgcatatgcgagagtggaagttgaaattaagcaaacaaagttggcattgtttcatgcgagctagaagatcaaatgcctttaccacttacactaagacatggccatttcttaatcttaattaaattacaatatggaatagctactaaaaacacatttttaaaatataagtggaatatgcagagagaacaacatatataatccttaatttagtaatgcgcccctctactgtgtacgtggaactgttttgcttccgcgtggccatttagaatattgtgctctttatataatatgtaaaattattaaaacctataaatcatgcattttctgatataaatcttagattatgttcttttttgtgttattgagatgattttttttcttaagtatcacaatgtgtcttttctatatatatatacgtccttgaagcggttttgtgcgcgttataagattcgttgggacattgtcaagttttggacatgttt

SEQ ID NO: 41439 - DNA, 553 bp, Arabidopsis thaliana landsberg
ttagaagtaagaagatggattgtggatgactagaatctctgtctcaagttaatgtggtttgattgatgcgttgcaatccataaataaaacttcctttttgtttgagtttgtgttgttagttactatgatcttatcagctttttggaactaggaatatggaatgtgttagaatagaatctaattaattgaacctctgtgatctgtgatttgcacttggggcgtattcattcagttaatacatatgttcttctcgattatttccagataaccgaggtcaaagattttgcgggtcaagaaatcgaagtaaagcggttagttgaagcggattcaaaggaagcattggagaggggaaacaaaggctcctcttcctcctcagcagcgccttcagcggttgatgcggttcttgagcagataaaaaagaaacaaaagctgagtgttttggacaagacgaagaaagattggggagagtataaggaagaacacaaaggtgttgaagacgagctagataagtacaagaaaagctcggatcagtatcccgacaaagttggtttct

SEQ ID NO: 41440 - DNA, 683 bp, Arabidopsis thaliana landsberg
ggggggttggtgatacttaatttgatttcccatctcgaccccaaaccccccctaatccattttagacataagaaaattggaaccttcagaattgttatccgcaagtacgttcgttttgatggattctaactgttttgctatatatgtcctcctcaatacattacttaagcagatgattttatttgagttagcataatgtctttatgcctagtatgcagtatcttttgactaattttaatgtgaatatgtcttttcggagaacttttttatttatttattttgtaatccctctttgaaagaaatgattataccaaaatatatcatggaatagttcacaataaaattgtgagtttgtaattagacccaaaaatacaattgttagagagagaactgaatcatccaagaagtaattgttgctacccaattactcagagtacttatgtgtatatttgtatgacatccatatgttgtggcctgtggagctaatgttgatcggacgcaatatcaattttgttatgttcggaatttattttgatttttttatataacaatttttctttttttttttaatgttttttatatatataaatttattattaggttataagagtcaacaacatgtgtgtatttacatggctcgcgcgtttttgtttttatgtgtagactttctttcattgtatcct

SEQ ID NO: 41441 - DNA, 706 bp, Arabidopsis thaliana landsberg
acttttttcctatctatctgccgacaagattagcataaaataattggaagccggaatagctttacgttctcgttttgggtgggtgtcgtctcaccaacttcactacagtgactactgactagatcgcaaaaaataatatgatcataatttagtaaaatattaaacgcgcattaagatttgattattggggatgattttcaggccaccagatctgaccacaaaatatagaaacaaaattcggaatcgtttaaaacagcttacaaaatactaataccccccagatgactagtatgtaatgggttctctagcaccctaaccgatcaaaaaaggctcctaaaacaatgtaaatgactcgaatctttttaacaaattttgatgatggctcatactttttccatacgaagccgaccaagcattaaatgcattgatacaaataagcacatccacataattgaaattttagagacgtgtgtcaaacacacttgacataagaagtttgcatgccgtaaatattgtgcatcattggattatagatccctactagcccacaagatggagacagtgtccaagaatagacgaacttagaagagtacatggaccaggcccaatagtggagtttcctaatgttcttcttgggataagagagtgtgtgagagaccaatatagctaactagaccaattataagggatggatagagtataattt

SEQ ID NO: 41442 - DNA, 565 bp, Arabidopsis thaliana landsberg
tgtttattagaaagatcagggtttacaaagaagaaaaatatctacaacgcatcaataaattggtgattaactttctttgcattagacgtattttcacaaaacaaacaccactgaattgctatgtttagacccattgctagccgattcacatatttagggcataatttgttgagctgttaatgtggaatatattttagaaagtttaaagaaaaacaataacacaaaaaaagaaggaaaaaaaaatgactttgagtaacttcaggaaatgtgagacattttcgtaaaattaaagtgttactggtaaatttaaattacagattggagtaaagtatgtgtaacgaaaacgctgataaagaacccattcgggttataacatcaccttagaagatgtatgatgcctagaaattccaactctttctttacataactaccaaaaaactatgttagatagtatacatcttctttcttataatcgatccttaaatagtaatattgattttcttgtaataaaaacagaccacttgaacgttttaatggagtgaaaaagatgtaagaaaagtttgtg

SEQ ID NO: 41443 - DNA, 851 bp, Arabidopsis thaliana landsberg
  unsure (1)..(851): unsure at all n locations
ctctagagccggtgcattttgttctgttaaacaacacatatccctatgtcagtctcaaagttcatcaagtaagctgcaatatttctaaatttttaggggcttactggatattttatctgagcttccaccctgctgcaattataagagtttaaaggtcagaaatcaagaaaataatcccaagatctatccaagtaagccatctacgaactacgattaattaagcaagctgttttatgatatctgaattaaccagtgccctagagttcacaataatgtatatgttcgctctacgggacagtcaaacacaaaaaaaagcagcacaaacctgagaaccaggctttggagtgttgcacttcctcatgttacatacagttctgaatgagaagtttacattaccacaattcggacatgtccaatcattatcgcgagttgaatctgtaaaagaacacaacagaatatatcaagttgactatcactataaaataaaggccagctttacagctgacatgttctagaatgggaaaaggcctaactcttctagcacatacctctcttttgtgattttnnnnnnnnnnnnnnnnnnnnnnnnnnnnnntgcaaagaagcgcgcatatattgtgaaaagatttcagctcatgttacaagtccaaggacttataagatcttgcatgtgatcaaaaccaagcatcttactgttttacataccatggcagcggcagaaccaggacccattgccataccaaggccatacctgtctattggtggaggcattccatacataccacctgacataagaagaaacccatcaatgcaccagccaaattagatacaggtacaatgatggtaatgga

SEQ ID NO: 41444 - DNA, 961 bp, Arabidopsis thaliana landsberg
tatgctgcgtgtattcaacgataccgctcgttatgttgaccaaggaggaggcaagagaaagggtacgtatcagctctttgtactattagcataatcatctgtccagtatatggtctcaagtgtatctgatttataatttgtaattggtgaaggagcctttgctgtttacctggagccatggcatgctgatgtctttgagtttctggagctgcgaaagaaccatgggaaggtatagtcatacctagataattcaccatatatactccctaaatgtaatttccatttgacgctgatacaacctcttaatacactttgtcgcattgcaggaagaacacagggctagagacttgttttatgctctctgggttccagatcttttcatggagagggtccagaataatggacagtggtcactgttttgtcctaacgaagctccaggtttggcagattgctggggagctgaatttgagacactgtacactaagtatgaaagagaggtgagtccctatttcatccatgtatatgctgcttctttagtaactcaaattcctgttatctcaataccagttatgtttgttcatatcttcagggaaaggccaaaaaggttgttcaggcgcagcagctttggtatgaaatattgacatcccaggtagaaacaggaacaccatacatgcttttcaaggtaagtaacagtcatcattttgtagctacacgttatggcgttataatcactggttcttactccaactttgaatactcttacactataggattcatgcaaccgaaaaagtaatcagcaaaatctgggtaccattaagtcgtccaacttatgcactgaaatcattgagtacactagtccaacagaaactgctgtgtgcaatcttgcatctattgctttacccagatttgtaagggaaaaagtgagagggagactgtttttttaaaattggtttctctttat

SEQ ID NO: 41445 - DNA, 754 bp, Arabidopsis thaliana landsberg
gtgttatcgttgactttgtccaaaagtagtggcgttgctaattttttgtgctctttctagaaatatttttgacgctttgaaagtcttacactaaaagccaaaaacattcccatttagatacgatttcaattgttaactttaagtgcaaatttatgttttctatgggaaattgaatgaattcacatttgagaatatcgacaaaatgtgggttgcaagtttggaacttgagaacgttataatgatgtataatcgggaaattcaattccttagaactaacaaataccgaataccaaacaaattaataggattttccttaaaactcaattgaattcataattgataatgtatatgtacttactattaataacttgacctcttttttccgagtaaataaattattcatcaaaatatactatttccaacgtaatttcagtcggtcaaaggaatatggaatgaaatcaatgatagtggtagtggatcatcaccattcctagagaaaattaagttcaaattaaattatggtaatgcgtatggaacatgcatttatgaacgtgtaaaacaaaaaggcatggtttaaaaaacagaaaaggtaatattctttaggaaatacatccgaaaatttcttaaatgtgcaaaagtattggaaaataaaatttacattcaatatttgggtgaaatatatagtcaatatttccctaattaaatcgtaacttattataatttacattcataaacaagtatttttacatagtat

SEQ ID NO: 41446 - DNA, 453 bp, Arabidopsis thaliana landsberg
ctctctctcctgatcagattactagactttatttgattgcgtgtagattaagactcacttccttatcagattactagactttatttcattgtatcggttcgcttaattcctcgcagtagatttgaggatctccagctttttgaggacaatccagttttcgtcgaagttcaaaatgacggtggtggaggcgggtgaagtgttgaacttgaaggtgggcgagaaccctctactggagggtgaggccaagacggggtacgtctcgcccgacgaccaagacggggagaccgccagcgaaaaaccctgcggcgcgccccagctgaagaagggcccctggagtcccgatgaagataagcttctcaaaaattatgtcgaggcacacggcgaggggaaatggaacaaggtgcagcgcaactccgggctcaatcgctgtggcaagagctgccgcctacgctg

SEQ ID NO: 41447 - DNA, 758 bp, Arabidopsis thaliana landsberg
tttagatccgatttaaatctggtccaaatttttgctatgcacccttttaagtatttgtgtgaaggtagaatatctttctaaattttatatgacgtattccaagttctttatacagtattttgttgaagatataattcgtactaagcaatgataatctagattcctgtaacgtcgtattcatgactttatgtctttattaaaagtttggttttttttaccacaactccattagatttgagtgaatagaaaggggtcgtctaatggagagataatatagcaaattctttaccaaacgtgtccaatggtccaaatttatatattgacaaaaaaaacatataattttcatgctaaataattaacaaatttcattggtggagagagacgtgttcccaaaccccaatggttgctaaacaatgaaccaaattcagatccaaaccggacaaatttgtattgtctgaatttaaaatttccaaaccggctttccttcgttttaccattaaacgatctaattttggttttaaaattataatttgagaactcagacgttttgttacgttagtactatgtggtggtcctcgagtttacaatcctcgtttccataatccgagtttaaaaataaagttaacgacggaataattattaaatagtgttctaaaaagcgatttaggctgtcgtttaggcttctgactaggcgtcatacaccatctggacaactgtctagcctgcctaagatcgtgtataccttgtgttagtctatg

SEQ ID NO: 41448 - DNA, 471 bp, Arabidopsis thaliana landsberg
tcacgatggcgacactcttagggccattgggtgacccaatccctagcaccaacagagtatttatggtggggtggacaacaccctggtgtatggtgggtcatcatgtgaccatggcattccggccacacattcccacggcgtcgctacggatccaaaccccgacatcaccccgccccacttctacaaactagaattccccacctacgatagcactacaggtcccctccactggctcaatcagtacgaacatttcttccgaggacaacagatgatggcctcagatcgcacatggctagcctcttaccacctcacaggcgcatcctagatatggtactatgcccttgagcaggacgagggtatgccctcatgggagcactcttgtgagttgtgctctctctactttgggcaaccgtgctgggtacacacctctccgagctggcgtgcctttcgttcacatgcacagtgcaggac

SEQ ID NO: 41449 - DNA, 663 bp, Arabidopsis thaliana landsberg
tgacctggcaggaggtgtttgatcttggatgacgaacatcaacacatatatacatatcagtgatgcactgatactacaaatagttgaatgcctcaaagaaacatagagagccaggaagaaaacatgcatgattaaacataaccattttgtcacctgataattgactcatacatcaccttactgcctggtgtctgctggcctgctgtaaatagaacatgctctgcctagctgaaaatagaagagacatggtacagtttaaagccataatgactagcaagaattttaatagcatatctggatggcttcattgtgtccaacagaaccatgtaaagtaactgggaccatctcctgcaatgaatggagatgtaactgggaccataacattaggagatggcaaaagaagtggtttcaggagaaaataacctgaaagagcatcttgactgtcaaggtcgtgtcactgcacattaaacaaaatttgctaaatggactgtattatataaataaaatgaagtgagtataggttaattcaacaaaagatactgcagtgttgattaaagaagcctactagtcacccttcactcatcgcttgcactgtttacataatatagtttaaaacagaagataggagatgaataaggtgctgtgctgatgatagctcgtaag

SEQ ID NO: 41450 - DNA, 636 bp, Arabidopsis thaliana landsberg
cgaagtttggaaggttaatctgagttttggtcactgatttctcaggttacaaaaaaaaaaaaaaagagttcccgatcgaaattaaaaatgaaaatattgttatgatcagaacaataactttagcgaagtggtagtaactcaattgccgattacaatttacagccgttgatgttataaatagacaactattgaatgtattacaacacaagcataatatagtgatctttaatgtgtttggacgtaagaaggctgataataagaagatgcaaatttgtacatgccacattaaaaatcacgagcattattatgtacattcataatcacgtataagcaaacacatctcatcattgtctttttttaatgaattggaccgcaaacatcaaaagttgtctactttaacttaacgaaaaataatactactccaaatcaaaagtaaacatcgaatgtagacatgttttcgatattgtatttatgaaatgatcttatgaaaatacttacgggtgtgtgtgtgtgtgtgtagaattattacccgcaccaagatcattttataatattaattgcgcaatatttgcatacccttgagatcggcgagtatggacgtgaactaaacattgaatttttattttgcttgataaa

SEQ ID NO: 41451 - DNA, 457 bp, Arabidopsis thaliana landsberg
atgaggggctattgggctataccataatgataacaaaattaaaggttgggtatgaagtcaatgtcaataagagagtgagctgtcctctaccataagtcttcttctgtcccttaacctctttttctttttcttatcttagcattttgtgctttgtctctttcaccaaagttctctatttcatgagaccactaacattctgacgactaatgaatgattcttgttgttccaattacctttaacaaaaaggtcttatgtggttcattgacgcatttgtttatcacattaccgtctaatttattaaggtatatagttatcatgtaaaatagtttcaaggttagttacatacgatatacatggacactataaaatatttttacaaatgttttaattatgtgatggctgatttcccatttttctagtaagaaaaaccttatgaaatatgatgaatttactgttt

SEQ ID NO: 41452 - DNA, 534 bp, Arabidopsis thaliana landsberg
gttatagcttatatgtcaggagaaaaagttataagccgacttgaattgattctggttattgaatgtcactagactctagagcattggtctttttactcatcgagtcattgggtaacaaaataaatgttgtgtcttaatatatcaaccaagccaattagaattatcaatggttaattatgagaaaattaaagaaagattagaaagattgttaagggcaaactcgtaaaaacgacattggaaaatccaaaaacatccgtagagattcttcttcttttttatattctattggatcagcctgcagaatcctaagcaacaaccatagcattacgtacctaaattatcaaatgaattacgtatattaattaagaccagtagattttcaactttataattcatgcatacaaaacatgtcaggattattaaaaaaaaagatcacgtatacttttctctacaggaaaatagcataagaatattttttactacagaataaataaagaaaaagggtcaataaatagggagaataaaaaagcagct

SEQ ID NO: 41453 - DNA, 451 bp, Arabidopsis thaliana landsberg
tttctaattcagatttcaaatcctctttgaataatgatcatttagtagcttttagagatgcgaggcattgctctattgctttgtctctcatcgtaaagccttaaaaccactgccgcagtttcctcaattgcactctctgtcacttctgcaaaacaacacaattcatagaaagattaaactttgtcaaattctcttaaattcttgatcatatatatatagtcttaccaatcactggccaagtcggattctctgcaaagattttcttggcaagctcaagctcttctttaacagaacctaactcagagtacttagtcttaaaactcgaaccaagtccaagactcttggctctagcctctcttatcccttgcaacaccaatggattaatcatcaaaccaaaaacctttctcgggtcgatctcaaacaaagtcttgggaagatcaacaccgttcac

SEQ ID NO: 41454 - DNA, 187 bp, Arabidopsis thaliana landsberg
gcgttgaatatgtggatccaatttatttgaaacctcaaaaatcgaaaacttattaccgggttgtatggcttaatccggaccttgttttctttcataaaaaaatccgaaaatagaaacaaagtcatttctcagaacggtaaagaagacttgtgtgcttaagtactacacacctaaattgtcatgaaaa

SEQ ID NO: 41455 - DNA, 595 bp, Arabidopsis thaliana landsberg
  unsure (1)..(595): unsure at all n locations
agaaacaggcaaaggagtcagttctgtcctaaacgattaatttaaccctttttcactaacctcattcaactacataattaattatgtggtttatgatccaccgtggatacaagtgttgtccaattgagggaaaagacagacttggctcacgttcttcaattaattgatcgtcttttagtttcatggttaattaattttcaatcataagttcataactgaacaccaaaaagaaatatcttgtggtgcacacgaggcttattctttgatattagaaaataattaaaatcattagtttnnnnnnnnnnnnnnnnnnnnnnngttcgtacgtaaaatagtcggtgcctgaaagctccgtgctacgaagcttcctcatacgtacttaagtatgtatttattcaataatcatttgatgaatatggggtttaccaaaaccttaagcaccattaaattcatgtcattaaggggaagttaacgtctcgagagtcgagaatcataattaactgattaatataatcctgaaaaatggagaatcatgatctaactagattcctacgtacatttgtacatgcatattacttttctgtctcattttaca

SEQ ID NO: 41456 - DNA, 534 bp, Arabidopsis thaliana landsberg
  unsure (1)..(534): unsure at all n locations
aaatgtccaccaattgttgtttttgaaactcctgcagaattttttttatttttagaatatttttgttcattttaattttagaaaactctttatttttatagaatgtctaacaaaattctagcaccaaataaatatatatctgtgaaatgaatcatacaaataattacgaagacaggggtgtttcaggaattttacctcatggattaaacagaaagcggagtctgtgacacgttcttaaactaagcgccttggaaataaaaaaaagttaagggtgaaaccgtaaatacgctcgtgtttgggttcataaataagcggccacctttattttatgttctgctttttttttataattaaaaggtcaaacacggcgattttgactctttttaatcactttcgtcggacccaactaactaatttttttgacttcgatacaaaacaaccaacatatgtaattactcaaagttatttgctttttctgtcaagttgatgattntggttttgcactataaaacttctaccaacacatcgataaac

SEQ ID NO: 41457 - DNA, 721 bp, Arabidopsis thaliana landsberg
ggattgaaattaagctcactagtttttattttcttcacataaaaaaaaaacaaaatcactatatcggcaagttaagttttcaatcattaaaacctaaaactaaccacccaacccaccaatgattaaaactatatcccagtcccaactaatcacaaatttaaggtaaagtgtgtttgaatcattttttaagaattttagacaagctttttcattattatcttccttttagataaattacacatttatattagcttaatattttgtttgttttagtttttagctaaaccatatcattcatgtagagagaaccaccctaactgttatgatctattcgactcgtattaattctcatcaatatagcaaaatattaggattgatcgatccacatatttcagttcacccactttaatatatttcaaagacagtttgtaaacatttattacggttttcgtagatcttgagtatttgaataaataatgatatgattctttgtatcttgtacagttgcttatttgagtagacattaattacaaatcaaaatctgttagcataaaatatacatatatcgccgtttttcttcatttgtaggaaaccaaataaagaataaaaggcatatggcactgatggactaaactggcataactatgctcgtgtttattggtacaagtcgctcaacctgaggaatcgagagttgtaatgatcactatgtgactgtgttgca

SEQ ID NO: 41458 - DNA, 402 bp, Arabidopsis thaliana landsberg
aaaatttaaaagccaattaagattttcttttgaaatttatttacaatttcttgttatgagatctacattaacgttattatatacagtaacactcagttagatattaatctcttgtatttagccaaaccaaaaaccatcggatcaatgcataagttttggaatttctagtaatttatttccagttaagaatgtttttatagtgtagcgtagggctagaagacgatcctgatcaatgcaactaatagaatctcgaacatcaaaacaaaacaaagaaaattatagagatcgagttcatatctcggagcgacgtgtatcgatgatggtctgacgcacacacgtgaccgaccaagcatcacgtgctgctgaatgctgatccatctcaccgttgctgtgctgacctga

SEQ ID NO: 41459 - DNA, 525 bp, Arabidopsis thaliana landsberg
atttttggaagagagcctacatgatacgacaacaatggcggaaagatcattctctcagctcccgatctcttcttctcacattggcagaaggacaggaaacacccggagagggatatttccggtatcggagtattggatccatgcaattccggtgatcgtttttctctgtttcttcaccctctggattttctcccactcaggttccttatttctccgattctttaatctaagaaaagattttcccgagaaaatgagtctttctgattttggttttggttacagtgagcgtcatgaacgatggagagataatgtcgatacatcgtcttgagaaatccatggccgtgagaaacgagtctcatgtcagtttagcgattcttgcttcctctgctgtttcaccagcctcctcagctctcgtcgccgtcgtctctaccaatcagaatctcacaacgcaactcaatcgcagcaaaatgcaacccagtcggtgaacaaagcaaaacagccacacgcagtctaatctctgaacgg

SEQ ID NO: 41460 - DNA, 949 bp, Arabidopsis thaliana landsberg
tgagcaaaccctttgattttaaggtaagccattgctcgatttgcataagtcacatcatttggcgataaagcaatgctccgagagtaacaatcaatcgcctcattgaacttcttctgcttgaagaattcattaccctgtattccaagagaggtccatgagaaagattgcatcacgagaatatcacataacaaaaacaaagcttgaagaagagaaagtacctgctccttctctgaactagaatccaatagactttctccaatcaaactactcgacaaatccctaatggaacgatactttttagcaaagtcatatttccctgacccacttggtctgaacgtctcactactctgaaagttcaaaacaaggaatctcataaggatgcattaagttttacaaatgagagcacttctgtatatacacaaaagaacgaaccggattcgacgaattagcaggttgttgcttaatcttcttgtctttatccttcaatgagagttcccaatcctgcaagtcattgaaaaatccctggaaatcctggaaaaaaaaattcgaaaccaaacgatgcaagtaaacatctaattcgttcttagtctatatacataatcgattgtacaacagttcgttgaactaacaatctccatgaaatctagataacgaagtggagataaggagcacgagtcgtttcgatttttttcctttttcattctcgagtaaacagagattttagctagagaagattcatgtaagaaagatgaatcgagtagaaatggttacctgagtttgatcgcggccgtgtttgctcggtgacctagccattctgagagagattctccggcgagcaaatagtcgacgagaaagagcaaagatgattctagaagaagactgagaaagtcacagagttcaattttgaactacagtattggacttgggctttccgatatttgagtaatgt

SEQ ID NO: 41461 - DNA, 478 bp, Arabidopsis thaliana landsberg
  unsure (1)..(478): unsure at all n locations
cgaaaaataccaaagcatcaacacatatccgagcttcaaatcctaccagttaccgcattatttcactgaaataagcttttctctaattattttactcaaccctttaaagtcgactattttcgtgtttaacgtcccaaagcaaatcatatcctctttttttttttgttacatcaatatctgtattatctatattactcactccgcacgaacgtctcacgcttccataaatatctgcacgacaaaatatcatcataaaaagagaaatctaaaactacaaaattctaatatattgtattaattaacggtaactacgatagagacctaattccccaccaccgttctcgtatttttcacgcgtgtatgtaactttataaccctacacgcatgaagctctagtgcttcgttaaacaaaaacaaatatggnttattggttttttatctatgccctctcgtgacttattttttcaacaactaatcc

SEQ ID NO: 41462 - DNA, 137 bp, Arabidopsis thaliana landsberg
ctctggtaatcacaactgtgcttactctagatttatctcaagttttcttttgttgaatctgttgatatgaacacaagtcattacctttatatgtctagctaaatgcaattgggaaaattaacaacttgctgaattga

SEQ ID NO: 41463 - DNA, 544 bp, Arabidopsis thaliana landsberg
cctaaatgctgggtttagtaagtagatagataacctttttattctacttgttagtttatttttaacgaaatctgaattgttgaaatatagctgaaccaatgacccaattcagtcttcaaatatcactagcaaacgtaattgacatgaccatggcatgtttcaagcatattagatttcgatacgtcttaacttcttaattatcgggaccagctacatacatttttagtatatgtcatcattatctttacttctttttttgtatcatcacaattatttccattttttttttttgttcttcttcatgtgcaaaagaagaggtactttgataagattccagtctataggattcaattaagatactaattaaatacagtatatacagaatcttgagttgtccgctttcaagattccaatacagtttacaaaattctgaattagttattcttgttgagtcaatacttttaaagaatgttgaccaaaaaaaaaaaaaccaaagaaaacggatccttattttacggtctccttaaccttaatatagtaaaac

SEQ ID NO: 41464 - DNA, 459 bp, Arabidopsis thaliana landsberg
  unsure (1)..(459): unsure at all n locations
cgagacatcccgtcccatggcgtcagtgctcaagcatgaggcgagtgaagcacgcaccccgagcgaaaacctctcaaagttgtgagtgagtgattaaacaaggccaataatacatgcatacaattaatcaagcatcatgcatgcacctacagggaaattaaggaagaaataatatataggaaaaagatcgtttggttgttgctccacagtactgccgctgaagaagataccggtatcgataccagtgatgttacatgacagccactgcacatcactccctcagacaacactccacggctgtgtgggccacgcccttgcaagaaggactccccagctaccgactntgtcaccggaaagatgcccagaagatccgcctcaataatgcatgcaggtgagagacacaagcaagcacgcatggcgggagctagagaaaataccaaaataatcaaaaaaaaacac

SEQ ID NO: 41465 - DNA, 902 bp, Arabidopsis thaliana landsberg
gctaaaaatactccgtaaatacgcgtgttggcatgaacacgtgttcatgttgtgtgtgtaatagaataatgggtccctagaatatcagaaacagacaagcaaacgagtcacccacttgcttgctactccacgcgcctttaaccgcgtctgccttccactctcttcttcttatcccgcgttctttggaacttggacttgggttcgttgacatcaaactttgaattttatttgctaaaaatgtgatctagaagataaagaattaagtattttgagattagtactaacctagtcctaacttcttatctgaatttgttaaaaatcggaggatttttcacgtgaacttatctgaaaacgataaagactgaagccagaaggttataattaaccgaaaaaaccgaagtagtcaattcaatacccgaaacaaaagaccggaatctcgattacttaaccgaattaattgaccacagaaataaactaattttaaaatagttgaacgaagaagcgcgtgagattttccatataaagaggctcacaaaaccaatcctctttcacaaatcacaaatcacatctcttcatcttcctcgttttatccaaatcctctctcagacttcatcaaatcgtttctctgcttccgatccgaaatttgcggcggagaaaagaagataacatcaacaaaaaaatgatttctctattcatctcaaacttttcaaacttatcaaacttatctccgacatttgataacatgaacatgaacatcccatcgaagaagatcgtaccggtaccgacaccgagtgagaaagttgtctctttggtatctcgaacccgacgagatctgcaacgttacaacaccgcagggtatcgtcaagtcgtcgggtacgttcaattttacccaacccctaatt

SEQ ID NO: 41466 - DNA, 330 bp, Arabidopsis thaliana landsberg
acgcccgcgcggcccaggcggatcctccaccgcacgctgccacttacacccggggcccggctgtcagtctcgtcgcgcgcgcgctcaccctcacgacctctgacctgtgggaccgacactccagccgctattcgatcgcgcgcgacgctccggtgtgtctgacaattgggccggcttcgtcagctccatccgcaaccgaaatcccgagcatggcggagcttgccgtcgatcgcggattccgttgttgaccaaccgactgcgcataaaaatgggtcgcgcctcgctcctcctatcctttaacccaactcgcgttcaccgaagggtcgatag

SEQ ID NO: 41467 - DNA, 470 bp, Arabidopsis thaliana landsberg
tatcttcgacctcaaatcatatgttttataacgcatatgatcggtctgcttaatgattaaatggatcttgtataaacaaaaaatggcatttttttaataatttgttgaattacatcatagagcgtaaataattaacttttatgtcaatcatgcactcgtttaaaatgaaatgatatttctatacgtggtagtgtggtactaattaagtaattatattggctatatcatcaattgctcaactctacaaaatttcgttaaagatataaaaatatacattgatgacaaaaaaagaggtatacagttgtatattcactctgcctatttcgtagccataggaatcgaaatgaaaatatccaatatttttggtattaaaggcaaagttaatacggaaacaatttgatttgacaatattctaccgaaaatttgaaaagtaaattctttcaaaggaatttctatttggcttagtattc

SEQ ID NO: 41468 - DNA, 758 bp, Arabidopsis thaliana landsberg
tgtatagtataatactctctaggtaatgattaaaaaaatctgaacaaaatcgtctaattgtggctttgtgtgtgtttaagcagagaagcaatatgcaagaggagattccggagaaatagcaaaggaggtggcagatcggatatggtgaaaccgtttaatatcataaatttttcgacacaagacaaaaacagtagttgttgttgtttcaccaagtttcagatcgtgaagcttctcttgtttatccttctctctgccactctcttcaccattatctattctcctgaagcttatcatcattctctttcccactcatcttctcggtaaatctatttcttttttccatcaccaacatttacattcttgacctcaaaaatgttcacatgcaaatttttacttttgcctctatctcttataatactatcttaaaattatgaaattagatggatatggagaagacaagatccacgttacttctcggatctggatataaactgggacgatgtgactaaaacccttgagaacatcgaagaaggccgtacgatcggtgtcttgaattttgattcgaacgagatccaacgatggagagaagtatccaagagcaaggacaatggggatgaagaaaaagttgttgtattgaatctagattacgcagacaagaatgtgacttgggacgcactatatccagagtggatcgatgaggagcaagaaacagaggtccctgtttgtcctaatctcccgaacattaaggtacctacaag

SEQ ID NO: 41469 - DNA, 181 bp, Arabidopsis thaliana landsberg
gggccaccgggaggacgccgcgccgccactggacccctcgtgcaccgggatgtcggcgtgcggcgtcgtctcggccggcaccatgacaatgtccatgccttgctgttgcggcattggcggcttctgctgtggcggcgagggctgctgctgttgcagcgggggcggagtctgcgaggctggt

SEQ ID NO: 41470 - DNA, 523 bp, Arabidopsis thaliana landsberg
  unsure (1)..(523): unsure at all n locations
aannnnnnnnnnnnnnnnnnnnnnnnnnnnnnnnnnnnnnnnnnnnnnnnnnnnnnnnnnnnnnnnnnnnnnnnnnnnnnnnnnnnnnnnnnnnnnnnnnnnnnnnnnnnnnnnnnnnnnnnnnnnnnnnnnnnnnnnnnnnnnnnnnnnnnnnnnnnnnnnnnnnnnnnnnnnnnnnnnnnnnnnnnnnnnnnnnnnnnnnnnnnnnnnnnnnnnnnnnnnnnnnnnnnnnnnnnnnnnnnnnnnnnnnnnnnnnnnnnnnnnnnnnnnnnnnnnnnnnnnnnnnnnnnnnnnnnnnnnnnnnnnnnnnnnnnnnnnnnnnnnnnnnnnnnnnnnnnnnnnnnttcttctttctccctttctttctctccttttttttcttcttttccttctttttctttttttcttttttctttttctttctctttttcttccctctttttttttctttcttcttctctttttctttcctttctttctcttttttcttcttttcttcttttttctttcttctttccctttc

SEQ ID NO: 41471 - DNA, 658 bp, Arabidopsis thaliana landsberg
gttgtgttagaaataatcctatattttaaataaaataaaatggtaaataatatatatagaacgtggattaaagattcatcgtcaaattttacaaactcataaattgaacaaaaatttctcaattaaagatttaattaagttttttatacaaaatgaatctcacaattatcaaaaagaaagctacaaaaaaaaattaaaaaaaaattaggaaagtttcaaacatttatataataatcaagagttgattaggacaaagatgattaggacctaataaacataggtggctcctaaacgcatgggccgtagcccccaagacagtgcatatgggattgtttaagacaaaaccatgtttgctttaataataattaattttagattatgactatctaactttcgaagttttgtgactaaaccaatcccgtcgattatggaaaagtatattttgaggaaaaatcttatttttccacttgttgaacaaaaaaaaaacttatttttccacttaatatgccgtaggtgttaaaacaacttattttcccacttattcaatttagctaaaaaaacataaatttctcgtctctaacgaaagtagttaaacctttaaaactaaaatagctcactgacttttgctgtcaaaaagaaataaagatcactgacatct

SEQ ID NO: 41472 - DNA, 548 bp, Arabidopsis thaliana landsberg
tatcacgtttgtcaacactaatattatactaccaaattgctacaatttttagggtggggaaaaaaaaaagaattcatggtaagaaatgccaaataacgataggagataaatgattatataaaagctatcatgatcatcacatggctgcagagaaggccatgtgattccctcttttattgtcaccattttttcagggctcttatctatatttccatataatgtccatactatatactttaatggttgtgttttaatctatagttcgttactacgactaatatatgaacagcattttaacgttctattattcagcaacagaatattggtctaattatttgtatatctcaattattagaatgcatttggttcggtttcgggtacgtataaggacgtaaacaaatcgtccaaaattgaaatttcatgtgcttacttaaaaattgattatatatataactaagagaattcaatccctagacttcttaaaatggctaatgtattgcagtatattataaaaacattaaacgtatatcttaagctagcgtaccaag

SEQ ID NO: 41473 - DNA, 737 bp, Arabidopsis thaliana landsberg
aaaacgctccatctccagacatagtcacttttctctgattttagaaaacaaaaagcctgacgcgtatacttggggtatcatataggcatatcccaacataaaaaacctcctctcatttatactatacttgataatggaaaataaatataataatcattacctatgattatacaaattcacaactaataacttttcttctggtctgaatcaacaactgtatcataattctctcaaatatatgatcataatttagaatctaatatatctctagtcttatacattaactaaactttatcataatcgtgtaactaacgttgactagataccgatacatccaaaagcatgaatgaaccttacatccttgatcagcgtgatcctggccatgatgaaattccatggaatgaagtacacaaagggaatatatgatactacataaaaaataataatgtcaattatatttggcatatctatatgcatatgaagtttaaaatgttcattttaaagataagattagattacatttcacataactatacttctaatctacattaatattgactcgtgtgtcatgcgttattttttgttcgtagatataaaacgaataatatcccatgcatgtcaatatcaacaaagccggaacattatatataatccgtatatatatgagtcataaacctcatatgatttgagggcaaaatacacattattttcgtttactaacaaaccaaaattgaaaa

SEQ ID NO: 41474 - DNA, 776 bp, Arabidopsis thaliana landsberg
  unsure (1)..(776): unsure at all n locations
cacactaggtagatgccggtgcgttgcgacggcatacaaaatattaaataaaatgataatgcacaactaaatcagttcaaaaagatatgtaatgctaaaaggatagtgtttgtagatgtcagagagcgggcggacgctcctggatagcgaagcgtggagaacaagcgagcgggtaggggcgcgacgcacaaaaaccacgactggaactattaaaagtagtgcattatagtagtaaagatagtagataaaatacccccacccagttgttaacatgtcgatctaataattcaaaataccacttttaacgatgggataaatatattagttcagatttccagataacaaaaccacattaaattagccaaagagactatatgattctacacttctacataaaataaaataagaaagaaaattcttgttgaaagagaagtgacaacaataatgagaaatgagaagagaaagaaataatctacagtagggtctatcatatgaagttcgtgaaataaagttctagcacaaaaaacgagtttgttgaaatcaaggcaatatttacagttatacaatacacatgttgnnnnnnnnnnnnnnnnnngctaattagcagtcaaactcatcagcatagactaaacaaatggtctcaagctttatgctgtctgaacaatggaaaagcacacacgcaagcaattctaacatgccctagtagttgacacaatattcaaaggaacttggttatcccacggcaggaagtctgaaacgttgtagttgaaaccata

SEQ ID NO: 41475 - DNA, 677 bp, Arabidopsis thaliana landsberg
  unsure (1)..(677): unsure at all n locations
aactatgtatgtgccaatttaccatcacaaaagatttgtttctagtgaacgaaacgagttacatttatataacgaatccaaacgatagttgatttatatccgtatttgagtacgacttcaataaattagattccttgataccataatttttagataaaattctgaatctgatgacaaaaaaaaaaaaaatctgaactgaattttggatgaatccgttaaatgaccaaattggagaaacttttttttttttgttaaaggaaattggagaaacttgaataaaaaaaaagttaggaggtccatgcaataatatttagcacaaagacagaaatccgatttaagatcttcaggacccacaggggttccaaaagaacacatcaaatcctttccggttgttggcttacccatcgactttccggttaccacttcccacccatctcccattgaaatataatattgcattaaaataccttaaaaaaacttttagttatgaatatacctcgaagttcccaaaattaattaaacacctccaaaccatagacctcttaagtcttttagacttttagtagagatgggcatccgggtacgcgggtcggattttaataaaatttgattggatatgggtctttcgggtaaanaagttaggacacaatangataaatttcaatctcgggtcgggt

SEQ ID NO: 41476 - DNA, 521 bp, Arabidopsis thaliana landsberg
tattttcttattatcaatcatatattaaaatttgacaatacgagtttcttttcaaggtgttcaatatttagttgaatatgtgatattttagattttactgaaaaatgtttgtgtgctagctagactggtccaaaaataatggaggtgcaaagcgaatttaaaagttattatccttctaaaattttcaattttcaattgaaataggatattaatatattactattattttttattttaagtaggatatatttaatcacaaactaaacaaaaattgtaaatatatgaaatgatctaaaatagtaatgattggtcttaagcgaattttcatatcattttgtctatatcatcttattttaatatttttatgttcggatagggctgtgacgcttctctcctcattgattcaaccaattccgagaaaactgctggaccaaacggaagcgtcagggaatttgacctgatagaccggatcaaggctcagctagaagctgcatgccctttcacagtctcatgtgctgaca

SEQ ID NO: 41477 - DNA, 535 bp, Arabidopsis thaliana landsberg
tgaccaatacaaagttattattctataaccataatttataatataaattttaatattcgttaatttaacgaaaatattttatggaagaaaagaaattagttattttcgaaaacactctgaattataacattacctctcagcttgtaaatggcatgcttgacaaccctctcacatccactgcaacacatccttactttcaggtctatcgtctgttaattagcaccattcatatattacaaactaattagaactaatatgactgcttcaaaaacaattagtattaatatgtgatatatgtccataaagaaaaaggtaattaattagaagaataattatttaaatgaccaactctctgctgaatcagccaaaggatattataatcacatatagtaacatccactagtgagacaaacttatgacattccgtttcagttttggccgattcccctaaacgaatcaataaaaattgaaaagacattttttaacttacaaaagagaaaaaaaaaatgagcacaatgagtactttatatttttt

SEQ ID NO: 41478 - DNA, 646 bp, Arabidopsis thaliana landsberg
tatctcgaatagtgataacaaaattagcaatacatacggctagtgaaatgttgatcgaataaacggcactgatgtaatgtacttatcaattctgataatcttaattgtattgtttttctttttttcccacagtattgaactagacaattaaatttaaagtaaaattatacatttctttcgttgtgtattaaagtaacatgcataatatcattttccttcgtacaatcctccaaattgacaattgatgaattactttgtcaatcgtaaatgaatttttctcaagtctgtatactattttcagggataaacaggtacaggtgtcccaatatatgttactgaaacacatgcgtaaattatactatatggagatctatcggttaattattgagagaatctaagaaagtttttgagtacaacagtcctaataatatcttcacataccatataatatacatatatacatatacacaaatgtactttttaaaccaacatcagcatacgtatatcccatcaggaaacttagacttttgggaattcatggtatgaaaaccaaaaccaaatgacaacattcgatttgatactcccgacccatggtaaagaaataacaaattccaatatatctttcactggactttctgaggcacat

SEQ ID NO: 41479 - DNA, 329 bp, Arabidopsis thaliana landsberg
ataataaaagttagtaacacaaaaaaagaaaagaatatttatttatataatatatatatatatatatatatatatatatatatatatatgaatatacgatataatgattatatagaagtcttgaatattaaaaagagtgtggttcatcgtaagccggtgtggaggtagacaagcacaaagcacgccaattatgaattacaatttacgtaatggtggtttcttgtttacaaataccaatttttaacggaccacaattcagtctccatcctttgaggttaaagattttagacccaaccaaaaaaattgatcaaaccttaaattaaatctct

SEQ ID NO: 41480 - DNA, 742 bp, Arabidopsis thaliana landsberg
aacaaacttttgtattttacaataaaacttttctctttttgcatctgaaataattatcttttaatgtagtaaaacaaaatttcctttttttttaatgtgaagtttttacacatttgcatgtgcacgtccttctctactaatcatattaagcatggatgtaaaaactatgattaacaaataattgatctttttgggggtactgctctacttaataattgcttatatattgcttatatatatatatatatgtgtgtatacataaaagagtaaaataaaacatgtgtggttcatagtgcaaattttgttcactttcatatttctttggtctttttgaggtagtgttctctatagactatatagacttaataattgcttatatattttcaaaatatgaagagcaaaatggctaacaaccgaaaatatatgtattctttttcttttgaataaggttatgttctccggtgtctacgacatattattcgatttatttctctttctctctccatatgtatctctttcttaattagtagctatgtgttttgtttcatatttattacccactgtgacaatgagtaaaacaaaatatatgtggttcatagtccaactttcctattttgccatctgaaataaaagttttgataataacgttggttttccttttaatgttaatttcctataaatttgcatgtaaaagtccttttctatctatcatttttactatgtaaaggaaatttatttttat

SEQ ID NO: 41481 - DNA, 937 bp, Arabidopsis thaliana landsberg
ccgtgacaaaagaaaaggttttgagtatccaaagatatgttcgatcgtaaaatcaactcaccttcaaggcatttttcacttgagtagactcaggaatcaacctaaatgccacaccattaacttttaactggaacacctgcaacaaacaacacacacaaaaatcaaaaccactaaacagaagaatactaaaggagctaattgagttattgattcctccttataccttgctaagagcaagagcaacaacttttgaaccttctttcctcatacgaggatccatactcttcatctctttaagaagagtctctgcatcttcctctttacaaaacaacaaacccagagatttcccagaggaagtccctgaaaccaacacaaactcctcattcgaattactcaacgcgtaaacaggaactcccgccaatctctcctcaatagcatcagcagataatcctttcccgcttccgcgaatcggaaccgtcacctgagccctcgcaccaccaccgtcgtcagaaattctcgcccagacaggtgccttaccagaattgaatcgagagattctagaatctaaagcttgcttagcttgatcacgaaacgaattgagagcagagaatatattaggtttgttgttgttcgtgttggcgttgaagagaggattaagggtttgtgaaacgttgaggagtaaattggagcattgagattggagatttgagaaggattgttgtatattattaagctcgttttgttgtttcgatggtgggaaaatgtttgaattcatagttttctcgggaaaatgatgcttgagactctgagaaagagtagtgaagggtttttgaaaggctttgcgaagaagacgacgacactgaggaaaaagatttgaacactttgcttgaattagaattgtttttgtaaagaaaccctctaattatgcgatgtttcc

SEQ ID NO: 41482 - DNA, 630 bp, Arabidopsis thaliana landsberg
ccgctacacgttgtgtaagaggcagtaagtttgctaaatccacaatccgtcaaaccaatttgaggagcatggaagacgatgctgaagaggatgatgaaaggtcgagtattaaagccggtttgctcggttctgaggctgttctgatattagaactcaagagcatcgccgacgttggccttgttgggatgccaaacgcagggaaaagcactcttcttggtgcattatcccgagctaaaccccgtgtaggtcactacgcgttcacgacactccgtcccaatttaggaaacgtaaactacgatgatttctccatgacagtagcggatattccaggtcttataaaaggagctcatcagaacagagggctaggccataactttctccgccacatcgaacggaccaaagtcttggcttatgttgtggatttagcatcggggctagacggttgcgaaggactgacgccgtggcaacaactgagagatctggtgatggagcttgagttccacgaagaagggttatccgataggtcatctttgattgtggcgaataagatcgatgaggaaggtgcggaagagagattgaaagaacttaagaggagagtgaaaggagtgaagatatttccggtttgcgcgg

SEQ ID NO: 41483 - DNA, 425 bp, Arabidopsis thaliana landsberg
tgtttttatgatgctggacgttgaatgttcgacctttgaatcacacggtttctagtgtaatgttattttgttcgagatccttggcccttgaggtgggaaaggtaatccatgccattgctgtcaaacttagtgttgtggcagatacaggtgtttctacttctatctttgatatgtatgttaaatgtgacagattggagagtggtcgcagagtatttgaccaaactagatgtaaagatttaaaatcttggacttctgcaatgtcgggatatgcaatgagtggtttaactagagaggcaagggagctctttgatttgatgcctgaacggaatatagtctcatggaacgcaatgttgggcggatatgtacatgcccatgaactgggatgaggcacttggattttctcactttgatgcgccaggagattg

SEQ ID NO: 41484 - DNA, 507 bp, Arabidopsis thaliana landsberg
actatttaagtttcaaaatacatagtgtgttgagcagatatattgaaatttgtagtgtaaaatgcaaaaagttgaaagctaaaatttgcagatgcataatgtgtaatattgatttgtttttcgtcaaaactgaaaaagaaaaagttgaaatttgagatgatgtgatacatatgtcacatgcatgtgtgtgtgtgtgataggtttaaaaagaaagtaaaagtcaaatgttggttaatgcgagattcctttcacaccaacaaggcaaatacatgagatgagatggtcactgtagctaagagaaatagaaaaagagtatcgccgacgcaaaaaaggcttggccgagacaaaaaggcccaattttactactgtctaagaagaagagcatcgagaatttacaatgggctcaagcccaggcccgttttaaatagactcctattgattggttagcaagtaagaccggtttcaatttccgttgggtattgagttggtttaagttattagccgtcg

SEQ ID NO: 41485 - DNA, 752 bp, Arabidopsis thaliana landsberg
  unsure (1)..(752): unsure at all n locations
gagtccagggcaagttgaagagccaatctgttctaaatcaaaaataattcaatatttctttatcagctaagtgattccttcgcaaaggttcgtttacctttttcagtatataaatattatcaaatagtacaacaagacgtatatgtgaatctttttcgttggcaaaacctagatataaactatacctaaatgcaggcctgcctaaatgttgatataattttattatataagcgttgcttagtaagttgaaaactttaaagattacatgcttatcggtctcttgttttgcttatagagaaacctcaatattattgttctcttatatatattgggtaatcttaacccaatatttggtcagcatgctatagaactatcaaaactaatgactacgcgcatcttatttttttattttgacgtcaggcttgcgattatgtcaagtacagtactttgttttgattgatgtcttataaatcccaacatagaagttagaaagtttaaccgnnnnnnnnnnnnnnnnnnnnnnnnnnnnnnnnntaatatgatttaccctcttcccacgcgctattaagccgcgcgtgtgccgtcaattggcacgtcatcaccgacgagactcgccgcanactttgacgtgtgctggataataaatatatcgttgggaaacttaaagagtatgaattattattacttgataattttcccatatacttggtgtgtaacatcagcgaggtagtggagacatgacanatgagaga

SEQ ID NO: 41486 - DNA, 1850 bp, Arabidopsis thaliana landsberg
aaacccgggggagaaacttctacgataccctccacctgtagccgttgatctctctcctcctccagctgtccgagaaggagtttctcttactcttgagattatcgagaattacaacagtatgatggtttctgcttcaggagagaaaccggcttttgatcccgtcctctctgcactgcttgacccaattattaaggtacatgaaagttcaaacttatgaaatatcgtgttcatcgaaaaccatgattgtgcattgaagcagatttctcgactttctcaaatccgcagatgtgcgagcaagcagcagaggcacataaatcaaagaagagcggccaattacccagaagaagcagaacaagtactgactcaagccagttaacctcagtcgatgctctactctctagcagcccatccccaccacaggtatcatttacctatataaaaccagtacagtttatacgtcaacgttcatagcccaaaaaatgatcctaactttcatttcttcttatgatctttttgcagaacaacgaaacaccctcaaaaatattcctcatcaactgtttatgcgcgatccaacaaccattgctaagacacgatgttgcgtcccaatacgtaaccaacatcggattaatgatcgagaaccacataaacctcctcgtccagaatgaagttgacacactactccaaaaatgcggtctttcagacaaaatgcaaatcttccgctcttccacatccgaacttcccttgtctgaacgacaagacacttcacccgcgatgctatccaaatcctcaaggcattcttcggcctcgttttgggaagcgaaggctctcttcctgagtttgagcagatacaggtccctaaactcaggtttgattcttgcgtcagggtcgctaaaactttagctgaagcttacgaagttatataccaagctgtaacagatcaacaaaatggatatccagatccgaagtctctcgcccgacatccaccagatcagatccgaacgattcttggtatatgaatgtacgcttgttttttttccaattatctttcgaaattaatacttgtaaaccaaacaatcaatttatcttttcatctaaatactcttcttatatatatatatatatatagatatatatagatatttacatatcaggttcatcattttctttatctacagttagttacatctgaaggtgggcttcgttcaaaagcgtgtcatgtgctttgattccagttgctttcatctgatagagaagcttaatggcttcaatgtaaatcccattctgcatataacttgcgaccatagcgttccagcaactaacactagtctcgtccttactactcttaaaaaccttttccgcgtctttcaccttcccatacttcccatacatctcaattaaccgacatcggatcaaacaatctgactcaaatccgagctttatagcattcgcatgcacttgttgcccgcttctcccaccgtcactgacccatgagcatgcttttagaacattagagaacactgagacgttcttcttgattccatggttacccatttcgatgaaatcgcggattacttcttgaaactctccttctctgtaatcgttagtaactttcgctgcccaagcaacagtgttagcattagagagctggtgtaacacgagattagcgtcttccaaacacctgaattctccgtagaaacgtatcaaagaacccgatagatatgaatcttcttcgtctataaaccctagcttatgacacaaggcatgaacctgtttccctaactagaagtctctaatcatggcacaagctttcaaaacgcagcccaagatcctagacggaatcttaaagcacc

SEQ ID NO: 41487 - DNA, 475 bp, Arabidopsis thaliana landsberg
ccaactaatgagtacattttttccaaactgaaatatcgaaacctgaattaagcgagggaaccaagccggtttcaactctagtgcgtataagtctctaattgcttacatggttcaatccaaaccaagctacactatgcttgcacgttgtgttattttgtgaaggatgaaattataataacgaagtttgatgaattgaaatgaaattagtttcgtcacgaagcacacatccattaaaatttgattcttatattatattttgaatgaaattatataattttaccataaggcacgcatccattgtacaatgtacatgttgtggttgagggagtccacgtggaaacaaaaatgccacgtgggtaatgacaagaaatatagtcgttggtcgttgtgtcgtgagtgtgtgtgtttcctttttctcgtgcttgaaaatatgagaaatgtgacgtctcgttaagttcaatagacaaaggaactc

SEQ ID NO: 41488 - DNA, 567 bp, Arabidopsis thaliana landsberg
aattcatggcattaacaagcctggacagataactttgttgggttgagttggtatgaagtggtttgcatatttactgtcaggagatggaactgtcgttgtgggaaatggttggaaaggtttttgtgaggcgaatggtgtgatgttaggagagacttttgttttggaattcattcccaaagatgatacaaatcatgtatttaagttctacaccaagtagggagaccaaatacgtaaatgttagttagtactttttcaagatttctcaaatgttttctccggatatcacatgacaggttctgcatatatcatggattgatggactgcggagagttagctaaaacaattaatggctaaacgactgatgaatcatttacgttgaagtccactaatgatatcaggtagaaaagagagagttcaaaagataccgagaaacagtcttttttttgtccacaaagcctagcagtgaaaacaagaacaagtgaggtgcagagagattcatgaccctaacacacttgatgatgctagagattatcatctgtttcacagatggtttggtttatgtcttga

SEQ ID NO: 41489 - DNA, 690 bp, Arabidopsis thaliana landsberg
caattgcccaaatatttagcgtctaaccaattgatcaaatattttttatttcatcaatcgataaattttaaaagttacactaaaattgcaccacaacatcaaaaatgataagaaaaaaattaaaatgacgaagacatttttatgtcattgtagttctaatgcggccaattgttcgaattgtttctatcgaatgatattacatataccattttgtttttcagcattacatatacaatttttctgccaccaatatgcattataatgaatttaattcaggtaataagtggtaagtggtgacacatctattatactcactaattttatattttatctacatatactatatttagactaacaaaattataaatttcacaaggttaaatttttttctttatatatatatattatttaaacataatgcattatcatttttctcttattatatttttaattgaaaaatgataaatatttctctaaatttttctacctttacatctcataagctttatgcttttctagattgttgagagagagacaaagaaatactctggtgatgtagcaatagcagtctatgttgatcgttgtgtaatcgtgagcttactttgagcgaacgatttgcatttcagattgtttagtatttctaaaataaacaattgatttttctcgcgatttactttataagtttcagtt

SEQ ID NO: 41490 - DNA, 460 bp, Arabidopsis thaliana landsberg
aacaccctgaattggtgggccatcaacctcctggggtccaatcatagggatgtcgcccaaggcagggggcgggggcattaaagttgggcaccggccccacagccaccagatcatcaggaatctgcccattctgaatctgcccattctgcagcggagcaccatgaatgtgaccagaagaactatctgaggacaggtccgaatgcggattgctgacctgttgctcgtcaggtggcaggtccagatgaggctgctgcacaggcggatcattaacaatccattggtcccaatatccttgaatgttgtctgctggctgggcttggacattgtcttctggcgggaaattaagatcccagcccacagccggcacaggttgacccaaaccaaaaaactcaagagggagctgctgaccatcctcagggaccactggcaccggatcctcatcttgaggcttgacccccag

SEQ ID NO: 41491 - DNA, 453 bp, Arabidopsis thaliana landsberg
ctcatcccggcccagttatgtggtcggagagaatgatgaaggtgtgtgatgagcaagatggagaagcagggcacgtgcattactagctcatatatacactctcaccacaaatgcgtgtatatatgcggaattttgtgatatagatgtgtgtgtgtgttgagtgtgatgatatggatgagttagttcttcatgtgcccatcttcaccatcatgaccactccaccttggtgacgatgacgacgagggttcaagtgttacgcacgtgggaatatacttatatcgataaacacacacgtgcgtgtttgtgtgtacgagctagcctagatcgcgtattttgcggaagtagataccctctgcaaaagtacctatttacgtacgttcgctaaggaagattagtcttgcgaaatatatcagggtgagtctattaacaaagctttatgtgattatatatatg

SEQ ID NO: 41492 - DNA, 449 bp, Arabidopsis thaliana landsberg
tgaatccacaaacgttgattagtctacctatatatacgaaatctttgatttttctactccacatacaaaaagcggaaaaaaattatatcttggctggtgctcagtggttagtcttgaagagactttcatactctttttggcgtacgtgatttcttttttctagaattttagagtacgtcattttctcctgtacaaaaataatcaatcattttcctacccaaaaaaacaaaagaatcaatcattttccaacagtaggtaacccacaaaaaaaagaaaatccaacgataatcgattttcttttcgtttcacaaaaggacatccatcattccttaaagctcaaattattttccacgagttataattatgaacactcttatagatttctataatagggagcatttcttggagggacaaatatgagattttcccatgcgtattgatgaactatc

SEQ ID NO: 41493 - DNA, 678 bp, Arabidopsis thaliana landsberg
actaaaccgtgtgggtttacctgttgttttcggttaatgttttattcgtacttacgagaaaacaaaagataatgtaaacgtagtaaaaagctaagcaatacataattggtgaggttatccattatcgaaacgcatttcaaaccattatagcaattataaccacaaagattgttttcgtctataaatttgtaaaatgtcaagaaatactgaaatacaaattctagtcagttatttctccataaaaactgattattaaagaattagagatacgctgattacgatttaatacattatggtattactattttagctttttgatgaagaaccataccgcaacagcttagcaaaaaaaccataccgcaacagccaccaaggctataacaaccgcggcaccgatgcctattcctagcgccaccgcaaaatccatttttcccttacacttggtctccttgccaaaatatatgtgtgttttgggggaagggtttgtatattttggaaaaatatctagattgtattgtctaggaatcaattctttggcttgtttttattgatgtgtattgtatcctttatgttatagtatatttaattacacttttattagttgtcgtctgcttttctccatttattttatattttatttatttttatatatttttttaatttctttttattataata

SEQ ID NO: 41494 - DNA, 856 bp, Arabidopsis thaliana landsberg
  unsure (1)..(856): unsure at all n locations
tactcataaataattgatcgttaacgtgcatacaataaaattaacgaattccaacatttctatatattacatttgactcaaatatgtcaaacatgaatctcacttaatgtcaaacaatatgttattaaatgaagtactaccgttcggaaaaacgataaatcattaaatgacatgtggtagattaggtttgtaaaattaaacatttcgagagaaattttttttaataacggtttataacgacaacaataaatacttaatcactaagacgacaaaccattaccgttcggaaaaacgataaatcactaaatgacatgtggtagattaggtttgcaaaattaacattttcaggaaattttttttctaataacggtttataacgacaacaataaatacttgatcgttaacttgaccatacatagtattaacgaattcgaacattccaacaaaacccatttgatgcaaatatgccaaacatgaatctcatttaatgtcaaacgacatgtaatgaaatactacggttcggaaaaacgacaaatcactagatgacattatggtagatcaagtttgcaaaattcatattttcaagagaagaaattcctaataatgatttataacgacaatagtaaatagttgatcgttaacttgaccacacttaaaattaacaaatttgagcattacaacaaaacgcattttatgcaaatttttcaaacatgaaccttatttaatgtcaaatgatacgtaatgaaaaataaatactacgtacgattctagaaaaacgcaaatcactaaatgacacgtggtagatcgagnttgcaaaactaatttcaggagaagaaagtatgataacggtttataa

SEQ ID NO: 41495 - DNA, 545 bp, Arabidopsis thaliana landsberg
gcagttgagaaatgaaaacggaaaacagaacaataaagaacagtactctgcttttaactttgaatctataacattatgaacacaacaagcttatgatcaacttggaatatggctttttaaaacaccccaatagcaaaaagattcagtctttttagttctttctctaaacagtgaactgaaactattccaaactaggcgccacttctgttgggttggactcaaacacatcttcagagtttgaactctctgcttcatcaagaaggtcacgagattgaatcgcctctttatacactggcgtctccttgaaatccgtcgcaccttcgttgtaagtccccgccgcaagtccaccggagattagctgttacaacattttgaaccatagtgaattgattggtttaacttcaaaattggagaattgttataaagcaactgaaaagtacagaaatttaccgcgaaaaggattccgaaagcccacaagtactgaacgaagaaacctagaccatcccacttctcaccttcaaaaggatctggttcaagtcaggaag

SEQ ID NO: 41496 - DNA, 330 bp, Arabidopsis thaliana landsberg
aacgctttcgttcagcttcagcaatccataatatactatccaaaccactcctcctcctaaacataaacacagcacacggaggagtagacgatgaagttgaagaagacgatgacgacgacgccgttttagacgatgaactagtcgaaacagacgacaacgtttctttgtagaaccagtcgtgtaaatcccacatcatgtctataagcattccatcgaaaaacatggtttgattccctctaaagttccacttaagcttttttaccgaaaacactttcctcttatcaacataaaccgacatcgtttcaggacttttcactttccataagtacc

SEQ ID NO: 41497 - DNA, 783 bp, Arabidopsis thaliana landsberg
tctaacgtctctacatcaaacagatgcatgtatgtatacatattgacgtttgtgtacgcaatacaaacacacatattttactctttctcctcgtacacaaaatggtttaatttttctttaagatatagcaatgtatcataaaacggaatgacttgtacaagtgtatatgtattcataatcttactttctacagtttttatttaggcaaaattgttgtccttgagtctaagttttcctcctacacgtgaatatagattccggtcgtcggttgagacaagtgtgcacttatcttgtgttaacgagacaagcaagttacccatgtttgattataattttaatactcgactggtttattaaattcttgcaacttggaaattttcaagatgataaccaacaactaggtccatccataatcgagatgatttatgataaaaaattgtttggaaacacgatcacgtgagctaaaaaagaatcattgtggtccatttcgtccaaagcgataagtttgatccatcgaccaatcacctgcttatgcttcgacgtcggtccaaacattacatattacaatatctaataagtgacatgtgaatgtgatcgttgacaaaaggttacaaagaagaagaatgttaatttcgtaaggccaagactcgaagagccaaagaatgaaaatattatgtaagtgagacaataatataccggaaaaaaaaatgaaatataatggtcgtgtggaaaatacttaacccaagtgactctcttttttcatctttgcttttgctgatgatg

SEQ ID NO: 41498 - DNA, 500 bp, Arabidopsis thaliana landsberg
tagattagaacaactctcgggcaaacatatatgtcattaatgaaacatttttagaaaaaactattgaaaaagatttaagcttatacatgtttgaatgtctgctagagttcatgcttgttatcatggagccactttcctgtgagacacacaatcattccagatccaattttgaaacatatttaacatgtattcttgagaaaaaatatcgtatgacacattgtcgcctattaaaaagatgtcgtttttgaaaactcaaaaacaattatcttctatggtgattgtgtgccctttgaattggtcatttttccagtttcagtagtcctaaacgtagttgtgacttcaagtgttttagccactactcactaaactaaaacatctcgcttaggattctaatattgtgtgattgtgaaatcatatttactattattttattactctgttacacattagataatcatatgatttttgttataaaaatagtatcacaaaacaggcattta

SEQ ID NO: 41499 - DNA, 1057 bp, Arabidopsis thaliana landsberg
  unsure (1)..(1057): unsure at all n locations
cttaagaacatctatgaaagtgaagtattttcttgatgaaaccgaagcaaatgtacctgttataccatgcagtaaaacagcaaccctgagttttgaggcgagtgctgatgggcagagaggtggtgaaannnnnnnnnnnnnnnnnnnnactgtctcctcctgcaatggcataggaacctttgatctatacaccagtaaatctggtggaagaccagaagatacagttcctccaaggacaagggcggtttgggagtgattcactcgaagaaacctctcattagaaggttccatcgcaataacctgagcagatgaactaagttttcagtaagctctggccaaaatgagcatttttctggcaaaaatgaaaaccaatattaccttaaaatatatatagtcgtcgctttcggagcacaacctttgactacatggattacaaatgcttgaaccacaattccagtcaatgtaaatgcgaaatatatcgcctcttgatagctgtctatcagttccaaaatacttctgtaatgcagaatctattaacccttgtcgctcttcagcttcaaatgacgaattgactttcagggatgggatggtaccacactctgggattttaacaaaagaaactctcagatgtgatgcatagcctggaacttgggacacgggttccaaatccaaaccaatcttcgacccatcttctgcagattttccgataaactcctcatcacacttagcttcaaaatacttctctaagaccccgttccctcgatgtacgagggatttcaggcaagatatgtgcaagctaagattaaaagctaacattggggacaagtaagcaacctcttgatctaataactgctggcccatcaaatcataagtgggaaagacaagcatcgtatgaagagagtccgaaacaggtacttgagtgagagatgcatcttccagcgtcgtcttgggaggatcaagtacaacaacttgcgcaaccctttgaatgcctatctcaatgttcttgacaacaacctttgcatttaaaaactcacttgttacatctaaagcacaaaat

SEQ ID NO: 41500 - DNA, 485 bp, Arabidopsis thaliana landsberg
tttttgaatcgaagttgaagcttaagtctttggatgaaaagagaaagcaagttctgtataagattatagacactaaaggtttgttatcacttatcacattttgaaacttcttttgtgggtttagttttgattgtgttaagcttaaggatttggcttaaattgcaggaagtatacgtgtgttttgtagagttagaccatttctattaacggaaaggagaccgattagggaacctgtttcgtttggaccagataatgttgttataagatctgctggaagtagtaaagaatttgagtttgataaagtttttcatcaatcagcaactcaaggttagtctactgttaggctttagtgatatcacttcttttggtttcttagctttctgtttccttccagttgtgagtaaatgaggccttttctcctggttgaaaaaaacaactctgtagaagaagttttcggagaagtgaaaccgactcttagatctgct

SEQ ID NO: 41501 - DNA, 360 bp, Arabidopsis thaliana landsberg
gattaggtaatactcactggaataaataaggaatcttaccgggggttctagaggatataagaaactgataacaatatcattctcgtcttcaagaggttgcagcggcatatagtatgcagagatgatagacacagtttatacacagatgatgagattactcagaaaaatatacatttagtgggagccaccagtactgggcctgtcctttttaaattatctagcagtgcaagatcaacattgaggaaatgaccaaacatatcttccaatgctcgacagtaaagaacctttgttttcaacaaatgttgatagcttacgtgatggaatggacaaatattaattcgcaaataacaaatagaatag

SEQ ID NO: 41502 - DNA, 528 bp, Arabidopsis thaliana landsberg
tactctaaaatcaaacgttaaatgttattgtcaaaaaaggagtataaatcattttatcaaatcaatttttatagagttgatttgtgacatagcttacaatttttattttcttgtctttaattcgagttttggatttaatagtttaaaacacgttaaaaagacaatgatttgagttaaaaaagaagaagacaatgatgctttaatcatgaaacagatacaacgttagattttattatttttacatctgctcgtaacgaaaaagttctataaaattttagctgttttatctttcttctgaaaaatgatcgtataatattttaatggatttaaatatacaccagctaaaataaggtctatccgatcatatagcgacgtgatcaggatacttaagttccattttaatccagtatttaatttgtattctaaaataaacgcaaacgaattctaaaatgtaatggactaaagatatattgattgctgtaccaccttgaactaataagtaattctcgtggatatactagtaaagta

SEQ ID NO: 41503 - DNA, 527 bp, Arabidopsis thaliana landsberg
tccatgagggcatggaaaaaaaggttacgatctttgttgtttcagtacgaaagaaaaaattactgaaatagaaatctgaatatgctttatttgattctgatttagtttgcaatttttaatctctagttcactgtttcaataaatgattgttactgtttgattctgatttagttttgggctaaaaatttacagagagggaatgtcaaaagtgcactaggccaggattttacatagagatgttgacgctaggagaagatcaaatcggtagaattggggcaagctctagctggtctaggtcgaagaagcttcgggttcatcgctacgagattcctgatctaaacgtagaacctagtttggattgggatggggaagaaacaggggaggccactaaggctctgagcagtacatgtttgaaacctaaggatgcagattattgtttactaaatgttcctcagctcgtatacgagttagaggtcgagatactcgcacgcgtgccgcgtttcgagtattggaaactacagtactta

SEQ ID NO: 41504 - DNA, 908 bp, Arabidopsis thaliana landsberg
atgacgatcatacaaaaaaaaaaacaaattgttttctctgacatacattaatataacaaaaaacgaaacagaaaagaaagaaaaagaaaaaaaggagaggaaagaaacaagaaggtgcatgggagttttacgccacgaagggtcaaataacgaacaacaacaaacacaactgctatttcttccgtactatttgagtccactttttgctctcatgtgtcaaacgtactcaaaagtcaaaaatcaaaatctttcgtctccgcgtattcattctccttcgaatgtattattttcttctctgcaaaaaagatattattgccaaaaaggcatgattagggatatgtttagattaaaacaaattgacaaaaatttcaattcagaattattctttaatcaaatacaatcctttttatataaattttgatttatattggatcaacttggtttatcctaatcaaatttttatagtaaatatactacaaaaactataaatggacgcattgagagtgtaatatttggaaaataaaacgatcccatcaaactttaaaatttcaatccaccaccatgttacgtctacccttgcatatacttttccaaaaaataaaaattatattatatatacaccattggcattgtatatgtatttgtaaaggactaatttgaaacatatatatggtctggtctggtctggtctgttagaatatggaagaagcgtatatatatggtctctgttatccatatacgataatatatacaccattggcattgtatatgcattttgtaaggactaatttgaaaccatatatatgtctggtctggtctggtttggtctgttagaatatggagaagcgtatatatatatggtctctgtatccatatccgatataatctgtaatataaaagctgaaata

SEQ ID NO: 41505 - DNA, 455 bp, Arabidopsis thaliana landsberg
tataatggggcctatatcaggggcctatagaaaaggtcaggaacagtgagaatggtcagaagagtccataaaaagcagaccagacaaataagaacatataattaaaatgtgaaactgaatacagtacctgcgtatgttgaatgctatcaactttatctatagcttcacttggtttggataatatgccccgtgaaccttgaaaataaaagtaaagcaccgacatgttaaggtaggtatagcaaacacaaactgaagaaaaggaaaaaattaaagttcaatcctgaaaatacctgacgaatctctgcttcctactttaccattattgttttcgaccccacttgggaaagacgaacttgaagtggccactctttcatcaacatctccagatcttttagcagctccatttccaatttcttgatctttttggggtttttcagcacaggtggcaacggctt

SEQ ID NO: 41506 - DNA, 1276 bp, Arabidopsis thaliana landsberg
tataacaactataacatcacaagtattcacaatgaaaccaaaagatttttattaaaggaagtagcggtaacacacctgagatgctatatcacgaggtggatgtttgaattccatggaatccggaataaatcttaggtcgagcttgtttgatgatctctcaaactcaattccatcacatgatttgtacaagtaatctgcagtagcacttgaatcacattcggcaacagcgaaataatacctgaagcaatagtaaaagcagagtttcagtaatagtccctctccaccacatatagcttaagacgggcagattcgaacttactttaatctacttatttcataggcacgtagcttctggttgatgacatcctcatcttcctcctcttcttcatcttcatcatcactagcgtcattctttttgtcgccatcaattaccggcccatggatttcctcctctttcattcgctcaagtccgaactcagatggatagacggcaactgacaaaatgcgcccatcttttggcagaaacgaattcaacactacgtacaagtctttagcctaagtaacaaaataagatatcatccataagaacaactgcaaaaatcacagagcagtgactctagagtctagacaaggcagagaaagaaacaagctctacttaatcttagattcgttccataaccatagcaaagatattaacgtcaaagaaggccaaattgaaacaaaacatcatagattgagagaacttacagagacatgtctccaatccatgttaacgatagccagtctatgagtttcttcttggataagcggtatgttctcttcctagaagccatcatcatcatcattaccaaatttgcaacatgagaaaatcaattacttgtcaaaaactagtagaagaacaaggcacatgaatcaaagttgagcaatttaccggaatttctggtccctcatcttcatacatagcttcatcgtcctcatctgtatcatcctcttcttcttcctcctcctgcgaggataactcttcagagtctgctttctcatcagattcatcatccaaagaagcaacctttagctcactctcactctcttcctcagattctacatggctagatttttcggatttcaaatcattgatctctgtctcactcccgctctcatccccagattcctcgtcagttttctgcttaccttcatcttcaactcgataaaactctcgaagcgaatctttgccagtgcctcctgttctacgcttgccacgcttatcgacaagagcaga

SEQ ID NO: 41507 - DNA, 163 bp, Arabidopsis thaliana landsberg
gtttttttccgatcttaattagggttttatgattttgttttgtttgtgctaattactaatagtagtggaggttgttgaattcgttgacaaatttacttctttttgtgttaaatggtttgttttagctttatgtgtatatttatgtttcaggtgtggggaagag

SEQ ID NO: 41508 - DNA, 587 bp, Arabidopsis thaliana landsberg
aagactttttgatctgccgccggaatttgtcagtggccttaatcatagtctaatagtctaattaaagactattttcatgaaccacattggttcaatagagactcaatcatattattcttaagttaaagtttcaatgttgcttaatagcccgaccattcgctaatatggccaatgttaatagaaccttagatatcattaggcacattggctaaatcatgggcccttattttagagcttcttttctcattcaaaaaactgaaaaagggataaataagatatctaaagtgtttctctggattccaaatacctttttgaaaagcatttttttttttttttttgatagcatttttaagggtattgatgtgaagtaatgttgtttatgttattatataaagaatctcttaagacaaaaaaaaatagatcttgactaactcataacaatttcttttcataaattaataaaaactatccaattgtagatgggaaaagtaaaataaaattatattagtatataaattatggtgctaaacttaatcatgagtttttcacagattaaaaacaacgacaatgaagaatctcaatttctt

SEQ ID NO: 41509 - DNA, 893 bp, Arabidopsis thaliana landsberg
acgcatgggcctgatgaccacgtagtatgaatagagatcccttttcaattctcttatttagcaaaagctttgacggaagcttcacaggcataggccaagcctctaaaagaattattaaataaacaactaagagcaaaggtgcaacagtctaaataaacaactaagagcaaagaattacctaaatgtattaatactttctttgtaacagtcttgtggactctctttttcgataaagcagtattaaggacttgcttttgtgaaatccaagctttgtttggtccggagaaagtgagcaacacggttcgaacaaagtgagtaacgtgtacctgttgttattttaggaccattagctttatgatagctagataataaattaaactagattaattccaaaagtacacccaattttgtacaaatttttggaattagtataggcttcttcaacttatagttcaatcggtattagttattttttccttcctaaatgccatttaaacaaattttccaaaacttccacaaaaggttaatgaaagactcttgaaaacgtaacgcacaagagtgactcctcatttttgaaaaatgcattcccacctcagtactgctcagaggtcttccatgttcatatacaaaagcccttttgttattccttaaattaggcattaacaatgtaaaagactcttcactctcaaatgaattttcaacctaaactatttgcagccttgatgccatttatagaccttttgtattaagatgccgaattcctttttttttaacacgagactaacaacatgttgaaacttctttccatataatgtttgtcatgacgaactctttgttacattaattaaacatctttatacataatgtcattatttgccatctgccgaacctag

SEQ ID NO: 41510 - DNA, 571 bp, Arabidopsis thaliana landsberg
  unsure (1)..(571): unsure at all n locations
agggacagccacataaacacaagatctcctcttcttcaacttttgtttctcattcggttattgaagacgacggggaaggagagggagaagatcagcatttgcatttatcatctggatccgagttagattctggatcggaatctggatctgannnnnnnnnnnnnnnnnnnnnnnnnnnaactagccctaaagtgaaagagaaagaaacacgcttaccggaaaattaccagcccggttatcaatccggttatcagcccggttttacgccgggatatcaatatcaaccgggttactcggctgggtatcagtatccggttgaaggatggggattcatgggagagaatccgaatttaaacccgtacccgaatccgaaccagaatccgggaatgtactttatgaagaagtctgtgcaaccgtcacgaccggtagtgtttcagccggagaatcatagagtggagaatgggcaatggttgccggagaatggagttgggtattctaattattaccaggaaacgctaatactgggtattttggttaccggagcaacgtatagagcatcgtctccggtgag

SEQ ID NO: 41511 - DNA, 393 bp, Arabidopsis thaliana landsberg
tataacaaaaggggagcaaatcacatattttgtgaaatcccaaagaaagtttttggtttcaccggccagtcatgggaaactatcggtggccgtcaaagctatcaaagttgtcactcagagcaaaacatacgaatctgtaccgcgtcattctaatcgcgatcctctgcgtcaccttttacttcgtcggagtatggcaacactccggcagaggaatctcacgctcttccatttctaaccacgagctcacgtccgtgccctgcacgtttcctcaccaaaccacaccgattctcaacttcgcctcccgtcatacagcccctgaccttcctccgacgataacggcggcgcgtggttgttcaaatctccgtcgtgcgggcgttgaattctcggagtaca

SEQ ID NO: 41512 - DNA, 337 bp, Arabidopsis thaliana landsberg
cgacaatggctttcaatccatacggtggtgagatggggaggatatcatctacggtgactccgttcccatacagagccggtaatctctggaagattcagtacggtgcgaattggagagatgagactttaaccgaccggtacatggaattgacgaggaagttgtaccaattcatgacaccatttgtttccaagaatccgagacaatcgtttttcaattaccgtgatgttgatttgggtattaattctcataatggtaaaatcagtagttatgtggaaggtaaacgttacgggaagaagtatttcgcaggtaatttcgagagattggtgaagattaagac

SEQ ID NO: 41513 - DNA, 799 bp, Arabidopsis thaliana landsberg
cggaagtcggtcgtatcaacaacgtaaggagatggggcttgggcttggattgggagccggactttttggtggattaatggtgggagacattgtgtctgatgttgcaaattgttatgatctttgaattttatttcattttgttatctctaaacatttcctttcccatatttacatgaacttatcatagggatgttgttttctagatctataaaactttttgttgtatgaatcaaataaataatgggaaagagtttaggtaaaacatggtaaatggcaaacaaaataaaaaataaaaaatttggtgtcaactgtcaagtatcaaaatcaacaaaactcatcatcaagcaaggccaaaacatccatatctcaagttccatatataataaacaaactcaccgaacacatttctcacaatcccaaatcaaaacttgttgtgtaaatgatccttgtgtatataatctgaatttctcttgaaactaagtctatatatttccgtgtatataatccaatacaatgcacttttgtatattgtacatgcatccaaatcttcaatttttaaatttatctataaattaatgcattggattttatgcttttttcattcatgaatgtcaaaaaaatttctttctttttttgactcactaaatattccttcctttttttcaataatcagtcaaaaatttatccgataatttctttttcagcattgtcctttaatcaagttagtggcctttaatgaaaattgaaaaaaaggttgtttcaatcaaatgaatggcaacaaattttgaaaatttttttt

SEQ ID NO: 41514 - DNA, 838 bp, Arabidopsis thaliana landsberg
tattatttcttctcaatcatttatgctctgttttcctctcttcttaggctctgtgttggttgttaattagtgcatatgtgaaagaataaaaccaaacatatttttggaatcatagttcttgaaactgaaacacacagaaccaaaaaacataaaaattgaaacattgatcttcgcacaaaagaagaactgtgagcgaaatggaggatcctacgtcttgttagtacaagagagaatcaaagcaactagaattcacaatcaacctaaatcatagagattgggtcacaaagttgaaatcttaaaactaatatggacctaaagcctgaaatgcagaaagcctttaagtgttggtggaaatggaaaaactcacgtctcatgtaagcccaaatgacttgtttaatactgtaatagccttcaaataatttgttaaaaaaaataaggatgtcaaatgaatccttataatatatttttggcattatggctcagatgtatctggaaataattagttagatttttgtctataatatagagataaatttaattagtggaaattgtcaaacaattatattctatatatcaaacttattcattatcctaagattggcatatagatgaaatcacatattttaaaaggtagtaatatcataataatgagaaaattaattttaaaaaatctaatttgagtatttattccttgtaaatttctgaattaccattcttttaaaataatgatacaatcctgtccattcacaaccttacttcaaagtcttacactttccataaatgtttctttaataccttttaattaggagaaaagtgaaactaaaaactatgctaattt

SEQ ID NO: 41515 - DNA, 647 bp, Arabidopsis thaliana landsberg
  unsure (1)..(647): unsure at all n locations
aaatggaattccagttaaaacccaaaatgctggaacttaaatggacataacttaccccagtcgaaatagtttactatttattaccggcggtaaaagctgaaataaaggaactaatctgttcaaactatgtatatacttaatttcaaaggcgatcaaataaaaaacagtcaggttcctgagtcaagatttgtagtcaaaaccttactctgatcctgtatagcctaactagactgtatctttgtatattcatcagtctattaatattgatatcaaaactgtacgtacaataacgtactgcaccaaattttatcaacaaacaaaaaatagactatacataattacgtatcaacttctaaaagttgtagtgtagtgataaatgataacggattgatttgtatatataccttaaggcttaaactgatccatatataattttattcttcatatgaaaattttggtaaagccaatataatttttgtgtggttggtaacaactgaaaataattaggggcatcgcaaaagtacaaccgtacaatgaactaatttgcaatttctgagaagaattttgttaagtgaaagtctgagtcaacaaaacaaaaattcanggaattgaatgaatgattgggtccctttatgaaactccccatg

SEQ ID NO: 41516 - DNA, 431 bp, Arabidopsis thaliana landsberg
  unsure (1)..(431): unsure at all n locations
ccccccccccncccccccccccccccccccccccccccctcccccccccccccccccncccccccccccccctccccccccccccctccccccctntttctccccccccccttttttccctagtccccccncncggcggccccccaccccacccacaccacaaaccncncncccncccnccccccctcnnccccccccccccccccccccccccccncnntctcccnttanttctcccccccccccccccccacccccccccccccccccctccccccgccccccccccccccccccctccccccccccctccccccccccccccccccctccccaccccctcttttcttttgccgtctcccccccccccctccccccccccacccccccccctccccccccccccccccccncccccccccccccccccc

SEQ ID NO: 41517 - DNA, 1782 bp, Arabidopsis thaliana landsberg
agagctcatacttcttttccttcccacaccttgacccaagattccagcaagtcacagcaaaccaattctgttctcgctttccagtctctcctaatccaaagaaacactctgtcccaagcttagaagccctgctctgagcttgcaacataaagttaagagcttcggtttcgctgccaatgtcttgagtcaatatagtgactaaggtacggaagaccacaacctctgtggttggcattttttttcctgagatatagaaactgagaaacttggaaagagaagcaacagcaactggaagcgcttggcaagaaatagcttcatgcgctgaaagggaaagataatctggagaaaaatcaaggcaggacgtcattgcatcgatctgaccaatggcacaactgtgttccttcttttgcaggtagatcttgaactgcaagaatcagaagcaaagagaagttgctgaaacaatttttctcaaacaatctccagatacatatatatggcgaggtagccgaagaccatatgttgaataagcatgtactgtgggggaaaagacagtctaccttaagaaaggagcaagcaatattgggctcaagctgcagagacagaaaactagttagcaattctgagttgaaagatccaactaggaccgttgaaaatagaagttccatggataaatgtataccttttcagcttcttctatgtattcaagagctcgatccagctgagagtgcccaaggtagcaaagacacaaaaccctgaagcctttggccctgaaaactctattttctatatcatgtggaatatagagcattgatttctcaaacatctctgcacttgtctcataatctttagcacggaaatgatctgaagcactgtaaacagcagaaaatacccagattagatccccaagacatacactcaagaaaacaacaacaaaacctatcaatcactgtaaccaagctgaatcactcagttaactaagatgcaataaatatgacacaccaatgttaaccaagggagatgaaagttcaatggcaaaaacatacctgttccagagaacagaatgtattgccttcctctccttagtcacagcttcactagcaaagagagcaacaactctctcatctgacacgagctgagccacaacgttcgccctaattctcgaaccattatcacctcccttactctcaccaagcacccgatgagccactctaagtgccgcctttgcactgacatgacaccttcccagcagacctaagaacacaccctttgcagtttctgctccagcagtcccaaccacctcaaaatatgcttccacagcagatacccacactgcctctggaatatcattgtttcccaccatacctctcagctccttctctgcctcactatgcctcccaagtcctaaccaagccttcatcgccaacacaggtaatgaagcatgttgatcagctccatcactaccatttcctccattccttagaactttcacacattttatcacattctcgaactctcccttctgcaaatgcactgctgatatgaaacgcagagttttgattctcatggccgtgaactccgtagtatcttcccgagtttttgctgtacctaatcccttctcacaaagatccaacgcttcattcattaacctaagagcgtcgtttagactgcaatcgtcgtcacctctagacaaagagcttttaccaaacgcaaggaattgatttgagagcgatttgtagtgatccggtgaaccaaacaacaaattcttcgcccgattaagcaacg

SEQ ID NO: 41518 - DNA, 497 bp, Arabidopsis thaliana landsberg
gtataaagaatctcgagcttccaagttccaacaccaattgtgttacttttgactttttaatcgagtgttttttttgttttgtagtttgcgtgagagcgagacacgagtctatgttttggtctgagtagtcgtgaaatgttttaaaatgattcagaagcggaaaatagaaaatatgataatatcacctggtttaaacattgtctttttagccctagcaagatcatcacaatctcacatggttcaacattaccaaaaataaataaaacaaaatcaatcaaaaagatttaaatatttagaaaaatcaacattaccattacatctagaaatcaagaaccaacttttctttttcctctttctcaaaaaaatatataaacgaacgttttactttgaagaaaaacaaaaatctcggagagattttactatagaaagtttcattccttctaacatggccgttgattcaactgatcaacggcgagattttgttgtaaggatcgtcg

SEQ ID NO: 41519 - DNA, 475 bp, Arabidopsis thaliana landsberg
ttttattaacccccaaacagtaaaactttttttttctaaaacattacaataaaaatgatatttgtaataccgctatatattttacgattagtcacaatctaaacggtatcaatcgacaaaattactgatgaccaatagaaattttggcaaacattattacaaaaatgtgttatgtcaaactaaattaattgaaaacaaaaaatttgtaattgaattattaaatacgttgccataaattgatgttttgcccttaattaattgattacaatatgattaaaaaaggtataactaacataaataaatacccttcaagaaccaaccaatctctcattctttcgtcacccaccttcttcactctctgttattttcacaaaccagaaaaattcaagtacagagaaatgatccttctctcacttcttctccatcttcttctttacctgctcaacacttctccatctctttctctgtcccccga

SEQ ID NO: 41520 - DNA, 486 bp, Arabidopsis thaliana landsberg
tttgctcgtcgacgaattcatattgcggggttggggctgaacattactattctagactggtaaatgacttttttgagtttaatatatatatatacccgcgggtacccgatacccgacaggtacgggcacgggtacaattttttacccgcgggtacagttgcgggcgggtatggctagtacccgttggtatagtcgcgtgcggatatttattatatccgacccgaatccgacccgttgtcatctctagttataatcataacttcctatgctattaggagtcttggaaacgatgacataaaacactcactcgtgctgctatttttaagactcctagcacaacacgaaaataacaaagttccgatggtcttcttattttcgatgacttctttggagacggccggacgtaaggttatgtccgacggtcacttatagccgtcggatataagttatttccgacagtttagggtttatgtctgacggctttgg

SEQ ID NO: 41521 - DNA, 522 bp, Arabidopsis thaliana landsberg
aatttgtttttaattggattattcttcaataggtttatatataagtaatttccttattcgttttcctatataattggttgaagcttaagagtcatgaagtaataacaagaaataaaaatggagaagaaaatagtcaaatcatacacctacaagattctattctgcgtagaagtaaaatcgtgaaagaattaattacaaccacggatgtattaagtatgaaactttatttattttggaaccgtcaatctatttgaaaacggaaacacattgatgttgacaaagtatgattgaaaaaaatttagatagttttttttttttaccatcgaagtaactcacacattattgtcactaatacaaccaattgtttacaaaactcgatcaaatgtaatattctttatatataagaaaatttatttagtttatattgactgattcactaaaacttaaaaccacaagtaagttaaacgctatgttgatatgtcaacagtttcaacatgacaacattacagtaaaactattgtt

SEQ ID NO: 41522 - DNA, 665 bp, Arabidopsis thaliana landsberg
gtttagagcgaaaagatacgcttcattcgatattgaatattgatttttatggttttgtattattattattattattttttttttgtaaacaagttttgtattatcttatatgtttgtttttatgcgatagtgggactcctttttttgtccaataatttcttgttttgttctttatattcattggaaaaagctcacacttgtcattaccatgaaacttcccatcttttaaagtttatagaaatctagaatcaaaagtttcatcatcatgcaaggttgtcttgggtccctttatctttaattacttctgatcgattaagaattttttttaatcatggttcataaaagtatcaactattattatgttggtcttgattttgtggaactgtttatatacgcacattaacaaaccttaattatatacaattaagcagtacaatagtttttttaattgtttgaagaaaacgaatagcaataaaatattacttgacattttaaaaggaaaaataaatgtcaataaaaagtcaaaaagttaggttggaaatgtttttacatgtgtgatttgggcgtttggtttctatttataaaaatatataaaattttgtttatgtgattttatttgagtatctaagaaaatctatagaaagctatgcgtacggaacacatta

SEQ ID NO: 41523 - DNA, 613 bp, Arabidopsis thaliana landsberg
cgaaatattctttggtcttatctttccaatcatgaaagtaaccaataacagtattattattttgtttgtaaatgtcataatcgtatgatggctcgttatctccatgttgattaagagtgttttttatctctagaaaatgtcatgttgagaaaatgtcataacaaacaaaaagtaagagttttttttttttttttttgtatagaggaaattaagaacgagtctttgcattttcattaatttaactccatgttgatttacatttaatcgtatgatggctcgtttatcttcttcttagtacacttgttatttattatgtagataaaattgattgttttgtgtcatggactttaaatacatatattagtaacaagattgtctaaaactatagtctgactcgttatctcaagaaaaagtcaaaggatctaatttactacaagaaaattgagttacctttctgccatttaatcagtgtatatatcggattacaatcaaattacttccaaacttacattcaccttatactagtcaagtaaatgcaacatacatagacgatcgtaatatttcactcagttaaagaatgttaaaaaacacacacattattcaccccataata

SEQ ID NO: 41524 - DNA, 326 bp, Arabidopsis thaliana landsberg
aaactctaacacaagtgtcttgggagggagcacctcgaacacctcagggagattgtttgctggatatggaactatctattattgtatgagattggtttgaatgcttttgttggcaaaaacataaacagtactatcatccaacgagttcatatactgctaatcgtgtccacctattaagcctgcaaaatgattttatttcaaaggtattttgcttattttatttaaggaacaatgcaagaaaaaaatgtgctactctatgttgcaatttaacctacatgcatctggtaatagacgtacacacatttactaaaaattgacatcacaaa

SEQ ID NO: 41525 - DNA, 814 bp, Arabidopsis thaliana landsberg
caatatgtgggtcacaagtcacataacacttaagcatgatcatagttcggtcatgatctaattacatatcactttttttttcttttgtaaaatcgatgattctatatcaaaatatagggaatttttgaaaaaagtttttttttttaaattatgcctataatatacttattgaaaagtaattttgagacaattttttttgtcacaaatctgtgatatttagatactatattatgactaaaataactcacaaattcatagtaatttcatcactatatttgtgacgaaaaggatcataacaaaatttgtcacatttagtgacgaacatccgatgataatatcaatcataactaacactgtcaccaatgtcttgttacaaattagttacgaacttgtaacgaatatgaaaattgcaatttgtgatataagaatgagttaacattagtcacaaattaatatcaattgttttatgtattatacaaaagaccgtttttggtaatgataatatgttggccaaatgattttaaaatatattggccaagattaaaacgaaagatatgagtactttagaaaaatttgtacgtattaaaaaaaaacaattgatgataaaataacacaaaactgttttagttttatttgcatatgataatatcagatttgtgtaaaaaaattttatacatctgaaacagaatttttcttcatgttcccctttttttgcaaaataattagtatcaataattattgattgtatgattaaccccattttttaaaacagaattgtcactcttttcggaatatctaaaaaaaaggatgaaaa

SEQ ID NO: 41526 - DNA, 428 bp, Arabidopsis thaliana landsberg
  unsure (1)..(428): unsure at all n locations
gttgtgatcagtatgagtaaagttgcagctcaccattgagcaagggaaagtctcaattttgatcttgttgatcacttgagtgagtaaaatgttgaaagagactgatcttttgtggactcctcaatggagacgtaggttttttctgaaactgaactccggtaaataattttttgttaatgttccatagttaaaaataatgcaaaaaataattatagctcagacctataagatcagacaatataatacacatatctctttatatcttatgttgttagtcctatatagatcaaaaatacctttcttatatacacacacaaatagaggtccaaaatacgggtgtctccacattagactgtccacagcggntctccctaaatttttccctctatatctcatttttgcgccatgtcatcaagattctaccccct

SEQ ID NO: 41527 - DNA, 614 bp, Arabidopsis thaliana landsberg
ccaagattgcaggatgtgagaaagccccgtcaaagagccagccatgggtgtggccagagatagaaagctttgaagtcattagcgctgaagctgtagccgagtgatatggtaacaatgactccacacagaagctcagttccacaggatttctatcatcacatcaaaaacaaacaaaaatgcaaattcttttaagtaatgtgataagagagtttcacatttaaaatcaacatcaaaatgcaaaatttcatcttttttacttgtgaataatcgatctggaaacatgattaacgcaaaaatgtaatttttacatagacaagttccttctttttttttcacaattcgatcgaattaaacccatttcaagcttcaagtagcacaaaactgtgaaatgagctcaaataaggaaatgggtatgagagagactaaccggagaggagaaagcagtgggcttcttctggcagtggctctaaacaatggtggagcggatttcgcttgagaggcgaagcggccagtagaagcagcggcgctgcgtgagcaagcagctcgaagcatcgatctggcaccgcacaggacggcgcacgtggccatcaggagagagaattgcagagaagatc

SEQ ID NO: 41528 - DNA, 502 bp, Arabidopsis thaliana landsberg
  unsure (1)..(502): unsure at all n locations
tttctagtgaaaactcaattattgagatatttattatgaagtgaaactagaaaactgaaataaataaagaaaataaaagttgcagaggaatgtatcgaggaaagggtctccaagaagcaacaacgagagaaaactccattttgacgcaaatggtaatgacaaggagatctcatttcctcagtccccacttagaggtaaaattcattcttcaatatcatcaattcataatttaatatatacgtcatattcttgatttattattgtctttaatacagtttattaaactactacatatattaaacatacagtaacgttttaatttcacgtatatagacaaatgcatttttctactgcccatgagtgtacattttgtttctttgcttattttttggtaccatataattgtaatagtatctaattaatggccctagcagattcttgaaataaattcngtttgggcttatctgtgactgtgagttataaaaaaatcttaaacttaaca

SEQ ID NO: 41529 - DNA, 1056 bp, Arabidopsis thaliana landsberg
  unsure (1)..(1056): unsure at all n locations
gtcgttgataaacatgtgagccacctatcatccgcctcccagcctggtttcgtaccatccgcccacttttccgttcgtaaatcaaattccacaatggtagccgatgcccacacccttccgacaatgtatatcttctcgtcaatgaccttagatacattcgtcataagcccaaccggcatgtcggcaacaagacgggtcgtgtgagttcgacagtcgatgcataacgcaatcgatgatggcggttgggcttcccactcctcaacattccagtcgtatcttccacccattacaaagatgttggaacccacaacaacatagcttgctgctgtgggcataggcgggagtgacgagataaggaccaaccggttttcaacagtgccgggcatgtttcttttggttctccggttaagactataccaacgagcaacttcgagtatacaatcttcgatgagaacatacacacaatcttcggtgcagccgaggagggaccgtgtcttgtatagtcgaggcgacgcaacgagagatcggaattgcttagagacgagggatagcatcgaatggttgtacctcgggacacgtggcgctatacactccatgatcacgtcgtctggaattgacgtcatcacnnnnnnnnnnnnnnnnnnnntctcgtcttcggaaagcatctcccaatataatataaagagataggctcaatcgacaatatgatgttttttcttctcagctttgcaaatgtacatatatatagatgagatgatggaaaagatggatacgtaggtgcaaggatgattcatgaataaacataattatacaagttttatccgatgagatcttactgttagcaattattttaaatttaattattttcttagtgaattctattccatttatgaacttaaaattaaccttcaatatgatatcttaatttataaataggaaatctttcataattttaatatatggtgcttttctttatattttacttagatcagatatttccgtcttaattacctataaattataaatgtcctagtgtggtccatacatataattatt

SEQ ID NO: 41530 - DNA, 649 bp, Arabidopsis thaliana landsberg
  unsure (1)..(649): unsure at all n locations
aattggattttgtcttataaaaatgatctggaggaatggtgccaaatttggattaatacttatatgcacaaatcttgattaaaatacaccaacagtgtcatttttcaggctattattggaaacgtcagaacagttttgcaaaatgtcaatgattcacctgtttttactaggagtttttgtagattaaatatgtttaattaagttatttgtataatcaaatattttttcaatattgtaatttatgatttaaactactagtttcaagcaaggactacttnnnnnnnttttntttttttttttttttnggggcaaagagcaagtactacttttggtgaataaaaaaagaaaaataatactgttggcttttagctaaagttttacattcatagcttaatacacatgtaaatgtattcataactagtggttaaaaactgctagcgaatttataattactcgttttgtcaccaaatatctttcattggatacttatatacacatatcaattagaaaatgctaatgctagaatttgaacaaaaaaggcttgaaagttgttttaccttattctttagtagttttgatgattttaaaaaatatattgcaataaataagtaaagaaatgggaaatagtagtacaaaataagagtgcgtt

SEQ ID NO: 41531 - DNA, 541 bp, Arabidopsis thaliana landsberg
tgtctactattttattcaaaagataagtttttattgcctttgcattattgaaacaatgatagtgatgaacgtattaaggcataattttatgtataacattatgatatattacgatcataagttataacttcagttacatttctataatttaatttgatatttttgtcttttgaacatgtgataattacttaaaccatatgaaatgtgcttaataatggtgagtgttagactcaatgttgtgccaaatgagatggtttttaacttggttcatcattttttgtttaattcgattattttctttcaatttaatattcaaggataatgcatttttctagagtggatagcaaattgtctttctgaatatctctatatttcaattcatgaataaagttgactatgtgaacaaataattcaaaaaaaatatactgatttgtacattagatatgctggtttcataacaaagaaaatataaaaaaacaaaaataattgacaaataaaggattacaacataaattaaaaaaataatctaaatgtgttaatg

SEQ ID NO: 41532 - DNA, 508 bp, Arabidopsis thaliana landsberg
cgccaatggaactctaaagttcaaatgtataggtaatggtagaacgattgcttttcgtgtctcttggattttatcttaaatatattagtagtgttatgcttgatattcgtgattgaaatatataaatattttccaaaatataatgtaacgtattattagccaatggatcttagacttttagtgaacgaaatgaaataaaacatttggtggaacgggttgtatgcaaaaataaatgttatcttccaaatggtagtgtaacaaaatatggatttgcgaggattcttttagttttgatgcatttgcatgattttccagttttggtgcattcgcatgatctttcaaacatttggcggaacatctttattctttttttctaacctaaatttttcgagtgttttaattacaaagatttttttaaggaaacttcacgatggttataatatataataaactttactagctaacagattaacaaatctattgattgatgtctttgaggtaaaattta

SEQ ID NO: 41533 - DNA, 1622 bp, Arabidopsis thaliana landsberg
aagaaaacaatgagattgcagtatccataaagacaaacatatttgaatctttatttaaaagtaattaaaaattgttcactttttatttttttttgggtaattgaagtttgatgttctacaaacaacatctttatttttaggtaacccaaagtttactcgagtggtccaaagattttaaatttttaatgcatgctttgaactttggaagtttataaagttctgatttacaaattgataaatcatataagtatgtgtagttaaactaatagaatcatcaactgaatttttttaattatgccgttacaaaaatttacagaattaggtacttttgtatgcaaaactatatatatcatcattccattttgttatttttgacaaaactaatactttaatataaaaaataaacatttcctcgtgtgattcaaagactatagattgaaatactttatcatatacaaaaattattatgatttctgatttaagacagaatttatgtctcaacgaataagttatcttgtttaagaaaaatctaaagtactaatacaatctgttacgactaaattatttcttagccgcatgggagatcttgggcaacatgcctcaacatagatacgggttttaatttaaataatgttctcctccaaaatacatttagataagagatttggaaatatcgtaatcgaatacaataaagaattaaattgccgtatattattagaaaaccagacatggaaaaagatgggtaggtgtgggcgctctttttaggttctgtttgacgaactcattatcaaaaggtgtaagtgtaaattactttcttacctaaacctacttctattagactcttttattctgcattcttcaaaaaatttgggcatcttgaaagattcctttaaaacaaaaaaaaaggtaaaagattgagatcagaagatggttttgttgacaggtggtgctgaagtttggattcaatgaatttcgaagttcttgcgatattgtcaagttttcctcttggaataccatatttgttttaatagatatactgtagttgttagtttagatatattatttttcataaccgagtttgtttacatttgtatatgttaggatagaatgatgtagccatgtaggtgggatcttgataagtgataactatcaatttacagaatctttgaaatgaatctacgtgtcctcaaaggtagcataatatatttacattatagtattaacagcaggtaacaccgtccacgtgtgcataaagttttggtgtttctagactctcttgtcatactactaactgaaatattgtaatatggttttcacactaaaaaatcgaatcaacccaatatattatcaaatcaaaccaacgacgataaattttacctaaaactttttttaaaaaacgattttcagccgaaatatcacaagattatcggtcttgggctagactctagagagggatagatagatggaacttagaaaataataaatggaaaaagatattaaaagaataataactttgaagttcaaagtacaatcggaatggaatatcagtcttttgcgtgaatgcgtgtgatgtgagtcttgacgtcgtatatggaaccaaaaaggtgaaaaagcaaaccgag

SEQ ID NO: 41534 - DNA, 500 bp, Arabidopsis thaliana landsberg
tggtcaatttcgtctatctcccaacaaagtttaaagtaaatttagataaatagcaagaaagttggttgactatgcaaaaggatctctagccagagttttatattgacaattgtgaacattaaataaaggctatatatatacattattaaagttttatggttatttgctttattttattttcttatgctatctaagatatcgctctatgagtattggaaacaaaagacataggaatttcgactaactatagtcaaatgattcaatttttttttatatatttaaaacatttttatttggtaaatctctattttcaaatttgtgtttagatattgaaaatactaaataccaaagtgaaaaaaaattgagagccaagattggtgtggagattcataattgaaaaggatcgactctctaaatattggtggaaaatgtttacttaccagctcttttttgctgagaatggaatccacgtcatatttgaatatgtgcgtgtataaaca

SEQ ID NO: 41535 - DNA, 821 bp, Arabidopsis thaliana landsberg
atttgatttttacaacataaacgctggcgttaatcgaatgtctcataagtcataacccagtggttaataatgtcggtgtggtagacactttagaactatcgtcattctaatatgaatggtggtgattttggggttggccaaaactcatgttctttacaaaaatcatttcatatcaagactgaggataaacttcgaaattgtatataaaagattataacaaaaatacttaaacacattctgatgaccgaattacacagtcacacatgtaattataaataaaaaatgacataatcagaagaagatcattgccacaaaagcagacagaaagctaaatcgattgaagctgatagttgcagcggaagaggttcctgttcattaagaaggccatgtcaattaatttgtaaagaaaatattatcagagtttgtgtattttatggttttttcaacaaaatgtaacaacaaatttgaaaataaatacgaattagtgctaaccattggttgatcccggcgacgcaataggcgaaggagcttcatttacaagagagaaaaaaacattaaaataacgtcgtttatacttatcaaagatatttgattaagttatatatttatgggatcttataaataaaagaataatcatcactcactggctattttggagcagagtgaaacgtcaggattaactccacatgccttgggaagtaggagagcgttctctttggtgaggtttagggctttgagcacctccggattgttaatagcggtgcatgttcacggtgcgtctttctgtacgatctctttcattggccagcaacacgatggtg

SEQ ID NO: 41536 - DNA, 1237 bp, Arabidopsis thaliana landsberg
gaaccttagcattgttccagcgttgaacaaagtgcctagccacatcacggcaaggtggtccccataaagcacaatgcacatcatgccaaggcatccgtggatgctttttacgctctaattcatctttcagagcatcctcccaagtattgggttcagactctctggaaaattttaagtacgttcaaaccaaaaaatcagagggttgaattcggaaaggtgaaatgactaatggacatcctggtttgtatttaatacaaaatttgatttcatcacagctaaaaataactagcaagtgacacataagttcttagtttttattacatctaaaaatcaactctttattcgcataaagaaggaaattcttacctggggttgtaatagtcctttccaggccatgtcacagaagggttatctccaactttatgttcaaacgtgtcatatcggccaaaacacaagtctagccctccgataaagcaaacctgattatcgacgatgacgagtttttcatggtgagacctagaaagacacgcagaggtaataatcaatgtccttcccgcttatttttgtggtcagataggagttttttaacagtttatctaatatcaaactcagaaagataaactagaaagagcattgtgacatattagagtgatctattagaactgtccaccatatcataccagaggtagacaccacttgagaaatgatcaggataacgaagtacccgcacattctcatgaatgccaagaagcctgcgtttgctatatacactgttgatctttaaagcaagagcaacctccttgtagataaggatgtatatctgaaaaagaaagtaataaaaatgaaaaagttgaaagatagtaatccaccaaacctgacaagtcagatctccattgcagactacagacatgcttcacaacagaagataatagctattaagtacatgcatgttctgtagtaagtacctgaactccttgcttagctttattctccaacaagttatcaagtctggatgaagtatgcgggtcaaaaggacgcctaagatagagttctgggcacacccaccagccacagatgaaaatctataaggcaaatcagatcagttgaaaatatataacattcaacacatcatcagtctccacacccagtaatgaaaagtggtagacctcagatttagcattttcaatcgctgcagcaatggctgcaaaagctgctccaccatctacaaaccacgggc

SEQ ID NO: 41537 - DNA, 999 bp, Arabidopsis thaliana landsberg
tggaaacaagttatgaagagagaattttggcaagtgtcctagatcaatattttggatctatgaataaatttgctagatttttacctggcactggcccaacaaactggttcttacttagatccagcagttctagatttctcaagtttataagttctgaaaatatataggttcctcaagtttaatacaagaatagtaacaagtactcatcaactatgactacgagaccttaatattgaacttattaagacctgaaagtggacgtacgtacctttcattggaaaagtaccttccatattgtttccatgaagaattaaagttttaagcgaagaagccgtgtttataaacggtaagacagtattattgacgccgttttcactaatatcaaggatctcaagatttttcaatctctcaaagcttttataacctgcatgtataaaacccaatgatgttaacttgaaaatgacgatggcttataattatgtgtttttgaaaaaaaatagactaaaaaattgttaatagaaagggaagtaaaagatcatttatataccatggatatgatcgaaccagccttgacaccagaaattacttaaatttagagtttgtagttctccaaatggatagaacaaggaaagatttagtagaggaggaggatagtatgtgtcagtcaagagaagaccaatcacatgcccgctggtaagatcacacttgactctttcccatttgcaacagtcgctgttgttcgtgtcattaggccaatcatacgggtactcggatatgttgagatatgccttgagctctagcagtcctttcctttcgctttcgatgcaacttctatgcccatgcgcatccagcgatgataccatcatcattatcatcataaccatcaccattaggtccattaccattacaaatgctggagagaacatcatcaacattgttctaatttgacattaggaactattcctaacttatgtttggtaaataaaagaactattctca

SEQ ID NO: 41538 - DNA, 745 bp, Arabidopsis thaliana landsberg
agctgctggaattttctcatccattaacaggttcatgaaatcaatgtgaagatgatttcttctctgcagtgtaataatattcacatgtcctggtattagaaatgtaaccaaagggtattactgtatatctttctatgctattacatcatgaagagtataatacgtactggtaaagagttctgttccttctatacttcagtgaaccactctggtcgagaaaattaatccgaatcaacccaaaagtcagttttgtacctaaactgcagtctgcagatactatgtactagttctatcatcataacatgaaaatatcgaagttttgcaacttgttctgtttgcgattggcactttgtctatcctaagctggaaatgctacctagagttcttgagagccttcagaatctaaaatgactcgtcatagtggtggtgatgacttgcacgacccaagagtttaacataagaaacgttttgtttctttcttatgtgttatacatgtttttatggtgtgtgtgtgtttttataacaggatttggatatgaccacagaaagggaggaactaaaactttcatcatccgtgcctctgtttgatgtcatcactcagagtttgcagatataaagaagcagcttccgtgaagttcaaagctaaaatgaaagtggcaaggtacactgtagagaactcagtggttatcaggaaattaacttgttctgcatttgagtatttccatgctagaacaagggtatctac

SEQ ID NO: 41539 - DNA, 228 bp, Arabidopsis thaliana landsberg
atacatgggcgtatacatttctttgtttaattatacgtttgatgcactgacgcaaatgttgacattcattgaactagatgtgtttttgatgtctcccatacccaaaatattcatgaaatgttatccaaaatatttatgtatattacaaacaaatttatctaaaacatttggaacaaaaatgtttactgaaacagtagatttttgttgtctaacgtaaattggaagtat

SEQ ID NO: 41540 - DNA, 498 bp, Arabidopsis thaliana landsberg
aatttaagttcttgtcttggtcttccctcgatttcaaacgacattatccaaaaccagagaactacgaattattcggtgagttctctcattgatacgatcctcttctatatatctcattgtttataacccatttgtgttcttctagcttcgaagcattttaaaagtttgtacctttggaggtttcacattctctccttgaacgattttgctttattttgttcagcttccgttctcgacgaatcttctatttctctgtcgattcattgatctgaaaatctaaaaatggattcattctgatttaacttttatcttgttcaaactcatttatgatcccaaatttgttcgcttcattctttataaattagaatccttttttgttcttgcggcaattatcttccttcttttctatgattgaaagatttgttacctgcagaagttaattccattgatttcttgaagatgcagtatctcttgctacttaaaagagttagagttttt

SEQ ID NO: 41541 - DNA, 165 bp, Arabidopsis thaliana landsberg
cgcacaccaagcagtggaggggtttattaaaagaatcgggggatcactcacgaaataacatatgagctaaaggccaaggaaaggccatgaacggactaaaagccgcgcagctggcgttactccatatgctccgaccacctgacgagcagcacaaaaatcaaccct

SEQ ID NO: 41542 - DNA, 687 bp, Arabidopsis thaliana landsberg
tgacaacatcgacgatgaagagagtgaagaggtaaagctatagggctactcggaatctcattactgtcttctaacatatcgctatatcgaattctcatttacaattctcggtttttttttctttgtttgtttgcataaaggtgggtgtatcagataggaataggccaaggaaaaggcagagaacgaacacgaaagtgaaaggaagagaatgggttctgaggaagaaagagcaaagtagaagaaaaggaaaaaatgttcctgctgactccaagttcaccagtagaaaacgcaggacgcgtttctagttttgttatgatacctaaacgctagttagagcgttttaaaagttttgtcattaaaataaattctgaacatcattactgttttcgatatttaaacgtgtgtgtactcaacatttttcttgctctctgctcgaaatgcatattgtaatttgtgtttgccttatcaatttttcagtcaatattgtgtttagtagttgacggcattatcaaccactcacgtacactatacttttggcaaacaaaaattcaaagtaacaccaaatttgtcttcacaaagaggtaaaacattaaactttttcttacaccaaatagaccagaagccagataacactaccaccagaaacaatagagaataagatgattatataagccatcacaatttaac

SEQ ID NO: 41543 - DNA, 110 bp, Arabidopsis thaliana landsberg
tacgcggtgcagaacatcctcgccacggtgatctaccacgtggccctcacccgccggatcggggactacggcctctcgcgcatcgtcggcagccacgccaggatcctcgc

SEQ ID NO: 41544 - DNA, 457 bp, Arabidopsis thaliana landsberg
acttttttctgattctatggtggttgatttattttgttggatttgcttctcgaggttttgtatttagatttacggtgtgggtttataacacatgggagcgcttatataatgattcatggggactggggactacttttaaagtagggccacactactcacttgtatagaatggttcatacttctgaaatcgaggagagctattctctgatttaactgtgacatttgtatctaataagacctgatttagaaacttgttgagagattcagcttaggtaacttgttgtgagatttgtttctagtctctctaatcactgatttggaaagcaaaactagtgtaactactgaatgaactcttttgggacgggcttactttcttgtgaacgtatactggtgatggttgctgtgtatcttgcttgggtttctcttttaaagttcgcctttctgtttgtagtataaa

SEQ ID NO: 41545 - DNA, 549 bp, Arabidopsis thaliana landsberg
aacgccttcgatacaatggactctttggtccactgcagttgtactctcgatcataattacacgaattaaatcctctttattcaaaatcggctattacttatctaggtatgcttgatttcatttgaaggttttataaaaggttgcaggggacaagtccaaataatatgaaccacatctgaccctaactataaaaattaatccacaatcgattataattattaaaaaaaactgtatctaaagcatacgccaatccgttaaaagtaaacaaaatctttatgcaaaccttatagaagttcgaaaacaacaacataaataatttctgatcataatcaaagaatcagaaaaaccataactccaaacacgaacagcttcatcaccgaaaagctttctactgccacagccgctccatagtaattttcaatagggtacaagtctcccggcggatatgtgaatacgtaattaggtggaggtggaggtggcggtggcggcagaggcgatggtggacaggaagatttcttcgggggtggtggtgaccgaagaggaagggag

SEQ ID NO: 41546 - DNA, 903 bp, Arabidopsis thaliana landsberg
  unsure (1)..(903): unsure at all n locations
aacattcgtgtgtagtagattaaaaactgatcactctaatgttatactaatgtgaatcgaccctggcgcgaaagggctggaatctacacgtaagttgattaatgattcacactttcttaatgccaataagtgagtatctcgtaatcttgtaaactttttaaaattttaatgagtgagttatctcgtgattaatattcaaattatattcttcagtatcgatcgtgtcatgtatggataattggatatacgcaagtcttatgacacacaataaaatatgaggaaatttgacgtaagggttatatgctggcggcatttgagctgtggaaaattgaactatatatgaggaacatgctaattaaacagcttcagcggaaagttgtgcaaaacacgttttgatgtataaatcgcttatactaattctcatatactatataaatcgggtcnnnnnnnnnnnnnnnnnnnnnattttggttaagcgacacatgtagtggttgtacaatcttctcaaatctcattgtcagattcagatagatattcagcaatatataatctataaaaaaacatgtgatagtacttgttgaatatatatatatatatatatatatatatatatatatattatagaagcttaattattagtctcacaagtcacaataatgcgaaacaaatgtgattgaggcttgccatctactacaattgtgtgcataatttatgaaatgggacagtctggacataatgagaagaaaaaaaacagagaagaagagataagctgtctcctttgcccatgatattcaaaccattatttttctgtaataggtccatgtgtgtttcgcagtaacaaaaaaaaaaaaaaagttcttggcaccaaagactatctatttcgtagatatggtctttatgtat

SEQ ID NO: 41547 - DNA, 745 bp, Arabidopsis thaliana landsberg
cctttccttatctactaactccatgtatctgctttaaaggttaatatataactggactaagcaaaataaaagagagttgggttttcattatagaatcgagaagatttcatgtccctatatcaatcacataaagcgttttccaataacataaaaagtcggataaatgaaaatatttgagaatctaaaacaatgtcatatatactttaatggaaggtccttttcttcgaaatatttgctcaccgaaatcggtgaaagtgatctaagactaaaactaacttgtgagtaattcatgtgatgggccttctgcatcgaaaaagagcatggcgatcacgtggcagcctctcttgcgccgtctcagtattagcctatcacgatagagtaagccaatgtatacagcatggcgatcagacacatgatgatgatcgatctgaataacaagattccgaaggatgtaataaattcatgtgaacagtgcttcgtagctaaactaagaccagagctattgaaatgaggtaaagtgttttctttgtaaccccattttaattaggtgaaatatctagcgcacacaccaatctgattcatataatcataactagcttgtaaactacaaatttatttttcattgtgttacaactagaccattcccacgtgaccattcacgtgctcctataatgaaagaaacctaaagaagagacgctccaattcgaatagacatcccaagcttatcctttcttagtaaatcaaa

SEQ ID NO: 41548 - DNA, 426 bp, Arabidopsis thaliana landsberg
tttagcgagagagcatggagtagctaggcaagaagagcacacaaatcaagcatgggaaactgtttattcggagggttaggcgacgaagaggaagacttattgatcaaagtcataaaatccgacggtggagttcttgagttctactcccccgttaccgcgggctctgtctcccacggattctcaggccatgctcttttctcggcccttgatatcctctggaaacccctggctcacgaccacctcctcgtgcccggtcagtcctactatctttttcccaatattgtctccgacgagttgaagacttttgtgggaagctgccacgtgagatccaacagcgagtccttgactgcgataaccccgtacagaatgtctctggattacaaccacggggtgttgaagcgatcatacaccgacgttctttcaaga

SEQ ID NO: 41549 - DNA, 628 bp, Arabidopsis thaliana landsberg
acttagacttcaaaatagggtcagagacaaagttggaaagagactccgcccgatgtctcttcgtagaaccttggactttttctttcttttggattagttattttaggattcaataggattttggccaaaataaaggattcaattgaagtagaatggacccatttactaagccttttactttgacttattctcttcttctttttctctttctctcttctcccttagtctaacataatatgattccatgtattctttatagccaaattcttttctttttgggatatcacaactgggatatcacagctcaaaatgttccactgacaatggatctctgcttctgccgtgcttttaggaatgaagaaacgaaagtattaacatatatatatatatatatatatatatatatatatatataaagattaaaatgattttttgtacaacaatattaaaatgagtggatttatcatgtgatataattggacatgtttatggtcacttgcagtttattatatatatgtttgtttttgttaaagttaattatatatccatcaccaaagaacaaaataactaacactaattaatagcatgtctccaaaagaaaaagttactaattaaacaagaaagctat

SEQ ID NO: 41550 - DNA, 621 bp, Arabidopsis thaliana landsberg
gaaaagggcacataagctagattaggatttgataacgtacgagaaaaaatcgagaaaaaatgtcaacccttggtgggagatttaggcgaattttctaatctatcttcctcttatttttttcttggtggccaataaaactagagtttttagagggtaacgaatccaaaccccacactcacatgcatcgaatccaatctgtttctccaacccattcattaccaaaacagcagataaattttataattcatcaagtctaccaatattaattatcttctcataatcataaacttggttctctttatccaatattatcttctcataatcataaacttgattctcaaacattattactaaatctatttttcttttccccttctaatattctttactttaacaatacaaatacaactccttttaagacttttttttatagtaaagagttatacataacatgtttggtaacatagtaaaatagctaatataatagaccttttctaaaaattgtcaaaatacaataagtgtaattggtggataacatgtctactttaaaaaactttttagagtattaaaaatgtcgtcccataaactatataaatgatcatcataaatgtattacaataa

SEQ ID NO: 41551 - DNA, 977 bp, Arabidopsis thaliana landsberg
  unsure (1)..(977): unsure at all n locations
ccgagagttgacagaaatggacagtagaatttaagaaaaaaaagaagtcgttttcttgttaatctcataaacaaggcatatggaattacgaaaaaaaaaaaaactaactagctttgataacaaattattgctttgcttgcaagttgcgtatatctaggattttttaaggtacatatatatctgcatagctttgaaacctgacatgttgtttgaaaaattctgacgagcgttctctatctcggcaannnnnnnnnnnnnnnnnnnnnnnnnnnnnnncacccaaatctgcctcctggcttaattagatgttggtggtgaacaagcgagtatcctcaccggccttcggtccaagtcttagcctccacatctattttgaatcctcctagtttatttggaaagagagtacacattctacttataatactatatagattgatgaaagaaaccacgttgcgtgtggggaactggtgatataaatcaatattataagttccaactaatttattacttcatgtttataatcttttactgcaaatgcttttcactagggttcggggtttggactcgggtttttgggtgaggctcatagccccgtttgggtatctataatatttacgtttgtttcagatagggttcaaactttcagatattttttttgtgtttttttttaatatgtttatggttaaaagaactatgaggaaatatcaaaaatactctacaacatatccgaatttcatttgcttgcctccttctttacttaaacttcccgctaacccaagcgagcattcaaatatctgtcatccggaaaatttggtcaaaaagaaatccaaactactcataagtattcgaaagtacttcaaaatatttgaattaaccgaaaaacttgataagaaaaagctatccaaaaatactcgaaaatatcttaattacttaaggctatataaaaatggggaaaatgtcaaaaaaatacactaact

SEQ ID NO: 41552 - DNA, 585 bp, Arabidopsis thaliana landsberg
gttgttaataggacccactagggaggcttatatatgtaccttcatgggagtgacattgtatgtctagactccggttattggagctgaacttttgttttcagcagtgtaaaatgcgagtgcactttctcctggctttactctaacctataagaaagtaccaaaaccaaaaagacatatcaggtaaaaacacactaattcgtctcaacattcttcttgagatataaagtctaaacctctctttgtgttggagtgaacttccactgcatcccatctgcaacatcagcattgaactgcaccacaatctccctgtttaccagacaatcatagtagagaatatagtaagctagcaagttcattataaacacatataaagaagaatggtgttaagaaacatataaagaagaatggtgttaagaacagagaaataaacaccttttagtgacggtaccagattctgaatgcctagcaatcttcttctcaacagtctgtagcataaaggccaacaaaaagactgaggaagagcccactagtggacttgtaaactcaagaggatcaaaatagaaaggaagaaaacaaaacggattt

SEQ ID NO: 41553 - DNA, 470 bp, Arabidopsis thaliana landsberg
tttcgcaggctttgagctcttttctactagggttagggcagacggcgcatcgaggcaagggcagctcgctccgtcggctgtcgctcgggcaaagtcagggaagggatactggaagcatgatcttggcgggctgccacagcccatctaaaccccctttgtatccacccctgttgtccagtgcaataggcatatcactcgacaaagacaccatgactagacacctgaaaactagctttgctgagtgccagagtcaaggcactcgtaaagacaccatgaatggccacgtggaactttgatttgctaagtgccaaaaataataatatgctcgacaaacccagcgactttgtcgactgtcatagccaggcactcaacacagagctctcggtaaaaaatcattgataaaggctcactatgataccccgtcacaacaccttttctttagcgagtagagtaccgattcagcactcagc

SEQ ID NO: 41554 - DNA, 560 bp, Arabidopsis thaliana landsberg
tttgatgtttttgcttgaaaatttgtgcattttactttgtccatgactcacacgtgacaagaagcatcaatgatcttattgctttactttaaaaacatgtggaagttccacccaacgccaccggtacaacaccgactccatgttgtacaaatctttagaactagaaaaagttctattggtccatgaatgtattgcatccatatatccattctaattatctgtaatgggaaaaaggtggatgatcaatgagttgttgaaagtcaattttgtattgcaaaccattcaaagaacttgcaagttggaggtgtgcaatcttttcaaattaatttgttgttaagttcatgttcacaacacatgaattgtgcaagaatcctgagcaagctatgtattctctagatgtagtgagcttctatgtaattggtcctaggtcttcgagtttaattccacacatgctgtgctctgtgcaaagtcaaataaataaattaaagtggtgcatgctatgtgaaagcatgttggccccctattgtttggtggtcaatggtaacataagattatatgac

SEQ ID NO: 41555 - DNA, 544 bp, Arabidopsis thaliana landsberg
ttttttatactgattcctgacacatttttaccaactaacattttgcagttgctactgaagttcctgaaaatgtattcttagtggaggactgtcctcacgattggttgtttcctcaatgttcagctgtggtaagccctctttagattttcaatatattactacattcacatctccgaagagttatcttctaattgaggctgtttcttgtgttgtggatataaaggttcatcatggcggtgctggaaccacagcgactggactaaaagctggggtataacatttaagttgctttctttcatactcatcaccgaagtgtcctgtgttggaatctttaacagttttattgaccacatgaaacctgttacttcctatattcttatgaattccatttgtgtcatcagtgtccaacaacgatcgtgccattctttggggatcagttcttctggggtgacaggatctatgagaaaggacttgggcctgctccaataccgatagctcagctgagtgttgagaacctcagcagctgcatacgatatatgctaca

SEQ ID NO: 41556 - DNA, 519 bp, Arabidopsis thaliana landsberg
ttgaatggttgtgatgttgaaaaaatagattaatactaccagtaatgtttattatatttaacatgtgttatgtgctaagaacattcctggatccgccactgttttatatatatatatatataatgctgcagtctgcatgtacttttaattcttcagtaatacgacatcatatttatatacgtaaaatcgttagagtactgttaacagatttgtatacgtaaaacagttagagtttgaggtactgtgtagtcgtcagatttgtatatcctatatttaaccttataagattcggtcgacatcgatttgtatatcctatgtttgagatttcggtcgacatcgatttgtatatcctatgtttagttataaaagattcggtcgacgtcgatttgtttttccttgatattttgcagtgaaccattatcaacacgtgtgacaaaataatgagtgattctgttaaatcacgctgagtcgtcgataactgaatgtcgacacgtcacatggttgtgatgttgtgcacaa

SEQ ID NO: 41557 - DNA, 587 bp, Arabidopsis thaliana landsberg
aagtactttttttttatcagactgatgttctctcaacgaaaatcattatgttaagtttccactgatttgcttaatttgaagcaaaagtcataacaaggagattcaaaattatttttggatagtgtcaacggttttagttgacatagtaacaaatcaactcttattaattagttacatgtgggtgtggtcgatgaataacaacgacctttgtctctagttttacttttatcgatgaactcatctctctctctctttttttttaatatgttttttttccatttgaccagaaaattatattctgtaatatcgtagcacacaagcatcgtaattcctcctagtctaaaagtcaaaacaataatctcaatattgtctttatgtactgaaaaatagaatttggcttctgtaaaggcggtctatttttctaaagaattggtgtgtttaacctaagatcataaatttatattgcactagcgtttgactaattttgaggatgactagatcatttacatatggttggttaatctacctagaatagttcgaatgaactaccaaaacacgtataaaaatcaaagtttattaaagagtac

SEQ ID NO: 41558 - DNA, 486 bp, Arabidopsis thaliana landsberg
  unsure (1)..(486): unsure at all n locations
aaatgttgttttgctaataatatttagtaaaataattggaacaatggtaagaaaaagcttgaaaaatcaaattttgtaaatttccccttctacttgttagtaattaatagaaatagataaatattagtttcttttgattttatttttcccaaattcactagcatttgtggaaaattgatgtgagtacaaaactgatgtgatttttctttgttattcctcaaaaatataatttttcaaccttcaattttaagttttttgatggatatgagcagcttttgtcaaatctattaaataaaaagacgtgtgccacaaattatccacatcagcaataagtttttttttaaaacaacatatatatggaaaaataatagctgtaaaatatttatttcccatttaggttaaaaaagtagaaatataattggagataagagacgaaacagctcacagcaaactaatcagtaattagggttatagctctntaaagat

SEQ ID NO: 41559 - DNA, 393 bp, Arabidopsis thaliana landsberg
tttgaccgatagcacgtgacactcgtaaaaattggactagattaaatatagtctaaaatatcgaagctgatctcgtttggttcggtccatatgtttctcgcccagatccaaatcttcggatataaataactagtaaaaattcatttgattccgagagtattcaccaaatcaaattctatctaaatttttgtatctgatattgttttgatccaacctacttatgtctcttttaaaccctaatcctggaacacatattcatttgtatcgttgttgtaaaaaatgggaaaaagaaaatctgaaaatatctttctcctatccttatctaccgccgcccccttcctcctgatttttttctcaccgcgcatggtctgcagctagagatgtccaaatggg

SEQ ID NO: 41560 - DNA, 1090 bp, Arabidopsis thaliana landsberg
atgtagttggttagtctggtgagggcttcagttggaaagttctaaattgttctgataggtttattaatattgagttgttactaaataatgagaattatgactaccaatagaagtgagaatctagctgtgattcacctctgtatgttttgttgccttgagataacttaaaaaccctttctcttatttcgatcaacaggggtgtgcttgcagcaattgatgtcatctcagacagtttattagccggggtatgagctatacatctattttacatttcatgaagacgcctataatatatctcaaagtgtctgaccctaatgaatgattgcagatcttctactttatcgggttcggtctcttctgcttggagtcactgctgagtctatgggttcttcaggtaagcctctgatcatactttgcatggcttcttcaaaaactgttgacgttgatgaaaccagtaaacatttgattgatctggtttcccattttggctttgcagaaaatttacctctactttaggggaaacaagtgaaaaggagataagagaggaagatgatggtaacttcccttacgataagaaaaggtttgaaatatgtgtatctcctatgaatgtaattaccattttaccgtttgatgcgttgtgttgattgaggtaaattctttagttactatagtagcaagagagagtggttgttcggccatttctttaggttttttactctgttcttctctggtctgtaatataccaatatcgtctctgagcgtttgggattttttttcggcgaagtggatggactattaagacaaaaaaatcatagctatgaattattactagcgactcacttcggtctgaatcttagaatctggtccttctgattatcattgcgtaaacgcgtataacaaagtagatgtttcgatatgtccatgaactttatgaattcttttacttgaaacaccatgactcgagagagataaaacttcgttaaattcttctgtgaagcaaagtaagacctttttttatttgcaactctaaagtcgaactcaaagagataaagaactttttggaagattatgtgagcatattttactttac

SEQ ID NO: 41561 - DNA, 399 bp, Arabidopsis thaliana landsberg
cgtcgtcactagccgcaccagctcaccgataaccaccgtagctcctcaatcgatgagtgccacggtaaatcgcgccggtgactcaccccttcctccgaccgccacgcgtcaccactgcaattcccggccactgctgttgcgctctataaattgaagccaccgcaagctccgtatggtagtcaagtaccccgacacccagtatttccctcagttgatcgccagcgagctcgaatttcacagttcccccaatttggttttctgccaccgtgaaaacgacctcaccacggccagcgaaattccggtcagttcatcctctttgctttcttgtttaagtattctcatgaacctgtgatgctcgtcgacccacccgattgaactgaaccgccatgaatcactggg

SEQ ID NO: 41562 - DNA, 444 bp, Arabidopsis thaliana landsberg
cgggaatacccgaaccctgtgttttcaagtcgtctaactaatcgcgattagtcacgattagtcgggctagtcggttagcagagctcgattagacagccgactcgactagagtacctaatcgccatggtcgtccgactagtcgacgattagggccgattagtcgctcgattagccggttctgggcgactaggtttaggacctagattttttgatttcctggcttcgtgggcttttttggcgggcggcccgactacaggcagttgaaacgccagccacctctactgaagatggaacaccgaacgcaagccgccacttctgtcttctctttatttccctaattccctacctgctcggcgactcttcttgagttcttgttctggaatccaggcttccaaagtccactctagatttccagttccagcacgcgtgaatccaatcccgagt

SEQ ID NO: 41563 - DNA, 523 bp, Arabidopsis thaliana landsberg
gtagtctgcattcatattatgtggagaacactctgtcgagcagtcaagattttgtgacgaaccttatagagttggtcaagaatatgcatttccctatcgattgaccagctttttaatatttttaagacaatttttgtctacttcgaaatctttcgtataaattttaaaatgaatattttggtttctagcatcaggtttgttgatgttgtattctaatccagtttgagaaaccaatcatccttacatattttaatttagtttgtgaggttgacaaaaaaacaaaatctatagaaaactgcatgacgtagggttcaattttattcattgtcttcaatcttttttcctgttgtttataataaaattaataaagtttgatagttgatgtttaaatgttacaaatttattacccttcaaaagatatcataatttttgtgtttttaatttcagaaaatcattatgttttatacaatttgatgttgaagtcttctttttgttccactttgtatctatattattattatat

SEQ ID NO: 41564 - DNA, 221 bp, Arabidopsis thaliana landsberg
caaacctaaaaaagcatgacaactttaaaggtacttaaactgtattggaagttggaatcaaaattgtttatttactaaacgaattttcccctaggatcttctgatttgactgattcgtttagtatattgtttaatcttcttttttttttggaacaaatgaagaactgttgagtacttgagaattaaaataaattaaaattgattctttgattatttttttt

SEQ ID NO: 41565 - DNA, 448 bp, Arabidopsis thaliana landsberg
tttgatttatcatatgatgaacatcagaaagaaggaaagagagggaaacttatgtgatgtccttctcacagagctaaagacaacagcatttttttttccctaagttagcaaaatacccatttcgtcaaatatccgtttcttctgacaacaatttcttcgaataaaacataacaatattaaaaagaaaaggtaaagaaaaaaacaaagattggcctgtcttctctgcctccatattaagttagttattttatatgtattcttatcattactgttgtgggtagagtaaaaaaaacagatgggttttgcagagactgttttgcgtgtgttggcttttctcctttattgtctttccccttttttatcctgcaccgtaatttaattattgtttagctaaatttttattgctgccaatactagaataatttcattttattcttgcatcacaagt

SEQ ID NO: 41566 - DNA, 433 bp, Arabidopsis thaliana landsberg
taaattcctatttaaactaaacaatagcttctttatttggagtgggggggttgtgttcatggatcagtatatccagaaacaaatcagtgcaacagaagtaggcataaggaaatctttgacacttgttgaatcctctctcaacaagagatcaggtacgctcattcactttggattatacgtttttctcttaattttggtggttgtctagtgttgaaatgtgcattggcggattcattttgcatgatttttttgcttcagaaatcgagactgatgaagctgaagtggagaattcactgacgcatagtgaagctgttgatgaactctttgctaccacctatgacagcctcagggacaccaatgccaattggcataaccaaaacccgtgacctaattggtaagcttatacataatttttgagttatgcagcacttta

SEQ ID NO: 41567 - DNA, 292 bp, Arabidopsis thaliana landsberg
gttttgagtatttttaatggctccatctttcgtcgaagggaagggaagaagtcatattttctagaatctaaaaagacttatgtgtcatttgtgttggcgatctttgctatttgtctatcttttggggccgaatccgccgtgcttttctttactccactccgttggttcctgctttgaaaagtgtctgcctaccgcattcttctttcctttcttaaaatagaatttcagtgataggaaagccatttgtcggacaacctgcctaccctagcttgtagctgctctcactcactac

SEQ ID NO: 41568 - DNA, 659 bp, Arabidopsis thaliana landsberg
tctaaaataaagtttaaatagagaaaaatataaagatcactatttgaaaatacccttaaccagtcgaagttgttttatattttaggttcattaaaaaattcggcgagccgaagtatacactttttgagagaattagttggatagtaaacgtatggatcaccacccgaaaaaaaaaattcattttctatatagctttgataccactaataataccccagccaaatcaaacatgaatttgtttctgaacccaaaaagaagtacccgttctgattcggtagaagaaaaataaaatcgaatacgaaaccatgaaaatctcttaatcgaaattaataagtaataacccacccttttgtccaaaaaaaaaaaaagtaataacccacccatgttatgtttgtctacggaccaaaaaaaaaagttatgtttgtctacggaccaaaaaaaaaagttatgtttgtctacgagtccaaagacaatgagattgacgtggcaagctcccatggatagaacaagtgtcaggtctgtgttactctttccccaaagtgcatgagctttaattctcttcgtattaatctttgtcaatatatcctatcgacctttcgtttcactacatattagacctaggttagaataaccttagatggggcttttacagaaatgag

SEQ ID NO: 41569 - DNA, 980 bp, Arabidopsis thaliana landsberg
tatttacccgaattattcatatgtaacccgaataccgtacgttgtcgggtctttgaacccatacccgtctattttttaattaaaatatttttattaatatcttcccaaatgggctttcggcttttctgggtttgggccaaacagaaaacagaggttacaaaaaagcaagatatcgccggccacttcgccgggaaatagaaaacagagggtttaggtttattagtctttcgattgaaaacatatgatttggttttgggaatatcggtgaagtttttctggtttgaagaattcattatctgattctaatttaagcttttcaagtttatgcaaaaagttttcgaatttctcaagaattaaggtttttttttttctcgtggaatgtttgctcagtactcactactcagtagctaggtcagagcgaacttgtttatgcaaaaaagtttgctaatttctcaagaattcagccttttttttcctcgtgagttttttgctcagtagctttagcttgatatgtggaattgttgcagaggttatgtggtatgagattttcagctaatggtaggttttaattacttgagctgagctagaatcatataatgtagcaaatttggaattttttgctttcccttgcagatacatctttgtttgtttgactcaactcaatagagagaccttgtgtatatacaaaaggtagcttgacattatagtgtagacaatcttgttggcctaagaaacaaattcgactatacattgtatcaatccctggcttcaagcacagaagaggcacaacaacaaaaacgcttatgagttctatggcttcttgttccctttttcagctaccgagcatttcttcctgtgtaacgtcgctgctgttgttgccctgttaaagcttggttttttcttgatgcagacttttctacacgtgctttgcggacagctcggtggatctgcttctcatgctctttaagcaaatcttcaag

SEQ ID NO: 41570 - DNA, 660 bp, Arabidopsis thaliana landsberg
  unsure (1)..(660): unsure at all n locations
ttttttcattaaattcccataaaattattgtgctttactttaatgaatatgaatctttaaatagtttatgttcatagagtgtaattgttgatacatataccatcttttacgtgacgactatacaatgagatagcagtgtaagaaagagacatacagagttggcagtacaaaaacatataagctgacgctacatttttataaagagggatagnngnattttacaattaatatatacaaaaatacttaattacatattgccatctgtaaccaccaaaaaatattattgtctagtataatcaagaccaggacaatctaatcagacatgagaaagaagaaaaaataatggtcatgcacgcatatatgattgactaattggtaatgttccactctttatgtgaatctactaagcttctaaactcaaaaacaaacttttacttttccatgatcctactaaggaaagctggaggttttctatacaatgcacttctctgcaattattgaattccttttatatgaaaatatctggattaatatatatgactcctcattgagtctctgatctctgattaattattaatgaatgatcaccctcaattatttggatataatatcgtataataagctacttgctttccaattcatcatcattacacaccattc

SEQ ID NO: 41571 - DNA, 481 bp, Arabidopsis thaliana landsberg
aaatttaattatcttacatctatctgagtatcaagtagtagctaataactttgttttttaaagtacgtttttaatgattgaattagattaaaggtatttgataacgaaatctgagaaagatatgtacttgtaacatcgaagtttcaacttccagctgaactttaataataggattatttggtcattctatcactaataaacttggtggttaagaatcaaaagagactgattacaacatatgatgtgatgggaaaatatgtaattaactaaaggaacttcttgtgaccttatatatgaaaagatattattatgaccttattctacattactaatctagaatctttgacttgttctggacgaaaagcttattttcgtcttccaagttccaactaaacttgggttatattaatctcagatatagtataaatacttatttggtaactaaagttaaattacctaggaaacctagagccaagaattt

SEQ ID NO: 41572 - DNA, 479 bp, Arabidopsis thaliana landsberg
  unsure (1)..(479): unsure at all n locations
tcgatgtcgcaattccattatccgatttccattgacttgggaaaacgttatgtatttgatgtgaaactcgctttttcttttagatttaatttaacattatatttcaaataaataaaatacagttgaattattcgaattgtttctaaacccggtaaacaaaatccaaactacccaaaaatatatgaattactcaaaatattccagtacaaaaaaaaatttccaaacgaatttaaagtactcaaaaagtaaactaagtacccgaaactagataaaaatgggttaattagatttttttttttaagtacccgtttggatcaaaaagtttcggtgcccgtaatactggcctctaagnnnnnnnnnnnnnnnnnnnntctaatttagtttgattcgaatttttgagtacgggtattttgtacgtttgctttgttaaaatatttaaaacaccaattgttaacctacgagatgaattttgataggtg

SEQ ID NO: 41573 - DNA, 806 bp, Arabidopsis thaliana landsberg
gcggttttttcacaattgatgagctacaacaagcgtgtgttgaacatggcatggctgatgttttccttgaagacatcatcaaagaagttgatcaaaacaatgtaagcttatatgatgactctgttccacattcctcgctaggctaatgtcgaggcatcagctgataaaaagtcttataggctcttatgttggtctgaacaggatggaaagattgattatggtgagtctgaggagatgatacacatggtaaatgctggtgcagtaagattgagctttggaaataatgaaaacattagcatgagagacgcgtagaggttgatctccccggagtttaatattttagtgcgatcgtgactgcgaaaatgttcttattcatggaatcaacaacctcaatgctcaccacctagaaggcgatgaaagaagaccaaaccggattcatacctgtggatggttcgagttttgtttaacgactgtgtgattaatcgtcaagtagttttggaggttttttctttacctctttgttgcttgttcattatggccattgttgaagttagtgagctttgttcatcatctgccattgttaaactttgttcacttgtatttgaaaaaaacaaaaatgtctttgtatgttgtgtgatttctaagcatttttactttgaaaatctatttcttcttttttagacgatcacgacccttcatccatatcggactacacaactcgatattgaataaatttatatgagaatagtaccaatggcctatgatgtggaagatgatgagctagcaagtctcaatcatgtaaatga

SEQ ID NO: 41574 - DNA, 130 bp, Arabidopsis thaliana landsberg
tatacataatattcaatggatagtgtgactgaaatccgttcgaggatatttagtattatctagatccgaaccggattccttattcggtttggcttggatcggctctacaccacctttcccacaaacaatc

SEQ ID NO: 41575 - DNA, 285 bp, Arabidopsis thaliana landsberg
agccgtagcaccacagaacaaaagctcacctcccttctcctccgagctctcatctttcttctccgacgaattcatcgcttccgccattacttctccgaccaaaaactttcaaaatttcaaatttcaaaaagcagatccaaagacgattataggaattcggatacgcggcgaatcgtgttgaagctagaaagtggcgggaaaacaacggctagtagtgtgattgagcagatcggaagagacgacaaagattgattgaagaaaagggagaaaaccaaattcagaaac

SEQ ID NO: 41576 - DNA, 596 bp, Arabidopsis thaliana landsberg
tccaccaatgttcagacccatctcgacaacttgttatcttctcctttcaacaatgaccagtcacctgaagagctcgtggaggcaacgagatctgcagctgctttagcggttaaagctgcaaaggctgcgagagctattgctaacgagaaggctttgatttccgctcaggcgattgctgcggctaagagggcattggaattggttgattcttttcctaaagaagcaatggctgattgcaaggagaggtctcctaggaagaacaagcagaagaaacatgtccccgtcgagctcttgtattcaaaggggcagctaagagacgaggaagatgatttagcgcgtaggttgcatcgagctatagacaatacgtcgtatcctagagtcttgagaactagcgaggagaatggtcagagatacaagaagcagaagaagaacaagagcgtagttgaaggtgggagtagtagtattatagtgaccggttctatgaaagacattgctggagttgtggattcagacagctcctatgaaggattagagatagctagatcaaacagggatgaagcggattcgatgctgatgatggagaaatcaggggaaga

SEQ ID NO: 41577 - DNA, 196 bp, Arabidopsis thaliana landsberg
catttctagcatcatcgtctcgtcctggagtacttcggctactccgctttgacaaccgtgcattacgacgacactcccgccgtgctgcaccacaaacgtcgcgatggccttctctacggcagcttgatgcgtcgccctgtcattgacaccctcatttgcctcgatgcatcacgccttcgtatatggctgcttctca

SEQ ID NO: 41578 - DNA, 2660 bp, Arabidopsis thaliana landsberg
  unsure (1)..(2660): unsure at all n locations
tatgaaaatgcaggtcagtcgcagcggtcacacagtgttagggctagttcggtattgatactatnnnnnnnnnnnnnnnnnnngaagaggaaactaaacgatcttcatatgtttgatctcaaatcatccacatggcttcctcttaattgcacgtgagttttaactttttaacatttttctgatgattgtttacattgaactcctacttgtgatttcttgatacggttcttctcattaaaaaaacagaggaacacggccgtgtgcaaggtcacatcatgtagccacgttattcggcgacaaaattctgtttgtgtttggaggttcgggcaagaacaaaacactaaatgacttatactcactcgactttgaaacggtaatacttattgctataatgttttttatttatttggtttcttgacattgaacatctcttatctcttggtgtcatcaagatggtatggtcaagaataaagataagaggatttcacccatcaccaagagcgggtagttgtggagttctttgcggtactaaatggtatataaccggaggaggaagcagaaagaagagtaagttctacttcgaaactgcgctaaatgttacctggatcttacaagtttgctttgcttttccaggacatgcggaaacattggtcttcgatatccttaaggtcgagtggtctgtagcaagcatctcctctcaatcttctgtcacatccaacaaggtggataaatagaaaaatcacattcttatatgtaactaacttgtatattctttcaaccccatctgttaaaagctcagttattgtcttgtggtatgtttgaaatagggatttagtctagttcttctgcaacacaaggataaagatttccttgtagcttttggaggaacgaaaaaagatccttcaaatcaggttcgagccttatcattccgctgtattgttcaagatctcaatttatgtatgtgttttgatgctatgtctgaactatgaaaaggtcgatgcttttaccattgacaagaacaagagtgaatcaccaacacatccgcaaacaacttccaagaaaaaccccggccggttactgtttggaaaaagatcttcttcctcggcagttttaacctctgatgaatcggttaaagcctcttcacagaggctgattgattcagttgccagacagaaacttgcttcagccattgaagagcatggtggctctggtagaaggtctttatcagagattgctttcggtgatcatcgtaacccaccttctggaaatgtctctttgcgtaaacagtttagcaccgaagaggaatacagagcggtgattgaacccgcaaagtgttcagaagaagacatttccgtgcctcctccggtatatatagttagttcatgattcacctgcatttattgacgttcttgaatttgcttttaaaacgtcttgtcttggtttcagaccacagatgacaatactggaggagcaaagattacagcagagaaaacactttctatggtttctgaccgtgaaatcttaagtctccagaagcaatgctctgaaacatatcctttagaaaacgttgatggcgccttgatattccaagaaatggataatatcaactttgcaggatcagcgtcctcatcgagcgtgtaccaattccatgaagcgaaaatgacggctcttataagaagaaatgggattctggaagggcagttagaagcagcattggcgggaagagaggcggctgagaggaatgtgtcggttgcgttgaggagcaaacaagagactgataaaaagttatctgacgccatgagagatgttgaattgcttaaggagaagctgaccgggttagagctcgctcaagaggaagctaatagtttgtcaaacatggttcactccgacaatgtcaggcttgagcatgatgtagcgttcctcaaagctgtcctagacgatacacaaaaggtaaaataatcctagtagatatacaagcgttttcaaaagactgaggattaaagtttaataccgttttgtgttatgggttttgtaggagttgcattcaacaagaggagttcttgcaggagaaagagcaagagcgttccagttgcaggtgtcatcataatcatcaatagactctattcaaatttgcattttcaaaatgtagtattgttctaaaaacttgagatgaacgcaggttgaagtgtttcatctgaagcaaagattacaatctctagagaacagagctgctacacccagaaagcctttccatgtctaaacacagaccagagacaacacgataacttttatgacttccattttgtagtactcgagacatgactgaattcatgtgtgttgtggagtaatgtataatagaagtgaattcagaaatgtcaaaaatcaaatcagatcccaagtagaataagacaagtgacgatataaacagccatttcattaaacgtcaccaactaataagcttacaaagatacacacacatgagatgagactgtttactagtgcgagacttttgatctcaatgatttagcattttttttaggtagacatagaaaataacattatcactgagactcttcctcaggtggttcttcttcttcttgaagaaggttctcacggttgtcatgagcccagaagccacgcacatctataagcatgctcgc

SEQ ID NO: 41579 - DNA, 691 bp, Arabidopsis thaliana landsberg
ataaccggaccggcctgccttttggaaaatggcgtcttcagattctccccggagagaaatatcagtgacccgacccgaatcaggatcgcagctgataccgtaccattccttgcaacaatcagtgttttcagaccaagtgttgaagataccgaggtttggttcgctcagtgacgacttgaaagcattgagagccgtctgatctttaggagagcagcatctgacgacggagatgacggaaatgaaaacgacggcgagtaatgaactaaacggcgatgccaacaactttctcatttttaaaagaaatgtttgatatagagtggtgttgtgtaatgagtctttggattatatagaaacgtagaaaaggagagagagacatttgcatgtgcatggtatcatgggcatgtgcatgttactactattgttctatatattatcttacgaatgtattcttataccctttaatctattgtactaaagatgagtatcatgtgtgtatgtcagttttactttttttaaaaatatttgattaatcgagtatccaaccatgatccggcaatatataagttaatcatgttgatttgtttcaacggtaaggatatatgttttgattttcatggacatttaactaatgcaaagggataaattacatggacattgaagtaatgcatattcttagacgtatttatacata

SEQ ID NO: 41580 - DNA, 1022 bp, Arabidopsis thaliana landsberg
tatcttacctattgggaatgcagaatcggaaatgatagggagacgagaataagatcgaagaagcttttgattttgctttggagaagacggcgtagagcaagaggtcaataatgacgaaacgagttttgattttctcgtaaattttgggttacgtgttcggacggttcgtataagtctggtttcttttggtttagtttcggtttaattaaaacaatggcttttcagtttaattcgatttctgctgtttggatgtgattaatcaccccactaatgatgttattcttacgtttttacatttaaaaaatagtaaatatttttactttataataaataaatatattttttgtgtattctagatttttttgtcaatttaaatagaaattaacaaatagttttaataacaaaaaaaaattaaaacagctaaaaaaatcatatctaacaacattaaatcttaagataacttaaattaaatcaaagacgaagataaaaattccattaacatcatcattttgatcataaactcataaaagtttttactatttaagaaaaccatgttcaaaggctgagtgattctttacaattccgcaagaaaaggttttgttgtttccctgtgaccgatcttcgatactcgtttatcttctgttgtactttagtcgttcactgtgtaagtcataaactcacataagtttaacccaatgagagagcttatctctttaccacatttctctataaaaatgatcatctcaacacatttctccttcaatctcaaatttcacaaaaaccctctcagattttttctacaagctgatcaaaacccagaatccagttttcataaaaacctcatctttcttttattcttctttacacgctctgtttttcatcaatggcgtcaaggaagcttttttttgtcaaacctaaatatatctatccagaaccaaaaccagagatgtccaatgagaatgtctttgaattcgacgaatctgatattcataacttaggcgatcatcaattgcagaattcat

SEQ ID NO: 41581 - DNA, 669 bp, Arabidopsis thaliana landsberg
gatacacgagacgggattcggttgatgtttcaggtgatattttgattgttactctttttgttggaggagaaaggtctcgtttttatgtttctgggatgcaaataattctcattttcttgccataaggtagaaccaaaccaagaatttcgtgggttagtctgtgaaaatgcaaatgttcttccttccaagttcatacatgaagctttccgagatgggtttggtacgtatcctccaatttagcttgttttttttcttctgtactgtactagacttatctgtcaattcatttatttacgttgggagtaaaatggattaatgatattggaacctgacaaatatttcgagtactaatgatgaagctaagaattttctaacacatggtgtaaaatgtgttagccttgaatgaagaagatagattagaggtaggtagtattctcaaaatgtatccatgctccaaaacagagcataatttgaagttgcatttagtttacacatattaatgtattgaggctagttaggtggattccttctgttcggtgtgtgtttgattggagagggtaatggttagtaaatgttggtgtcaagctgtgtaaggaaagaaattaatattaagagactggaagaagctattacatccatcaatggatggtacatggagcgtggtctttc

SEQ ID NO: 41582 - DNA, 130 bp, Arabidopsis thaliana landsberg
tgcttgagagcggggcgctagtaacctttatatgaactaagcttttaaccagtccggtttattaaaccggagcaatgcgggacagacaataattagtggtattacattgaacaggcaccattcaccggta

SEQ ID NO: 41583 - DNA, 515 bp, Arabidopsis thaliana landsberg
tcggatctgtgtacttgtttttgactcaaaagtgtgaaaacaagtttgagtttgaaaatagaacttgagaatagaaagagaaataagaaaagaaaatatacaaggaaaaatatatatgagtacctataattcttcctactagaactttatttgagaatttgttttgatgtttgaaacctagagattaaaaccagaattcgaatttagtttgaatttttgattaggaaacaaaataggaaataaaaaaagagaacaaaagcacttgggctgaaacctccctggcggcccactccctttcctccttcagccagcccaatccgcgcgtgtgtcactggcggggtgggacccatcggtcggccttgggcttgattctgcccgtgcccgcgtttcctgttggcacagcttgtctcactgtctggcgggtccccttggtcatcctcgtcctttgctcgccgtggaaatcgcaacagaaccgcaagcgctcgggtccatggggctcggatcgagctgttgca

SEQ ID NO: 41584 - DNA, 522 bp, Arabidopsis thaliana landsberg
tctggtagttctggctctgtccaatcttctacttccatgtactttctcctctgctccaacattagtttctgtgatggctctgtctctgaataatcctccgccgcatggttaggctcttctgtctcggaagttacaagcaatgacgtgtttggctcagaagtttctgtctccggcgtcggcgtcactccacgtggctgctctgaatcctccgccgcatggttgagaacctctgacttcacagtctctgtctccggcgtcacttcatgtgtctgctctgaatcctccgccacgtggttgagaaactctgacttcacagtctctgtctccggcgtcacttcatgtgtctgctctgaatcctccgccgtgtggttgagaacctctagcttcaaagtctctgcctccggcgttacttcatgtgtctgctttgaatcctccgccgcgtggttgagaccttctgactccaaagtcatcgtctccggcgtcaccttctctgaaactacctccgccgtatgatttactcct

SEQ ID NO: 41585 - DNA, 1008 bp, Arabidopsis thaliana landsberg
  unsure (1)..(1008): unsure at all n locations
gtaaaaaagtttaaggaaatgaatatttatgatgacgagtttagtttgttgcttcaagaaaggatcattatgtacacgtcaatcttaaccaccaaatgtctctttttcgagtatagtgcaaaggatacacgagttacttttcttaccacttgtacactgccatatactccttctagaaattagaggtgaatcaaatatctaagatctgaaaacccatctagaatttaatgtctttagactttatggatttagatacggataccttaattttaaaactaagatatttggatccgatcttagatccgttttaaaaatacatgtaccataaatacaatgttcctaaaaagatctggtatctgtgggagaaataaaaaatgaatgatattataaaaaataaacctactgaatacctatataaaaaaaaaacattttagcaacgttgtagtgagaaaacgtaaatactatgttgttgtgccttattggattgctacaaaggcagtaaccttgttcagttgataagctatgtagaatatactgtataggactaaggttttgtgtgtcaatgcatatgtatataactcaactctagttggtgtcgaagaattgattttatttaaactcatactaatagttcaaaagtatgtcaaaagtatatctttatccattccaatgcttcgagttggtgagactaatcttgctaagaaacttattgcacatatatagtggaagggggattagttagtaagaccaagaccgagcaagtctctaattgtaagaccatatatatatatattttttttatcttttcaacgatatggtagttaaatacatttaccctacaataattggaatacttaatagttaatcgatgagttttatgaaattattgtagaacatagaaagctcatacaagaatactttgagagaaagtctttctcaacacttaagaaacaggcttttngtaagcatatgtcaatacgtttgtctaaaaccagttaccgtgaaaca

SEQ ID NO: 41586 - DNA, 287 bp, Arabidopsis thaliana landsberg
acatcaggatttgagtgatcattattgcagtgatatcactgttacaaacttacaatattatcattgttctagggtttagcatttctttacatttcagctgaacatctcatttatttatatttatttatatagcctcttttacataaaccaaaaatatttcataagcactcactgaagcattctcaacaatacaaatgtgtcgtgtatatttaaagatataaattacacaataagaatcagcatatgtttcagagtagggaatcagcatagtaccaataccatgttga

SEQ ID NO: 41587 - DNA, 468 bp, Arabidopsis thaliana landsberg
ttatacgtggtcgttggggatggtccaaccaggggcacctctataatttcttgtacgctagacagaacacaatctcggttttgattctattcagttgaccaaatttcaaaattattaaaacctcagcaaatgcgaggctacaatctcagtttaatcaactaagaggatgtattcagagacgctgaatctattctgtgtcaacatgaagacaagatctgacttcattttgcttgagatttttcgttggctgaggactctgaatcctggatcttatctcccatgtttgcatctgtagtcacatttgcatttccacgtgcccgagcgagtttctcagcttcttcaatctttcgtatagcttcctgttgtgttgcgttcatcattgtccccatcgttttcttctctcctgcgagctgaatttccattatggtactagcatgcttgattataggttagaagtgactttaattt

SEQ ID NO: 41588 - DNA, 604 bp, Arabidopsis thaliana landsberg
  unsure (1)..(604): unsure at all n locations
acggcagtgatagttgtttggcacaaggcacaaaccaagcctagcatctctggaaaactaccaaatctgtttgatctttgagtttgatagtgaaaccaaggaatgggccaagtccacttccacacaactctgtcaactctgcctttgtgtaagagatctacaatgcaaagtagacatgataacaatgacattgacattgcagccaatgcatataaaggtttatgtgcagaggagatctggtcgaaaacagaagaaggtatctccaacatgaggttggtgatgactaaagaccactcaatcataacctgcttataagaagaaaaaaacagaatttatcgccaacaaatttgttagtaaaaaaacgtagctaagactttaaaaatggtttttgatctaaaagaccttcgttcttgaggctcttagcagtttgttctcgatttcccgagctattccattcaccaacatctcctcatcactgggaatataagcataagcaaaagcacactatttacaagtagagaaagcagtgatcataatattaatcccagagattaaaacatcttgtagctcacttacgacggtaactntaatagaaagtatgagt

SEQ ID NO: 41589 - DNA, 799 bp, Arabidopsis thaliana landsberg
gaagcacaactaaaccaagctatcgagacagaaccactttgccagtataaattagagagttttgttttaggggaagattgcttgttaccacttatgttttcttcttccctctccatttctaagtaattccctgcgaccactgtctctattttctctgccgccatttttctcttcttctctcagtttctttagcttctttacttccactctttaaatagactagtgaaaagctttttcatttatttatttgttttatgggttttgtttcctttcttttgctctgtgtgcaattattgagtaacgagtgtcgggggacgaagtctttagtcacagctcacgagttgtcatggggatatcggtttatgattggttggtgactgagttatgtcacctacttgtgactgttactgttttcggcgagcgtggcgttgtttttttaatgggcttgatttgattgttgggcttatgggccatatttctggagcattacacgaacgggtaggcccggtttgagattgttaattatatattgaccccgataatatgcaaaaaaagagggttagctaattatagattttaaagtttaaagtagtgagagtagactaattgtaaattgaaaatagaagtgatgacaatgatgttttttttttttgaaagaaaggctaaactattattatcattaacaattatttgaatcatgatgattgtaacaactagaaacaatgaaaaaaacatattggtcctttcctccttcttgtgatgaggatgataacgatctttatgtagaaaaatcaattat

SEQ ID NO: 41590 - DNA, 462 bp, Arabidopsis thaliana landsberg
tgattaaaaccaaactgaaattcggctactggggaatatcttgacagagaggagtttaaatcttaagaaggacctagaggtgcttacgtgagacaccaatattgttcacgtggtgtaaaacctaatgaagtaattgcaattttatcattcgtacgttagagaaattaaaaaggctcatcaagatatatactaaagaatctgttaatgtacttagtgagttggtatagcattaacaatataccactttaaaactaaatggatcaaccaatgtattgcagtgactcacaagtcacgacgttctctatcaaattaaactaatgaacccttgagttgtacgacactactatatgtgtgattgtgtgtagtggccacatcgatcagtccatatgtattcttttgctgtttgatagaaaaatacagttatgtataataatccatgagttttcggtatgtggtcatgtc

SEQ ID NO: 41591 - DNA, 542 bp, Arabidopsis thaliana landsberg
  unsure (1)..(542): unsure at all n locations
ttccgtaaagagtccctaagcactattcatatgggtctctgaccattgcacttaagcccctgcactttctattccttcacacatcaagtccctggcgacgacacgccaagcacatggtcggagccgtgcgtacccattgtcgaggacgtgctccaatggtgccgagcatgcggacaccctcagggatgtaacccgagcctattcacgcgcttaatttggtcagagcaccgataactcagctacccgcggtggcagtggaaccggatcaccggcgtgactttaccggtgcacccgagccggtctagcttaatccaaggacgcggaaggactgagtggcttactatggttatggttcttgcacaaacttggatggaaactacccggaacggtcggtctacgtgagctatgtccgcggcggcgttctcggacagtaccatcgcccgttctctacactatggcacggtagcgttcaatcagtcgacaccaagagctgttctagcgtcagaggatgcataaacgcanatgagagggacatgaacaga

SEQ ID NO: 41592 - DNA, 505 bp, Arabidopsis thaliana landsberg
agcagaaaggaagtactaattcagtaaccaattaggtctgatggacaccatttagctagtccagcattctgataaacttaaggggggagctattaattgagcttaacgcacaactttgatacaaattaaaatgttcagttaccatatactagaagaatgaaatctctgtacatgctggctgaagagttgcgcaacttacttttcaactatggagcatatctttgcagtaagatctcctttaaaatcttgttcgcttacttgcaaatattctataagctcctttgctagtggcttcacgttattctcattcactagaaggtaaataagctcaagtgcccttttctgaattgaagcatctgaatcctaaagcacaagatattaaacactttccatttaataaagaatgatctcagtcgacctacacagaattagatggtttactatactaagacacaaagtcggtagcatgttacagctttgatacataaattgcattccataacca

SEQ ID NO: 41593 - DNA, 803 bp, Arabidopsis thaliana landsberg
  unsure (1)..(803): unsure at all n locations
tgattggtcgctttattgttttgaagattttaatttatgagaatttatattttaaaataaaaaatataattgttatatctattctaaaacttattataaaaaaataataatttaatttcttgtttattctaaagattttgtatcttaatttattttgtgattgctatattattcgttttgtatagtcattatgtaaccaatcgcgagaaatcgttaaaaattagcaacctaaaatattggtcaatagtcccgatcagaacaacacttagtcgcagtcgatcgcagtcgcggcaaaggacgaagatctatatataaacaagaaaaatacgatgaatatgttttatcgttgtaaagaaatagcttgcgcttgaaagtcaaagtagcaaaatgctcaaagaaagtgccctcccatgttcctccctctttcttatgtctccatttgtataggcaatcaatttccattagtttgtaatagaataatccaaactttaaaccaattttctcatatgtgcattttcgtgagtctcaagaaaaacagaagtgtcaaaactatcacgatcaaacagatttacattttaagtacagcttcacaacgtgagagtctcaactcttcattttcacccatcaagaatcaaaacaatacacatgcaagcacgaacatgcttcatatatataaacacacacttacaaacgtgtctacaccttacangaaaaaccaaaaaaccaaaaaaaaatgggaaactctttaagatgcatatcacaagaacacgatccaaaccagaagaacctagcttcgtcgtcaa

SEQ ID NO: 41594 - DNA, 388 bp, Arabidopsis thaliana landsberg
aataggacatcaggctttcggaaaacccaatatctgatcctgtaagaggtggtgtcccaagatttgttctcggggcaaggttgacaaaagtacaagtgctgaatgggagtgaggtagaacaagtgccttaaaaaatgtttaacatactgttacctttcattcatctgactctactgggttattcttttcaggtaagagctcgtgagaagaaggattctgagatccggtaaatcgtcaatgcctcatcttggtcaatcttgttgtttggttcagcgtcagtactatgcttagttttttggatggcgcggtatgtcaatggtgatgtcaaagttaaatgacaagttggggagattgagctgctcacctagtacattttgaaaactatatt

SEQ ID NO: 41595 - DNA, 507 bp, Arabidopsis thaliana landsberg
attggtgtcactgtttttcccaattcatctatcaatgtgctatacaaattcgtgatctctctttattttaattgtgagtcaactatgtctatcttcacacttttgtgaattgatttaagggtatcacttactacataaatttcttaactctctttattttaattatgaattgatttaaggataagttgcattcctcatccttttttcaacataattctctcagtcaccttgttgattttttctgctactgtcctcacattttgctcgacctttcacttcccagtatgaagcaaagctcttccctagcttgatctatcgaatgaagtagccaaaaatcgtgctgctaatttttgtttccggtaagattgttctgacaagagctaaggttagcaactgtttcttgggtccattatcattagagtacatctcagttctttctgatcgcgttagagtatatcccaccttttctctctcaggtgcgatataagacgttgcttttgaattatc

SEQ ID NO: 41596 - DNA, 729 bp, Arabidopsis thaliana landsberg
ttttacatgtatatagttttagcttgatatgaacggggacaacggaaaaaataaaaaaaaagttggaaacagtatgaatactacacagatatatccctctgtaattgaaataaagaaccatccaaaaattagagttaaaatcgtagatttcgaacatgaaatgtatgctctcaaatacggcaacacagaccacaaaatcatgaaagtgatgctcgagcaaattattgtcatgtacgaaatctacaatttcaactgtaattcacggttctttgtttatgggttagatccaacaggttttacaccaaatacgggttccaccactacgagcctaatgttttttttttgttttctttttatatctacgaaccacgaaatcttttttcttttcttgaacgtgccattttgttgtctgtaactgcgatggcttagtgttgtgcgttaccaaagacaacacaagccttatgtcttctttggtaacacaacaataagtcatcgtagtgaaagactaacggtgacaactttggatcattttcgcttgagccctagaattataagaatttgattttctcttgaacaaccctaaaaaaattctaagctttcttactcttctcttctcttctattctctccgtatataaatatatagctaagttagggttttatgtgtcaccggctcaccgctgttaaagctatttccatttccgatttattatatgatgctgttaatatt

SEQ ID NO: 41597 - DNA, 735 bp, Arabidopsis thaliana landsberg
gtttacctaatgtttctttctacttatttatatggtttaatatgtttaaaatatctaacaacttcaactaaaataataaaaaacaattgatgaacaacgtattacaaacaaacaatttcaaattagatcaaactcatcataatacaataatattgcacaatacatattcaaatatctattgactagtaagtacaagagagtagagaatatgcctatattaaagaccctttcatctgcattcaaatgtgtaattggaattttacgctttacaccaaattaatgcatgcattgcaatagacaatttaaaaattgttagctttatagaatatcattgagacccataatagacctttaatctgtgtgttatataactgaatttgaaccggattaaatatgggattagaaatgattacataggagaaagctaattagtagatgggtttctttcacgtaaagctaattaaatggttctttttgacttttattgctaataatatctaacaaatgaactatatatgtggcatgacaaaaagtgtgataggatcaatggtcattatcgtgggactttatatacttttatggggaaaaagcaaggataagtctgcatcagtgaccaaacaagaaccattagatcttgatcttgaaggttgtgggacagcaccaaaggaactcaatagatctgccattaagtgtctgcaaataataactttaagatatatttaactgtttcccata

SEQ ID NO: 41598 - DNA, 588 bp, Arabidopsis thaliana landsberg
ctttatctctttttccggtttaagattttaaaacatttgcatctcttcaattcccacgatttttctatttttgtttcttacaaacattaagtgcttggcacgcccatcagcaaatgtttggccatatttgtgatcaacacaaattgtatgtcaacaaaaattgaaatgatgttacaaacaaaatagacaagactattgaaaattcatgttctgatgctttaaacagtaaatgataaatgatgtgtccatgcctaatgaaaattttattgtccaaaaaatataattcagatttggtatttagattctatgcattacaacgtggaaacgagatacgtaaatacccacatacaaagatacattatattgttgtagcttgaacatcatcatcaaatctaatcgggtaaataaacatcggatttgaagtgaggaagaagatatgaaaagaagagctataaagaaacgaaatttggctaacgattgaacgcaaccgaaagagcaacaccaaggacaagccatgctccaatgaagtatccaaaatcctcgttggtcctacatcttccggttcctgtcgattctcccaaacatttt

SEQ ID NO: 41599 - DNA, 2553 bp, Arabidopsis thaliana landsberg
agaccggcattgacaatcattgtcgagacaaccaggccagctagaggatctaagaaattaactccgagaatagaacctcctgcacacaagtcatatttcacgatttatgagaacttcatgtctccctttatcagtagttccgtacaacagctggaccgatgagagagacttggtaaaagtaaataaatggaattcagagatctacattgtctccagttctttagtagtagccatatgcgtgaccaggtctgggatattgaaacaaaggatatagttgatttacatatgtactgattggaaagaaaagcttaccaactccaacaagtgcaactagagaagaaatagcatctgatcgatgatgccaagcatttgccatcatcaaaccactcccttgtttttcacctgctcgttttgtgatccaataaagcctgagaaacataagattcagggatgaaggatcaaaataagtgaagagaaaagggatgaaggatcaaaagaaaaggggcggtaggttctgagaagcaagtctaactaaagtgaaaatttgcaattgtctagtaagaagcgacggtagagcaaaagctgtagacgtaaagcaatggggtatgataaacttgattggattgaaaagagtgataaataaagtgatgtttgtacccttctttgatagaaatggaagcaatagtaacagtcaaagcgagaatgggatgattcatatcaatgccgtgatgatgtccactatgaattacctcaggagctgcggacagtgcaatctgcaaatgagaaaggaagggagaagaactctgtaaattgaatttattatatcccaaataaagcaaacaatggaggatcgataaaagataaacatgaagtgcaatatattctcatacaatgaagcaaggttgtggaggtggagatgagtaattaaaaaagaaagagaaaggagagagtggtggtcatacagataaaaggtctaaagcatgccaggcaataccagagccagtagccaaaagcatggcagagatgccaagtgctccaagcgtttcaaatttaccatgacctgcccttgtatgcatggggaaattcagttcattgttattataatgtatttacatcaaaggaaagagaagagaaaaggtaaccataaggatgttctttgtccttgggaacatttgcagctctgtaagacactagagcaacaccacttagaacctgagatataatgatgatgatcatgtgagaaacaaaaccaaaggaaggatcatcttccgtcctcagcaaatgagaattttcattaccacatcggaaacggaatgagcagcatcggcgataatggcggtgctgccgcagagataaccggtgagagcttttgcgacagataaacctatatctgcggtgagacctagccggaatatcttctccccttcttctccaggcttttgatattgctggtgatgatcagggtgaccaaaatgccaccttctggagaaatcgaaactaggtttttgcgatgaagaagaagatactcggagtggtgatgatgatgatgatgatggcagataacggcaagacatataatatatagtagacctacaaatcctcgtcggattcaggatttgaaatctgatgatacccattttgatttcagctgagaaaccctctctccctcttttctccgatcagtttcccaaattgacttctcattcattgcgcggtaagatagacggcgctcatttttttaccgtttacttagttaccttttcaccgacgattgtaaaattatactcagtcaatgatagcttcattaaaggccccccatactgttctttcatattgggccaaatcaaatgttgggagtataacaaaaaatattttttttaaaacggtaatggttaattaacaacactgattgatttggtctctcttataaaccagaaataaccgattctagaatcgaaaacccgaacactgagtgaggtagatattggccggaattagagttgtctaccggcggcatcagcgacaaatggaatgtatggagttttgccgagtaaggagctgacgactccatacacaaaacacataaagctgaagacgaaaacccccgtgtgcccccacatcatcgccttcattccaaacccgcctccttgacccggatccagtattcgggtcagcagcaccggaaccgccaggagcacatccagcgtcaccgcctgcatcgcgttgaacctcacgtacctactgaaactcgtgttcctcaccactcccaggtacagcccgaagaatgccacgaagctcgcgtacggcaccgatctgtacaggttcaggattgggaagattggctcgaacagcaatcccagccttgggtactgcgcgaacaggaaccgcccgtactgcatagaattgaagaacggcagcgcgtacgacgctatcgaaatcacgcgctcagtcgccggcgtcggggtgtacgaggcgcgcgtcgtcaaggccgttgcgcgtctgctagaggggctgaacgagaaggttgaggatccggcgaaggagaggctgagt

SEQ ID NO: 41600 - DNA, 732 bp, Arabidopsis thaliana landsberg
gcagtactctgcaaaattggctataaacggttaaatacttgaatgtgattactttcgtagaaatcattgtaaattgttttggccaagtttttatattttatcgatatgtatcaaaatgccaaaagtagctcttggaatctttatattctagactgatggtcaaagattacactatactctccaaaactaattttgaaacctttactagatcataatgcctaattttacaacaacaatttttttttgtaaaaaacgcctatgtaagatctagtcctaaatcttttgataagatcatatattgacgaatttgttaattacaagccataatactataactaatttggtaaaacgacatttctggtataactaaaatatataatcaacattcatagaatttgatattttcagaggctaaatgatttggattaacttattttccctatcacagaagagtttaatttgagacgcttataccatagcagtgatgacaaaactaacctccaaaacttaagaaactggaccattaagcgaatatctcaggctttactgaagacttgcaactctcggctcccaaaccaatctcataactttcacacctgaaaaacaaccccaaaaacttggcttgtaacccattccaaagtgagaacaaaacctcccttaatcccatggttcaatttaaaaggttctcctttttttatgggccttttggcttagtttaactttttacaagta

SEQ ID NO: 41601 - DNA, 283 bp, Arabidopsis thaliana landsberg
cattttcgttttaaattctccagcattcataaatgatgtagcttagttcagccaaaaacaaaaacaaaatttgatttgctctcaaacattattaagaatacatttcactatttcttaaataaataaataaaaccatgattaagaataataattaaaaaggatctttataaaaatttcgatcaataataattcaatgcatatatgcttttgttactatatctagtttttacatcctctactagtctatatacacaaaaacctgaccgtgggttacacttttaac

SEQ ID NO: 41602 - DNA, 566 bp, Arabidopsis thaliana landsberg
  unsure (1)..(566): unsure at all n locations
gtttacatatcaatattaacacagcgaataatcattattacaaaaaaaagcaaaaaaatagaagaagatattatatattggagaatctttctttagtcttagttgggaagattttgtgctatgggattaaaggtatccatccctattctatgatagaggcgtggggttattggaccaatctatatatattaccacaaggcttaagatgaagtgataatacagtattattaataccctcccaaattatttttaaatatttttaaaatatttatcaaaagaagcttacggtatagatcatacttgcagcagtattctataagtttatttaatttcagtggctcgttacgtgaacacaaggtaagctaatagacttacgtgccccattaaacacatacataattatacaagtatcatgaaactagtgacaaaacctcgatcaaataaagaaattaccatgacgacaaaagataattaaaaaaaaaaactactatatgtcatactcatgcatatgcatgtacaaatgccgctntaaatatttaatttagttaaagcaatgatatttaaat

SEQ ID NO: 41603 - DNA, 1562 bp, Arabidopsis thaliana landsberg
tttttttctgttttttttccggattatacaatattcccaacctcaacagccaagggtcctaccataccctatttatttcttcaattgttttgctaccaaaagaaatctagatcttgataaaataaagcttgctattcttcaatatatcaaaccccttctctttgctttctcacactgaaatcaaactcctttggtaatactactctcacttttgcttaaatattaatatgatcttcttcatacatatatttgtgtcatcatcagtttcaagcttttctggttttcttatttccctttctgtctctccgcaaataaccataattctcagcttttaatagtagttactctgcaggagttgtttctccactcaaaagctgacatcattttcttaataaatctcaatctcatatgcaaaattttcaaactttagcttatcttttggattttgttttccacttttcatggtacttatcaagctttctcatagtaaaaaagaaaatccttttgcaatacatgtttccatttaaagtttatgtatcttttttgttccatgtgttataaactctttccatgaccagagaatcttaatctccttataggtaattaaagatggagaagaatggtcacacggaaagtgaacttcaaactcaaatggtaattcatttgtctttttatatcaaatagttaaatctttcaaaaaaaaaaaaaaatcatcgtcatgtcacaatcaaattacgtgtctaaaagtattttggaccattcgtttcctaaatagtaatgaagaatgtgaactcttgctagctttttactcttgaaaagtatgtcagtgtcatttttatttcaaagaaaaaaaaaaaaaaatcttatttgtttcctttgtcaacatctgtttacttacaattttactatatttcacgttatctttgaatttgttttcgtgtagtttaacctcttggtggttcatatgagtttaaacatcagatcatgcgttctaatactaacttaataatgcaataagttttaaaaaatgttttatcacagaaagataaaacaaaatgaagatattaagtatctgcctacttcgaataaagtggaagatgatatataataaggtctctcgaacaaaatggatggtaattagaggtcttgaatatattaactctatatataaactaatgagactacattaaaattatccaccaagtggagtttgcattagtaaacatatatattaactaatgatatagttattaatctatcaaattaatatgaaaatcattagtgaaaatgacaataaaatgagctgaaattggtaacgttgcaccatcacgataaatattaccaatttaccatgctatttatggcactagttatactatattgtggtaaaaagttgatccaaaatagaagaattgactgtacgaaattgtatactaccacttttgtacaataatcatttgagactgtatatagtatacttaggtattatattttaagcctagtttaaaattttaaatttctttttctatactaacatttttactaatcagatttatatttgt

SEQ ID NO: 41604 - DNA, 532 bp, Arabidopsis thaliana landsberg
cataccaaaatgaatgatattgcaatttattagtcgaggtcaaattgctgtaattttagtcaaaattttagaaattcatgatgtttgtgttaccgataagtacatatatctagtgtcataaacattgatagtttgctctataaactcttatgataaaattgataatttagcttagaccactaaatctatttttttaaaagagggagtagtcaaatatcatagcggataggtcaaattaactaagaaaatctgtctcatctgaaaagaggagaatgaaaggcagaggcaacaaccaacacaactccataagaagcgtcaccacatattattacctctgtcctaaaaaaggaaaccgttctagttctcccataagtcgaagtatataaagcttggcaaaacgtatagaaaaatgtcaataattataacaccaaatagatataatattaaagcatagctaataagaaatccaatgataccgatagttttcatattaaattagttgaacatgagattattttactcggcaccatgc

SEQ ID NO: 41605 - DNA, 555 bp, Arabidopsis thaliana landsberg
  unsure (1)..(555): unsure at all n locations
ggtggttcattggatattgtcgggaattatacaatctttcgatatgtaatcaggtaaacatttactcgtggcttggcatgtgttcattgatagtcatggtgtattggtgtgtattaagaaaggaaaaaaagttgatgatgtgtttgtcatctcatctatatgtatcatgcatgtcgaatggcacacggatccacatgcgtactaattgtgggcctgaattgttatgggcctacaaagagcagccggaatagaaaaataaggatatgggcctactaagcataaagttccaaattccagtaacgaagaccttttcgcaagtcatcaaagcacaatcccacaccgtacgttttggtttacctgtctgtcagataacgaccgtctcaatatcggatcttaattacatttatgaataactcgactgcgcctccgcanaataagaagaaattgaatatcgaacatttcaacctcaggcatcacatccaagtgattccttatgnttgatgtaaaatgggatatataggaccaatcagattcatataataatattcataaatc

SEQ ID NO: 41606 - DNA, 469 bp, Arabidopsis thaliana landsberg
tttgcaacattcaaaaaaaccctaaaacatttctgagtcaatttcgatgaagacgatgaagagagagctttttacaaaaaaacattaatggacaaaaaataaaagattgagaagaggaatgtttcggtgttacagctgttttgtttttctaaacgacgaaccaataatacaactccacctggatttacgcatcacaattttaggatccaggcaagctgtgacgggttaacgataccgggcaaatgggtcccatctacccggagtatgttagcaacctccacatatctcctccgtttatgatcactcggctctatatcatggctcggcttattctttctagggtcaatagattgggtcgttaatgggccggcttgggctttagttggattccaaagctctccgaagagtgtgccattgttgagaaactcatgagccaagtaacccgcttagagctgattcgaaacaaacc

SEQ ID NO: 41607 - DNA, 544 bp, Arabidopsis thaliana landsberg
tttctagtgtattatgtacttaacttaatttacttgactaaggtgatcttattcatttatgatatatcagtttagtaataagatgatttatgtcagaagcttataataagatgtgggtttattctaaaagaaaggttatataattgtggatagtgttaattttgctgaggatcatggatggattttacaaaatcttctcgtgtattgtttttgattcaagtttcttctcataattaaattcttgaataagacaattctctgtctaaatgggccgtaatataactttttttataaggtacagcctgatgggctgaaatggttgttggtctataagtttttttttaaagacttcattctattgatcatatcagtaattacagtgcaaagctgttgttatgtaagaaggtacataacagtgaaaatgaaatgagctattatttggtaggctgtgtttggcaagcagatctgcaggttagtctataagttatttatgactttttatttttttagagtcttatgtttgttttttaataaaaaatataac

SEQ ID NO: 41608 - DNA, 712 bp, Arabidopsis thaliana landsberg
gggggtagtgcgcgggtgcgtgtcgttttgtaaatgtgtaaaatcgcggcctgctacattggctttataccatcattcacagagaaagagaagcagcgacggggtcactcattcatatgcaaagcaactcaaactccaattttcatttcccagacttttattgtatcgtttcaatttaggaatcagacttttgttttagacaaaaaaaaaaaaggaataaacattttgtaacctttatattctccagcatcactcttgtactaaatcaatgcacatgcaaggttttctcaccattgttgatattttcattttttgctctatttcatagctttggactttggacaaattcaatagattcctcaagctttgtcacttcatctaaagtatgtcatcgccgtcttttaatgagcaaacaaacatatcagtaaagaagtcaacaatttatttgcaattggctcaaatttgagtagctcaactcttctaactcagaattttcctaggttcttcattgttttaaaaaaatttggcaaagggaaactttactgattaagctctttttgtagttaattacaaaccctctgaaatttaaattcatatataaaaaagtgtaacatccagattgtacgcaatgatgaatgagtttcattatttccattatattagtcatttttcttcatagattatttctaaagcttccaaaactgaaattggc

SEQ ID NO: 41609 - DNA, 527 bp, Arabidopsis thaliana landsberg
tttgcagacaagttgtaatgtcaccgacgagtggtacctaaagagtatcttacaaaatcaaagacatattgcaacccgctccccaggggaacccttgtttttctccatgcaggcctggctactcatcgtcaacaggatcccgctggaagcgcccaaccaccacgtccacagcatcatgtacgccctcccgggcagcatcttcagtgtcggccaccgggcccgcaataaccggccccaaggagacagtcggatcgtggctccgaaagcacgttaagacgtactcgatggccgatcggcagagtctgccgcccttggcctccaagcgggtgccaagaacctgatccagacgtcggaggcggtcagcagtggaatccaatattgggagcatgtcggagatggacgctggccacaccaatgccgggatgggactcatccctaatggtactagggctgtgctcgcctcgccaacccaagcagcgatgcgctgagctccggcttgttgctctgcccggagtcatcaagtgtct

SEQ ID NO: 41610 - DNA, 371 bp, Arabidopsis thaliana landsberg
  unsure (1)..(371): unsure at all n locations
cccccccccccccccnccccccccccccccnccccccccccccccccccccccccccccccccccccccnccccccccccccccccccccccccccccctttttccttgttccccccccccccgccccccaacaaaaccccccaccccccccccccncccccccnccncccccccccccccccccccccccnnnngncccccccccccccccccccccccccccccccccccccccccccccccccccccgccccccccccccctcccccccccccccccccccctcccccccccttcttttcccccccccccaccccccccccccccccccccctccccccccccccccctccccccccccccccccccc

SEQ ID NO: 41611 - DNA, 582 bp, Arabidopsis thaliana landsberg
tatctttttaacatatataagtggatcttaaaagaacagaaaaaatttaaatgttaaactgttgatattttctttaaagtaatttggcagtgaattttatgagaagttttaatagattggagaagagaaaataaaataaattattaatttctattcattttatttttaaaattatgtttatgtgactttaaaaaaaaactgaatttcaagagtaaaaaaaatgactttaaaggcatttaaattatttaaagtcagaaaagtgtgatttgaaaaaaaaaactgttgaaacttttgaaactattttaaagccttaaaagccttttccaatcacccttgagtctccacaaaacctagatctaaaaactgccaaatctactatttcagtttttagttttgttccccaaatccagaaattaaacgtctttgtcgtcggctctctagtttcatttttttcttgccctcgaattggagtttccggtgaatcgccgacggatttggtgaacaaacgatgaataagtaacaaaacctaaatgatttttcttagctttgagtattcatatcttaattatcggcataaagact

SEQ ID NO: 41612 - DNA, 725 bp, Arabidopsis thaliana landsberg
tgtaaataatgggcttgagcgttgttgatctctggggttggaacgagccgacgccgtttaatgcatgaactgattttgctgtatacgaaccaaaaaagccaaaagcgattaaagctcttgggattccggcgcctacgtctattgcgtaacgagctcttctcggaatagctgaaaattaaagaagattgattagaagaaaataactaaagctaaggttaagtatctttaatcatgattaaatcatgtgtaatgaaaagataaggataaaagaagaaaaacaatgtctcaaaatgtaattggtagaagagaagactctttagtaaaatgggtaacaattaaaatcgttgacttaaagagagaagtagggcaaaggcaaattaaagtggatgataagtcaacgcattggagctttcattattacggcaccgacccttttgtcgacttcactgattatctatcgcccaacttctcattcttctcaattaatgtgtgtgtgtgcgtttttcctttctgatttataatttttcttagtgaaagtgaaactaaagacatgtacgataagaaaagaaaagttacttaaaaaaaaaaagacatttgtatttgtacataatgaatatacatgtacttttcgcctattggtttcattagtcaaaatatctaattaaatagtctcatgtggttttcatatttaaacaaccagaacggacaaaaggaggtggttatat

SEQ ID NO: 41613 - DNA, 1048 bp, Arabidopsis thaliana landsberg
ctgctgcaggaggacttggacattttgcagtccaggtatatgtcctgaagttgtttaaagtattatccataggatacatatttctgtttcatttgtggaagtatttatgccggttgaaaatagattttaagagattctctatgcagcttgcaaagttatcaggaaataaagtgattgctacttgcgggggatcagagaaggccaagctattgaaagagcttggggtcgatcgagtcatagactacaaatccgagaatattaagacggtaggtcttgtgtagaaacttttattagtatatgtggctaagtgacaattattcatactggtctaatcttcataggtcttgaaaaaggagtttccgaagggtgtaaatatcatctatgaatctgtaggtggtcaaatgtttgacatgtgcttgaatgctcttgctgtttacggacgactcatcgtgattggaatgatctctcaggttccctatcatatcactctcgatacgtcttttatttgataaattaagtccattcacctgttctgttgtatttagcttttgaaactgctagacgtctgattccttttttacagtatcaaggagagaagggatgggaacctgcaaaatatccagggctctgcgagaaaattttagcaaaaagccaaaccgtggtatgtggtctacttgacaatgttttttcaactcaaaaccgctaaatctaaaatgttgatctaggaaacgcatattccttaagttgattcaaactaaacaaacaccaattcgtttcaggctggattctttctggtgcaatatagtcaactgtggaaacaaaatctcgacacgttgttcaatctttacgctctcggaaagcttaaggtaatgcatccttatcgttattttgaatttacgtgcttacattcagttctgttcaccaaattgttgtttcactaactattccaaacaccactttactttctatttttctcactttggcaggttgggattgaacagaaaaagtttataggtctaaatgctgtagcagatgctgctgaatatct

SEQ ID NO: 41614 - DNA, 567 bp, Arabidopsis thaliana landsberg
atttaagattttcattatttcttaaaaactggcaaaggaataatattgtatcgagatgcaaaatctggtttaagaaacaaacacaactatggatgcttcatttagatgttgattatattgaatctggatggatgaagtgaagaaattaacgtgctcttgatactcgatagatcgcatactaatctatcaatatgtacgagacgatctacttttatctggccatagatatagacgtaattttggactatgaactaaaattaagattaaaaaagaactaaatttagaaacgattatatgaatacggagtttcacaagtaagtgtacttttgttgttgtcggatacatgtgcttaagatacatgagcgttcatgaaaatgactctctctttctatgtgcatgtgcatgagaggcatgtgaccaccgcaaactaagccttaactgatatctttttctttaactaatcatcaatttttaaatagtccaaacaacacttgattacaaaactactactttttgtatgaattggcagtgtctatgagatatgaaagaatgtcgcacttgcgaaat

SEQ ID NO: 41615 - DNA, 818 bp, Arabidopsis thaliana landsberg
  unsure (1)..(818): unsure at all n locations
acatatgtcctagtgataatactctttttagactgaatgtccacagatgagagtaatcgggtttagactatcttatgtagtgaagagatcgttgctctttgtgatatcgacgcttatgtaaagatagcggccaaagagttccatttgaagatgacccgaattgggaatacttatagcagttttgatacatataacgatggttattgagtttgaggaatttaaggctaatattgtttagtcacttattaaaaggtaatatacttgttcgccaagtagtgtcgtgcttatattcattgtttagaggtttctcaacttgctatcaatgatacattcggcccaaatttttgtgttgtggtggacctggttgcatttgttgactttagtcagcttgggcatttatccatttgtggacatcattgttacattgtagacctatgagattgataatatttatggttaaacattattatatcgtttttcaatttccagatgcgccaaaccatcccaaaaggtagaagtcggatatatgtaacagaatgatttggagttattgagatttggacttaagatcattcgttaggctgaatagagcagtccatagaatccctgaacatctccaattagcgtaatctcaagtgaagaatagagacttggccctttagatgtcatgcttattctgcacaaactcaaataattcgtttgttttcttccaaattgctctagtaaactcaaatatttgnttcttcctccaattcttgttatctctaggattctatgaatatgcgtcttattcaaatattattaagaatgtctcatag

SEQ ID NO: 41616 - DNA, 259 bp, Arabidopsis thaliana landsberg
taaattactcaagcctcatgttacaactacacagcgtggacctaacatcttgccattttctactacccgatgcaaaggtagcatgtgcgctacatagtacaagtggtgggccacaccacatcaatccttgccaaaacacaaaccggtctagtgcattaataccactacacaatgaatgcgactttgccactagaaaaactcacaactggcgaggtactgcacgaatatcgattaccacctagtaccatcagaacaaggt

SEQ ID NO: 41617 - DNA, 657 bp, Arabidopsis thaliana landsberg
cttattttataggtcaacattattaatctgtaataggagtattcatttcatgcactcccttattcttttacttcaacggataataaaattgttacgaatggtagagcgattgaatttctccaatggtaagcaattgaatttctcaaattttgtactgattaagttatgtgtttttagttgttttgtgtgcttgataatgtattgtatcgtattataagttttccgttgttttatttattttcataatgattattctaattttcgtatatatcacttaagatagtttttattttatttttaattaagaatataagaaatatattaagaagatatcattttaattgaagtatcatttttgtattggactattacaattataaatataaataatatttttaagataaatatttatattcccgatactttagagtatctattagatatcggatttggttgcgattctttggatataaaaatttaagatcaattcagtaattaaaacctattcggttttggttcggtttcatcgggtattgtccatgtgaccatgtctaattataataacagtgatcatgatagatcaaattaagttaccagaaacgtgtacgtgacctgtttactaaatgagcacccttatttgagttggtcatgaagaga

SEQ ID NO: 41618 - DNA, 866 bp, Arabidopsis thaliana landsberg
cttaggtatacttttacatgtgtcgctgattagtgagctggaatgttttgcatgatgtataacgataataataaataatcttatatgcaaacatgataataaataaacttactgtcagcttttactaaataaatggaattcatattggcttcaatgtgcaagtgattcgatttccccaatatcatttttttatcaagaaaaaaaaattatcatttcaaaagaaaataagtttttcttgtttgttttgtcaactatgaattaaatttggataataacgtaacgattaacgaagatgttaatacactattggattattatgtcgtggccatcttagattgaagaagtaagttaagagacaggaaaattataaacgtttttggacgtggaaaagcaaaaggatcaattcatccaatttgcatggattggaaagaataaaaatcgccattttaatttacatatctattatttaatagggtcatatgacttacttcctaattaggcctttacgtacaaattgaagaatgttagatcgtactggtctattatgtgaaacagttcacgaataaatacgaatacgcatacatgtatcaatatgtcaagacatctctgattaaaatacttcaatgaacttggaagataactatgagagattgagagtggaaactacaaaaggaaaaaataaaaaaaaaaacttcaaaggaatgagagagactaaagagaaggatgagacagaagcagaagtcactggcctctttggtcgctcaaattgcttcgatttcttaagaaaaatacaaaatttgttgtacaacattttcctaacactataacatcataattcataatcaccttaaactggttgattcttt

SEQ ID NO: 41619 - DNA, 609 bp, Arabidopsis thaliana landsberg
gagacagtgagttcatggcaatcaatcttaaacatcaaacatttcgtggtgttaagctttaataattgttggcaaaggcaaaatcaatcagtagagaatttaatgatcatgtacgactctcaaaccctttacaagcgatgacgtacacgtggcattatcaactcataataatacgttagataagtaacgaaattaacggcgagaaaaaaaaaacactgttcttatgttgctgcctaattcactgctagtgagtatagtctattctactctatagccagtttgactttggtggtacaaggagaaggaacaacagagaaatcaaagttcgttttactgttatagagaatgtgtaaaaaaaaaaagatcataatcatacaaaaactggcatacaaaactaaatatagcctggctatgacacacattagcagtttagtatgcttccaaaaaaagtttcatccagactgttgccggcctctacctcgcccacgtccgaagcgaccccgccctctacctctaccacgaccatggaagccccttccccgttcagaagactgcccgctgctaaacccttggattgtggttcattggggactgcaaatcactgggact

SEQ ID NO: 41620 - DNA, 410 bp, Arabidopsis thaliana landsberg
caatttattaacttttatttcccaacaaaagaaaagagaggggagtggcaaatcgttgacaaacggtgagaacaaatacggtaaaacattttagcctttcaaataaaccaagaagacgttattatgaccacgcaagactcagtgctctttgttgtgcttcacctcaaacagaccatccggacctgagaatggcaaatagaaagcgtcagattcagaaactgattcagaaaccgacccattacggatattacagagataatctttgatgatctcttaaggtttttaggagagacaactaaacagcattatcaaagctgaagatcacgaaatgaaagacagtaagatggacgataggaaaactggaaaagtacacataccccaaggaacttctttgttgcgatgtgcatatg

SEQ ID NO: 41621 - DNA, 250 bp, Arabidopsis thaliana landsberg
ccaagtggcacgctggagtagtggaagcatccctgtttcaatggccttcaccacctgcatttaccacacatttatatttagcagaacccaaaatcatgcaccaattcatacaactatccagaaactcataaacagatactcagtaaacaggccactaaaaactaaagccacaagccgacaattgattgaaggcccatgcacaaccatactagttggatcccacggcatccgatatgccttgatccttcta

SEQ ID NO: 41622 - DNA, 546 bp, Arabidopsis thaliana landsberg
cctatttgtatgttacacgcgtcgtctcactcattagctgcatgtcatttttctcatccgctcgcaggtaggaaaaatacagtgtacctcgcgccgattatatgaatttatcagcctcatcataattcataaataataaatagacgaaatgaaacaattctggaatagaaatatgctgatctaaacaaaatggatgattataaaaatatataaacaattttaagaaaatttggtggatacttttcttatttttgaaaaatttcatgaaaagagagaatgtaaaaatagacttgttatcttacaattgttttctacattgcgctacataaaaaattaagagtacataatatatttcctttgaacatttattccttttatagtgtatacctatattaacgaacattaataattataaattatgttaatgtagtcatgtttctaaattaaattaacaaaatgttaatgtagattaaatatcttacttttttttgaaatttcaattagtttccaaaatataaatatttctatatatagtataaaataatt

SEQ ID NO: 41623 - DNA, 560 bp, Arabidopsis thaliana landsberg
  unsure (1)..(560): unsure at all n locations
tttgattctgtgaaatttttattggggcaatataaaaccatccttaaaggaaaaaagggtcacagaagttcaaagaagtaatgatgaagaactcacaagcatgcccattattttaaaatctcacctttgctgcttcaaaatgctttaaaaaaacagaataatgagataaaactatacttttataattccctcttctttattttcttacttttttagaaagtttgtggggaaacaaaatcaatttccaaacaggtacgtcgaataatcattataaggtttattcgatagagacctcgatccaaaaaaataatatcacgttgagattctaatgtgtatcaaataatattgttttgacacattttgtctcatataactggttattttcttcttttactttatttgttgttaatggatctcggagaatatacatagtcacgtagtcaatttccacttgttaccaaatcaactgtgatcgcatgcattcctacggaactntgagttaaatagtttggaacatctttaaaaactgtatttctttcacctcaaaaatttacttttgg

SEQ ID NO: 41624 - DNA, 595 bp, Arabidopsis thaliana landsberg
agaccgtctaaattttgtaaaatctataaactacaaatttaatttataatatatttaacataattctaatatatatatataaacgtttcaataatataaattgaaatgacaaaatttaaatttttgaaatgtcacagttatcttaaaacagataaattgcatcttacaaataacttatctaccacttgttatggtcgaacatagatatttaaataaataatctaataggcatgacggaattcctcagagtatggtatgtcgctggaatacccatgatgtacgtacaagaatttgcattttagtaaactgaaaactactccacaaaaaaagctataattatctacaaatttttacaatggaaagtcataataattgttttgtttacaaatggacgtctttcaatccaattgcaaggtaaacattttattttatatccgcgagtgatttgtcaagggtgatttttctagtttttaatttttatgtatatgcatacaggtttgtgtgtatgcaaatactagaaccaagacgaggcaatatgatcgatggaatcttgtaataagtttctagcataacttttagcacatttatatatttg

SEQ ID NO: 41625 - DNA, 483 bp, Arabidopsis thaliana landsberg
tgagtgtttgatatatgtgctgttaaattttattttcggaatgcggattgatatggacatttacaagtttctaatattttatgttggagagtgtggcgacccaaacaagagtagttgccaagggaaactaaaataatagtaaggtgatgagagttcgattgctcttgccaaaaacctctaatttctaaaatacgttgggtgtgagtcgaaatattgcgaacggtgaaatatattatccgttcgagtataaaataagttttgttcatgttcatctctatcttaaaaatttcgaaaggttacatgtacggcattcaaatatgatacagacgaaattaatcaattatttggtatccgacttccaaagattggtccaagactctaattaagtaataagcaaataatggaaggaaggagaaggagaaaatttgattaatttaaaaaaatataatacaaaacccgataattggtttttttttttttttt

SEQ ID NO: 41626 - DNA, 626 bp, Arabidopsis thaliana landsberg
gagggttatactaagatttaaagttacatcatgggacgaaaacaaacataaccttttaaaaaagagaaacatgtaaatccaaataataagttttgataaactctcgttttaagttttgttaacacatggaaaagtcattacaaatatcgtctggtgagcatgactaaatgagtgtttatatgatctatcattgtgatcatatttgttccaatttaaaactgtatatatgttatgataacttgagggagagaatcggattcggatagagaatgagaaggagagagtccgcaatcagaggaaatgtgtaataataattcttcacgccttgtcccaacccttcccatcattctgtctctctccgcatttctcgtttctgtaatctttttttttcttcttccaagtgtattgtttttagactacttaaaaaaaaaaaggataacgactctgcagaaatacccaacacaacttttaacaaaacatgacaaatcccatgttatttttgaagtaaagtattcatactggtctggtccatataaataagttacaaatacgtacgttacgtagcaaaaaaggggagagagtcttaaaaataaaataaaaaactggtcaaggagacaagagtgaag

SEQ ID NO: 41627 - DNA, 605 bp, Arabidopsis thaliana landsberg
gatcccctgtcgaattcaaagcaccacttgttcgacgaaatgtctctgtgagcacgaagaggaagctgattcgaaaccacgattcgtttcggtttcgtaacccacgcgccgccgttaggatcgtcggtttcgagaccggaaagcttcgtgacggcattggggatccgatttcgacccatgatccgataatcatcagccgaaaccagactaagctggtctttccaagattccggcgacataacgaagaagagaagaaaaaaaaatcaaaactttaaaattgggtaaatgaagaaatcaaatattgtttctgggtttctcagatttcataacaaggagagaagaaaaagaaggatagttttacgaagaagaagaaggaagagagcgtccatattgtggaatttaagaaggaagaaaaaacggaaattttttcggtgaggataagaacgaaaacgaaagaggaaacaaaattaaagtttaaaaaatcaacacagatttttggacggtctcgattttctcgagatggatatgattggtatatctgaaccgttagataagcgcgtgtggttactcaaacagacttttgtctttgaaaaatgaaataaaag

SEQ ID NO: 41628 - DNA, 595 bp, Arabidopsis thaliana landsberg
actataaaacatttatggcctaatttttggcgtacgattttgttttaataagcagtttcatagttgatcatgcaaatatttatagttatgaaatgaattggcgttaaagcatgttgaataatagttactgtgaaggtataaaatagatatatgcacagtaaaaccttatatatatcactgttttatttttttcttgttattggtttctttttaagaagttccaaatgttattttaattgagttttatatatttttgtcctaacattgctaaaaaaaaaagatattttctttcaggacaaaatttattattgacttttataaacattatatccagccttttccggaaaatcaaatgattctgctactctaaaatattcatatgttcacatcttagtttcattcatgtttaattttggttataatacccataatttagattcctttgtttttttatatgtgaacatattttccaaagttagttctacatctaaatggaacagaaaataacattggattgattttaaataacagcagtttatcaaattaggaaaataaactaactatcgtgtaaaccttcttagaattattaagtaaa

SEQ ID NO: 41629 - DNA, 553 bp, Arabidopsis thaliana landsberg
aaggtctcgtccgaatttatcttgttggtctcctccattgaggtgtccatatcaaggagttcaccaatctcctcatcccggtttaattgtatactttctggggttgaggcacggcccatacttgattcgattttccttagaatttcatataaaacagaagcaatgctgcgtgcatttatcaacttctcttgctgactatattcagataaatttccataggttaatgttggttcgttgaaattgaactagaactagcaatagtcagtagatttttaaaaaaatggaggatatatatatacctattatccaaattgaatgatgcaccatgtctgatgatgtattcattgtaagcatgataaacacgtttgagttccttatgatcatttatttcctttcttcttcttatagtaaactcgtcatcctactacaagtaaacaaattaaagatcaagacaaacaacataacaacttaatatataaggttagaaatttcatgaattatcccgagactgatccacaccattcatatgatcggtcatattttaaaaaaaatc

SEQ ID NO: 41630 - DNA, 408 bp, Arabidopsis thaliana landsberg
ttgggagatacatgggcatttttttcgattctttaactcgtgaatttaggttgttcttttgtcgtttcatttgttgtttttttgtatcaatcactcgtgaatttagtttttttatgagagcataatttattataatttgcaatagagttgtaaagtttaaattgctataacgctgttttgtggagagttaaatagggtgttgactgttgagtcataagaccaatgtgtatggtcttagaaagaaaaccttgtcataattatataagataataagttctgttatagaggctattagacaagtgataggtctaaccagtccaaatcacaaaatccaaaagctaaacattgctttttgaaagagaatgtattttgtaaatcttgattgcaacattttgggaagattaaatt

SEQ ID NO: 41631 - DNA, 679 bp, Arabidopsis thaliana landsberg
acattcaactaaattaaaaagtccaacaaacaaaatctggtcatgaaaagcttggtgtgatgtttctattaagtaattttactgaggttaattggttggtttaacttaaatgtaatccaaactcctctccctttagagattttcagttgggaatgaaaacctttaaagcttgcaccctaaaatgacattaatggttatagatatagtttgttttcatgtttctttttttttatattttcctttagttttttctagggttgggactaaataatcggacttggatccgagatccgatttgaaaagctggatacccaattgggatggatccgctttcggatcctgaatttttagattcagatccatattttaaaaaaacttggacctttagaataaaaaaaattatgcatttttctatttagactttaaaatttgacccatattccttctttcaaactaaaattaatttctcatattttaaaaaaaacttggagaattctcaatctcatgatcattataacaataaatatatttattgtcacaaatatttttataatatatttaattattataaaagaatgaagggccggtccggctattcggggtttttaggggtatcgagatcatgaatataccaaattttaaatttttgtaatactttttaaactaatgaaatctgatt

SEQ ID NO: 41632 - DNA, 543 bp, Arabidopsis thaliana landsberg
ctaatcatacttgtgcattaaattattaattacacacgtttttccctctttatttaaaggtccaattttatcactttgttcaaccacaaattaagtaaaagaaaaaaataatcccagatacaatataaaacaatcaaaacatacaagattccacagatttatactcaagattttgaataatttgaagggcaaaaattatatataaaagcaaaacaggattgtaaaaatttatttcatttttatcagatcatcaaactattcactaatgttactattgtttctcttcattgcttgcttgttattatgcatccaaaccttaaaaacttgtctcctcagattcaccatcctacaaaacttatcaatctcttcttcatctttcttctgcatcctccaccctaatctctctgcaaattccttcatcttctccttttgttcttcattgatctttgtcctcactctcttcttcttcctcatcatcatcatcatcaaacttttcccatcaacgttttggttacgatgactcagaatcttcttcatatcctc

SEQ ID NO: 41633 - DNA, 354 bp, Arabidopsis thaliana landsberg
tttatgatttatttgcataataacatcatcacgagggatcaagcatggatactttgatgcatatctagctaggtttatatccgaaaaattcacacactcaaacacacatgcaaacatatccaataaatgtctagtttatcttaaccaatatataaactagtgatgacatgattaaccatgcaagagagtattcagatattattcaacctaatctcacaaactaatgaagcttttcttgagaattgtcttagtatcaggaacacgataaagcgatacgctgagtacaagagagagtattttggtgcagaaactcattctatagagcaatacgtgcaggttccctttctatataac

SEQ ID NO: 41634 - DNA, 725 bp, Arabidopsis thaliana landsberg
caaacataaataatattatttattatatgtaatgatcttacgaagaagtaagtaagagataaaagagagagtggaagtggccgagagaacaatataccacttcactcttcattactctctctcgtacgctttacaacatcggactcacatatatatagaagattatatgataggataagatagaaataggatagactacacttagattttggaagcaaatcacttagagacaaagtaattaaattggataaagagataagatcaaagtgatagattatcacttgaataattatccatttataacatctacaaaattttccatacgttttattactttttcttgtccccatatgatgtttttggtagttaaactagattataattcatatttaagtaaatagctagtttcaaacgggtaaatattaagttaaaactcacatcctctatgatatcaatggctatataatatgagggaagatttgaaaagtaacagaaatacatatactacgacaatgcttactttgatatgatcattttcaaagcttaacaacaccaagtgagtgctcacagttaagacaaacatgtcatttacgaggtatgctttccgctaattaacatatgttttttgtcgcttaaatatgaacaattaattactactataatctacaactccttaatgcatttccaatataaatatggctgtaaagatgttcacacaaactaaa

SEQ ID NO: 41635 - DNA, 365 bp, Arabidopsis thaliana landsberg
taacatggatgaataatggatttcttcctaactattaaaaggagagaataaaagcaaaccaaaactatatcgaaagagacttcacaaaaaaaaaaaaaactaacgaaagagttgcatcatactaattcatgctagatacagttttattttgattagtaccttttctaagcaaaattagaaaaccctaaaccaaaaatttgcattcaacgtgtcgatttacttgtaacgatcggattactttacagggtcttttagttggttacatgaaaataaaacataatttaagtcagtttctataaaaggaaaccaagtcgtagacgaaacgaagacacaaaagtagctttaagccttttaagttttaacct

SEQ ID NO: 41636 - DNA, 489 bp, Arabidopsis thaliana landsberg
agcaagagcgctcaccccgccgcggcacctgccactctggccgcagcacccgcttcgtttactcaaggtctcgttaggcgccatccggtgggacaactggagtctcgacagtccatatggccaggtcctggccgatcctggattgcgagcacgcgttccctattacgcggaacgtctgccgaatggaaaattgggttctccccggaaacaccgaaagaacgctgaacgcggacgtccattacgcgaaggccgcgggctaggactatttcatcttcggctactatctcgagagttcggcatggggccgcgatcccaagcgggcagtcacagctcaatcaggcgctcgcacattttgatcggctgccggacaaactcggcatcaagtatgccctgaatttcaacctgtcatttccgtcccgcgatgtgccgatggccagcgactgcgatcagcaaggcgctccacgggcccgattacatgcgcacgagcga

SEQ ID NO: 41637 - DNA, 655 bp, Arabidopsis thaliana landsberg
gatcattgtttttaataaaaaaaagatgaaacgataaaaacagagagtaaggagtgaggtcgaatagtgttaaggtcatatcaagaaactttgcttaggcatatttttgtccaacagattcatcagactttgtgtgtcagtcttctcttccttgttccatttctctttctgtgacgtttttaaggacacgaagcggtgaatctctgcttccctcacgtgccgtttacagtcgcttatgtcaccgtccaatcatacgtcgcttttccttccatgcacccactctctctctgtcatcttctctcagccgcaatacttgatcgacacctctattgggccgggcccaatttaaaccatctattggacttctaaacagagcttcttctctttttgtcattctaaacagagtttactagtactaaattataggaagaaaaaaagaagagaaaacagtgtcattttctttatcatgttccatgtacagtgtttgttttacttatttgggaaaaaatcttataaaaatcaatcctatttttactaaaaagacatcaaaacattttctttttaaaatccaaacggtcactaatctcactaagaaacaactgtacacagacttaagataatgtaaaaaatccgaccgttgtgacccaatttccac

SEQ ID NO: 41638 - DNA, 799 bp, Arabidopsis thaliana landsberg
taggtttcttgcctacgccgttggatccgtaagaaatctggggcggatgggccaccgtaggcaacggcggctcaagtaagagcagaggaacagagcaattcagaggcagaacagcttgaggctgaggctgaggctgagttccacgtaggagatgatcaagacgaggataaagaggccaagaggagccatcagcagtagcggactcagaacggtaccgtttcttcatggactcgatcttgttcttgcactgagtctgagtctttggtgacttggtgtgagtggcgcgtgaggacacgtgtttagccacgtcttcccagtcttgtcccttaagcttggctctgtttctgagaacccattttgactcataagcttcgagtaaagtcgaaacagctccttcgctccattcatcgcgttttaacctatctacaacgacggaggaagcagatggcttcttaagcgattcgtcgtggttgagagatttgagattttcttggttagattctccgttctccatatattttttcttcaggtgactaaaaacagagacaaggactcaagagtgtgatgaaaggagaaagaaagagaagattttagcaagtcttttgataaacatgggaaccttttgagagagtgaatgcagttaaacatatgagaactgtgtaagaatacgctgctgctctcaaaactaaccaatgagtttgggtacacgcgtttctcgcatgttcaatggtcgtgcctcgtgacttaaagcatatgaaattatgtttttcacttatattgttactgtcattttagtctt

SEQ ID NO: 41639 - DNA, 592 bp, Arabidopsis thaliana landsberg
ctaaagagacacatattaatagtggaatcaaccacacaagaataagcagaagcttgtgtaatttactctgtaaataacagcggcaatgtttcttgcaatggtgtctttgtagatatacttgcccaaaaggttatcttttgcagcaaccatgatcttagcagtggtaccaccagctataatactgagaggataccaaagatacacctgttcacgtcacaagaaacactttttacaacaaaaagtaaaatgctgaaaagaacactcgcattgatgaaaccagaacacaattgcaatctgataattgatctaaaggatcgaattgaaagaaagtacataactttgcaaacaaaaccaatcaagctaacaattttaattcatgttataaacaaacacgtactagaacaaagagctgaaatgttgaaaaatccaaatttgatgaaaccagatgatttgcaatctaataattggtctaggagtatcaaattgaaaaaagttataactttggaaacaaaaccaaagcaaagctaacatgtttaagcgtttaattatctcctaatccaagctaagtgaagaaagagtggaaaagagacgg

SEQ ID NO: 41640 - DNA, 623 bp, Arabidopsis thaliana landsberg
accaatgggacgccgagcacgtgcaggaactgctcaactgaagtagaatacaatgtgaaatggaaatgaatagcaaattgcaactattgtgagtatcatttgcaacttaccctgagggtccaaactcagtggtcccaggaggacatctcccctgagatccatatttgctataacatcaatcatcttggagtccaagaaagcacatcgagggattcaaaaaggacttgtgtctaatccatgttgcaggttgtcgacataaagcatctgcatgtttttaacattaggttaaagacacatgggttttttaggttgtattcatataattattaaagtaaaccaaattggcacaggtgcattaagccagttgaaatagcctcatactaaaattattgctactttatgaacaacataaattacaaaatacatgtgaatgtgtgaactaagttatcgtaaaaaaatgccctcaaattgcaacttgtaacatatgacagttgtaacagtaaacataaaaaattaatacttgtgtaattggaagagtaagttgcaagggcaaaaattgaatgtgtgtgttgagcttacagctacaaagatcccgcatccactgatgggtgcgttaatgcctt

SEQ ID NO: 41641 - DNA, 397 bp, Arabidopsis thaliana landsberg
gttggtttctctttcaatacttgaataaatagaaatagactggacgagcaggtatacatggtatggtgaaattttatttcatctatatattaaagcatgaacctcacatgaattcatgtaagatttttaaaattttcaatcatgtatagaaatatatctgaagagtttatggcagtagcatctgcatttcaggacaaagtatttatagtaaaaaataataaattacaacatatatctactacttttttctttcacttggtcaacacacacacacacatatatatatatatactactataacaatcaatattttttgttgaagaacttgtattttatttgttaacattttatttttatttatttggtcaaaattttccattccttttgaatgcatgtt

SEQ ID NO: 41642 - DNA, 1302 bp, Arabidopsis thaliana landsberg
taccttaccatctcttcaaatattataactacaaagttacaaacctcactcaatagccatgaatcaagaatcaataaccaaagaaccaagaaccatttgagccttatatctttccaccatcgacaagcaaacaaattgtgtaagataaaattataaaaaaaaaaaaaaaaaaaaaaaaagagaaaagtgattttagaaagaaaaaaaggtgtttacttgtcgggtgtgtgtgtgtgtgtgttatagtggggcaaatggctctggaagtagctcgaatcctccattgtcaaacatgagtccgtgatctgacaaccggtcatcgatgctatgtaaccagtttgtgtttttgacgtcctctttcagcaacaatgcatcataccttgagctctcatacatgtccatgtcactcaacttccccatcagtcttctaccctcgtttgcttcattcccgttctctgtgccattgctgctgatagaatccgaatgattattccctgaacggattggctggatcttggatgaggctggtctgatgctctgagggaatagcgttgtggttgatagtgcgcaaccattagtcttccggtttcttatgtcctacacacaccataaaaaatgttgagatattcatagcatggtataaagctacttgcatttagtgagaagagacatatgtaccatgtgtctaatggccatatcgagtgaactttttgagaatgacctcccaagcccgttgttattgtccgtgacagttgtcgaggtcttcacggttctccgtgaagttatgtcagaaacgtttgaaatccttcggggctctggtgcatctgtgagatgctgcccattaccaccaaaacggccttttccttgggtctcagtgagtcttcctctcgtcacaataggagatgaattccttcttgtgatgggacctttgggttctggacttgccttagccatgctgctaccaccaactggcctggacctgccagctgatattggtctgtccgggagagatgttctcagattaggtggtgtatcaagagggaagtctgctagcacaattggctgttgcggggtgtttctaactctaggtccaggagagcttggcctagacaatgaaggtccagtacgaccatttgatgcagcacgtccacctgaaatagtgggtcctgatgttgcagacaatgaggtggatgatgggcttcgacgggtaggggttgaaggacgagaatttggtctagaagcaattatatttggggagcttgctgagagttgtggtctagaagttggagtcgatggtcttga

SEQ ID NO: 41643 - DNA, 750 bp, Arabidopsis thaliana landsberg
tgatttataacgatgatataagcgttgcgaggaataaggagagataatccaatcgagtcatcgcccatcctccgctgcttccgccgctcaacgttcaatctccgccgtaccgccgccttgcttgtctctctaacgtagaaatacggacggtgttgtttttggtcaaagctctggaaattgtaggtatatttatcagaaaattatacgcaatatataagagattaatttttataaaaactattaaaaccccactggatctggttggataaaaagctacttatttattcatatgcaaatatgatattcccatttaaagcatattcggaagtttgactttggcatgaaactcttaatcttatttgatgtggttgacaaaaatatttttgtttctttacgatgaaatgcttttgtatgcaagtaaccaatcaatgatcgtgcctattgcctattggtcaaagaaattactatctttcatccataagctacttatcagttaaagtgttaaatctgcagaaatagaatcgattcgaaattcggaaaccaccatctttttttttttaataaagaaaacaaagaagctaaagtaatgtgaatactactcaaattcaaatagctgcgagttttttttattcgtatgtgagtaaactctatatccaatggtttgggtttcatataaaattgcatatatttcttagcataatgtttttgggcagctggtggtcttaacataaaaattgtgttaacccgacc

SEQ ID NO: 41644 - DNA, 547 bp, Arabidopsis thaliana landsberg
attttgtgttgaaaagattctctgcgtctctgacggggacgattcttccgacgaccgaagcaaccaagtaagcaacccattctcttctacaattcaaagagctaacaacgagagagattgaaggtaatagattccttcgagagcttataaatcgaagattaaagagtcaacattgcaaagagatgatttttaactggacttagagagaagaagaagaagtgttgtactcatggatttgggggtttagggtttccttttttatttgtctcttcagatttccttttttatttgtctctttagatttccttttttctctttctaatttcaggttataatttattaattttggcggagtaaaagtagatgaccgttacaagtctgatttattagactgtgaaattggaccgttgttatgtgggccatggcttttattaaaaaaagaagagaaggtatattatttaaattggagataatgggccgttttaaacccaattattattggtccactaaagtttttatatcctctaacttcgacgagcttgatata

SEQ ID NO: 41645 - DNA, 576 bp, Arabidopsis thaliana landsberg
agattttgattttctttgatggttatacagcatcacaatcgggagggaacaaataaaaatgaaggccagtctgcttcacctcgaaagggtatattgtcggaagctagtcatttaacgtcaaaaatcactttacgatgatatagtgattaactttgaactttgtttttggcagcttcagcttttctatcatccatagcttgtcagaagcagcctgcagcattccaatcaccaagagattctaataacggtatctatttctattgaggttctttgttatttttaccaatcagatttttgtattaattctgttcattttttcttgctgtgcttagtgaaacttggaatcaaggcatgtatagtccctgaacttttcattgaaattccagagacagctactgtcggttcgctaaaggttaggatttttcggcttataattttctggaaaggatctccttcatgtttatggataatgattgatgaaactttacttcttctcgctagaggacagtgttggaagctgtgacctcgatacttggaggtggattacgcatagggtgtactggttcatggcaaaca

SEQ ID NO: 41646 - DNA, 816 bp, Arabidopsis thaliana landsberg
aatagttatgagtgaaagaatttgagggtgacacctatatttattgaaattgcaacatagaaatatgggaagtgttaaatccggtccatcggtagttgcctcacaacgggtcaatttcaaaaagatcaccgacagtggacctaacaaaactatcaaccctcagagttttattaaattacgaaattgccatatcattcctcgtgacctgtaccccgtacccaataagtaccacgaaaattgctaaatttaggaaaatcacttcttcttctttttttttttgaagaaacaacaaaattagaatacacggaaattaaaaagaaatcacattgcttataaaaacatttctcatcttcagatttttattttcctatccgtcttttctccgatcgctggatcttgaagatctctagattttctcatctctctctgttcacggactctgtgtagatagagttcgtctgtttttcggagttcttgtgagaatctagggtttttttcttaaatctcgatcgggttttggtttctgtgatttttttttaaaatttgtgattcgaagaattgccattttctttgattagtcatattttttaattgcgatctctacatagagatcatcgaggggtttttaaattgaattttttgaaattgacgaagacgatagagttgttgagcggtattgatcttttggtgtgaagacgatagagtttaaatttgatttgaagaggatgcaaaaaactcaggagaagaagggtggttgcttcttattcatcggaggaccttatgattcctttgttcttgacattccgattttttgat

SEQ ID NO: 41647 - DNA, 1550 bp, Arabidopsis thaliana landsberg
cacgtgaagactaggcatcaggtagcccacagttacacataaagaaaacaaaagtatgtgcagttacctcatacactgtaaagaattatcagctccaacttttatcacacgaagagaagctaacgagacaagggatcaatgaaagaacacctaagagcaatccaacagctgctcatttcccctcccgtgggaacgggaagaaactgagctattttataatggtaagcgcatgtatcattttcctagcttctcagccatgttctcaacaaattactatattatcttacctaaggaatagtggtggttttgtatcactattgctaacaaactccatttaaaagaacataatatagtcgctcttaaaactgattctaactaataatctacagatacaattaaaatataaactagatcagactatcagtagtgctattatcccagcttaacttatgtctttaccgaatatacaggtttcattctaaaaatcacaaagctcaggtcataaaacatattctcttgcaacaaatttaatcacaacagccaaataaacacgatatatttccaatacgcagcatcactcaaaaaaacgcttacgatacagagccagcagcatccagacattgcactctcttttagagaagggtagaaaatatatctataagtaggaactttactaaaagcaattcttgagtctgtaaactttacatgtctatctataaccgtgttccaccaatgtttcttacagttcgtataaacgaatgataactaaggcaaacgaatagcggaaaaaacaaacactaggggtatcacctgctatacgaatgagatgagtatggagaagggcttctgtctcttctactcctcctgctatgcctctgccttacgggagacctcgagtgctttctacgacgtgaaggtgatggagacggtgacctcgatcttgacaagtcccgaggcatctctcaaaattccgtagaacaagcagtatcttcctttctaaggagaagctcagctcagctttaatctctctgaacggattggtcctgcaaattccagattcaacaactcatgttaataattgaaacagcctatcagaatctaaataggtataacaaacagaaacctagcagcaactttcagattgcggacacacaatctattaaatatcttctgcataaacccaaaattgaaaccatcctggaaaatcagctgaaatcgtatgactacttaccctcgagaatcgcggcgttgttgttgttgtttgttggatcgcctcaagagtcaacacggagagagaagatgaggaagatgtatgggtaaaaattatgcagcagcgaaccaaaattcgtcgggtttgggatacatagagcaacgtttaagaagatgaagccagcttttgtaaattattggaattggtcttgttcgttatgaacattgaaagccttttgggcttattaaacattgaagccttttgggcttattaaattcgacatgggttttgagcccttccaagtttttaagttttgttaaggttaaagaaaaaacagtta

SEQ ID NO: 41648 - DNA, 329 bp, Arabidopsis thaliana landsberg
tgacatgccgtactcgagagtcaacagggggctgatagagtgaggattggattactttacctgccgagacgatgctactggttgcaggccgggaagcccctgaggtaccagcgtaagtaccattttgaaatgcaatgcactggagagaagagtcaactatgttagggcttcttggactgcggaagctggcaatgaatgttgactcctggaccgtacctgctattctgatgaacgagatcacagatgggacgtgagaaacgaacatgcttacagcgcaaacgacttggagcgcatatacacatacattagtggtgctaggattgttaatg

SEQ ID NO: 41649 - DNA, 754 bp, Arabidopsis thaliana landsberg
aacttcttgagtaagtagaccaatccgaataaaagaaaatatcttctggcttggcattctaggaacaggcttaagaggccctcaagtttcaaactttgaaagaatttagaaacattgtatgtctaatgtgattttgtatattgtatttacgattttcactttactgtttgtgaaaaatataatttcaatgtaatgaaaaagaagaaaagaactataaactatattttttatgacatattaatttctatagaaggtaggagaaaacgtttaatctattttagaagcgttttgtaaacagattttgctaaaacaaaatacttgacaatgtttggtaattttctaaaagtaattacgatatttttttcaaatagtcatgactattaaatatgccattcaagagttgtcctcacactaagccgtgtgaaccaatttacgactctgcctcgccacgcgattcctccacgccttagcatcgccggagaaggaaatattgattctctgcattgaatttcattttttccgggagatagaaacatttgtcatatcaaaaagtgtgacttaaaaactatagattaaagtatttcatatacataagacgatgtcttggtttaatttagacctttatgttgccatttgtccattgttatcttttatttatcgatatattatagctttgtcttgaataaatcaaacttcgatatatttcattttgcgtttttccatttgtctaatttatttttcttttatatataaa

SEQ ID NO: 41650 - DNA, 1118 bp, Arabidopsis thaliana landsberg
gctcggtttctttatccaagcgtatgttaccggagaaggtcctgttgagaaccttgcaaagcatctcagtgatccttttggaaacaacttgcttaccgtcatcgctggaactgccgagagagctcccactctctaagccatttctactttttttaagagcttccaaaatgtacactttgttcgattggaactccttttgacaatgttaaaaaaacttccatctgaatcttcttgatatatttcaatggtgctttatcatgcttctaaggatatacatagtcacccattggtttaatatttgttgttaccaagaacgctctgtcacaatttagtcatacattgcgattttatcactagtggcgagtatggtaaaaagtttcacaactaatattgtgatggaatttgggactataagttagtcgagagatgtgatccgttgacaatattaaatagcagaagatcaaatagaaatgagcagtagcagaatattttctcaactaatttaatcattcttacattgtaaagaactagtattactcactctcaacaattgtctgtctcatacagtaataccgacgtacagtatcattaaaaaatgtgacttttgcttcgatttcaaaacacaaatgaatgttttcactctgtcagctttgaagttgcagaaatcaaaacccctattggatcctaaactctagctaggcatgtagatttgcttcgattcaaaataacaatgttttcactgtcagatgagagtttcagtacgtgataaccattttaagcaaatcaagtatatgcttgatactttgtcacatctaaccaacatttaacaaatttgtatatatatatatatatatatatatgttcagaactgtaatggcatgtaaatagttgaatcaattcttgagtttatctttcgaggtgaatcattttattcaatcagaatttgtcatctaataaaataaaataaaaatcagattcattaattgtaaattctaatccctagtcacttttctataaaaacgaaacaatcatttagctaaaaataattataaaatataaattgtgcccatttttttataaactcaaatcgaaatatatttttttttaattgtagaata

SEQ ID NO: 41651 - DNA, 1018 bp, Arabidopsis thaliana landsberg
  unsure (1)..(1018): unsure at all n locations
cgattatgctaattataagaaaggtaagagtattttagtgggggttttccaactagttgtcaaagtttcgacaataacaaaatggtattatttagttggacccaataatatattatatgaaagagagatggacagacatagacaaaatataataagtttggcatctttcattttatggttagagaaaatgacattctaaaagagcaaataaatagactactcaagagttattatgtttatatatatatatatatatgtttgtattatcattaaaattcgcgacaaggagatatatattccaagtgggaatgtataaatcaatcagtcaaacagtccatgtatcttcaaaaagcttattaacctaaaggtagtcaatttttttttgtttgcatgagatgtcaataatttttttttgtcaattaatcatttaaataaaaatagcaaattatggtcatatttagctaatttactcagaataatgtatgtgattagggaaagaaaagaaagacaggttggtccggaagagtagtagtaattgagtatgacagaccacgttcttctcttatttagtatctccgttccctgtttaaggagtagtacagtgtacggacaaagaacttaacggcgttacttacaatatccccgtcacgttgtgttgcatgtgagaaaaagggtttgggtgcgaattttcttcttcttgagaaaagagaaaaaaaagaaaagacacagcgactcaaagacatgccattgtcctttccagtctgtttttttttacttatctgcaaagtgcaaactaatcatatattattccaccacttctcttcctctcttttcacctttttaaaataataatatttattgttgtatacttttaaacaaatattttgggttggtaattgtacttatatcctggttttgaatctaccggttttggtatcattaactacgtcaagttaattatgtttcctaaactagtatatgtaataacanagatgataaatgcttgtcagtgataatg

SEQ ID NO: 41652 - DNA, 1317 bp, Arabidopsis thaliana landsberg
cattactttaggagctttctcaactctagctcttgcgttttcattatcatgttacaagaggatcttaaatcaaatcattttggatttttgttatgtttattttgttataatttatttggatatgattaattgaaaatgaagtgacacctagaacttgctctaacatgggtattgttgttttccttgttattaggactctgcttaacattacacttttgttaagagtaacaacatacatctaaaatctcataacagagaatagaaatcgtacccactgcaaaaaccagatactcaaattagtccatttcatgacaacagattaatgggcctttaagtatatggacatgggcctttgtcagttataagtctcccttaaccagttgacttgtgttccctctaactttaacaaaagattgttcctgagaaattctagggtttctgaaatcgaggagagatccaatcggcaatggcgaatcaagtgatcaccggaatcaaagaaacagctcagtcaattactggagcggctcgtccatggggcgatttcctcgatctttccgccttcagcttcccttcctccatcgccgatgcaacaactcgcgtaactcagaacctgactcacttccgcatcaactacagtatcattctctctatcctcctaggtctaaccctaatcacacgtccaatcgccatcctcgcgtttatagccgttggcttagcttggttcttcctctacttcgctcgcgaggagccactcacgatcttcggattcactattgatgacggcatcgtcgctgtgcttctcattggtctttcgattgggtcgctagttaccaccggagtttggctcagagctctcaccaccgttggatttggtgttctggttttgatcttacacgctgcgttaagaggaacggatgatcttgtgagtgacgatctggaatcaccttatggaccgatgctctctaccgctggcggtggtaacgacggtgctcgtggtgattacagtggaatctgatcaatacgatttgataatgagtttggggatctagggttttgttgttttgtaattgtcatgttgtattgttccctcatacattgttaatgacacaatatgtattgagtcgatatcccgtttagagagagaggatatctgttccccgttagtcagatcatatggttgcggtctcccagaactgatctatattggcttgtatgaaccatgttaaaggacaagaaaagggtttgaatccatacagagtcaagaacagagtacacaactttcttcattcaatgtcatgattcatagtagcgcccagc

SEQ ID NO: 41653 - DNA, 562 bp, Arabidopsis thaliana landsberg
  unsure (1)..(562): unsure at all n locations
acagttgttgtaaacttctttttaacagccgaacgcattcttatatacaacatactagtaactagtaacttgagtttccttagaacatacaccattcttacaatagttttgttattagatgttcccgttttgtgtataatttgattcttcttctatatggtcttgtattgtggaaaacgattattggggagcaaagaaacatacaccaaaaaaaatatgatcaaaatttttannnnnnnnnnnnnnnnnnnnnnnnnnnnnnnnnnaagtaagaaattgcaattatatgagatattatatgtatatgcaattgttcttagtatttaggtgtttagaatatatactttagaccgttttaagatgtttgttaaaagttagtcttcttctaattagaaacatcttcttttgtttttatgaagtaagtgataagatatacatataatttacctcnnnnnnnnnnnnnnnnnnnnnnggttaccatgtcatgtttaatcgttcacatgagaatatctggtgactgtgtcttcggttcgatgtggctatatttctagaaacatgtatc

SEQ ID NO: 41654 - DNA, 615 bp, Arabidopsis thaliana landsberg
atcctgttgctatttgttttcaactaaaatgctgtaacggtcgtttaatactattattgttaggtgggctcatgtttagtattgggctgggccttgctattaatatacattggatgaaattgatgaattccttacaagtcgagaatgttgatacctaaaaataatgttcatgaggtttaaatctagtaataaattatgaatatagtggtccatgatattgtcaaactttaattttgttgatatcatttttgtgagatctctaaggcaatgtcaattgttaattgcacttatgtatactagagtccaaataattcgaatgatgctatattggttaattctggtttagctttagactcggtttagtagtaacttataaaactctcatataattatatatatatatatataaattatgataaaatttcaaaacttagacctatagaaagagacatttaataataaacaaaatttattatgattgtaaataaaactaattaaatcataaaacataccatacaatagataaatagatagcataattttcagcaacaaattttgaattagttgtgacacttaagtacaaaaaatgtttgcgcacattaatattgcatgatg

SEQ ID NO: 41655 - DNA, 620 bp, Arabidopsis thaliana landsberg
tatccgaaagttttcaaaagtttgcctctgagtcaggttattgttgatgaaatatttaaattcaaagataatgttcattgattgggtggtcgcgtaagtaagagtcgtcagctagttttcttctccgagagtaatggagccatctcaacgcaacaccaaaccgccgtcgttttcagattccactatcccggttgattccgatggtcgagccaccgtcttccgaccattctctctctcctcgccacactcacgagcctttcacctagcttggctctcactcttctcatgcttcttctccaccttctccatccctcctctggtccccgtcatctcctccgacctcaacctctctgcctccaccgtatccgccgccggaatcgcttccttcgctggctccatcttctctcgcctcgctatgggaccactctgtgatctcatcggaccacgtacttcctcagcgattctctcttttctcaccgctcctgtaatcctctccgcctcactcgtctcctctccgacgtccttcatcctcgtccgtttcttcgtcggcttctcgctcgctaatttcgtagccaatcaatactggatgtccttcatgttcttcggtaacgtcattggtc

SEQ ID NO: 41656 - DNA, 133 bp, Arabidopsis thaliana landsberg
tcggtgcgctggcgcgtaaggccggcgtcgagatctcagtggtttcctttggtgactgtcgccgcctgacccccatgcgcttgcctgagtgaccaggcgccttcagcattacacctgttcactccagatcaac

SEQ ID NO: 41657 - DNA, 645 bp, Arabidopsis thaliana landsberg
ccgctcgatgtggtgaatttgagcgatacaattcacacatgaacagctatgcctgattcgaattcgagctcgtaccccaccaaacacggttttgcgactgctcttgtggccgtagaacgctagggttcttcaggaagaatctgacgtcagctatcttcgatctgaatcgatcgagtaaggaagagagggaacttttgtggcgagggaagtacttgtggcgcgagccttggtcgtgatgaaaccggcacaccgtgcagaactcgatttcgctctttttcgatggtttcttcatcttcttcttctttctttccaaagtgacccgaattagtgatgcgattacagcgcgattgaaaccgaagccacggttgccaaatttaacaatcaagctttattaatttccggttcaaagccggtccgacccggatcagcctaatgtacataagtctgaataaaacgaaaatccgttttttccgttatcattatttgtttttaaaacagtatgaactatcattaagaaaaaactgttagaatattaaaaagaaactgttagaatattcctgactaaagatttgacggtgaaagaaaatatttgattttgtttaattcgatagacatgaatggggatcctctagagtcgacctgcag

SEQ ID NO: 41658 - DNA, 253 bp, Arabidopsis thaliana landsberg
catagaaacaattgttacacaaataggttccgagtgcctacatatgtaacaaaccaactttagcatgaagcctcaccataatctgatactgtacagaaactctaaagttgattcacagaacctgaattttgagtcttatcagtgaatcctagcgattcgcactctgtcttaaattcatcagctatggttggatggaaagatctcaagcaacctttcttcacaactgattctaaaacaacgtgattaaatgaaa

SEQ ID NO: 41659 - DNA, 1052 bp, Arabidopsis thaliana landsberg
  unsure (1)..(1052): unsure at all n locations
agttggtttatttgatgacccttcgttgtacatgtgtggcgggctcaatgatctcaaactaggaaccaaattgctgatttacttctacaaaaacgatcttcaaaagcttcctccacttctcacaagacaacaagccgatctcattcctttcactaagtcaaagcttgacttccttctcgaccacttctctatcaccaaagactctcctcaagggaaagccataaaggagactttgggacattgtgatgctaaagctattgaaggagagcataagttttgtggaacttctttggagtcattgatcgatcttgtgaagaaaacaatggggtataatgttgacctcaaggtcatgacgactaaagtaatggtaccggcccaaaattcgataagctacgctntgcataactacacattcgtcgaggctccaaaggaacttgttgggattaagatgttgggatgtcacagaatgccttacccttatgctgtttactattgccatggacataaaggtggaagtagagtctttgaagttaatttggtgacggatgatgggagacaacgggtagtaggacccgctgtctgccacatggacacgtccacgtgggacgcggatcatgtagcttttaaggtgttgaagatggagccgaggtcagcaccggtttgccatttcttccctcttgataacattgtgtgggtaacaaagtaagaaaatagacgtagctctatataatgtgagtatgtgtttgtaataactatggtttgaaaggaaaaagaaaagaaaagaaaaagacagccttaatgttggctttggtattgcctctcttttgtgcaacttgcagtagcaacgtgagaatactagtaatgttaatgtaaaatataatatctcatgcgtcctaatatatatatacactacatatttatatatcacaatgtatgtaacttatggtccatgaaaatatatgtcggctttggaagttttcgaattttggatcgaagtgactcgatcgtgcggaaatatatggattagacttactgatgcctatatagaaggt

SEQ ID NO: 41660 - DNA, 539 bp, Arabidopsis thaliana landsberg
  unsure (1)..(539): unsure at all n locations
tcctatcaggatggttctggctttttatgttggggctgataattatcctatagagattagcacaggcccatataagttgacaagtcatcagttacaattacgtttcttcttcacacagcccaattagcaaaaactcggttcaagctgaaatcgaaactcgaaccggactgtgatggtggtttccnnnnnnnnnnnnnnnnnnnnnnnnaacgtcggcggcgagatcttcgaaaccaacgcgtcgaccattcaatcatcttgcccagactctctcctcgcagctctatcgacttcaacctcccatggatcgaatccggttttcatcgatcgtgacccggagattttcgccgtcattctcaatctcctccgtactggtcgactcccagctaattcctccggcgttttttccaagcaagagctactagatgaggctatgtattacggcgtcgaatcactcctcagattggcgatgttaccgccgccgctgctaagtttcgatgcgtctcttgtctccacaatcgtaccggctgctgatggag

SEQ ID NO: 41661 - DNA, 564 bp, Arabidopsis thaliana landsberg
ctccagaggtgacacattttttcgctttcaagatctcgacttttaagtctctcttctcaaatatttgtagttggggtgttcatagtatcatcttctttaagttggatatgattttatttcgtaggaagtgcttgttgctcggaaaatccatccgtgtttaccttctttcaaagcagagtttactgcagctgtccctctaactcggattagggacatagcccatcgcaatgatattcctcatgatctcaaggtaataactcttttctcctgttttgtcattagatcagtttttttaatggtatccatataacatatctatgttccagcaagaaatcaagcatacgatacaaaataagcttcaccggaatgctggtccagaagatctaattgcaacagaagcaatgcttcaacgaattaccgagaccccaggaaaatatagtggagactttgtggagcagtttaaaatattccataatgagcttaaagatttctttaatgctggaaggtatttctgaaaccacctatcatttcgtctgattaacttgctaaatgatggtcccatgg

SEQ ID NO: 41662 - DNA, 330 bp, Arabidopsis thaliana landsberg
gcccaactgttaaaaaagaaagggctgggggagcttcatacaaacacatcgaaagactttgataaaacgttgatcctaccactgatgttaatcatcagcaaaaatacattaccaaacatatatgagaaaagtggcagctaaattgcagcctgatcatgaatataaaactctatttcctcatagttttctagcacctgagactctgaaaaactctaggttttctctgaattgggtgaataccataagggataccttctgtcgctttcataagtgaatctggtgtatgaaggtgaaaagggacaatttcactagcagctttctgaaactcta

SEQ ID NO: 41663 - DNA, 609 bp, Arabidopsis thaliana landsberg
aaaatgacgttttgattcactgataccctgaaatgccgtactgactaagatcttattccgctctaccaagacagatctttttagcataatttgggggagtttttccccattaattctcactttgtcttcttcttgtgtcggataggttttcaagaaaaaccctcttttgtcttgtctcctcaaaatcagttgcttcttctctataataatagagggtttattcatatcttcactatctagcttcttcttctatcatatgtactccaactctcggatatgatcgaaagagctttgttattattatctttacaacttcacgcagacgcataagagagagagttgatcaaagatattcgagattgagatgaacaagagtaatcctgctggttcggtgactggttcggatataatagacgccaagatcgaagaacatcaactttgtggatccaagaagtgtcctagctgcggccacaagctcgaaggcaaaccagtaagtaatattcctttttttttcttctatttgatttcagttcacttaaaaaataaattctttctaccttctttttctcatttttaggtcatttgtaaacgtttttttaaagaaaaaaa

SEQ ID NO: 41664 - DNA, 574 bp, Arabidopsis thaliana landsberg
atttgattccttggaccctgcatgtgtctctaataaatttctttatcaggtagaaatcctctttaattcatgactgtgtttacgatttcatcatggtagttgtggtaatatcatattttgaagtagcttgatctaaactgcagttacattatcaaatgatatgaatgtgaaaaagagaaaggaatgcaactgcatttgtaaaacctcaacagagagtacttttagtatttacaattttgtttaaatattttccacaatttgcaaatcaaccccctaattccgaaactgtaaacgcgagaaaagattttctcaagaagcagagaaagcctattgtattaattgggttttgagaaaaggagaaaactttcgacgatcggaagatttttcagatacgaaaaatggcggtacagtggcttttggtgtgtcacgggatgatgacgttgacggtggtcatctccttcctctgtggtcaatggccaatcttcaaaggcacaccttttcaatggattcactacttcctcactttcggcgcctacgattacttcctgtactacttcttctcatctgattgatt

SEQ ID NO: 41665 - DNA, 492 bp, Arabidopsis thaliana landsberg
ggcttttgtttcgtcgtcacgacatccctctgcctcgcttgggtgagcttcttccttctcggagggaggcgaggggaccgtgtatggtgtacccacggtgctggaccgctggagtggagtgggcccgagctgggaggtaacctcccactgtgttgcgggtccgcaatttcattaagacctagtgtcagtgacctgtgtggtggtaaccgccgggaccgcgctatcctcgccggcgtgcacgtgctggccgctgctgcggctaaacgctagagccatggagatcaaggaccggcggcaatgtcattgagactctctccaccaacttactctattccgtcacgtaaaaaaaattctttattcttttaagtgctctctaaatattcttgtcctttatacttttttcatcttcaaaagcatcatctaaattcggtcatttatacctataatgttaaggatacacaactaccttatttattcagtttttttaacttt

SEQ ID NO: 41666 - DNA, 640 bp, Arabidopsis thaliana landsberg
tgcacacttttctagctcggatctacctaagtccaaatcaaacctcgagcacaaactgagcaagaaaacctgagaagctacgattccagctaagtaaccaacgccacaggactcagaatcgatctctttacgcaaaatttcactagcaaatggcatgaacacctccaaacaatcctcaactctacaattatcttccacttcatccacaacccaaactcgactcaaatcagcaaaactaaacccagagaccatcaacacatcatcatcttcatttccaggttcatcgacacagtacatgctaatatagctcacaatcccttctaacaagctcaaagcatctctcctcctagaaataactaaacgactcaactggtaaacaacgggagataacagcgataccttcttaacaccggaaaacgaatcggaaaacgaaactatcagctggaagaaacacgaagttaacctaacggaatcatcccggaaagctaacttggaagagtagaatctgatggcggagtagaaccagacgagctcgagaggtggtggttcgggaagatcgttaagaatacgagtgaaaatggagtcgaaatcggagaaattggttcgtccgcctcggtactgtaacaagagctgcttgatc

SEQ ID NO: 41667 - DNA, 557 bp, Arabidopsis thaliana landsberg
tccagaattcagaatcttttactttcttaggatctgcgaccatagaacggggggggggtatacgttttttgatcacaaagttggcgacaagaatcaaaatcaaatctcatccttcctttgtctctcattatgaagccgccgctcttcttatcttcaacttccttaaaacatttttaccatttcaaatcgaatactattcaacttaagcaagactcttaaccatctgttaataaatcatcggagttaaaagagttgatgcaaaacacaaaagtcaaaagttagaaaagcagtccaaactgtgaaaatgacgtaagcgtaaagaagtattcttctaacgtacgccgcagccagagaagatgggtccggtcctcccacgattggtgcgtgtcttcacgacacttggaccattgtcttttcaagccgacgacgacgatactcatcactatatttagtcttataataataacattaccattctttatctatttcttctacacacgagccccaaaaagctctataataccttatcttttcaattacgacattacgatgatgca

SEQ ID NO: 41668 - DNA, 422 bp, Arabidopsis thaliana landsberg
cattttttgaacgtgatccggtgattattctcaacctacgggggctcggaattagagctatgagtggcccagtccacatggaggatatatatagcttcattgtgatgttgcactctgggcgcctaggctattatagactggactgatccgattagcggctactatgttcacatatttcttgatcaaagtatctgcgcggtacacgtttatgtgcaacgctgggacaagattaacttgtacgtgagctgaaaaatgcactccaacttactgtccccttattcaaagtagcagataggccaatttagagtgtgcggtacagtacatgtctatgtgcgagcttggggagaagattaacatacttggcatgcctgtacatctgtactcgtcatgagctgaaaagagcactccagtctactacacca

SEQ ID NO: 41669 - DNA, 420 bp, Arabidopsis thaliana landsberg
ttcctgcccttctaagtggtcttcttgggtgtcaggagctgagtactggtacaatacgacctaccattcttcattggggcgttcaccttttgaagtgttgtatggaagggcaccacgccatctgggactcaatatttctgatgcttctactcaactagaccttagtacttggcttcagcaaagggagttgatgcttaagctcattcagcaacacctgttgtgagcccaacaacgagttaaatctcaagctgataaagaacggacagagagggagttcgtagtgggtgatatggtttatctcaagttgcaaccatatgtgcagtcctctgtggcgcctagggaagctcacaagttaagcttcaagttttttgggccctatatgattcttgcgagagttggcaaagtggcctataaattgca

SEQ ID NO: 41670 - DNA, 545 bp, Arabidopsis thaliana landsberg
ctagttctttgccattctcatgacctaattttttttattaccaatgactaacttagtgtgatcatgtttttactcactctatttctttttttgttaaaggggtttcttgcattagaattaaaagaaatcaaagtttacataggagccttaaaccatagacttaaaacagaacataagaagggaggaggcaagcacaaatgctagataaggagagaagaaattaagaattgccgagagaacgtatgcatccggttcccattccagttccaatgcgtttttgatcctccaaaagtgttgtttgccattatctcctttcatatttgtaatccacagatagtcatttccattgatcatactaatatcttcaagacatgacgcctgagaaagaatactaagtttgatgactcgaaacatctctgtgtgaagattataggcaagaaccatcttattttgagtgcgacaataaacccatccctttgcacatattgttccttcttcatctatgtgtaaatcatgatcataaggcgtataatctatcacctacc

SEQ ID NO: 41671 - DNA, 567 bp, Arabidopsis thaliana landsberg
tgatggcttttagggctgggtctttccattgtcaagtgattgaaattgaaaacgttttttcatcttcttctccggcgctcgacggcgtcgtgacgcgccttctggggtggccggctcgcgcgcgggatgttagaatcgaggtgctcccccatccaccgaggttccatgcgctggacgatcctggctttcggcaagctcaaagagccgtactggcaagccggcgtggccgaatacctgaagcgcctcacgccctatcggccggtcgagctcgtcgagctgccggacgagcgggtcgacgagggccgcgaggcggccgcgatgcagcgcgaggccgatcgggtgctcgcggccctcaagccgggcgcctacctggtggcgatgtgggagcgtggtgagcaggtcgactccgtcggcctctcgaagaagctgacggcgctcgatcacgagggccaccgcgaggtggtgttcgtgatcggcggcgccaacgggctccaccccaccgtgctcgcgcgggcggactggaagctcgggctctcgaagctcaccttgccccatatgctcgcccgg

SEQ ID NO: 41672 - DNA, 717 bp, Arabidopsis thaliana landsberg
tttttttttaacatatttataaaaaaaaatatagcgagggtgaatcttatatacacaaaaagagatgtgtcgatggagttgggagacaatttgtaaattgaaagcacaagcaatgcaatctattaatctaataagtgactgggcgacgaattcggaatggaaatcatgttctctaaattgggctttaaacaatattgcgtgaagcaagaataataaatttgggctttagaaaattgctaaaaggcccattatcaaatacccaaaaaaaaactagtttctgtgtcggaattgtattgagctaccgtctaccgatcatggcataccgcatacttatcttaaattattaaaattgcctgtcattattcagtcatgactaaaatatataaaagagagcagagattcatcgtagtaaaaaaaaataacgacccaaaaattattttacatgctttatgtgactttctcattccttaatgattacacataaatccctgaattcattttatctcttatgctatcatgaagtcatgaactatagagacggttaacgaatttgcattctaccatattactgaagtgatgcaacatgcacgcactttaaatataaatgtgcatgcagagaaactataaaaggaaaattggcttgaattacttaacatgaatgaaaactaaaatattaacgaggttcgattattttgattttcacactaaatttcaaac

SEQ ID NO: 41673 - DNA, 570 bp, Arabidopsis thaliana landsberg
  unsure (1)..(570): unsure at all n locations
gatttcaatttgatttatgtctatattatgaattatagacgatatatataataattaaaatatcattttagaccattaaactatttaaaaaatttccatatcacattaactcaactgatgaaagatttaacgttttgtttgttttttgtcggcgatttcaactttgtttagtaaaagtctaactcatcattcattatagaggaaaaaaacagattttcaaaagtggttatattcctcatagcctcctttttattaattagaatttacaatcattgttggcaaacaaataaaagaaaggttaacacaaatcacaagaattatattttcttctttatttcctttttaatcttttaattattatttttgcaccttttcttaaactttatcatttagtttaataaagtaaattaggattgtttgacaaaaaaaaaaaaaagtaaattaggattagaatatataaaaaaggccctactggaactactctagatttctttcttatttttaaatatcactatctattnaaaatatattcgttatttttaataacatgtaatatgcggttttattatg

SEQ ID NO: 41674 - DNA, 519 bp, Arabidopsis thaliana landsberg
caaattaatttttatttggacatttatatctaatacttttgagttagaaaataaataccctatctaattaattatgatcataaaataccttgtatatattggtggaataactccaaaaaattaacagccgttattgggcgtgacagaatcatttaacggtgttaaatatgaattctatatatattattggataaatacaatcgtttagagtagtattatgagaatgttgtggtggtccagcggtacgattgtaattgattactcttccactcaaattcgaatacactatgtttaattgattaattgttttttttcccttcaccagaaaccctaaccctagcgccgcctaaatgttcttctccaccttaatcttcttcatcggctataactttgtatgaaatgaaaattgaaagttgcagtgatcccttgattgagtcgagtggaaatcacagagaacaccgtcacgaatcttcataatcgaagcagacgagacgaagcaaaatcggaagctatatcgac

SEQ ID NO: 41675 - DNA, 351 bp, Arabidopsis thaliana landsberg
atggcgacgcatacaacgatattaccatggatagaacgacgaaaccttgtataaagcgctgcgcatattcaaaccaccctttttcctgtatcgtagaacaggaaatgatgcctccactaatagagtacccacgctactacttgctgggatatcagatgtgttaccacatacatgtcgagcgtccctagactggtaccttgacacgatgagctgtgctacaggggtgtagatgacatagcctgatggaagggatatataatgcgatctgcggatgctattgcggatggataatgcagtcttgcactgtgctatttaacgtatagcgtacgcggaggctggatagggatttca

SEQ ID NO: 41676 - DNA, 195 bp, Arabidopsis thaliana landsberg
acatagggctcagtggcgcgattagcttgtggtctggggtgacgcactactcacttgtggtttggtgtggtgctgtggtctgtcctagctacttgctatcctgtggtctggggtggcggtttgctctatggctaaatacctgctatcaacagagaacataggggtaacctctagcctctattgaggcctggggtg

SEQ ID NO: 41677 - DNA, 348 bp, Arabidopsis thaliana landsberg
aatatgtcacgcaaaatggttactctgaaggctccggacaaaagaaagaccgaaggcaccgaggggcaagcacgatcggacacccgatcacggtcacctgtcctgcgtacgccggacaatccgggtactaaggccgaacaatccgagacaggcgcggccagtccggctatgatggccggacggtccgcagatggtcagaagcagcaacctcagaccatcggaccacaacgttccaacacacgtgttaggaaacaaaacactactaagacgtctggacaactcagtagagtcggccctacttttggtcagctgcttgccaaatatatgaagaaggccgttccacacaac

SEQ ID NO: 41678 - DNA, 354 bp, Arabidopsis thaliana landsberg
tgcaacaaagacggctgaggctgcaacaagtgacggcaaggagcgaatcaagccataatccagcaagctcagctcagaaaggtagctccccaggaactccaactggaggctaggatactgcaatatgcatcacaacataacaaatcagacaacatcataaacaagcagcaggcatttggaacaagaacagatttcattgttgaaatgcaacaaatctttctcaccttcttgttgtcttcttgggcagatctgatgaacatcctaggaaacaaaaggtaaagggcgcacaaaatttagaaatgggatcattctggtagacaaggattgcaggaccaattcagattgatttggttt

SEQ ID NO: 41679 - DNA, 401 bp, Arabidopsis thaliana landsberg
  unsure (1)..(401): unsure at all n locations
ccgcgggctcgaccaacgtcagttgaattgccggttctggngctccagacggcgcacggcggccgccagcgccgcaatgggcgagtgattgccgctgaccgactactgggcgtcgcgcaagtcgccggcgatcttctcgccctgcatcatcgtggagcggcgttcggggagcgaggtctgctccccgttctttggcgcgagcttcttcaactcatcggacgagtggcgcaggtaataggcctcgcgcgcggcgcgttccatgccggcgcgatgctcgatcagcgcggcttgcgcggcacggagcgcggtccacaaggccttgagcgcgacaacatccttctacagcccggcgaaggcatcgagcagtcgccggtgcgtagaggcgtcaaccagggcacgct

SEQ ID NO: 41680 - DNA, 713 bp, Arabidopsis thaliana landsberg
atattgagatgttgatccctctcaattaagcattcaatgccattgagcttaatttccccgcacgaaacatttactctgtttttttgtttccctccttctacgtttctctgtacacggctttcttaaattgctcacacgaagcagataattcgtctctctatctctctctccatgcatcattttcttcgtctcattggtattgattgattcacgtgactttgtacattgcggttaagttcttccgtcttggtcattccacatgttgtgtagtgttcaacgccgaattttccttcacccgaggttagaggcttgcggatttttctgtacattggaattagcttcgatgtttcgagattagtgttagaaataatagtttgcgtgttaaagttcttatctttcctgatttggtcggttacctcagttttgtcttgttgtgagatgaatccatctcttgctatattaaggacaaatcttcaaatcggtgatattttgcttcttttttttctcggccacagattaaaatcgtcaaattatctgatttttgatgccctgaagctttagcttgcatctgtagtcatttgtcaaagagaattgaacagaggctttctatattcgtggtcaagggtttaggagattctgggttttggcgtgattttgaggggaaagattgaaactttccccgtgaatggtaagacagtgagaaatgtgtgggt

SEQ ID NO: 41681 - DNA, 298 bp, Arabidopsis thaliana landsberg
gggatggagaaagaagttcctgtactgcaggaggaaaagagttgcttttacaagggcgatgatctagccttaccagtatactacatgaacatgttggagaaaacacaatccatggcgtgaagaaatgcaaggagacttagttactttcacaacaagtaacttttaacattggtgtctgagaatagcttatgatcgaaaacgggactacaagctctgagacaggttaaaaatatattctttaaggtcttaacctcagagattaggtcaaaatctgttgtttctcgtcttgagttttaag

SEQ ID NO: 41682 - DNA, 1376 bp, Arabidopsis thaliana landsberg
tgtgaaatcattttattcctcattatcgaaacccaaatctgttcaaaacactttatgggccataaattattatttctcaatcttatgttacaagcccaattttatataaacttacttacagcccatttctcgacattttcagtttttgacaaaaaaactttttggtttcaaattaaatttttcttctctttgtgggctttcaaaactgatggggatgctcttacaactcatgattttttctttcgggggatcaggaaatgataggtctcgttccacgacgattttaataatcttcttttagattatctatcttttacttcaaccaaaattactattagacgaaagatgttgaccagaatacgtattttatttttgataaatattcagcttttatataatatagtagaagaaaagagtaaagtaaaagaagaagataaaatgtagtcaaaggtaggaaccaaaaggaaagagaagaaaaggaagttaatcttaacatgatgatagttcccattttgtcttggggataatgtcgcaaagacttcctcaattttcttactttcttcctattttacgttctttttcttttgtttctagaaagacatatatctttatttgatatattatattcatatgaaatttagaaagaatgtaagtatttagaaagtaagttacttcgattaattaatcaacttggctataaaaacaattatgagtcaaatgtacatatgaacaatctactcaattggctacttaacaaatctatctatttgtttcaagaaaatccttgcaatgaaattcatcgaataaaaacatcatacctttacacctatttagtggataagtgtgatctacttctacagttgcactgccttcttttgttccttttcacgtcaaacacactcacatttgagcatacatcaatagaaacaacaatatctctaaaacattacttaaaaaactttcaagttagtttcgatttacttggcattcgtatcctttttatcccctcgtccaaaaatctaagctaggtaacatttttccaaatgtcgagtggctcgggaccaaatcccaaaacattttgtcattcttaacttttcaaataatctaaaaagttttatgggaaattaaggattatccgccaactacggattgtcttgactaggttcttccatattatatagtcaaaattcggaaaaaatcaagcttattcgaaagatttccggtgccgaaaaaacagttgataattaaagtccatgtttgtaaattcgaatgacattaaaaatgtataacttatcgtctcagcttttgcttcaaatgggaacatattgaccacactacatttaactggtgttacacccaacataaatacttcatat

SEQ ID NO: 41683 - DNA, 524 bp, Arabidopsis thaliana landsberg
tttaggttcatattcaatatcattgtcaattttgggggctgtacgaaattcacgttctcaagctataatcaattttataaataaacttgatagcttccatgaacattttcagaatttccaattttcggatagaaaatgtatataatgtaaaattgtattacaacgtaaaccatctactacgggtttaattacctctaaaatgactatgaagcaagttgactattttcgggataaattacatttgttatgtggcacttattataccatcaccatttggactatatacaatgtttatgaggtcaaagttgataaaaagaaatttaacacgagtactcatggatcttagggataattttttaaaattacggtcaactctaataagaaattctagtaatggagatcgagtagaaatgatcaatgactgtgggaaaaataaattccgtcaattctcattagcaagaaataattcgtgcatctatatttacacctattattgcagaattggcaatataaataaaaggatt

SEQ ID NO: 41684 - DNA, 530 bp, Arabidopsis thaliana landsberg
gtcacaggaattgacaattggagcgggaagcagattcacagccacaattatcgcacccctgaaccgtttcgggatcaggtatttctctcctctgcctattcgattccagcactccaaaagattcctcatcagttacgttgtgccacactcactaaattttatactataaccgaatcatatttttaaactaaaattaattaagagctcaaacaaatcgtcaagcaacattgatcatgatccattaccacacccctcacaatagccacagaacgttgtcgttgtagggttctcgaccagtggaatcgacattgcttcagagatctcacgtctcgccaaggaagtgcacgtagcagacaggtactccaaggacaggctgggaaagatggcgctgtaccagaatgtctggattcacgcagaggttcacgactctgaactttcatagctactctccaacaccttcccgctatatgaatagagcaatctgtactgagcattgacacacgaataccatccacgagagcaggtggact

SEQ ID NO: 41685 - DNA, 565 bp, Arabidopsis thaliana landsberg
ctgatttagcttcttctagagaaacacaggaggcactcgagagaaaggtttggaagattcttctcttctgcgaatctatttcacatggagttagtgaaagtttctaattgattttgcaggtgagttatcttcagaacgactatagtttgctggaaaacaagcagagtgaattgaagacaactatccaaaatttgcttcaatcgcgagaaagtttcttaaatgcttaccaggtgcttttctcataaaatctcaatcctgtcaaaatcttatactatatctaagggataaaaatagcttagagaatcatctccatgatatggaactgtgtaacttcagttagtgaaatgctggtgtgtttgcaggagtcgttttgtgaaatgaagtgttcaattgaagccagggataggaagattctcatgctacatgagaagataacctctcatcttacgttgtttgattcaattgaaaaagaggcatcagtaattaaaaaggtcatacatgaagttcagggccttgggataaaaaagaagatgtagggcatgagatctctgatctctgactaatc

SEQ ID NO: 41686 - DNA, 517 bp, Arabidopsis thaliana landsberg
  unsure (1)..(517): unsure at all n locations
caaaatcgaaatgaaactgtaaatgcaggcagaaggttctccttctatttgcatgtggcattatggtaacaattcacaattaaatattgtttaaaatgcttaaattgtcagttcatatggaaaaatatacaaatacaaacgtaaacaaatgatcaagggttaaaccaaaaaggattttttcacagccaaacctaaaccgaatcctacttcttccttttttaataaagaatacataatcatactttgaaataagaacagcataaaactaaaatattttgggaatgtgcatagttgaacttaaatttattagaagacgtgaacacttgnggttttctatgcagttttacaatttttgccggacatgttggcttttaaatctttttaatatatttaaggcttacgcaaaactcccaaagttttgtgaggaatttctacacatttttgtcaaacaaataaatacaaaaacatcatttaaaatcacataagtgccttcttcaggttttgggaaagaaaactt

SEQ ID NO: 41687 - DNA, 777 bp, Arabidopsis thaliana landsberg
tctaagtacaaccaccttttaatatcagtaccagagattgcacctcaatttatttgagcttctctaataacatttagagaaaacagtaatcatatcatacgatcccctccctatttttgtgtaactctagtctttttcagtttgaaagctcaaataaaaaaacatgtgcaaatgccaatcatataaaaatagataacaacataataagtaaaatatctcagtttttaaatccgattttggagagtaaataaatttgaatttaggggtagactctcggtaattcaagtttgtcttaaagatgcaacacaaaggctctcaagcgatttcgatttcgttgtctataatgatttggaggatagtgtgagtgatcgcttacctgttttcttactaatactagatgttaattttgaatgtctaaccgtaattattttggtaggatcaattcattagagacaaaaaggttgataaaacgttcaaagcatgtctagatgatgtaaatagtttattaaactgatttgcaagtgtaatactagttttaaagcgtatgataaatgtagaattatattcaccaaaaaaaattgtacgaacttttttctttgatttattctattattattttctcttcactttgctaggttatgtggttttaaaattaaaaaaaaaaaaagtttcttatgaactagttatgggatcctaatgtatataggttaccagaatggggatttggttaactatttaatatttatcttggataaaacaatgggattaaaactcaga

SEQ ID NO: 41688 - DNA, 664 bp, Arabidopsis thaliana landsberg
ttattggtgacacaaaatccaaccaaaatcagggatggacattgaaccaacttattcttatagaaaatttgactaagaagtaatttggtaaaatataatatgtcatctagtaaatttggtagaaaataattatatgtaaggaaatatatcaccaagagattaaacatggattggtcaaaataataacttgattatataagtgaaaatgaaaataaaagatggactgaatatatttaatcaagttgtacattaaggaatggaataccatatttattttatttttgtttcaaaatatcaaaagtattaataaagataaaatttcataccatataattaagttatggccttttaggtgataaaaataaaagtaatgatacttcactatatgtaatattaattaatagagataaaaattttataccatataattaagttataaaattttaggatgtaaagataatttttataatatgaaatttatgtgatattaaaactaaattttttttagaataagttctttttgtttttgtttttgggcacaacatagtatgtattaagttttttgttgttgttgtcaagagtatgtattaagtttaaactatcaaaaagacgaagtaaggtgaatcagagaatttgcaatgcatgacttgggttaggtatatct

SEQ ID NO: 41689 - DNA, 1099 bp, Arabidopsis thaliana landsberg
  unsure (1)..(1099): unsure at all n locations
tggatccctcgctggaaccactcatcacattttcttctacgttatatattttccgttaagagaaacaaaaaaaaaggctagatgtgacataaggaagaagacgtaagcaacaaagagtcataagaaagtggaaagatatgggaataaattggtatattatggcgaaatagggttatggttagtttacaattgagaattgacccaattttttaactaatttgtggattacttatagctgaacacatgtattttgcttttgcactttgtagatgatattttttgttttgttttttaatcatctggttttcgcttaacttttttttatcaaactatatttgctgcactttaaaacctataggccataagcccaatacaaataaacatattatgaagattcaagaatgatgaatagtgaaatttaacatgtaaaatctaccattcaggtttagttttaggctgttggatatttgtgaaatcgaaaacttgtcttgggctctcttaaaattaaatccctaaatgtctgttttttatttgataaaaaagaagtccctaaaaatacatatcataaacattttatggggcccaaaaaattctgttctttttttttttgtttataattgagacttccgtcgttcatataacttttcttcgatagtacgctactgcaataacaattataaaaaagaagaagcatattactataacttatccaatgtggaagaatctatggtcatttgttattgactacaaattatatataagtcaattctcgattcttaacgtccgttgaccaaagtcattttatttgtattgtgcttatgtatagtcggtcctcttttgttgtctctgacgctgatgttttgttcttgcaatagaagcattattttccattcacacggataaatnttagcatcatagaaagtaaaactgtcgacaagaattgtgttctctacattacattagctaagctaatttgatcatttcaaaggttcttcttcccagctcattaacgtaaccctttcagctttgaaggtacaattatacaaaccaaaagtcacctttctccacaatcacatgaacgtagtacacaggtttgcgt

SEQ ID NO: 41690 - DNA, 459 bp, Arabidopsis thaliana landsberg
tctgtataatgattttaatgtgaaaccttcttatatgttcaagttttaaaagcgttttgattcgaaggttattcatttctccatcattattattgttaagcttttggagaagaaaaaatagctcagtatatcttttgttttctttatctactctttctctttttttttttctatgtttgagacagttagtgtatttatgtaagatactttgttgtttctaatgaaagtttctttgattttgacacacacatacatatatatatatatatatcacgatttgggtgaagttgagaaagacttctattgagagttacagagcaatgtgtaatacatccaatcaatgtatttcgataaaataatactaaacaaattgtattttgtgaggctgtgacattcatcattagtgtaatagttgcagatttcaaagaaacaaaatactatactattggtatttgttat

SEQ ID NO: 41691 - DNA, 509 bp, Arabidopsis thaliana landsberg
aaaagtacttgcaaaaccataagcagatgggtcaccggcttgtccggtcagatttggttcttacgatttcctctaggtatattaacaaaggcgcgtcaagttcattgcctagttccagctctctccaggattttccttttttttatgcaaaaacaacaaacacaaaataaataagaagattgtttattttaactttatattacagcttgaaatttccaggcaaatttttttccttcttcttcttcttcttgtctcattaattatcttcctcttcttctgtttcaattcagctgggtttagttttaatttctagttgtgatctctcagcttttgttctatattgatcgaagctccacttaacagttcttcgtacgttgtttccgtgttcttcgcttttttattttgtaatttaatttcggttgctttttaaatatctaactcagagaaatttaagggattgctatctattttttttttatttggggattggttaaagtttctcggttagt

SEQ ID NO: 41692 - DNA, 597 bp, Arabidopsis thaliana landsberg
catgtattggtgttggtgatctatctaaggttgtgtttcttaaaattgcttgcaggagactggaaaataataacctgactggtaatgttggttcattagccaactggctcagtctcactgtattgtaagtaggcacctttggttctgaaacattttttgtccctctttgtgcatcttttgctaagaatataaccctgcaatcttcactaactcttataggaatgtatctcataacaacctcgtaggcgatatccctaagaacaataacttctcaagattttcaccagacaggtatggtaatttagcaggttttggtattgtgcattttgttttgtttgctaatatctatgtttatgtttttggataaagcttcattggcaatcctggtctttgcggtagttggctaaactcaccgtgtcatgattctcgtcgaactgtacgaggtgattacattcttctaaaagcttccattcacaaaacctaagataattaaagctcatgtttctatccatgttttgtctgcagtgtcaatctctagagcagctattcttggaatagctattgggggacttgtgatccttctcatggtcttaatag

SEQ ID NO: 41693 - DNA, 711 bp, Arabidopsis thaliana landsberg
acaattacgtcaatcatcgaaacactaatatcttatggtaatacgaataaaacaacatgcctcttataccaaatgatacaactacaaagttgataacatactatatatgttgtttactgacctctagtactctgtagtattgagtgacagctggtacgagtccattattaaaattggttcagatttagaggatttatgagtcttggcttagaaccttctaattaacataaacaaaacagtttttaatgtacataatcgttaacgtaatactaaatcagaataggatccagtttttgaaaaatcttgttatgtagtatacaacataataatttgccaaacagtttttgatttatactctaatatatcaacttttgatgtgggacaatttatacttttatacattacccttcccccatcctaacgttgatgattgaaaatctgaaaggtgaagtttgtaggactagacatctatagatgataccaaaatcgaaatattagacatgctcgttaattcaaaagtagaaaagtgtaatatacttttatattacttggaaattttctcgacttttgatgtgagataatttctactttaatattttttcttttgttatcacatcaattgaacaaaattttttttttggaattcaatggtacaagaaattgaacttgggcttttccaaattttacttttaaaattttttaatttttttt

SEQ ID NO: 41694 - DNA, 414 bp, Arabidopsis thaliana landsberg
gatgttgctaaaagaaccgagattgtgtatgaccgtgccttgaagtgttcaaataggagtcttctagaacgtctaatgcggtacattatatccttactcatatagattaataatgtaaaccccacccccttcattttctataccgatgaatatctgatcttttgtaggttcctctcgtgtggagcttgggcagggaagctattttgtatggttatgatcctcgattacttgctttggcggttacttcagttactgcaggtgatctatcattgattcatcttctctaatccttgttttttacaaaatgtaatatctctaaatataatggaatttgcctcagcctgatgaagatatcgaggaggcacccgatatctgtctttgccatcaccgaggggttgaggtatctgagggtct

SEQ ID NO: 41695 - DNA, 413 bp, Arabidopsis thaliana landsberg
ttttaatattccagggggtgataccccgcgggtcgcggttccgcaaagggaaagcctcaaaaggcgacgcgcaagggccgaggagagaaaggaacctgaggaaggcacaccagtttcaagcaatccctaggccgtggcgacgcgctgggaaggattcaaatcaggggcgaagcctaggtgacggcgctcttagtcgcctctagtagctgcgcgacgcgggctggcttgtcccatcggtttgcctcggccatgtcgactaagaagtaatttttctctcttcggtttgaattccatcctcttcttagctgcgtgcgatttggaggccggactggatcgatgttagcgtgcggataagcccgcgttgggtcttggatggatgaatgtaatggtgagcattgtattgaggctgactg

SEQ ID NO: 41696 - DNA, 1076 bp, Arabidopsis thaliana landsberg
gaacaatgaaaaagaaataaacttattgggtaaaaatggaagacaaaaagtttctaaatgcataaaagaaaaacaaagtccccaaactatatgatatgtgaaagagacatcaaattaatgtcgtcttgttagacataaaagttggacttggacccatcatagaaacacagaaagggcggttacctttccaaaggtcagtttttttttttttttttgtctcttcagaatcccaaccttacaaactaatatcacattcaatcgaattgaagtaacatcatcacttaattatgatctacagagtaagaattcgttataccaaaaagaattagaacggcagaatcaaatctaagcttagaaacaactaaagtacaagacacttgaaacaagcagtacatttgactagaccaagattgtgtccctccacttaagttattatagacccacgactactttgactttgttttgtctgcataagatctatgtctcactattttcaagttcaaatataagctaataaacgaattcagatagtgtaacgaaaatattactttactacctgaagtacatatatatatagagagacccgagataattgatgtgtctcgaccgttacaaaactaaaagaaggtattcaaagaacgttagaactgacccgaaaaacgttggcaagagccggagctgcggcgaggaggccggcggatgtggaagcgttaacggcaacttgaacggcgagagattcaagaaaaggctccggccaaacatcgttggctccgcggcgagggcgggatggagatggggcctcgaaaacgccgccgcttccaccggctccgttgtcggaagaagaggaggaggtagacatgagacgagaggggttataagaggaacaggggaagaagaagaagcggagagaggagaaagaatggtgggggagagaggaaacaaaggacaaaaagtgtagataaagacatacttctccgaggtgggggacccatgaaggtatgtttttttcctatttttattttcttttgtcaagatttgttattatttgtttttgtttattcttaatagatgcagat

SEQ ID NO: 41697 - DNA, 477 bp, Arabidopsis thaliana landsberg
  unsure (1)..(477): unsure at all n locations
gatacatgggggttttctaaaatggttataaaacaaaggggtgtatgtatagaaacaactaaaatttggggggcatcacaaaaaagttatggctagagaattttaatcagcccacaggaatcgagacggaaagccgttagattcctcaacagatttgtacttgcgtcttttgtacttgaactgcctgtgtgtatacgtatatctcaacttttcaatactcgctttttttttgtcttctcttttgcgactaaaaaacacttatctgctctgttggtttatgttccttttttttttctttttgtaaactttgtttgtttgtgttcttaaaccaaaactttcacatgctgcttctagtctcttcatgtatttttcataatatatcattgatttacagnaggtcgctctttctatcattttcatatctttactttttttgggaggtatactaaactaaatttctccatggaattcgttttt

SEQ ID NO: 41698 - DNA, 1284 bp, Arabidopsis thaliana landsberg
tgaaatatcatattatatttatggagtggaggtaagaagacaacatttttcttagtattctagtttgtttgttttatttattgaagcagtaagtgcttaacctgcactatgcatgagcaaaagtctaaaaatgatataaaaatattttgtaatagatttgagatgttttgtttctcactttgaatgaaaaaaaacaaacttttactaaaaaaattgttgtcggtttatgtataagaaattaaagttgaaaattgaaccaagataaacctacgttatggattataggaaccaaccattgtcttcacttcatctttctcaacatactgtatgtttttgatttgagtccgacccgaattagtcaagtttcagttttaatgggcttcatcaacaagtttacatatggacttaggcccattttcaaaccaaaaagtacaatacaacaaaagcttctccttgttaactgaaacaaaaacaatgaatccttttttatttggtcaaacactggatgcaacaagtgaaaacaaacaaaaaaggagggaaaaaaaatcaggaccttttttgtgtggctgccttaagaattaccaaacaaatggggaagccaataaaattgcttaagacactccatgagaacatcagtatgttcaagctttccagcagaaactcgaacataacctttaagcttttgtttgttgtaatgacgaaccatcacacccgggtgggccaaatcctctttcagcttctttgcatccattccagatgtaacctcacagagaatgaaattcgaatagctcggatatggattcaagaaaggaacttcttttaatagcccgaacagtctctctctttcccgtaccaaggcgtctctcacatcttccaagtatttcccgtttgagagtgctgctaaagcagctacttcccctgcaacagagacattgtatggttactttgctctccacaggtattcgattatactcaacggaaacgctccatatccaactcgaagcccggctaaatctgaaatatcatcagaattcttagatgcagactttatatctgtaatgtttagattatatagagtgataaaccaaaatttaccagctcgtttgctaaatgtgcggagaacgataaggttttcatacttcttcacccatttcatgcgtgattcaactcctgagaattcgatgtaagcttcatctagaacaacaagtattggcatttctagaatctttaacagatcggtcttgctgatgatactgtatcaaagagaaattccgattaataatc

SEQ ID NO: 41699 - DNA, 761 bp, Arabidopsis thaliana landsberg
tttgatcttaacgagacgacgctcatactctctgagatcgatcgagtcaccacgcttgaagtaaaccttaacaacaaccaatccttcatcgtgcttacattgaatcgactttaggaatcttcctcgacctaaaacctcttttaagaccagattgtatgaagacggcaagtcgtggagatagtactccgtcgccgagacttgtgtcgtacgagcgattttgtttcccatcgaagaatttttaaaaattaaaattctttgtccttcgattggggttataacttataatactcagctgaattcgaacatggaatctgattattccggtgataaagagaatcgtctccggcgacggaggaaaaagatacgtgttttggacttcctcggaattgttttatagtttggatgagtttaaccccaattcgacacgtttctaaacaaatttcttaattagtttagtttaacattacattacaaaaattattattcctaacatgtataaaaatattaatttgttagatttacgacttttgtaattatttcaaaaaaaatctgaactttttttccacaaacaaagaaaatcttctttttcactatttctatttatttttttttaaattggaaacttttctagaaaattgaagttatttccaaatgaaatcttatttagtgatttagaactatataataaaaccaagttaagtaaagtttataaaggatgtgcatcgtttaaggttattattgtaattatacacattctttac

SEQ ID NO: 41700 - DNA, 554 bp, Arabidopsis thaliana landsberg
ctcgaatgtttaaacttaaaacacgttccaccttccatctacacgcatctgcttagtctcaaccatttgtttttcgaaatcattttttgatttctttttgttattgtcaactttcctactccttcattgtttccattttttcatatcattcgaatccatcgagatttatttccaaaaccctatctgaatttgactctatttatttggtccaaagtccaaaacagagtgcaacattcgccaaactgctagagaacataaactgaggatttgttttgttggtttgtaatttctgggaaattgtttcgtaaaagttttgcttggaaactgtttcgtgaaaatagaaaaaagtaaagagacattgttgacctctcttcttggttcagaaaaaaaggtgggttcttcttttacgttacattcttttgctatcttcgttcttaatcactttttcaaattctacacattttggaataaagtaaaattcctttttttgtttgcttttttcataaaggtttcgtcaaattgttgggtagctatctctcattaattaaaatcaa

SEQ ID NO: 41701 - DNA, 649 bp, Arabidopsis thaliana landsberg
tgatgagttcaccacattttaggactaaggctatttgggtgcctaagtctttattgcctaaccttgatggacccatcatgagatgggtaccaaaatgtgtttgaaactatttgcaggtacccaaagatgatatgaagctttggggtgcttgagcggtttaactcaattcttatctcaagctatcaatcttacattgtctatcctttaagattgacccaaagatgaattgagttgttatatcactaacttcatattcatctctagcaagaacttgtgttgtagggaataaggattaatctttgtgggaatcaagcaaaaggcctacaaccaagtgatatccaaaggatggtaacaattaaaatcttaagtgcacattgtttttaattagtatattcctttgtgtcttttgtagccacataagaaaaatgaagcacttgagaatgaacttaaaatattttaccttgttttgaaaaaattctaattatatggtagattgcacattcatcatttttatattgtgacaatctacatgctttaaattgattgtatgtatcttgtggcatatttcaagttaattatcatattattgccatgatctagacataaagagtattatccatgttcttaaatgaatagagtgctaagtaag

SEQ ID NO: 41702 - DNA, 1022 bp, Arabidopsis thaliana landsberg
aacattagtatatagtttgtgacacagattaaattttgtcatctctacgacacaattaaaaaaaaaaacaaattttattagtaattaagaaagcgattcaaccatggaaggcctcctccaacacctcaaaaaaaaaaatacaccacaatgtgttactaattaaagttgcgatcttattttgacaagggttttcagtggttccatcaacttttttgaaaccatgactaaaatttataatttttaaagtataaacatttccggatttggcaaaaagtttccattatctttatggaattgataactgttacttgcatatatgtgtgtgttgtgactgttttccattatacaacttaatggaacgaaaatactaaattattcaataaccaatcacagtttgggggacaagaaatcaagaataggtttaagcagtgtttgtttgcaaacttgataatcatcaatttgactataatagtgtgaagtcactcacagtggagaactgatgaagcatcatgagtcgtgtcatggctcgtgaacacaatccatcatatcatcgtgaccgtccgtgagatcagaatctaatctctctgttgctgtcagagaaggtcccgcaatataaccctctgagttactaagagttggctccacgtgtagtaagtagggaccatataagctcacatcagcattcactgcttcctgtcgcatcatctatcttttacacagaaagtaaaaagataataagtgaattaaaacaaaataagagaggtaataatggttatggaagaggcgtgaccacacgatgaatacaatttgcaatctaggttttggaattactcgttgattaagaggtggttatgttgtgttgcttggttaactataatttattgaaattgttggaattaaagaaaaaacaagtgccgttgttacaaatatatgtgtttcgatatcttacttataaactgactaataatcttaagagaaaaaaaactaagtatttagcaccaatctatacgactatgcaaact

SEQ ID NO: 41703 - DNA, 564 bp, Arabidopsis thaliana landsberg
  unsure (1)..(564): unsure at all n locations
tattaattgtaggaattgaaacaaccaaatttcataggaaattcactagatatgtttgtctaagtcatatgaataccctcaagcacaaccaaacttgtttgaagaagatatgctcaaaagtgcaaaatctgctctctgctctagcgcaccagactggtctggtggtgcatcggaaagagtgcacagatagggctacaacccgttttcaacagacgaaggcgtcagacaggtgtggtgtacaaggactaagtctggtgcggcatcggaccgaagttccagagaggttgtttattgggcaatttggagtcggggcatcggaccggtccggtggcacaccggatcatttgacaatgcccaacggtcgtttaacttcttcaacggctccctactctaataggatcaaatggttcggtggtgcaccagaccggcaccgtaggcggtccgatgcactcacagaatgtgcatttcagccctacttcttccaacaactatntgggtgattgggagctatanatgccccccactagcacnataaaaacacaagatctactcccaacaaccata

SEQ ID NO: 41704 - DNA, 347 bp, Arabidopsis thaliana landsberg
acaccaaccccgacagaggtggttctgactggtgccaacaagcaggttattggcctggttgctgcgcagattcgtgcttaccgtgcacctgagccatataaaggcacgggcgtgcgttatgcagacgaagtggtggtcattaaagagaccaagaaaaaataagtaagacacttgtaggcattgtctgaacagtgaatcaacattaaaggtaaattcaatgaaaaacgtaaataaccgcttgcgcagagcacgtaaaactcgtgccaaaatagccgagttaaaagttacacgtttgagtgtacatcggaccaataccaatatctacgcgcagatcattgctgaaactg

SEQ ID NO: 41705 - DNA, 544 bp, Arabidopsis thaliana landsberg
taatagaaatatcatcgcccttgccacatcatcaatatgcaccatattgtaagtatcaaacaaatacttctccttgtaatttccttcataaaaaaacgtaatattactatagtgaatagtgattattactcaaaacactatttgtgaatattattagcacatgtttacacgagtttaacacacacaaaattcgttctaaataactcaaaaattccacgcacgtaggttataagcaaaagaaaagagttttattagttacgtatagtaattaggattttagttctgttttttcgtataaaatatacatattttggttcgaattctaacattttcaatagccactatgtccaaacataaatctaataagcctgagcagaatatttttttcatttaaaacaaaagtataaatgagaaaattcgagcatttgttcaaaaaaattttttttgagaaaattcgagctatgatctcccaagatacttggtgaaccataaaccatttaactactactagagtacaagctagctagtaggctagtactatgaa

SEQ ID NO: 41706 - DNA, 121 bp, Arabidopsis thaliana landsberg
tctttatttcggggttggagttattgcagaagttttgtttacatgcatagacgctgatggccttgtgctactcaagactatagttggttgggtaggcacgcacctatttacattgaagaaa

SEQ ID NO: 41707 - DNA, 502 bp, Arabidopsis thaliana landsberg
ggattcttccgaagatactcctaaaaaatcggcatcttcagggaatcaaccattagacgactcttccgataaacttcctcaaaaatcgacttctagcgagaatcgaccgttggatcctcttcgcaaattgaatccccttaataaattggattctttgaaggatcgacacttatcggaggaaggagagttcccgccatgggtaacaccgcattcgcggaggcttcttgcacgtagacctaaaaataatggaatcaaagcgaatgttgtggttgcaaaggacgggagtggtaagtgcaagactatcgcacaagcattggcaatggtaccaatgaagaacacaaagaagtttgtgattcacataaaggaaggtgtttacaaggagaaagtagaggtaaccaaaaaaatgctacacgtcatgttcgttggagacggaccaacaaagacggttatcactggagacattgccttcttaccagaccaagtcggcacctaccgcaccgcc

SEQ ID NO: 41708 - DNA, 441 bp, Arabidopsis thaliana landsberg
tatgttctgcgcggtagcaaacttccacttgggatgggagaaacacaactccaaatcattccctttgtaaacaaaatccccttcatagtcagacattgaaacaacattgtgcacttgtctagatcttgatcttgaacttgatcttctcatgtatctatcgtccttctctacaatctttgttcttctgtcatcgcacgttgcttcatcaaacttatcctacaaacagagaacacacttttagtcttgtttttggcttaaagaaaaaaagagagccaatgcaaaataagaatagttctttacaaaggattgtcgaggttgaaacatgttgttgtactctttgttgaggctgcgattgatgcgttttgatcgcatagcggtttggactctgatcaaagtttgtatgctctgcaacatcgcggccgcgcgtttccttactaagta

SEQ ID NO: 41709 - DNA, 584 bp, Arabidopsis thaliana landsberg
ccagtaaaatatttattgagtacggacaaaacatcaaaaatcagaacaagaccgttgagatggataatacttgtctagagatacgaaccacacccacatgttcctacacacaatccccaaaccatctctctaaccaataacactttttctctcttctcagtccttcaatggcggactacgacgacgaaattgaccagaataaccaacctttcatccccaaagaaactgctctacaagcactaaactcaataatccagctccacttcgagaaaaccttagagaagaaacgagccattgaccaccagaagaagaagctccacaagctatttcagctcttcttcatcttcctcgccgtaatcttcttctccctctctcaaccctcaggtcgtcttcactgccgccattgctgggcacccatctgcctcctatccttctctcacctcttcttctacgtctccgtcgctcaaactctccgttgcatcaacggcttcaagtaccagcgtcgctgccataagctcactctcggtctcgccactcacaagctccgtttcatcaagtcaagaatcgctgccggagatttcctc

SEQ ID NO: 41710 - DNA, 518 bp, Arabidopsis thaliana landsberg
tgatgccaagcgttgcgcaccctgtgaaatgctggacaggttcttcacttccaggaaaacagtcacgccatcgaacaggtctttgttgatttttatgaacctgtggtttataacgaataaaaaatatagcctttatcttcataattacacaagctacactgcgaagttactaaaacgaatcctgaccaagggggtgaaatggttgattttgtgctgaatggcaaaccagtgagtgcacaggtggacggcgacacgccactgctgtgggtgttgcgcgatgaacttgaaatgactggcaccaagtacggctgcggcatgggcctttgcggcgcctgtacagaccatgtggaaggacaagccattcgatcgtgccaaacccccatttcaacggtggcaggcaaacacgtgaccaccattgaacaaatgcacgacgacaaggtgggtgctgccgtgcaggccgcctggcaaaagcttgatgttgtgcagtgtggatactgtcagtctggccagatcatgca

SEQ ID NO: 41711 - DNA, 608 bp, Arabidopsis thaliana landsberg
  unsure (1)..(608): unsure at all n locations
taattaaatatacatatctcgttaacagacaagtctatatataccaccattgtagtcattcttcatcatcactttgcacctcatgagtgacgacgaagatctcgatttgtctttaaggttatatacacaacaaaaaaaacccgttaatgagaaaaacgggttggttcctcaaagacaagaggaacaaggcgaggtcatgcaactcttgacatcagatcctccacaaaatacccaaccctctcctcctcaaccaaatgacatgacttcttttgccaacggaacaaaccatgtgattgttcccacgcaggctcttgagcaagctgtaccgcccccaaacgtctcagtgaggaccccattgcctgatcaaccttcagaagaagtccttccccctcctcaactgaaccaggttgccaccgtggccttggcaactcccggcagaggtcgtccaccagggaggacaagcacgtcgtaactcaaaaagaccggtggctgggggttggaaagaaacgttaggtgacaggggnaagaattcgtacccaccccgtatccatggggggccacccaaaaaagccaggggcaaaaatccaattctttttcaggagaacttt

SEQ ID NO: 41712 - DNA, 579 bp, Arabidopsis thaliana landsberg
ggtgtttaatttaggtttaagcactaacttggaagcactgaaagaagaggtaatggaaacaggaagctggttttggaactaccaactcaatggatcccatattcatcttcaacaagtagaggtttcacaaagctaacccaacccgaataatttggagctaagcctcccaaagtagaaaaaagtttattacctctccttgtccatgaaaataaaaatagaaagtgtaatttgctgtaaatgtttgctcctctgtaaattaaacaaaacagttcaccatctatctgatgtgttctctttcatgaaaaaagctcgacaattgtacaattcataaattcatacttgcacagcaatacttgaacttgaagccacaagtcaaaacattcttaatggaaacaaaaaaactctgcatgtgaaaaaaaaaacgcagagaagctaactgtttacacttacctccttcaaagttcatttttatctctgtaacaatggtgatctcattcttagaatcaaaatcatgattgtaacacatttttctcatgagattcacgcaaagcatcacccattctcaatcctctacactca

SEQ ID NO: 41713 - DNA, 858 bp, Arabidopsis thaliana landsberg
gcgttactgcgttatttgggaccatatattcctaaaataaaggtatttttggtcatttgcattgtacttttttcgttagctacacaatctctaatataagaatatatgttggcaactattggtagataaaactcgtatatcaaagctttgatattatgcgatttttgtttttgtctttctcgaacatttttttttattattttcgttacaaggaaaactttttaagccttttacattattcatggcattacatgtttaaacgaatttctatattttaaatcattttgattaagcatatatcgagtttcacatatatatttagctaaaatgttaatgtgtcaatctgaaggcagtagttgactaaacaaatatctttaatctttcatgtcattttcaacatgagtgagttctcgaattcacataaagctgagtttaaagtgacatatatataccactaggctaaaaaggacaaacatatcagtaaaattttggactaatttgcaaaatgacctacgtagataaaatcactaacaaatctgtaaaagagtataactcatttttggagtgatttgacaaacgtatcattataatttgtatatacttttgtaaaatattattatttaaaatccatttaattaaaagcatgagcttttcagtttgtttttttattatagataattaatttgatttgagaaaatgaagaagcacttggtttttaaaactgggaggtctacgggttagttgcaaatttcttttaccataggttatttaattttattaagttgaagaggcctcttatcttataaaatcttgtccaatataaatactatatatgacgggatacaaaattggggtatc

SEQ ID NO: 41714 - DNA, 516 bp, Arabidopsis thaliana landsberg
gggagtataaaaaatggaaaagggaagaatgaaaacaaaaaagtctctttattttttgttaaaaatatgcgtccaatcacaagacgacaagtgtcagactctatcaaattctcaaaactctctagagagagtcaatgctctcaattataatgagtttagaaatatttttttgaaataagtgagagagaatccatcaaaaaaataaaaattgaagagactccccattgttgatattatggttctcttcttgttgttgttgatttagactataatttgtaacgctatacctaatatttgtgttgctccccattgttgtccttaaggagatgctatatacatatagatactagccatgcaaggatcattagaaaatgaatgtgattaaattacaaataaacccttcgaacaatgagaatctcatggttatttttataatgactaaagattacataaacataaataacacaaactaaacatttgtaacaacatcaaatatccctaacctcgtactatgca

SEQ ID NO: 41715 - DNA, 527 bp, Arabidopsis thaliana landsberg
tttttcttataaagttttgttaatcagtagtatgggagggataaaagatgtgttattaaattattttattttgtacaaataacacactcaatgtttattcaaataggtatgtttttattacaaaaaaaaaaagaactctttataaactaaataactcaaataagctgctggcaaagataaacggacttaattaaactcacagagtcacatgtaaaagtaacactttttggtatgattataaaaataatatgcaaatccataggtaaaaagcctattacaacatgtataattttcgtcgtacgtgcttgtacaaattcataggagaaccgaaccaaagtgtatatataaaagattaggcctttgatagaagaaaaaagatcatgagctagcttttgttttaatcttaaatagaaggagtgtactatgctcgagaagcaggcgtccgtgtgcatggattctgaatgagctatggattctgaacgacctcaatactttgcttagaataggaaattggttggagaggagct

SEQ ID NO: 41716 - DNA, 778 bp, Arabidopsis thaliana landsberg
gggtagggacatgtgtccttgcaaagtcaagtaatgtgtatcttcaattggattttcttcttggttacgaatcaaaaaacgtggatacagaaagagaagcacaccaactatggaagaatgcagagtttgaattgtctcttaagccagagagggttattcgagaaagctgcagctttctttttatttttgatattgacaaatcaagtgacagcgagccatttgatcttggccttacttggaagcgtccctcaaagtggtcatgtcaacaagctccattacactcgagtcggtttttgatgggaagcgggaacgaaagaggtgcaatagccatcttgttaaaagcgacagaatctcaggagaagttatcaggcagagatctcactaatggccaatgtacaataaaagcaaatatcttccagattttcccatggtatattaaggtttattatcatactctacaaatctttgtggatcaacaacagaagacagacagtgaggtcttaaagaagatcaatgtctcaccatctacggataaggtgtcatctggcatgatggagatgatgttggaactaccatgtgaagtgaaatctgtagccatatcaattgaatatgataaggtgatctttcgttctccatagtttccaattcacctagcataatctgattgtcatgagtatatgaatactgtttgtggtactaattctgtgtctgaaattttctcacagggttttctgcatatagatgaatatccttctgatgctaatcaaggatttcacat

SEQ ID NO: 41717 - DNA, 519 bp, Arabidopsis thaliana landsberg
tatactaaacataaatattgattccattttttttttaccattttttgaacagataagtctactgtctacataggaattattcgtagataagtgagttgcttagtccaaaagtaaactacactacacccactccggttttgatgccattactttcgatccatccaccgtgaccctctttttggaatcttgttcaacttatattagttttgttgttcaacaatcataataataaacttgtggtttcacatcctttgaccgcatattccattaaataactccagccctctgccctcgaccgctttcagtggaaaaggtagcattatactatgatgtaatagaacaaaatgataataaggaaacaaagactaccgattatttaacacgtgatacaacgaattccatgacgcgacctggagaccaaatacgtgctttaaaagctggcatatattttacatttcaaactgtttttttcttctttttcttattttggtgatacgtttaaagtgctaattttttttc

SEQ ID NO: 41718 - DNA, 345 bp, Arabidopsis thaliana landsberg
ttgacttattaaaaatagttaggttaatctataactagattgggtttatgaagttttaatgaattatttttatttatttacataaaccaagatttgtcctaaacatttcactttgatgtgtcatgtccacgtatagtataaatcgaacgtacttattgattaggaaaaaaaatttgtgttagaagtttcaacatttgatcattgcataaaagtattttcacatattatttagtccagcccatcataatcttggtaaattaataggaaaaaaatacactaatattttagatgctctagtccgatcaaaatatcttgcagaaaaaaaaaagagaaagaaaaaaaaaa

SEQ ID NO: 41719 - DNA, 792 bp, Arabidopsis thaliana landsberg
  unsure (1)..(792): unsure at all n locations
caagtgcatacacgcaacatgacactaggagacgacgttgatctcagaaaaatcgctgaagaaaccgatctcttcacaggtgccgagctcgagggtctatgcagagaaagcggaactgtctcacttagagaaaacatcgcagcaaccgctgtcttcaatcgccatttccaaaccgcaaaaagctcgcttaaaccagcgttaacaatcgaagaagtcgaaacttattcatcattcaggaaggcggcgaaaagatctgattcgaaaccgattccgattaacaaaaagaaggcgacttccaccgtcttcggattctcatggcaattaggtgttttgagcttattgttgcttgctactggaaactattacttcaaccacactaaacatgaattactagtagcttctgctacatgagacttgaaacagctcaaagttaaaaaaagttgctaattttgttttattcataaataccaaaatatcttttgtttcaaagttcaaatttttaaataataaaacggctaatgattattagattcgaacaatgacaaagattggccattacacatgaatggcccacgaacctcaccaccgtcgtgaaatttctttaagcaccaataatttcactggttatctcttactaattaattactttntacgtgttctaatccaaatcaacaataattatctgatatttcttcataaaccggntttggaatttagctgaaagatgtgaattttattctgtcttattaatcaaaaacattgaaatcgttttgatttcaattaaacccgaac

SEQ ID NO: 41720 - DNA, 563 bp, Arabidopsis thaliana landsberg
gaccgttacttggacatatccaacgaataccagaaaaccaaggcggaagaaatggaagaaggcgttataatgtttcgacaacgaaagattgtacaagcaataagaaagggaaacagagtaatgcaaccaaagaacgccggggacgggtagacgaggtgaccagagaattcaatccgtcgcgggcgacgaaggagcccacgacggccaggggcgacgaatgagccccgaaaaacctaacccacggcggaacatcaactagcgatgcgagacccgccgactcgcggtgcgaggaacgccaactcgctgtgcgagaacccgcaactcggtgtgcggagggtcccgactctgtgtgccgagagctccgactcgggtcaccttcccaggagcggcgactcatggtgccggagccgtcgactcggtgtgctggagccgtcgactcgctgtgcctcaaacgccgactcgctgtgcctcaaacgccgactcgccggcgaagcctcccggaacacccggaacacccgttacggctgcggctgctagaccgtgacgtcgagctggaattcggc

SEQ ID NO: 41721 - DNA, 466 bp, Arabidopsis thaliana landsberg
atgatattccaggagttcttaatattgtgactggtgttttcgctcgaaggggatacaatatccaggcatagtccttatctctctcatacacgcacacacagtgtgcttaggtttactgacacactgaaagatctccttttttttagagcttggccgtaggacatgctgaaaccaagggcatttcacgcattacaacagttatacctgcaacagatgaatcggtcagcaaattggtgcagcaactttacaaactcgtagatgtgcatgaggtgggattaccaaaagctactgtctttcttatatatttaacagtttgaatgtcttgatggccctatcattcctttgctgtcttagaccttttggctttttttaaaacgtagattagaggaagagtttctgctaaatctttctggactttcctatatcatttcctggtcttgtctgtttactcgaatgagacctcttg

SEQ ID NO: 41722 - DNA, 501 bp, Arabidopsis thaliana landsberg
tgagtcgtcatttcagctcgtgacttatcatttgtccggatcatcggtttatttgggttatggttgtgaccctgaaagataaccggtaagcccgttttgattggactctaaaccgaccgacccaaaaatagaattgatcatccaaagccgaatcaaatttcaaaccaatctgaaaatttgaccgagtgtattttccaaaaatccaaaaatttgaaccaagttaaactgaaatacattatactatgggccaccatatttaaattatgggcctcgatgggccgaagctggacgcagtcctaaccagcctcgacaagtctttttctgccatattctttctgagagaactatttttggtacctcaaaagtagaattgatgataaacttggaaaatgacaaaatatctgatacggacagtacggttgaagcaaattaaaactaaataagtaagccactcaacgtacgacaagtaatcaaacactaacaattaaataaggaaaacca

SEQ ID NO: 41723 - DNA, 582 bp, Arabidopsis thaliana landsberg
ttgagagattgtttcgacctactcttagaaaggtttgatttttatgatgatttgaggattgtttttgggttttgtctcttggtttggttgattttgatgggattaggttttggtttttgtgtaggatgattttgttgttgggaagaaattaggggaaggttcttttggtgttgtttataaagtctcattatctaagaaacgttctaatgaggtaaaaataaaagctttgatcaaattgtttatagagtttcactatcctatattgaaccttatcatggtctttgttgataggagggtgagtatgtattgaagaaggcgactgagtatggtgcggtggagatttggatgaacgagagggttcgaagagcttgtgggaatagctgtgctgattttgtttatggatttctcgatgtaatttctcttcctctgaaatgatgttttccttcgacttccttgatttatgattttggtgtttgttgagattggtatagaagtcttcaaagaagggacctgagtattggctgttatggaaatatgaaggagaatcaacacttgctggtttgatgcagagtgaagaatttc

SEQ ID NO: 41724 - DNA, 822 bp, Arabidopsis thaliana landsberg
tatttaatagcagaataccatgcgaatgacgacgtcaatataaaattttttatcgatactttctccttacttgcctaaataaattgtttgtgagatcccggttcttacagttagctgctaattattgtgagtttaaagcctattttatttgtaaattagaaatatggaaataaattagggtgattgcaatgcctaatttattgttttcacttttcacattcatcttttcacctctttttaactgggataactaaatgtaagtttattttatcttttcttctatttattttattttaaaccaaaacagaattaattggtaagtatcttttccattataactagttaaaattctatgtcatgcacggataaaccttattctatttaatattatgaatagttttattataatataatatagggataatatatacttctataaatttatgatgaattattattgcctgaagaaactacatagtacttatgtttggctttataataggttttaaacacaactcgaaaatcaaatgggactatcttcgaggtctgtggatcaaactagtctaattattggtcaaagacttattagtttttttattacaacttatataaatatatttacatatatataatacatctaattctttataaataagttatatatatatataattctacgtaaaatgtaaatatatcgtatattaaaaagcattccaaaagtaatttatttttgttgccaaatccaagaaataaagttagtgttaaaataagaaattagaaacgatgatttgttctaaacagaacgggttttaaaacaataaa

SEQ ID NO: 41725 - DNA, 546 bp, Arabidopsis thaliana landsberg
tttgtttcgttttgaaaaactataaaaccagaaaaatcggattgaaatcaaacaaaaaaatctcatgtccacccttacttttatgtaaagctgtcaacttctttttagtttgttagccattaaattcagaaattctaggtttaataaataaattaaatgatgcatctgaacggacttctacaagattgttgtccttttatggctgtcaacaaattataggttgcaatctacaatataatatcaacggtggagatgctacgatacatgcgaaattatagacattaaatttgcaagttaccactaatcaatgtgagcaagatatttggggaaaaagtaaaagcaaaacttgtggctgagatgaatcattgcaggatttgatcattttaaggaccacctttacaaaatattttagaattattcttattatgtttttaattggagaattttgtgtttgggtaaaccagaatattgtaaaaatatttatggtcaatctataactcaatatcgacgaaccgaccaaactaaacatagaatctaattgatgac

SEQ ID NO: 41726 - DNA, 545 bp, Arabidopsis thaliana landsberg
cggttcttgtagattagggttaggttttgtttttttgtgctgttttctattttcttttataatttcgaaatacatatttaaataaccctaaaattcataatgtttaaaccaaaactatttataaaaatatttatttttgggactaataattatattattaatttactaggattttcatttaacaagaaatgttattcaatgactaaaatcaatcataagcatccaaaaattattacaaatgaaataaataacaaacacttaaaagaaaattaattaccataaatatcattaataactaaatgtattatttttatttgatgacttttatagtgttacagtagggttgaactattgcaggcagaagaggaacggaacgagaaggggcacaggagagacgaggggacaactcggtattttggctttgggggcaagcgaaggaaaaaattgaaagggtgagaaaggttcgttttcttgactgcccccgatgcctgcagtattttctgaatacttcgattaccggtgttgttactgaatagcctcacata

SEQ ID NO: 41727 - DNA, 314 bp, Arabidopsis thaliana landsberg
  unsure (1)..(314): unsure at all n locations
ctgcggcgcgaggccatgnnnnnnnnnnnnnnnnnnnnnnnnnnnnnnnnnnnnnnnnnnnnnnnnnnnnnnnnnnnnnnnnnnnnnnnnnnnnnnggcaatggcgcggtcgccgagatgatgagctgcaacggtggcagggcaatgcccgacgccagcagcgcccgcagatgtaccggcgtggtgatcagcaggcgcggctccggcacccgtgccagcgactcgcggacatccggcgggaagaagggcttgccgtgatgacaggcgcagtttgcggagaggccgannnnnnnnnnnnnnnnnnnnncggacat

SEQ ID NO: 41728 - DNA, 561 bp, Arabidopsis thaliana landsberg
ctattatcgttgtttttattagctttgaatgataaactactatcaaaaagatatattttttttgtatatttgggatatttatcattcacaaatttttttatcaaaatcattataattttttttatttttagttttattgtacaactttttcgtataactattttttacagttttacattgtttcaaaataacttacagtttcaactaatttatgttatcaatcagatctattattattatattctattatatatcaatttaacacatgggttttggcaaacataaccaccggaggatcggaaaggaacttgtgattgaatagtgttttcttattaaaggttacacacatacaagtgtgtaagtcagatttttctaaaagattcataaatttagcattctttgagaaaaaacttaaacgtgaaacttccaagtaaattattcttcagaaaatctatataactttgtgtcagtaaagtgaagtttattccttgaaattctcccaaatccatactagtctcgttcatctggtattaattactatgacgtcggttgaaaagaaaa

SEQ ID NO: 41729 - DNA, 169 bp, Arabidopsis thaliana landsberg
catcgcgaagggtgtcacgttagacgcgtccctctttccctatgaatctagtttactagctaggcagtgcttatcactaacatgagacgaaacctcctctgggtcacctgcagcgtacgcctagctgccgcataacgctgatgactttgcatgtgcgagcatcaacagt

SEQ ID NO: 41730 - DNA, 768 bp, Arabidopsis thaliana landsberg
  unsure (1)..(768): unsure at all n locations
tggatccattgcctccaaacttatgaaatgagaaagaatcgaggatatccattagtcaaaattgtgtacagtcagaaattgtaagtttgtgccctacaagatcaaaagaagcaaagacaaaaataaggatctggtgagagtactccgacagaaacaaagttcacttgaatcgtactagaacgaacgtgtaggaatatattacattttgcagattgtagcaatgaagtccaactctaccgaagaggattatatgtggatgaggtcctccatattttgcaatgtcagccctttgtttaatgtagtatttgttataatcaaacttttcttctctctaaacaaaacacagaatctataagctttaaaatgcaaatatctctatgagtgatgagacctaaagttcatacattcacaatcaaatccaattacccgattagcccaaacatgtcgtgggatggaggatgaagattcttgtggtctctgatcttccagcttctcattactctgcgatggttcctcgaccaagtctctggcttcttgcttccacattccgttacccatttcttggcaaatatataaaccctatattaataaactcttaagagacttggaacttaagattcaaaccctaatttggaatacaaaatctatgcgcgttaagccaaaccacatcattaattaagaacactgtcaatacacaacatgtgagcagcgaagaccacaacaangggaagtgattgagacagcagatctaagctcatattcaacatg

SEQ ID NO: 41731 - DNA, 708 bp, Arabidopsis thaliana landsberg
  unsure (1)..(708): unsure at all n locations
tttttatttaacgtttttatttaagttttatgtgagttggtcattatattaattgattattaaattttatattaaatatttaggttagatgatcattctttttccagataacgactggatcttctagaggtcaagtatttccaatttggtttcatgattcggtgaaagggccaatttattttacaaagtcatatctgatgtattgcaatcggagatatgtgttttaggttttatttaccaagaaagaaatagtgatcttttgtactatggattcaataatgcgtatccgtcaaaaatccgtcagcttaatcattaccgataaaatataccaacgtggcatattatttcctaattttttatgatattcgtcagtttaattgttatcttcggaaagaggtcggaaatttctgacggtcttccgaccagtcagggtttagggtaatgataatgtttaatttctttgcaaatttgtggcacaatagtaataaattcaagaaaacttcgatttttcatcaatttctatctttacaatagaagcacataagtcttttaaaacttcaagtgttaagtatagtgtattctattgatcactagtatattagtgatgtgttaaatatattttaacatttgaagtactgaaatatgtactanactacatctaattgacttgttaagcttgtttatgtgcaatgaataaaagtattttaa

SEQ ID NO: 41732 - DNA, 610 bp, Arabidopsis thaliana landsberg
aacggtaagctttcatgagtgttcaaaaaaaaaaaaaaaaatagtaagttttcatgaaaataaaatttcaattcactgttcttgaaaaatattcatatgtttacttgaattttaattcgctttttctataaatttggcgttcttttattcacatatttagcaacacgcatcgagtatttccacacgtgagagatcttttgacaattgatggaaggctttgtcacgacaggatcgaagatctatggactaaactcgaccaatatatttcaagaatggtaatgactaaatcatcattgaaagctgaaaatatgactatgatcgatgtatctctagaggagatatcaaatgaatgtgaggtactaggtgtatagagcacatgaccttactatatatgtcaaatttggtttggcttgcagagaaacggctcggatttctccatgatggttgtttatcagtatgtatatgcgtgtcccttcagagtaagtctacacgttttctctacttgtatatttggaaacaacatgagtttaccgatgaaattattgttttaatatatatgagtgttttggctatgtacatgagtccgagcttagtgtctatcatagtcaaa

SEQ ID NO: 41733 - DNA, 731 bp, Arabidopsis thaliana landsberg
atttgtgatcttgaaagtgagatttctcgttttttatttacttttaattaaattcaacacgagtatggttttcttttgataaatttttaacattcacatatttttacagatttaattgaattttggatgccaatttttggtttaagcaccggttttgcccttctttacagcaatctccaagtttcttcttgtgatttgaagctctcttgtgtagtaatgcattctatctataaccatggccaagaacaagacagtcccttttcacacacataaaaataaaaataaattaagaattagatccaaaaaacacacataaaaatggtgtgtgaaataaaatggtgttttaatgtcactatttacccatgaggaaagcttcgaggaggcgattggcaaacatgacttgatcggtcgagttagctacaccaccagattcagagacccttgtgtggatttgaatagtgctgaacataaccgagccaaacaacacaagcatagtggctgcgaccgttttcgcaaccagtggtgctcgaccttgctttgataggtctagcagtttcaccacactcttctcgctggagtcctgacccgagtgtaatatcaggacggttcgattgcacgattgtgaatagagtgaacatactacgacgatttttattagtcatggagaagttagagtggataatcaaaaatggttcaaagtgtataaaagtgtgatgagtgaagattagaag

SEQ ID NO: 41734 - DNA, 929 bp, Arabidopsis thaliana landsberg
acgattatgcaaaacggacatactattattgctccaacctcaaagacacagttatcatcagagtaaaagtaatcttccgtacgagtaagttttattttctagttttgattgtgtatttgtgttgtgttcaaagagattagcatgaattgaatattctaactctgcttttacaaacaaaaaaaaaactctgtttttgcagctttggttccttttttggtccttctcagactgttattgcttcaagagtcttacaagaaagcaagcctcttttagaaaacgagacatcagcagctaaaatgttaaactctattcaaaacgtatgtctcatcagatccttctttttcacatttttgacgttgcaagtgtttttttttcttactcttttaaaactgttttgtgtcttgtgtacagagaaaagttctgttctaatgaatgatgcttcagggactaagaatgcgaatgaggtcaaacgaaaagctgagaaacttaaggatggaagagactactcattccttttctctgatgatgctcagcttcctgtttccatcaaggaaccacctacttctagaccaagttccacagagagccaaatgcagccaagaccaggttcatcaaataatgtacaagctcacacgagggaggattcggcaattaactctcaaaagcggaaatcaatgaacaagaagggccaaccaagttccaaattaggccatcagagaccactgtcctcaacaaagccattgagacatgattctaaacaacaaagggtagaacagagaaatgtttccttggaactcacaaggtcgtaactgcctcctgcgaaacaccagttgattagcaaaccaccattgaagcgagtgaagaaaaagcctgtgaaaatgtcagaagatgatttggccttgctaatggtatgaaagatgcgcaagact

SEQ ID NO: 41735 - DNA, 497 bp, Arabidopsis thaliana landsberg
atggctgccagtgcctcacgctctctctcttcaaggcctttggtcggtccgaggctgcacctatctggaccatgctttgccaaggcatctctgaatttcttgatctgaaacagataaaacaaatcaagatcaaaatcgaacctaagatggttttttcattgattgtctcatggattataagaatgagaacgaaccgtggcattggtacagctaaagctgcaaacacgaccctgagagccacggtagaatcggaaaaaagggagaacatggacaccaagactataacacatggacttatgctcctcgtaattcacctgaagaaactgcacatccgggttcatctctgcaaactgacatatctgcaacaatcataaaccatcattgttagaaaacttgttcatttcatcaatactgtaccaaaacaatcaagaagttggattgataccttaggatggagagccttgcagccaccacagccaggtgagaggaaatcaaca

SEQ ID NO: 41736 - DNA, 322 bp, Arabidopsis thaliana landsberg
gtgaatgttgggagtccatcatcagaaggtgaccagtctttgtttctcgtcatggttcgaagtccagcagaaggtaaagccaagcctggtttttgcgtctctgtttcacgtccagcagaaggtgaagccaagtctggtttctgcgtcattgtttcgagtccatcagaaggtgacgacgacaagtctggtatttgggccactgtatcgagtctatcaacagaaggtgaggagctatgggtggaggtggtagtactggtgttgagatcgactgtaagagtagtagatatgggagtgtggactggtgagttgctggaagttgtgt

SEQ ID NO: 41737 - DNA, 697 bp, Arabidopsis thaliana landsberg
tgctctgatgatgttgttccatcagatgaagagaccgggaatgtgaagccagcgtttgaacccgaagatctgcccatttttggaagggcttggctactgagatcgatggaagtaccggtttgttatttcccagtgagtgagatggtggtttggggagatttgcagtttcccctccaaaagaatagggaacagcttttgcagcgtcctgagaagaagtacccaactgcaattcaatttgccacaagatcaaaattcaaacggtcaacaaagatatatatagctccacaaatgttaccattctccagtttccggagagatctgggttgttttaaagtcacaaacgaatgaaaaactgattaagcttgtttacttcctatgttacggggtatatcaaggttcctcgcactcagaagccaaaacatgatgcaagatgcattaagaaaaaaaagacgagtactcaaagtacctcatcatgcatgcttctggaaagagaacccttaggcttcccaaactcatattggagtgcgttaccaccgctacttgctgcttgtgttccacggaatattccatttgtcgctgaagcggtcttgttcattccatttagaatgtcaccagtggtagttgcagggtggtttaagaacagaagatggctgattctgagagaaaatgttctggatatcttcatgcaatttagctg

SEQ ID NO: 41738 - DNA, 219 bp, Arabidopsis thaliana landsberg
aaaaattccggccgttataatatgaacgggtcagagttaatctaaggcgtgttaccgcccttttgttattatttcaagaattgatttttctaaacacgttcagaagagtaacacggtgaaagagaaatagagggaacccaacgcttacggcttgtggcacaaagcatgatactaccacaaccttcgccagaaccagagacctatgccaggcgttaaggc

SEQ ID NO: 41739 - DNA, 664 bp, Arabidopsis thaliana landsberg
aacagaagaacgtcgccaatgtgagagtatgcagccctagctcgagcgtcaatccaaaagacattcctgagactcccgtcgtcggcaaggtccatgaggtaaagaaagttggggctggaaagctgaatttggaagaagaaatcctgcaaggccctgaaaccccctctgagctccaagcgccttgaagattggaagtgatcaaggctgagatcgctggtctccccgctagagagtgaagttccaagagcgggtggtgtgtcaagggcaagggttcgatacaatttgatagtccggacttggacatggggaggtggttcgggatttgtcttagttgcaggagaagctgaggaggaggatttcttgtgagacttggaattgtgggcacgttgaggatcaaaggagtggttgtggtcgagtttgacttgatcaactttccatcgatcaaagtggatgagtcgaaggcgaatcatggcctggcagccggtgcgggtctcctttctccgggagtgagcatctttaagcagcttgaaaccttggcagttgcaacacaagacagcaccacgtttctccttgctgttacgcttagtccaggaggacttgacgcggatagcaaaaccgagctcacgggcgtatgagttgtagaaactgtaagcatcatcgtagg

SEQ ID NO: 41740 - DNA, 598 bp, Arabidopsis thaliana landsberg
tcagatcagatattgcgtggggaaaatgataataccccttctaccgcctattttgctaaaaagcccttcgagttggaagatatcaacccgcggtcctcatttatataaagatcgtcaccattaagtcctagatttttgcaagatagaccctacgcttccagaaaataattctcatggttgggaggcgttggattttataaataaaattctagagaaggattaataagtgaaagggaaatgtgtttaaaacatttcctataatcagttttggtgtttgacgtccatcataaaaccatgtggactaacgagttttcctagttgccatttatcttaggtagtcaggtgcataaagttcaacataaaccaagaaagaaattaagttggcgactcaatcaagtttggagcaaagacaagcaatggtgttggcagtggcgcaccggacagtgtctggtgccaagccgagcacctcccaactggccactcttgggtttctaagtatgcactccgctataattcacgaagtgtccggtgtgcccggacagtgttcggtgagccacggagcaatggtcagatgcgccacagtggactgcgatgttag

SEQ ID NO: 41741 - DNA, 641 bp, Arabidopsis thaliana landsberg
cgacggagacatgctatgcagttggacctaagatcgatcgccaatctgaggcaagtttatgatgtattatatccactgtttatgattatttattgaacaaatagaatacgaaggtggacatggattcttactattttttgctgaacaaccagccggagtgcaggaccaatatttttgatgcaccgcgccctggccccatgcctcggccaacttttaacatcaaacttccatctatcaaagagatgatgtcaagtaagatcaacgatctcccccatcgtcatcgatctaaattcacagatattcttgctgcatatgacttggaggttgacaagtcatgcgtagcataaaagacagcatcgacaaaattattgtcaagcaatatgacatagcagacaagtttatagaattgatagacgaggtactacgtgccgagtctgaaaatttggaaaacgagacggatgagccacagcaaccggggaattcggctgattcagcaggtattcgttattcagaacattttatcttttgacatgtgtatacgttttttgttataagtacagttaacagcttatgtttttgtccgtatcacacaacatttgatttataatcaaatttggcatatatatttctatataatgtgt

SEQ ID NO: 41742 - DNA, 1392 bp, Arabidopsis thaliana landsberg
gcaatctcagattctgttgcagtgaatatgcaaaagaacaagaatttgtcttatatttggattttttttgaataagcacgtgtctcatatttggctttgacgctttcctttttgttgttgttgttgttgttgttgttgttgttgtcttctggggatgttttgtctgaacattaagagtttgtatttgtaacactgtctttggatctttttttaataatttcaagcttcgatttggttccaatgaaaccagacttttgtttttataaataagtgtcactgtcatttttgaagagtccccattccacattttgttttcctctgaaatccaaatcccaattagatttgcagaatcagaatgagaaaatgtcaggtggtggagaacttctttttctttcttttgtcagatagttggatctgctgctcaccccaaaatgggcctggcccagtatatatcaataccagtaaattggcgcgtgtatatcaatctccttttcactaaaaaaacacttaataccagaatatattttaccaaaaatcttattagttctctagttttttttttttaaatctaaatataagcgtaatacttcatccttttttaataagtgatatttaaaaaatttatacatgtatattatctattttacacctacattctattaattttcaaaacaaaagtaataggactaagcatttattgtaaggttgattttgaaaatagttaatagttttacatgaaaaaatattgaatattatttaaagtgaagcaaaataatttggctacatgtcacttattataaataaaaaaatacacataacattagagaatcaatcttactgaaacaaaaaaaattgtgaaagagtagatggaaataacatagtatactaaatactaatgcttatttttcttcatatatccactctattacacctacatgctaccgttgcagcgaattaaatggatcaaaccaactgcatgatagatcaaacgtaatttcaatgtttttgatcaaaagatcaaatgtaattatgatgactcttttgtcaacaatctcccctggaatgcatcatgcatgatggtttgcacgagaagatcaaagtataaatttaagttcgggacacgcagaaaaaagacctacttgtaatattcttgaaagtgagttcaagctctcatcatttctatgcaaagttgatggcgtaaaggatacacaaaggtatactgagcaaaattttttaccacttttgattttctacatgacacttcttactaacaaatttcgttgaaaaacggtaaaacaacaattatttcctacgattttcctacatttttgacagtaagaaaatgaggtttttctaagataacatttgctttgctatgtaaaactaaaaaca

SEQ ID NO: 41743 - DNA, 589 bp, Arabidopsis thaliana landsberg
cattttcagctcctttcccactggttccaagaatttaagatcaacttcaacaggccacacctattcaaatacacccaaacatgaaactattaacaaatgaaacctcatactccatgaatgattaaaaacctatggaataaaagaaactaatatttcccttatgttcagacctaggcagctctacggtttaagaaactaatctcaagagtgagccaaaaatcaaaacttacacaaaactaccaaatcaactcgaacattctacaaggaagacaacagaagatgacacttttcctgtatgaattctaagccaatttgaatactaaaaacttctactacacacatgcaagcacaacaaataactatcctcattctttccaattccaaccctcaaacatcatcaagagaactcaaactaaagtagtaatttctcaataagtaacaaaccttaacaccaagtaaccgaagaggtgttacttggccaggaacaacgcattcaggtcctgcggattcaagtacagcttccatcgcaaacccaccttccacaggattcggatgctgcagagattcacgcaacccataattgaaaaag

SEQ ID NO: 41744 - DNA, 806 bp, Arabidopsis thaliana landsberg
tttattcacgctttgcaaagaccaattgtattttaaattttaaatatcaaaaattaccaaatggtaatcctatatcagttaggaaagacttgaaaaaagaattttttttttccaaaatccaaatcatagtcgacaaaaaaaatccaaatcactaattgaagaaaatcactaattgatgaaaaaaaaaatcactaattgaagaaaatccaagcctctctataaagctcgagtcccaaatactcccctcacattaataagttttttctcatacaaaaagacgatgttagaggtacaaaaacaaacgtgtcgtgaagtctggttttaaaatcaaaaggaagagattaggttaatggaagagtgtctatgagcaaccctccagggaagaaatcgtcgaacgccaaggtctcgaggttagtctctgactcaagcaccagctcctccactctctccatatcaaacgaatcaccctcgtggaagttttgcgaaagaaaaaactataaatgaagcaaatcatatttattcggttaccagttttttatatgtatttggttacaaacagtccttcgttcccagcattaggatcaattttattctctctcttttatgtaattgtaagacaacattagacaaaacctatggaaatgtaaccaatcagctgatttattaattttggcagacgaattacagataacaaaagaagattacaatcataatatcactttgctgacaataatcaatcaataaattacaaaaaaataaaattaagatataaaacatccatagtctccctttctttctcttaaaca

SEQ ID NO: 41745 - DNA, 819 bp, Arabidopsis thaliana landsberg
cgtcgcataagagacgtgtgaggattgagagagctgcttttataagagacatttgcttcttctgtgctgcgattggttctttggctttgattttggtctatggaaagatcaatttctggggtgctcttgggttttgttcattgtatgctgtttatgttgcctttgtggttctctcttggagatttggtggagatcaaggtgctgaatctgatcttgagtcaatccataagcgtggtagtcttagtgaaccaatcttgcagagagacggtcttgaggaaattgaagatggtgttgttaatggagagcatcagattgttgatgatgatgatgatcaccagagatattattactggaaaagattggtcatttgggctatcactctgcctctcaacttgccaaggatattaacaattcctgtagtgagtgaagacaaatggtctaaaccattagctgttgcctcggtcacatttgccccggttctgttgtcgtttttatggaactggaagcggaaaccgacgagttttgaggcgggggttgtttatctcatcgggtgtttgatcagtatagctcttggtttcattgcaggagccacgacgaagaaattaaccccaccaaagaaatggttgttgccttggttagcaggagggtttgtaatgagcatgacatggagttacatatcagcacaagagctagttgcgcttttgacccactaggatacattttcggtgtaagccgttcgatcttaggcttaacggcctcgcttggggtaatcaattggagactaataccacttgcaaatgcgctaccgatgggacgaag

SEQ ID NO: 41746 - DNA, 568 bp, Arabidopsis thaliana landsberg
ctgaccttaattgtattcatatgatttgtgttaaagcctgagccaatcaacaagaagaggccaaatgaatctgtatccaaaacacccgtctctggaaagaaggcaaaaccagcagcagcaccagcttctactcctcagaagacaggttgaaagatgagactctctctttgtttttgttccttagaagcattagatagttaaataatgagaaagctttcttagtaatttgttgtatactctgttgtattctgacgaaagagatattttcatattgtgttgttggtacagaagagaagaagaaaggaggacacacagcgacaccacacccagctaagaagggtggaaagtctcctgtgaatgctaaccagagccccaagtctggaggtcaatcatccggtggtaacaacaacaagaagtgagttgtctctttctttatttttctcatagcccaaatatatgtgtgaaaatgtaattagtaatgatgtgtaatggtattgtgtgtgtacaggccatttcaactgatgtaaacaatatgtcggtatcaacaagggttttaacaagggcaagg

SEQ ID NO: 41747 - DNA, 581 bp, Arabidopsis thaliana landsberg
ttctgtaaaatcaagatctttcaatccttttatcatcaattatatttggtactttgaactttgaacagatcggttcttttggtggaaggcaaatccgcaaatcttgctaagtatgcaattcacgcaacccgaaagcaacggatactcattagcttcatcaaatctaaaccgagaaactctaactggggaccaccgccgagcagatcgccaaatcagcacatccgtcacccaaccggcccacctaaacactaccctgttgttatcccgtccactggtgtcttgcccactccgtctcaccgcccaccaaacggagctgttcaaccgattttcatccctccttctcctccacttgcctctccaatgccgttcccaggtggtgtaccaaccgggccgcctgtctggccactgctgccacctcatccacgacaccagacagcaccacaacctcgaatgcccatcccaggcactggtgtgttcctcccacccggttcaaatcaagaactggctgacaacagcaacggaacagaaggaaaattagatttgaaggcgaaagaagaagctcgtaacggatttggtgaagg

SEQ ID NO: 41748 - DNA, 573 bp, Arabidopsis thaliana landsberg
tgactgttcacaaaaacaactagtcttcgttgactttgaatcaacaacaataatgtagctccaaagaaaggggtatatctaattcaaacccttatttaaacaagaaagaaagaattcgtaagcttttctatggaggttatttgtattaatgaaccaaaaagttatataaaaagggttatagagagaggcgcgcaaaatgaagacttctgttaactattctttggcttcttgtatatgcgtattaatatatgattcgttataattcaccaagaaagatttggaagtatatgcataatgtctacataactttatacatttgacctctattttatctttatttttaatattcctcggtaggacttctacgcacataaacttttaaaacctaatcatattgcatttatatatacctcaatttctgatattgtctatggacatggtgacagtttaaatttgttatgtactacatgatatggtgttatggtgatgatcatgtccactatgagatatctacgaagatatatgtacgtatgttttccaacatattttctattttatttttacgtttagtca

SEQ ID NO: 41749 - DNA, 566 bp, Arabidopsis thaliana landsberg
  unsure (1)..(566): unsure at all n locations
cttgcaaggttgggctcgggatcttcgttggcagggaaaaagaccttgaaacacgttgaatcgctcaccggagtagctacaccgccgcacgccgtggggagcttcattacggccaccatatctggtatggattgcgctccccagttcaccaatccgtccgcttcgggttgggatctccggtgttgctcggactcctgttcggcggacgtcgctgcaggatgggagcggcccgggtacttaggaatccctcgccgtgcacccagttctgccgcagtgcttgcgccggcgtgctcatcttggcggctgcactgtgctgctattctcagagcctggggaagaagacgatctcgtgaacgnnnnnnnnnnnnnnnnnnnnnnggaatagatcctgagttaacccaaggtgagccatcgatcgtcagtttgagggctcggatttgatgcaaggtacctttcactcagttagatcaggccgttgagatgtcacggatggctgtgggtggatactggttcataagcgtgcgatgtgatctggtccaccaagtgtgacgcacggtagagatatg

SEQ ID NO: 41750 - DNA, 654 bp, Arabidopsis thaliana landsberg
tagcatcaacaataatgatcagaacaaaaaaactcacatcttaaatgataaaaaaaaaatacgaaaatatgaagctcttattcgctatgttgttgaccaatgaaaaaaaggcagcattcatttttcttaacaacttttaagttattattcgaaagccatggttttaaatgaaagacaacacttctgaaaccccatctggaaatagtacattgtttagatacataataagatacgggaaaacacgagttattgctttcatactcattaacttcttcaattagttttctcctaatcagcaatcatagacatctttaattatgataaagttggctactatgtcgatgtacctcatttgaaatttgtattcaaccttcatattcactttcttatatatctttcaaaaatacaacagtgtgggcaatgaaattcccgctaaaaattaaaaatacaacaaaatactcctaaatataaaaactatacaataggttttaaggaattaagacatgtccatagaagcaagtctaagctgtttctcaagaggcaaatgatctctgaaggctacacaaatgtaatgcatcactttcacaagcattggtgctttatctctctcgctttgcgcaatttgctgtgagcttagccttgcattaaccgtca

SEQ ID NO: 41751 - DNA, 264 bp, Arabidopsis thaliana landsberg
tgcgtcggtgactgtatacatgacaaattcatacggagtgctctggaatacatactatagtgcgaccctcttcatggacttgaccatactttatactataacactgacaagtgactacacatactcaattatggacaatagtgattacttgcctactagtggacgtgttgatattgttttcctgacgacatatttgtaggaagagggacctaattgtgtgagggaggaccttgtgaggcgcgtacacgtggcctaccatgatga

SEQ ID NO: 41752 - DNA, 272 bp, Arabidopsis thaliana landsberg
agagctggttgggaagataactctctagaaagaaaagctaaaaggtaatctaggtatcatcactatcgacgacaactttgattgccattaactttctaaaaagttgtaactaatctcacaacagatcaaacctgaaataagcgtgtaggtttattttattttatcaaaaggttagataaatgaattaaaaactccttatttttgggcgtcaagaattcacatccacgaaaacattatattatgaccgctaaagaaagggtacatctaggctt

SEQ ID NO: 41753 - DNA, 564 bp, Arabidopsis thaliana landsberg
  unsure (1)..(564): unsure at all n locations
gcgcctgctgagttgcgtttggacgtcttgtagttgcgcacgcatgtagcgcattcatggccgcttgttgtggcctagtctggctaccaggctctgctgactgcttgtttaaggccttatacgcgcaagccagccccaaacccagccatagccaagcaggtttgtcagacgcgtcctcactttcgttaagttgcatgcgggtatcacaaggccgtgctaaatgcgtacgggtgccgcgcgtgcgtcgtcaacccgtcaacccgcatgctgagatgcttttcactatcgtgcgttggtcaccgtcaacannnnnnnnnnnnnnnnnnnnnnnnnnnnnnnnnnnnnggatctgccggcttcgcaaacattctgactctgtgctgcatgctgctggtgcacgacagtaccaggaggcgttcgagaacggacgtcaccgtccccaaccgccgtcaccctcgtcgcaccacggtcatccgcactccccgcacggggcgcccgcccacggccaccctcagcagcagcagcagcagcactttgagagccgcaagcagggcacccgctact

SEQ ID NO: 41754 - DNA, 530 bp, Arabidopsis thaliana landsberg
  unsure (1)..(530): unsure at all n locations
atgcatctgcaagtaaatgcagacctgaacattatgtagctcccaccgactcttgtaactgggaccccaattcaggtactgtttctttctttctccatctgtcctcatcttgatattgacgcatactctttccccatcatgtttgttgctattttctgctgttcgcattgcccacaatcntcatcatttacatctcttatagaacaacctagaagaattgtgggcactgcttaatttcctgctgcctaatatattcaactcgtcagaagacttttcacagtggttcaacaaaccattccaaagtaatggagaaagttctgccgaggaggtagcattgactgtatttgatattaaaatagtagacagtatacacttcataagacattctggctttaactgcacccttatggttgccatctgactaggcattgctatcagaagaggagaatctactgatcatcaatcgacttcaccaagttcttcgaccatttgttctgcgtcggctgaaacataaggttcataacggaatg

SEQ ID NO: 41755 - DNA, 1038 bp, Arabidopsis thaliana landsberg
cctggtaactccacataaaccttagctagcagctacgtataatgtgggggaaaatgaaagagaatttggttgagaatgggatccaaggaaaaaacatattattatcgaatgataaactgaaatccaatggattaagtaaatttcatacatattagaataatatcaggtgtagacactagacagtacaaaaacatgtaaaaaacgttgtaaggaaatacttcagatgcatatcaataatcaaagtaagaaatcatttcacagggttttaaaagtactatagatcatgagtcttaatcttcggttatgaataaaaatgtgatatatattaccgcctatgttggacttatgtgcaatttgcgttaaactttgattttatttggttggaaaatgaaagtcaacaaataaaaccaaattggttctaccaaacacgctgcaatgtattaaatatgtatatatatatatatatacgagacgaaatgatgaaaagaaaagagtgaccacacctaaccatatgattaatgccaaaacaagtttatgaaaaaagctgcgatcatcatcatccaagttatctatctataataaccatatacgtacagagactatcgaacaaatatatatatatatatatatatataaatatatatatatgatattcgccgactataagacccatacataattataacctatagactacctagtttaagaaatacacataaatatgatgatggtcgtcctatattacttttgggtgtttcaaagcacatcgacataaaatacactatataagttcataaacgtagtcttggcatccaaccgatccgcaatattaatatacacaatcagataaaatatgtcatgttgtttcgatattaccagatttaagtgttaaaatgatttatattgtatgcatgtcatatgatcaaatattttgaattttatttttttcttataaccacaagaataggccgaagctcaaaccaaatcctggaaatagcatttaaataaatgaatcatactgattactctacttttgat

SEQ ID NO: 41756 - DNA, 140 bp, Arabidopsis thaliana landsberg
ccatcctgagccttgcactgcagtactctcagcactcatcttcttcttatgaccttcaagggagccaaagtgagcgtgaatggcactaccaagagatccttttggtggctctccaccaccttcctgttatacattaaaac

SEQ ID NO: 41757 - DNA, 669 bp, Arabidopsis thaliana landsberg
taatttttcatatgaaaatgttcatcatgatcgcaattagttagatacgatggatataaaaattaatatatataatattacactcaaatatttatgtaattggtgacaaatattttttagtttttttgaattaaaaccttccaaactattgttattataaaattttaaaaccttccaaactattattattaatattttcaaattttaatgctttacaaaatgtcattatttttgttattaatatatgaaaaagaaataaaaatattttgaatgtttttgtttatcaataccgatcaacactggtcaaccctatatttagacggttggcataccgagataaggtttgaaaaatttctcaaaaaaattataagaagatgaatctctaatctcaaatgtttgtttacatagaaatttactttttcagaaaaatataaaaaaaaaagtataaaaaaataattaaatctattggatgttctaccaaaatatagaaaatagaaaataaaaaaataataagaaataaatctagttgtcgagggttggaccgatcaatcccaacatatgtgtctttatttgtttcgacatgtgaagattggaccgatcgatccatgcacttctcgtatcaattagtccatgagcttccgggatattcaacgtcgacatctgggattt

SEQ ID NO: 41758 - DNA, 445 bp, Arabidopsis thaliana landsberg
cagaatctctcgtttaagtgattgaaataccaacaccttacactttatatatcttctaaccaagttcaagctaaatttctctctcagatgtttccgcttgtaacgcaaatgttacatgcaattgtacataaattattgactaaaagaaaaaaaaaactttaaacaacggtttaatttagaatgtataacaaatgtggatgtaatgcattgaaacttgaaagagggaatggttgagagaaatgattatttagaatagcaaaaatggatggtcaatgaagaagacctttgggtccccaattccccaaagttcaggttaagaagatgaaaagtggaaacaatttcctttgtcctttgatattatattctcagtattgatttcttgtctttcgattttgttattaattagttaatggtttctcagatggatagtgtaacttgtagagac

SEQ ID NO: 41759 - DNA, 1658 bp, Arabidopsis thaliana landsberg
  unsure (1)..(1658): unsure at all n locations
cctagtagcagcagaaacttccattatatacttaaactagcaaaagtccaagactactacataagctgtaaaatgcacatacctcaagctggataagccaactgttagcacctgatccaaaaccacgatctagatgataaccaggtagcgtcccatctaagcacactgcaccaatttagagttgaataaacactaatcgtcatcacaacattcaaaaagtaatccaccaaagattcaaagaagtctacgaaatcgagcaacagaacaaaatcaaacgccataaaatttcggattccaactaagagagccaaaatctaaactgaatagtggataacaaaggtcaatgtgatagtgaaaacatctcctttcaagcatatcctcaaatcccaaagaagaagaacgaaagagaaggagagagagagagagagagagagagagtgtgtaccanctcctttagagtcagctccgtgaatcaaggtgagaggtatcattggaaccgaaggcgccatcaatttatactccagaaaagatatcacagtctcagtatctctgggtttcccaaatccgtcgctagatccgctttgaaccaccgccgcgactgaacatagcaagcacacgaccaccgcaatccacaacaacaagctcctcatctcctcttccgcccaagtcccggagctccgggagatacagaaaagacgaatcgagcgcgaaaatttggattaaggatcgatgacgatagtcttattagtcttacactttagtcttttatcacttgcatgaagtcgaaaataaaaatgattttgaaaaagaaaaagagtaaagcagaatgatttctaatactaacttataaatattactgaaaatctattctgtatttgtttcctatattaattgcgatggattcattcatttgggaaacacacattcatgtaccaatttttttgaaaaatttgcttacagattttgcatttaatattgtcagatttgatgataaaatatcttatcttaaagagttaaaggcttaaacgaaatcatcatatacttttggttattatatggaatgacatgatacagttgtctgtttttgctaatttgtaaaatgtgtaatatctgaaaattcttttccccatattttgatttggaattatttagaaaaatacaattcttataattttatttactgattgggcatatgtttgtgcttcatttcattggtatttattagaaggtacactatataatccttatttctctttaacataatgtcaagtcaagtgcagtgtttatggattgaatgttcctcctcaatttagcagagatttctatcattctcaaggcataaataattacgtatgctagatttattcgtgcccatctgtcggtctgacgtggaagtctctttaacagtggtccccactctggacctacttttagttctttttgaattctttggaaatttgaaagtaactaattcaaataaaaaaatgatcctatttttcgggtatatctttaaatcattgatcttttttaggctgaaaatgaagatcacaaaacaaacgaaatgtgagcacttgagaatgaatactatttatgactatacttcaaattgaatatgcaaatttaatcgaacaaacaaaattatgataattggcgtaaac

SEQ ID NO: 41760 - DNA, 226 bp, Arabidopsis thaliana landsberg
aaagctaaccccgagctcgagggaaaaggattgatcgaggcgcgtgatatatcgttttattatgtaacgtatgtcccggccgcgttaggaaaagcgcctgtgagcaaacagccttacaaagatcccaaaaaggtgaaggtggatgaaatgattgccatggtttatgaaaacctgagtgccgaaggaattgtgcgtttgtcggttgcagctcccgcgaccgagttat

SEQ ID NO: 41761 - DNA, 774 bp, Arabidopsis thaliana landsberg
  unsure (1)..(774): unsure at all n locations
gagcaaacagccaatttaaggcacaaagccacaattgaaactaacaaaactttttagaaaatgaatccctaattacttcctctagaagactagaaagcatatcgcaacacaactatatttttttgggaactcaatttagttgataatggtgataaacgctacaatcatcagaaattttggaattactcgtccttacttaattaatgtttaaaagacttataaaattaaactatttacttacaaacttgagcttgatgtggctttgttcaagaagcttaggaaccatcgaaaagatgccgacgccggtaaagtctgagatatgcgttacaacataattatttagaaatttagaaaaaaatacaaaaaataaaaggaaatatatttaatagtaagaatataaaacaaattttattaccatcttttgaaaaagaacttttaagtacataacaataattaggtaataatatgagttaaaataatgcatggaagacacgcgttgcatgaatgatgctaattacactttgaaattatcatcatcatcattaacttacttaaacactgtctatataaagacagagacagtgacaacagagacagagagataagcttaagccaaaattaagcagaaaaatggagaaatagtgacggtgagagagagagagatacggtanacgaagcaaagcaagagagtcacgagaaatctggcgtatgtgttcaatgataaagcatttcatggtgggccgacatgatcatcanaaaaagttcaattttgaa

SEQ ID NO: 41762 - DNA, 347 bp, Arabidopsis thaliana landsberg
taatgaactttcaatattgatatgcatcctttttccgattggctatttttatgtaccatttagaacgttaggtaaaagaaaaggataaaaacattgggaatttgataatgacaacaaatgttacgacactatgtgctcactcgattacaattattttattacaagtaaagaaaaaaaacagacacaagttctctatgctctgtcttcctcctaaaaaaagaaaatttctgttctgaaacgccttcgagggagggagggagagaaagggatgtagtcttcaaaattcaaatatcatgcgattggaaagttttaatctttgaaaggtcaaaagattctttggggggtgg

SEQ ID NO: 41763 - DNA, 866 bp, Arabidopsis thaliana landsberg
taatcccttttgaaaataatttgacttgtacacacggcaacaaaagaatgatctaaaggcaagtaacaagaatctgagtatccaccacctcttcctgttcctgtttttgttcctgttcgattccaaactctcactttctctgcccccctcgtgtctggctcccaccttttgtgtccactcaaccaacaacaacagtgtatctcttctcctccgttaaataactttatatttccccgttacatttccttattgtaacaaccaaaaaataattcacctgagactcacattctttaaggttttcgcatttaatatttcactttcttgaaatctcctatatttttgttatatatggtcgtcggcgatgccaacggctggtgaatgtagcgaaacaatgcttaacggcagaagcatcctacgcattagaagaagctgtgaacgttgcacgtcgaagaggacactcacaaacgacgtcgcttcacgctatctcagctttactctctctaccaacctcagtcttacgtgacgcatgtgctcgtgttcgtaactctgcttactctcctcgtcttcaattcaaagctttagatctttgcttaagcgtttctttagaccggatccagtcgggtcatcaacttggatctgatgattcaccacctgtttctaactctctaatggctgcaattaaacgatctcaagcgcatcaacgtcgtttacctgagaacttcaggatctatcaagaaatgtcacagagtcagaatcagaactcactttcttgtgtgaaagtggagcttcgtcagttgattctttcgatcttggatgatccggttgtgagccgggtttttggtgaagcgggttttcggagctccgag

SEQ ID NO: 41764 - DNA, 524 bp, Arabidopsis thaliana landsberg
acgtctgagattcgtaacgctgattcgtgtggcagttcggtattttcgagtaataatagaccgggaaagtttgttacgattcctgcaacggataagagtaacaatgtagagccgttagtaaaacggattacggttaagagaaacatcggagacgcttgcagagtagcggcgtctccgaggtcaaaatctccggctagagcggggaataatgttccctcgctaagccggagtaattcaagaaaggcggaacaatctccctatagaagaaatccattgggagagattgatcaaaacactaagaagatgatagaatctgtgaaacctaattcaagatcaagtagaggtccaagcccgagtcgtgttgctgttgtagaacttacgaaagctcctcaagttgtgttaagcagaagccgatcgttgaggaaatctcgagatttcgatttggcatcaaacgaggataacaattacactgcattgttgttgaaagatattcagagttctcatgggaagagtgttgatgatag

SEQ ID NO: 41765 - DNA, 2272 bp, Arabidopsis thaliana landsberg
  unsure (1)..(2272): unsure at all n locations
aacccatcaatcatgagatatgaaaataccagctttgtgaggtgagcaatccaattgccaccagggcttggtttcgatgtaatctttaagctttgcgtcttcttcaggagaccatggacctctcttcacatttgccttgtcacaacatggagccctacccatctctctatctgtctctcttggtctaagtgttttggttgagatatctttgttttgttttttgaaagagaagaagggaaaagaaaaagagttctctggttctgtaattatcaaagataaagacatctatttattgctctatgtattggaaacgctcaagtcaatgagaaacctattttctattttccttccattatgcttttttctcctctccccatgtggattaccttcattattatattatatatatatatatatatatatctatatgtagagagggagagagagaaacagtgcatataaattttagttgtgtttttggtcaccaatgcacaacaagaacagctggtctaatgttgtgaatagtggagaaagaaatcaagcggaacaaaccaaatctgtgaagaagaattcaataagttctaattgactgagctatataatgcacttaacccctaacatacagaactaatggtttgtgagaagaaaacaaacaggacacatggattagagtttgctttaatgtgcacatgacgattgtacacacgcatggttgactctcgcagagactgaacaatcgctagacgatcgatataaccggtttatggtctgtattcgattaaaccaaatcgaaccaaccaaaagtcagaaccaacataatatgtttagttacatggtatacgaaactatactatgacaaacataaattatatatatatataaacgtaaaaatggtgcatgcagagtcaaacatttatggtgtttattttgtcttagtacactaccaataaaaaaaaaggaaatagttcatggacagcccgaaggtcagtgataagaaaataaaataaaacgaaaagttgacattaaaaccaaaaatcagagaaaaggtgaaagtgatgtgtaatttattttccaaaaaaccaagtgaaaggtttgactaagtcatttcccacaagacattgtcaaaagtgattgatcccgaggccaccacacatacatatattcttatgggaagaatntgtgtgtatatataataagatataataacatatgtcatttatgtatacaatggcaaaataaatttgaatgtttatggcgcagcggtttaagttggtaagttggtgtggcacttttcaaaacaatatttatgagggtttccaaaaattgaaaaagataactttgttacactaatttcttaacacttttcaaatcagtaagctctagaacacactatcaccccccattatctttatcgtagctcgcttcatataccaaaacaccattactaattaaacagtcacaaaatggatgtatgatgagtctttgcttctgttatatccatttgaagtgttaaactgtcaacttgtggattgtatgtttgttgttacattttaattagttttatattgccaataattagtctacatgattattgagatggagtccctaccccaaaagatttctcagtgactacatggtaatacctagaggtcgaaatctatctaccaatattttattacatacttaatctaataattgataaaggtgctcttttagtaacataaacatacaataatatgcatctgtcgtaatattccactcaaataggtgcctcccctatcatatgaatgtagtagacgtgtataatggaaaatcgccttgcgatgttaacatttacgattatgaataattgacatgtaactattcaatataatactagtaatccatgtatactatatatgaagaagaatgaacaatattttaaaagacaatacttaattattgtttagtactaacagttgattgttacagcaactatacattatacagtggctaagccaaagtaataagggtacgtgttgccgtgttgggctgttggcttacctcgtatccgattggtatactaactgttgaaagcctctaaaggaattagagagtttcatattttaaggctcacgtgagagtcacgtgggaatcggagcgtgttgagtccacgcgaaaaagtgcaaaacggcagcgttttaacatagagtcgtgtcactttcttcacctttctcagactatctcattcccttccctaccatttccctcactttaccaacacaaacactaa

SEQ ID NO: 41766 - DNA, 757 bp, Arabidopsis thaliana landsberg
  unsure (1)..(757): unsure at all n locations
tttaaccttatggcaagcctgaaatattcaaccatggacgttttgtttcttacttacagtcttcttatatctaaatgatttacttcataaaaagaatggtatatagattttatgttactttatagccaacattatcatctatccagcttaattattttttttaacagcatttatttatttttttgctgatgaagcatcatgtcaagaataaagccaggactccataatctagaaaaaaacatcgttgcaaactattctcaatttttttttttttttaatttcataaaaaatctactttctgtttcatatcacatgccatcattgtaaaataattgtgatgaaatggttttggtttggtttggttggagtgtagtggaagactacgggaccccatattttccctaacatttttgaaattgactggtgaaagctacactacaaagtatataaaatatgtccttttattgacgacaaaaataatgtccttcagtgtagagaaaaactttatctttgcttctgtaatttcattttacgactatatatctctcctccttaatagttccaattaattaaaatttccttaaatttaatttttttaagtaacatctttgtggtttctgtgatattatatagttgaaatgtcttcttgggaatcatccgatatggccctgaagatttttgagtgtggacgattntttcaaagtgcccaatcaaacaactttaaagtgacttgattgaatgatttgtatgaaaattg

SEQ ID NO: 41767 - DNA, 926 bp, Arabidopsis thaliana landsberg
tacttaccaacggtttacagtaatctttccagctctgctcgttaagcccaaaattaaaaaagtcactggtatccgtaccaggatccctccatggcttcttctctaacacatcgagatttacatcaaaaggtgtcctgagaataagagaaacacacatcatgatcttcaaacacataaaccattactcatatcaatcacattcaataaacctaaaacacacatttatcatctaaacaccactgtgactaacctggaccaagggtttgggaaactatatctatattgagacattcctaaagaaggatcgatgcaagcattattagctgaagcgtttctagtccaccgtctctgaaacgaggaagctttggatgcttcgtatccgccaaagttggtgttaaacacacaagaagcaggaagggctttagagtcgtcgtctttgagcactatattcaaatcatcatcactatcactaaattccgattcttcatcggcctcagtcagattcatagcacaatcgtcgtcgtcacacggactcgaatccttagcaacaacatcaaatttcttcacttcaccttccgaatcagactttaccgtctcttcaaaacccttatcctcgccggagttcgtagcacactccgattcgaaagcatcagtcgcctgaaacttggcatcatcaacgtacaagtcaccgaaatcatcatcagtagaatccattcaaaagaaactcgatgaacaaatccaaatttgacactagaatcatctattccataaagtgagagtcttgacacttgacagttgcataaacccaaaagagatttgggagtgacagaaaacgccttaaaccctaacacgatataattcatatattattcttttctactacataaaatcttatatcataattataaataaaaattatgcttgtg

SEQ ID NO: 41768 - DNA, 665 bp, Arabidopsis thaliana landsberg
atttttatagtaacgaaatgttttggaaaaaaaataaccaaatagttttgtaataaagtaattttttcaagtttttatgcaatattttatgattagttattagttaaataatgcattttttttatgtttggttgaattttttaaaaatatgtaatttttaatatacgtgtttttagttaaacatcttatattttaaaacggattaagtatctttttagtcataatttatctttatacacaaaaaagtaatactttgtcgattcttaacccatgcaattgtttatgtgttctgaaattgatttatatgatcctagctcaactggcgttaatagacttcgtataaagggaaaaaatttcaaaatcattagtttaaaagttcgacgtgaaaaaatgtaataatttaacattctcttataatgcttccgtaagataaatttatggactattatccgactttttgataatgggtatgcaaaaacttgtcatatctaaaaaaaatatcaccaatgttaatttatacttgggcataaatgtatcattaaaaaaaacttggtggcttggtgcatatagaagagagtgaggctgtgagggagcactatagaccaactagacatctctaagcgaggagaacccatccgcatcgcatgtatgcattgagatagcta

SEQ ID NO: 41769 - DNA, 481 bp, Arabidopsis thaliana landsberg
acaaaatgttggtggaccataaacttttcccggttaactttcccagaagattccagcatggcccggggatttcaactgataaacaaaaagaacttttttctttaaaacaaaagcctgattcaaacatttgaccaaaatcataaatcagcaaacgcactaaactaattacgcttgaggtcaagaactggcgagcttacaacggattcaagcttgtaagaggaaaataatcacttttacacacccatgtgggaaaatgcagagatacagggtgagaatgcatcaaacaagttaatgaaggagaatttgcagagtcaaggccgctggatagctttggtggtggtagctagagatggaagtagccaataaaagaagccacacactgggcttgcttgtagagcctttgagcagaatattctaacatcatgttccacagatctccaacagtccatttatgggaaagaatccacttcgacacctatcc

SEQ ID NO: 41770 - DNA, 683 bp, Arabidopsis thaliana landsberg
tctttgagacaacgaacagcagtcctcaaaagctcactcacctctgggttatccatatcaccgagtttcctacactcagcctggacccacctagaaaattcaaggttctttggttacatttgatacctcaaacttctatgaaactctaggctcacggcaaaaacaaaggcaataataatgaacatcctgctttaacagccagtactgagttttctcgttcgccctaaacggatttagaaaaggtgaccttttttgaaaacaaattatcgtcatacaaagtacaaaccatgtgaaacagtttacattcacccaaactatctaggtttccaaattagcaatgaggaattcatgctaaatacaaacacactaagtttctaccaacaagccttcttggaaagaaacggatttgtaaagagacattgcagagaagttcaggctacaccaaattatcaatgaggaggtcatgctagatccaaactctaaattgctactaacaagtcttcttaaaaacaagcagatatgtacctgcaaaggcgctcatatgctccttcttgatacacagccatcatatccatcaattccaacccgcacgctgcatacaaaccccgtacattcaatactaccacaacaatccactttgcgcaccaagataacgacagatcacgaaccacaggtgaaaatat

SEQ ID NO: 41771 - DNA, 605 bp, Arabidopsis thaliana landsberg
  unsure (1)..(605): unsure at all n locations
aacgccagtattgggagacactgccgacgtagcaccgctaccacctccttgtggcgaggtgtgactcgttgctgaagtaaagctagagccagagaagatcaaaggcgtgccagtagaagaagatcttctatgacccggtttaagaatccgggtcgtggtcggcattccggatccggggctagaaagctcaccggaatgactcttgnnnnnnnnnnnnnnnnnnnnnnnnnnnnnnnaactcaccgacggtttaccagaagcagagccagaagagccagagctgctagtaggagtcgcagcagcggaagaagaagcagagccacgtggcattaaggtagaaacaggagaacctagatcgagttctcgaaaatcaggtttgttgacgtcatcatcatttctctgtaaatcacgaaatcgaccagtgattgaatctatagcaggttccaacgaaagtattctagaatgagacatcgtcgtcacttcctcgtgagctgaatctaaaatgagactcagcttccttttcttctctcagagaagtcaagagaccacaccgaagcttttaacgccggacagatacaagtactgtcttcagagagaagagagag

SEQ ID NO: 41772 - DNA, 898 bp, Arabidopsis thaliana landsberg
tgtttttctcttttttgtggaaaaatagatcttaaaagaacaaaaaaaaatcacctctatttttttgaagaatcaactgttttcaccaaaaataaatacaaatatggttaatgaaattcacgttaaaaaatcaacatatactaatgttaaacaatagatgtcataatcttgtcttcttcttcttattttatcaaaacaatgttgtcatccaaattaatgttggaggtgtgaagctagctgcgggtccgcagacttagctcatatagtactatagcagggtgagcttggacaccatattaggtacccataaaatagcgggcatgtgagaccagctcaaatgaattgcgaattttagcagatttagccagcagattggtaggtcgatccgcagactataaatattcaataaaaataaataaaaactaatgcttattgtggactggtccgtttgtcacctctgcagaatgtttcactagatctcctttcaataccagttttagtcaggaaagggatttataatgttacaaaatcttacaatccaaaatttgagataaaactatatttacattttacatattcaacttagtattgtgataaacaatttattaatctcttctgaaaatactagtgtttgaataaatcacaagtgttttcaaataataaactcaagatcaccaatggtgttaagaaacagagacaagaacatttcgcctatttgtcctttgaaaattagtcacgtccaatttccatcgagtttcgaattgtgttgtcactatgtttcaacttttaacctcgagaaattagctatagatgcgatcgttatgttcatgcgtcaaaataataatttgttcgatttgattatctttgaaatgagcggtatctaaagtggttaaaccaa

SEQ ID NO: 41773 - DNA, 901 bp, Arabidopsis thaliana landsberg
tggtttcgcacaccggatgtttctctgtgcggtggaccgccattttcagtagcttcgaggagttcgccagagaagtattaaaaaaatctgaatcggcacctcctccgtccctgacgctttctctgggcgtcacttcagcaaaaccccaacttgctccgtcttcgcctgctggttgccgattctcgccccctgctccgatggcgtttaggcgcgttgatcccgcacctttccttcctccgggcttcagcgcttcggtggtccttcaccgggaaattatggccaggtcagtttctcggcgcctcccgccattacatgaggactgggctatcatcagcatccaacctttacctgaccatgagatagctatcccggcggtgagggatgtggttagagaatacattgtggagcaccgtcaacttggggtgcgtgatatccagcggtcgcacctgggacaagttttggttcagttcagcagcattcttgaaagagacaaccttgtccttctcggtccgcagcagtaccttgatgcctccttcactgttcagcggcacaatggtgcttggaaccatagggccctgtattttaatcgggaatgttggctcatgttgttgggtttccctctggattaccgttcttctgagcacttgcaggtggctattggctcctttggcagattgattctgtgggaagaggacagacgcaacatttttaggactttgctcagggttcgggtcacgtccctggaggaggtcccacagttcattgttttttcagacgctgatggctttcttggagattcgtggacggttcagtgtgagatcatccagcaatctttgttgggaggtcacctcaagatgaggaccagtgccagtggtccggcggacgggggtacgagctcgaa

SEQ ID NO: 41774 - DNA, 849 bp, Arabidopsis thaliana landsberg
aatatgtgtgccaacacagtctcccttattaggcaatcctggtttgtatctacaatcattggttggaggtcagcagttcgattcagcggaagcgcagtccagcaatcccgcttatgacgtttttgaatctacatttgatgctgcaaacttaccatcatccttatcatcaaatcctgatgctgctaatttaccatcatccttgtcatctagtgttggtggtgcagaccacaaagaatcatcaaaatcactttttagtaaccaggacccatggaatttgcaaactaactcaaacgaggatgtcaaacctgatctacttaattcttcgaaaggtgagattgactttcatgttatacatgactccattactacttttttggtagttatccttgagaatgatctgttgattggtctttggttctctctgaaaggctccgaggaggagcacatcaaacaagaacttcagaatgttgctgaaggagtcgccgcttctgtgttacagtcaagcacaccttcatatcatgaacctccaattaaggtggatgagtatgcttttaattcgaaaggagaagtttcacgtaatgatgaaatgaaacagcagtctacacacttcaaggtccttagcttactgttcactattcttgtcattatttctttagatttcatattgcctcagaattattgctattgcttcgcaggatataaggaaccaacttctagaaagactgaatttcggatattctggttctgattcgctggatcagttgcaggtttgacaatcttgttcttgattcacttatgaccattatcttatgagtataaacatttggtttgcggtatacattataaagg

SEQ ID NO: 41775 - DNA, 563 bp, Arabidopsis thaliana landsberg
ctttgatgttcactcggaattctttttgaatgctctcgacccggtgatcctgcatcgtcttcagcaggtcggtgaaaaggcggaaatactccaaagtcaaaagctcgcgcaccggtcgcgcgatgtatttttccgcgtcgatctggagcaactcggccgcgtgacggttgatcgtggtcaccacgccccgctgatccaccgagatcacgccggcgctgacgttttttaggacgacctcgatgtagcgactgtgctgatccagatcctgcaaagtgctctcgagattttcggtcatcaagttgaagctttcaatcagggccgaaatctcttcactgcccgattcgatcttcaggggtgtatagtcgccgcccgcgacccgccgggtggcgcggcccaactgaaccagcggcaccgacagctgccgggcgagataaaatccgaaccaagtcgcggcgagcagaatcaccaaggtcatcaggaagagaatgatcatgtagatcgacttcagcggatactcgagggggttgatgtcgcggaagtcgtcataggccgtcgagacgtcg

SEQ ID NO: 41776 - DNA, 542 bp, Arabidopsis thaliana landsberg
  unsure (1)..(542): unsure at all n locations
caacctgaccgtgctagctcgagacttcatggagtccttgcgactcggtgaagacacgatggagcaacattcgacggactttccgaggatggatagctgtcgacgacatcggcatgcagattctcaagggaatcggttcggtcattctgacggtcttcaagtcattttctggagggtccggtgggattctcgagttcaccggaaacatcggggattggcttgtagctctcgaccaggcaatcaagaagggccagggccttactaacttcttcaaggggtttgctaaggcgattcttattccgatcggcttcatcaagagcttcctcggagtaatcaaggatctcatcagcaatctcggtcacctcgacgcgagtggcgttnnnnnnnnnnnnnnnnnnnnnnnnnngcctatgaagtctattggcgacgggatcggtaaggtctttttcgcgtctcttcgatattcttcggaaagtcggtaagatctttaagccgcttgccgatgctttcgtcacgttctttgagggacttggcgacaagat

SEQ ID NO: 41777 - DNA, 323 bp, Arabidopsis thaliana landsberg
atctctgtacgaaatcaccatcacagtaacttagatccgaagagctgagccaaaaacaagagccgcgactgctgcaactccagctgacacgaaagacgctgagatcgcactagatccagaagtaggacttggtgctggtgcctcagattgtgccgatgcaacgacggagataatcaccatcatgagaacaacaatggaagccttagagatcgccatttcaaagattttgttgtgagagataaagagagagaggctagggtttttgaattgctttgaaatttgcttagcttaagggttttctaccatgaaatgtggtgaggggt

SEQ ID NO: 41778 - DNA, 545 bp, Arabidopsis thaliana landsberg
  unsure (1)..(545): unsure at all n locations
cacccgaggggggaggcgatgaaaggtgtgactaaagcatttgtgctatttaacaggcagatgaaccttccatgggtgcagtaaatcttgcaagaatttgagaggcagaacgagaaaatggagatggtgtctgaggttatgggagatgctattgatgatgctttggaaggagatgaggaagaagaagagactgaagatcttgttagccaagtccttgacgagatcggtatcgacatcaaccaagaggtaaatacatcaatatcttagctaccatttacttattccacttatggatcaatcgaaccaatcttaccatagctgttagatattcacaatagaccaaaccagaatggaccttatcatagcttaaacttccttgaactgaaaccgatactgcgtgacgtgagatttggttttacttaacttgattgtatccatctataacattcctagttctattttccaccttgtagatgcttaactcgattngaccgattcatctatgcttcagctggtgaatgctccatctggtgcggtcgcagtac

SEQ ID NO: 41779 - DNA, 502 bp, Arabidopsis thaliana landsberg
cgtgtcacaagatctttaaaacttctattcttatcgattttggttgatattactacaaaaatcaacattgaaacaagtagcaaccatattataattattctaccattgtcgttacacttggttaaaagacaaagaagaaaatcccaaagctaagataagaagttaaaaagcacaaacccaataatatattgacacgtcagtagtagtaaaatggatagttaacgtgtcaatacattattggtgacgtggcataattcgtagttaaaaaaggttacttcgagcggtggtagtggttacggtgtgacgcacgtgagctatgacggtggacgagtggagactcttggacgtctccacggcgtttggcagcggagaaaactccgtcccagatttcggagaaagcgcggatgatgatgccgtggtggtatggctcgttaagggagaggaagcagtggagaagctctctgagatcgtttttggagtaaatctcgttctcgagaatcat

SEQ ID NO: 41780 - DNA, 567 bp, Arabidopsis thaliana landsberg
  unsure (1)..(567): unsure at all n locations
aatctcgactgtagtagtgcacggcaaggtcggcatgccattgcgtcgggcgctgctcacgctcgacgcggctccgnnnnnnnnnnnnnnnnnnnnnnnnnnnnnnnnnnnnnnnnnnnnaggccgatgggtcagtgcacatgcttcccgagcgatagagggttcgccagcggacgcaacgaccgtcgtcgctcggatagccgccaagatcgcgaagattgtggcagcccttgatcgtgaggtgccgccggttcgtgtcgggtgctgcgctttgcggttcgatcatcgtcatgcggcctcggtggcgtcgactgatgccatatcggcgcggcgcagtcgaaattataaagtcgaaaccgattcattatcgacagaaatttgagtcagtgcgccggacgttggcggacgctcagctcggtggtcgccagtttcgtacgctgcacagcgctgcgcttgccagcggggatatttcgcggtccgccgccgtgaacagggcaagtgccgtcgatgtcggggccaatgtccggatggatgtggcaaggcgacaagatcagtccgtgacttgtc

SEQ ID NO: 41781 - DNA, 596 bp, Arabidopsis thaliana landsberg
acaattcctccaactaacccaaccaacataattcacacacacatactttgttatgcttagaaactctttttatgctttaagaagtcaataatcaactaaagaagcaaaacaacagctttttgttttgtgctttgttagtctatcttttaaacctttgtaattaactaataattcaaattttaatctttctgcattaattcgagattcttcactcggtggttatcgttgtcagccagaattaaaaatagtatagttttctcttaatttttcttactaaaactaaacaaaaaaacttatctttacgtatcattagtggtagttatcgtatggaccaaaaagtcataattgttaattttgggggtttgtgaaaaagagaggaatgcttgttacctactcttattaacttctctcattctctctctctctctatcatagcttctctactacaacagtctctctaatcaaattgagacatcgagagagagatttgacaaaagaaacttattaaagtcttcttaggtttctttttcatgctttttgttctgttaatgtttcgtttggcaaaatgcagaacacacacaggggcaagctctgtt

SEQ ID NO: 41782 - DNA, 609 bp, Arabidopsis thaliana landsberg
  unsure (1)..(609): unsure at all n locations
tgcacgcgtccggcaatgtcgcgttgttgcgcacgtgccgtcgccgttcgcagttgttcgcgcgacagcgtgatgccgtggacgcgaccggcatcggcgatctcggccagatacagcgccaagccgccccagccacagccgatgtcgagcaccgtttgccccggtttgatgtcgagttttgcggnnnnnnnnnnnnnnnnnnnnnnnnnnnctgcttcaagactttgttgcggttgctcgaaatacgcgcacgaatactggcggtcatcgtccagaaacagctcgtagagcgtgtcgccaagatcgtagtgatgcgcgacgttgcgctgcgagcgtccgcgatcgttgcgctgttgccggcgtcggcgcgcgaagcgaatatcgtcgagacgcgcgagccatcgcggcgtttgcgcgtggctcgcattggcgaccagcagcgcgagcagttcgtgcagggaggcgcgttcgacatgcacgcgcccatccatgtacagctcgccgagccgaagttccggatcaatcaggaacgcccattgcgcgcgccgatcgcgtaagcgcagcgccacgtccggtgccgagccatcacncacngtgaagcgcgcgccg

SEQ ID NO: 41783 - DNA, 832 bp, Arabidopsis thaliana landsberg
cgacaagaagagaaaccaataacaaaagtttgaatgaaatgcttctcatttttctacttctttctgcttttgatggtgaagttatacatgcgtttcgtctctttttatagtctagtttagatgatggtttgagcaaaaaatcttaaagattttgtttgtatatatatacaagttataattctttcaagatttcacttaccaaaaacggttacaactattaataaatatagtgatatatggtcaatactgaaatctgattcacataactatattcctattgaacatttaaagttccggtcatcatttttctttctatagactttttcatgagactatttctcatcatccgaccagtatagagcattcaaatgtgttatgagttatgactatgatataacaatatataatgattagacgattttttctcatgatgttttattttatcctagttttggtagatacttataatgtattttttaaattcaataggaaattaacaagaaaatatattgaccaattatagagggcttaaaacttcgtggatgtaacgtttggaatttttgttgtttaacgatggaacccactttctttgtccctttagagattctttcccgacaaagtacaaatcattcacagaagaaaactttttattaccattgttcccacaccagatttacacttttaccacttgttgattcttggttatttggggtccacacggtgaatctgaatcatgtgatagtgattaagtttgagattttggtttttctctttccatttactaaattaatcttttttgtagtttccactaaagctttatcttggcatgatt

SEQ ID NO: 41784 - DNA, 761 bp, Arabidopsis thaliana landsberg
ctaattactatttgaaacaccttttacactttatagcttacttgtgtagaattttattgaaacgaacggaaatgtagtcaactttgatgccctgatacttgggtaatctatatgtaacaagtacaagtatacgagcttgttagttgttaagtgtgaaagagcttgataacaaaatgtcattcttctttgtgtgaattgattttcctgtatgcaaatttttatataataaagaccataaacatggtgtgggtcttcttcactatccagttcgactccttccttctttctgtttcaaatatttgaccccaacaagtattttaaatatttatcacaaaagacgcaaaatagcttgcgatttttccgtcaatattaaacaattatctagacttccacatggtgtacctgtatattaatacaacacgccaattttaaaatcgttatattgttctcgttatggtgagatttatagttaagcttaaaaaattaggatatgaattggataccatcgagagttgccaactattttctttaaaaatcatttatcatcggattaattaacacatggtggtctgaaattcaataattctgatataaatttcctggtgataaaacaaaaaaaatttgaataggtcttaaacctgtcgcatattatgtcatttcaattggatagcttcgatatcaaccattgtgtttaggaacatgccccctgacttaaataaaagtattttttgggtttttaaaaaaaagaaaaaggaaagggg

SEQ ID NO: 41785 - DNA, 623 bp, Arabidopsis thaliana landsberg
gtgtgaacaataggaattggtaatacttttaagtcacaatagttcaactataaaatccaaaacactcaaagtctcaaaccaaactgaaaattaagatcagttatctctatggaaaaacaacatttctgtagctaactaattaacgaatgcttgagaattataacccgttcattacattacgttaaccaacagacccaagacaattcatacaacaaaaactattctcttctttggtttttgtttgagagaaaaaaaatcaaacccccagtgaatacccaaacctggtaacccacaaaccaagaatatgtaagaaaaccaacgaatatcaaaagatgatctttaattccaatcaaagaaaaatcagaagaatatttgttttgttttgtgttctctcttcaaggtctatgaagatgctctatcactcgccttttctccttcggtagtcgccgaagacatgtagctcacggccagagacgtgctctcatcggtacaatgcgtctgaggaggaggaggaccaaagcagccggagcttgaaaatgttgcttgcaattgtggcaagttatttgcatcatcgttgcactaatcctcctacttgcttcttctctaaaaagatgagctttgtg

SEQ ID NO: 41786 - DNA, 633 bp, Arabidopsis thaliana landsberg
aaacaaagcgtttctgtgacgcgaaacgctatttttgagttttgacaggcggtgtggtcgctcgtacagacaaaggcgttaatacaaatcgtcctgctctgacagccgtccactctgttttcttaatcctacggctaatatactctcacgtgtctcttcccttcccacacgtgcgtgtactcgtgtgtcccgtcgaaagactttcgacagcgacttgactcgacacggatgcaaaagtcaaactaggtccacacttcgaaaaataactaaatcttaaccgttaaaatctcctcacaagacaaacatctaatctaacggtccacagacgtcggcaatatgcattaaaacgcacacgtgtgctgttgtgtaagtaagtcgtgcacatcaatacgtaccacgagtttggctagagcgacggggttgtcacttaagaatttgacagccaaggtcatcgccgttggcattgtttcctctccgggtatcatcatctctacgatctttccgctgacgaaatctgacggttgagattgcttctctgaatcaccaccgtctcttagaagtacgtccaccacgtcatttgccggagacgtcgttgtcatcgccacttgtctctcctccacaaccttttttacc

SEQ ID NO: 41787 - DNA, 473 bp, Arabidopsis thaliana landsberg
gcaggtcgatctccacatgcgtcgttgaattattatttggaactcttattctctgacccgacccgtttgtgccagaaaaattgatgcatgattttgatgcggcttcaggcctgaaccaggcttttaaatattttgggccttttgatttctactggttttcaaatgatagaaattttggaatgttttccataccatttcatatttttctatcatcagtaattaacaatataattatatatatatatatatacctctttaagcatggggcattcggacaagatttcaatttgaaaaaaatagagagatatatctacttgcattgaaattatgttatttcaaaaaataatttattaaatatttcttctttgatattcttgtattattaatttattatacatgaatgaaaaaacagaattatgtgatgtggatggaacctaatggaagaatcttctattaacacccaatttcacaag

SEQ ID NO: 41788 - DNA, 396 bp, Arabidopsis thaliana landsberg
catcaagaaatcgaaaaaaaaagaagaagaaaaaaaatcaagaaattctaaaaataaaaacctttgaagtcgggttaagaggttggatccgggtacaagtagagccggtatttccattcgccggacaactttgacagctcaatccggcgtcgcattcgctggtcgaactacatgtttctcccatctgtgagtaaaataaaagtacttctctgttacttttaaaagattcataaaagattagaagagaagtgtgtataagaagaagaacctcgagactgtgaacgaaggatgctaaacatcaagctatgatcatcagattaaggaacttgaatctctccatgtttggtgatctgttgcagcggcctggaactgagcgtagacgacggagttgaatgc

SEQ ID NO: 41789 - DNA, 179 bp, Arabidopsis thaliana landsberg
taccatggggaaagactcatcgatgaggggcgatggctctgcatggtatgctaaccaggaaaaaccaccatgaacagggacccgaaccattgtgatcctagaggtctgagcaccaaactacaggcaacaccagtgtagcattagccagtgctcacgaaaaaccatgaagagcaaaaagc

SEQ ID NO: 41790 - DNA, 583 bp, Arabidopsis thaliana landsberg
atgggactcacagtttttttttttttttttttggcaaagcatacatacagtctatgacattattttaatttgccagttgggagagattctaatcaaattaataaaacaaaaacgctgggaccttttatcaatatttctgtagtcttttattttcttagtaaattatttgcattgttacatgattacataaatcagtggttatgtaaatatcagattctactctttttctttgtcaatataaatatccaccacgtcagcaaacaattagggtttttgaagtaatacaaataggtttcgagtggggacttacccaatcttcttcaggcaaatttgttttcgtcgcaaactttcctttatggcggctcgttcgaggattcttcaatttcatcgcttctcgcttcgtcgtcgtctatcactatgcccggccaaaaagggaggtttagctcgtgagtttccgtaaattttaatagatttagcatcgaatatccgaattattcatgttttttctgggggctaggctttatctcttgaagcgttttttttggttgtaaattaacaatttcaagagaacttaatatattta

SEQ ID NO: 41791 - DNA, 778 bp, Arabidopsis thaliana landsberg
atctttaaaacaagtgtattagaatccaagcaaattctacaagcctaatgaatccgacttcaaatgaacgaaacaaagggttggttgtttatccatcagcaagcatgatccaaacgatgagttttgaacccggtaatcaaaaccagtataacacggtattgactcttgtctagctgtagaatgttcattagtgctgtaattgggagaagatgagtatctttacctgtgcaacaatggaatcttgactataaatggtacatgatttctgaaagggaacacctttgataacaagattttcggacgattctccaacaaaagagacctctgactctgtcttactgaatcttttcgatgtccgcttcaccgttagaaccaaatccttacgcttttccacatctcctttatgtaattcccacactccattctacattacaacatatgtacaaatatctttaagtgtgttcatatgatatatctcaagccagtgactaactaacaaaacccaaacaatcaaaaagtataaacatcgtgtggactatgtaatgaataatgagatttaaacaagtagcgatgagaattgccaaaatcgatgaaatttgggacgaaggaggcttacgtggagacgagagatggagaagagaggaactccggaggaatcaaggagagatttcaaggaggaagaagatttgcggaggatgaagacgagatgttcggaagaatcggcaaatccgagatcgccggaggaaagtccgggaagctttttggaagcgaagagatc

SEQ ID NO: 41792 - DNA, 846 bp, Arabidopsis thaliana landsberg
tgtagtaagtgtggttatttttaattaaactgtttgtacgcggggttgactttaaccaggtactaaacgacgagacgtttgcaatactagtgctaatggcactcttcacaacgttcataacgacgcctactgtaatggccatttacaagccggcacgtggcacccaccgcaaactaaaagacttgtcggcgagccaagactccaccaaggaagagcttcgcatcctagcctgcctccacggcccagccaatgtctcctccctcatctctctcgtcgagtccatccgaaccaccaaggtaaattacctttcttttatatttttacgttacaataatctatatttaaatttgtaaatctatgataagagttatatcagaaaattaagatatcattgaaatgctcaatgaaaatgtatccttcgtataattacacacattttgtatagttaaaattaaaaatcagctgggtaataatttataatcttggttaataatttaaaaagtcgtatttgttttggcagatactacggctaaagctgtttgtgatgcatctgatggaactaacggaacggtcttcgtcaatcataatggtgcaaagagcccgtaaaaacggacttcctttcgttcaccgttaccgtcatggtgagcgtcacagcaacgtcataggaggcttcgaagcctatcgtcaactaggccgggtcgcagtccggcccatcaccgcagtctctccattacccacaatgcacgaagacatttgccacatggcagataccaagagggtcacaatgatcattttacctttccacaaacgatggaacgctgatcatggtcatagccaccaccacca

SEQ ID NO: 41793 - DNA, 985 bp, Arabidopsis thaliana landsberg
actctgtagtatttcttaatttttgtatgttattgtttttatgtttgtatgtgctgtcaaaaaaagaagacaatagtattgaatattttgaacaagtgaagctgaagttaggaggttcttttttattcagatatagtaatattattgtatttaagtttactcattcaaatgcacgaaattaaaatgtgtgtgaatacaataaatcaaacgtgtgcgggtaataataagtggtagaaagttgcttcaacaagagatataattcaacacccactagtttgtttcttggatccctttttatctcattctccaggtgttaggcttgaaatttcttctcctttttcttttctcagtttttgggttaaataagcttaaaatttgttgtttgttttcttcccgactaatagcaaatttctaaattctttaggttagacgttagagaagtaaaaaaggttctctgattcgttgatgtaaagttgttgctatagatcattccacacccacttgttcttttatcctttctatttttttccctcactaagaagtctccttaagatattgctaaacaatatctgtcttacactcttttggtaaaagaaattatgtctttacatttgaatcacggaacgccacttaggactaaaaatctttgtccaaaaaaaagagaggaccaaatacccatccatatatgtataaactgattgagcataaaaagaaattcagctataagtttattttaaaaataccatgatatataaaaaaaactagaattagaaaataaacaaaagatgtatatatccaattacttttaaaaaattatatcattttaaatttgttaattgtacaccaagaaaggacattcttgcccggtaagaagaaaaacttaacttgcttcttacggtttattttctcgtatattaaggattaaaaagatgaagattcccgtggattttgcttaataccagccaaagaatatgtatcaagaaaa

SEQ ID NO: 41794 - DNA, 691 bp, Arabidopsis thaliana landsberg
cagataatgcattgatgattgatatgataggttattttggtggatctaaacagttttgctactctcgtcctcttgtaatacagacaaatgtgatttagtgatcattacatatgtatttttacgtcagttggtttgatttctctgtgcggtttttcaccaaactctatttttgaagtaaaaattaaaaagttataagtcaagatgatgtaacgtacgagaaaaatagaatacctagcttctaacggtgtgctagaataaactaaatattttattagtcaaaaattggtttttatatgctttagggaactaatcaaaatccataattttctaagaggcgtgactttaaaaatctgtaaaaaagcaattcggaggaaagagagagagagaaggtgattttgaaatttcagataacgcataatttttttattctcgccggagttttctcctcccaccgtctctgcttctcgtcggcgccgtacacagttgttgttctctgccggtaactttaccttcttcgatctttgaatcggtcttctttgtgctggtttcgtttttatacgaagatttgagtatttggtgctaatcattcatctacctcgatcgttaaccctagttttcgcttattgataatcggtccagtttttaagtggtcaaatttcgttttccttacttgattttcctggaacaattt

SEQ ID NO: 41795 - DNA, 531 bp, Arabidopsis thaliana landsberg
  unsure (1)..(531): unsure at all n locations
ccggagcagctgcagcggctgactttctgctctgcagtacctcgaatacctggatgaggcatgtccatgcttcacatgcaacactgccaaccctggaagcaagcccacattgagtcatgacttgccgctctagcagcagaccagtaagcgccgaccgatactccatcatgttccgtgccctgtgcgcagatgtacgccaaggtgatcaacgacgaccagctgaccaagaaggtcnnnnnnnnnnnnnnnnnnnngctgcgctacgtcctggggagcaccggccagagctttgtggtgggctacaaccagcacccgccccagcaggctcaccacaggtgcataatggcgatcagtgctcagcgttcgcgaaagtttggcatgtgtggtcgagcgaaagcgcgaatcatggcgtctcatgtagcgacgctgtcgccaacacagcagctgctttacaaggattgcaggcaatggactggaaggacgcgccatgccatgtgttccgtcagcctgcttttgcagcagagcagacca

SEQ ID NO: 41796 - DNA, 443 bp, Arabidopsis thaliana landsberg
aaactttggctccgtcaaggattagcagaaaattatcaaggactatttgcttatgaatgataaaaatatcactcgatgattgtgtctctggaacttcaccacccgtgtgtcaaatacttaaacatcatcacttatataaaaacagaagactatataaacttaagacatcatttatatttgtatgctaaagtttgtccatagtgcattaattggtaggctctttccttaaaccaaaagcaatctgcaatacccctgattatttattggtacttgatacgtgctttcacgtgatttcgaattgtaaaattttgaaattcgatctttttaagtgaattcgaattgaaatccttaattctattccttgcttcatttctttttttaagattggtattccttcttgtaacactagaagggtatacatatgcatgttaattgctataccc

SEQ ID NO: 41797 - DNA, 196 bp, Arabidopsis thaliana landsberg
ttcagatatgggtaatagctcgcgtgggatgtgttagattttttcatttggactactgaaattcaaatactacaatgcacatactcgagagtatgtaaaaaagatatgtttgaatatctgattggtatggaaaattatctagatacatgcacctatgtatgccttaaaaaagaatcgatagaaaaaacagttccat

SEQ ID NO: 41798 - DNA, 782 bp, Arabidopsis thaliana landsberg
cctcttcactgccgtctccatcttcctcagctacaaaggctgcacctttagggccgttcttgggtttacaggcttcaataccacttttggcagacccctgcttctgacccttttgattaacgttcttgatgacgtcgttagtcttgggcttttgaggctggttttggtttgggttaggagaccaaagctcggcgtgtttcccggctttaacaagcttgttgatgagtgtggctgagtcaactgaccctgaaacagtcaccttttgatgttctgcttctatcttcacgtggcaaactcctgttttggtcaaaacatgacaatgtatctatcgagaatccaaaatgagtaaagcagaaatgtattgcatgtgtgaaatttagaaaccttcgatcctctgaagaagtttcttgactttcttgttacagccctcgcagtgaatgttgactctgagtgaaaacgtctgtgttttgcaatagtcataaccattaacacaatgagagactattgcaaaaagataaaaaaaaagtggagaaagtcttaaaactacctggatctttaggagcttaaagtcttcatctttagtcatggcttaagaagaaagaataagagaaatgagtacacgcgttttagatattgtttggagtttagataactttgcaagcttggtaaaggaaactcgccttttgaagaataggcaattaagtggagaggctttgggtttagagacttttgctctgaaatttgaaacgatgttgagtgagtgagtgaagactgacactaaa

SEQ ID NO: 41799 - DNA, 487 bp, Arabidopsis thaliana landsberg
tgataataaggaaacaaattaaagaagaaccaattttagtatttgtcaccatttgtcaaacctagttcatgcctggctgattccactattgggaagaagatagacagtatactatttaaaactcattaatactacattaaaaattgacaaaaagaaaaaacccctactaaataatagtataactacgtaaatcgagtatttgtgttgagtcatcagaattacaacatttaattacttgcaaggacatgcacatacctctttatttaagagctttaaaataaatgaattgattaatacaaaaaacggccattataataactccctgaaatcatatatacttcttcgccgatattcattcattgtgtgtagcttaacgaacgaaatatatttgggtaattcactatattactattttcattataccgttaattgattataactagtcaccgcgttagattcaaagaacctaaataaacaaatctatttc

SEQ ID NO: 41800 - DNA, 584 bp, Arabidopsis thaliana landsberg
gttgaggcatgaacgcagaacacgacgaactactggcgaagacttcggcgcgatgaacgacgacggcgatgctcgacgatgggcatgagcagagcgtggacgacgctggcaagctcctggtggggacgttcaggtgggccccaggcgcgcacagggcacatggacagcggcgaggcaactgcgaggaggagttcgtcgacacctcagcttctgggtgcacggggcacgcgggctcgctggctggccgaccagctgccgcgccgcactgccacgtagcgctgctagggctggccgggcgagcaggggctgctgcttgcaggcgattctgcgcaaagcccagaaaatggggggggcgaggagcgtgcatcatgggggagcagggggagaatatgggaaagagagatatggctgggtgggtccacagcggcgatggcgttgggcaactgccacgcgcgcacaggcacggcagggcggatggcgacgcgggcgaggctgctgcgccactggtggccgcggggacgtgggctcggaagcacggtagctggctaactgagtggccacgcgcaagaggggagaagggagga

SEQ ID NO: 41801 - DNA, 987 bp, Arabidopsis thaliana landsberg
aaacataaaaaatcaaattatttttcataccaccgataattaataacttaaaacgtgagctataacacacttttaacgttctgttaattaatagtacaactacaatttgtatcaacataggtatgtctaacttgttacgttgaaaaaaaaaaaaagagttgtttgttaagaaaatgaaagttcaacaaactataatataaaaacagattatctagcaaattatccctaaaagtattggctaaatcgtctgcattggtccggtttttcctgcaccgattatatcgcctatcttacacatatttcatagcttattttattttgttagttaaatatttcacatcttattttgtcctaccagtaccatctaaatcattagttgataaaaaaataattataaatgtacagtccccacttgacttttctcaaattatgaagctgctcgtacgtatatactgtgattagtttattgttttgtttgtatatgctaaatcttttcttgaagatctcaaacttcgatctaaacgataagatcttactctggctggtcttagctttacatcttttcatattcttatgtgacatcgaagttacaaacatgaacctatctatttggacttaagaagtcaccagtcaatataccacatgcatgtttcttttttcgtttaccatagacaaaaatatggtttaagtattcacaaagattacgatctaagaagaacgatccacttcgttaaattctgaagatctttatgttggttgaaacttgaaagtacttagccactgaatagaacttatgaagatttcaaagcaaaaattccaaacaagtatttttattttcaaatcaactgaaattatatattgagatagaaagacttattattaattggacgatcaataaaacttgtaacatatataattttaacttgacattattattgagtaataaaattatatttctcatagtttttgactttctgtctatttgag

SEQ ID NO: 41802 - DNA, 486 bp, Arabidopsis thaliana landsberg
tcatctggcctttcatcaggcggttttgcatatattaactggaagcactagcgatttaatcagaattgctcaagagtgagccttagatacacttaagatatggtctatacatgctcatgattgccatatgtctaagagcgtatattacttaagttcaggtctctaaccatattctaataactgttttgcattctgtccagataaggaactcaaaaagttacctttgtcaccatcaacatgactgatccacaatgtagataagaagacaagcccccatatgagaaaaaccaaagacaatgaaactttgtagaagcgattccttccattagaagtagtctcagagactcttcttctaaccagaagagctctccgtgatctttgcatttcacatccaaccaataagatcagatcaccaaacaaaaacttaatatactggtcacacctgttcataacgacacacatcagattcacaactaaaagcaaaat

SEQ ID NO: 41803 - DNA, 776 bp, Arabidopsis thaliana landsberg
gaaagaagagaaggctaaagccaaagccatgaagaagatgactgaaatggactctgaatcatcttcttcgtctgaatcaagtgatagtgattgtgataaaggcaaagttgtggacatgagctctttaagaaacaaggctaaaccggttcttgagccgttacaaccagaagccacagtagcaacccttcctaggatccaagaggatgcaatttcttgcaagaacaccagtgaagcattgcagattgctctacaaacatccacaatttttccttcaatggccaatcctggacagacattgaagacggtagaagcggtttcagtggttggattaccattgaatagagtagaagtgtgtatgggagggaagtgtaagaaatcaggaggagctttgttgttggatgagtttcaaagggcgatgacgggtttcgaaggatctgctgtggcttgcaagtgcatggggaagtgtcgtgatggcccaaacgttagagttgtgaaggagactgatgctgtgatgactgattcagttaggacaccatccaagaccctttgtgtaggagttggattgcaggatgtggaaactattgtgacaagtttctttgatgaagaatgtagcaaagaaggactcggttctttctcatattgaaagtgttttgaaacggctaatgttttatatagtgtggtgctttctcattgtacatatttaccttctcgataagtcattgatataagccatgtaattgcgataagacctgtaaagatcaacttaagcaaaaaca

SEQ ID NO: 41804 - DNA, 693 bp, Arabidopsis thaliana landsberg
caaaaacaaaaacaaaatatgaaagagtgttatggtggggacgttaattgactcaattacgttcatacattatacacacctactcccatcacaatgaaacgctttactccaaaaaaaaaaaaaaaaccactcttcaaaaaatctcgtagtctcaccaaccgcgaaatgcaactatcgtcagccaccagccacgaccacttttaccaccgtgacgttgacgaaaaccaaagaaattcaccaccgtgttaaaatcaaattaaaaataactctctttttgcgacttaaaccaaatccacgaattataatctccaccactaaaatccatcactcactctccatctaacggtcatcattaattctcaaccaactccttctttctcactaattttcattttttctataatctttatatggaagaataaaagaaactagctatctctatacgcttacctaccaccaaacactaccaccttatttcaaccacccttcattcatctaattctcgtcaggaacagatacacttccttaaccaactatattacgaatatgctcctatcttctttcattctcttagagatcctgtaatctcctctcagttaatcttctattgtaaaactaagctcggaagtctatatggacactaacggggcacatgagagcaacggagcatgtagttgacgctatgtcttgcgg

SEQ ID NO: 41805 - DNA, 1806 bp, Arabidopsis thaliana landsberg
atatgaagagttaaacattacaaaggcattctatgtaaatggtacaatcaaaccaacttggatcgatcaatcatcctctttcattcttctgcgtccaaaaaattggtagtaacgggcagagagcttctgatgataaaaacaacgagcatgcccgagaagatgctataagtataatgggaacgacgaggaacgtgtttttactcagaccgttccctattccggccattcttctggttgttgtacagcggaagaagccagcgagccccgtgtttcctctttccataacaccgccaatatagcacacaaagtgcaattatgcagactataggaatcgcccatctatttaccaaaaacacaaacaaatttaggtgagcaaagagattgagagaagtttgctcaagacttgtttctgttacctgtccaagtcgagaataggactatacacgacattttcccatgtcccaacgatgaaatgccagactgggttgtaataaagagcttctgctgtccagaacatccttgtgtatgtctccaagaatatgaaaagtatccacgccgccatttctaataaaatgaattttatgataaaccggcccacaaccaccattacaagagagaacccaaccagccagttgaacagtcggttattgtattctttgatgaacaaagaccgtgactttcccatcatctgcacacaagttctcatatcaaattacagttcaatacttatcacataacatagacatgtatatattaccttagttaatctttgctcataattttgttttgaaggaccaacacattgctgctcaaacgttttgttgcagtacacaaaacctgcattaaatttagccatggaagggagtcggagagcctgtaagtggtccatgtcatcttcacaacttgtatatagcgcctcacagagcttcgacgattggtattcatttgcaagaacaaaattcttatatacctggacaatatttcaagtgcacaagaatgaataagaaagtaattttggaaatcttatttttccgtagactaccaaatttgccaacacgaaattcagaatcatccctttgtttcatccactaagccacacttaatagaaattctatattagcataggaattcatacctcctgcatttgttcatccaactgatcgacagatttctttgcatgttgtctgccaaaatgttgtgcatcaaatgctttgatagcttcattatgcgccatttcatgggcactttggagagattcttcggacataggtagtcgcactcttaccatcttctcattgtacagcttcacacatctctcaacaatatctttattgaaaacctcaactagtgatcctgttgatgggatctctcctttatttaacgcatccaatatctagcaatcagaattggaatatatcaacataccatttcgtaagcatataaggcatattatagaaatcatataagccaatagtgttacatatcaacaacgtgtacttatgctcatcagatttctagtaacaaatacatcacttataaaaacacgcactcataaattgatacgtaatgggataccaccatagcaccaaagggtatgaaactataagtatcaaggaaaacatgaatcaaaatgaccacattaaaaaaacgtctctgccattgtttatacaaattttaagaacaagctaactggataacttaaagtagcaaggaaacacagccatccatgagaagagaaaacatgtctatttacttgataaagtatgtaagagcaccagagaaagcagccacttattccttttgatc

SEQ ID NO: 41806 - DNA, 549 bp, Arabidopsis thaliana landsberg
  unsure (1)..(549): unsure at all n locations
tatttccttgcttcacacggcattacacatgctatgcaactaccctaggctaagttcttgcccctacaatttctactccgactatgcggggaatctcttgggagccaagcaaccgacctatttaggcctaatgctgaccccggtttcggtcacaggagttctaatgatcatcttcatgggtatctcattcacccttgctatgcattacttcagaagaaacatagtgaaattgcctataccatttaaccgtcttgctggatttaattcgttttggtatgctcatcatttgctggttattgcctacgctcttcttatcatccatggttacattcttatcatcgagaaaccttggtaccaaaagacggtaagtgtatacatatacatactaaaatgaacatatgttaggagatagagcgaagtaattatgaattaatctttagtctttttacaattattttgttggtattgaaaaatgtagacgtggatgtacgtggccataccaatggtgttgtacgcgacgagaggctttcncacgagtcaagacacaac

SEQ ID NO: 41807 - DNA, 139 bp, Arabidopsis thaliana landsberg
atgtaaactctatttgtatatagtttgatcgttttgcatgcattctggcaaacgcgacattgaacaaacattacccgggaggaacagcctatcacgctataaatagcgatcacatcagcgagatcctctttgggacaca

SEQ ID NO: 41808 - DNA, 105 bp, Arabidopsis thaliana landsberg
aaaccagcagtcttaagttaagatcaaagagtcgggcggaaaaaggggagagctccccgttcctggttctcctgtagctggattccccggaaccacaagaatccc

SEQ ID NO: 41809 - DNA, 699 bp, Arabidopsis thaliana landsberg
tctagaggagtacctgtgtccttccaataaaaagcgtctgtgcctcatgtaaactatcttcctagatgcagcaagggatacgtaagcagttccatcaatgcatactgtgcaaccaacctttcccttaaactggcctgataatgtgaagagagcagggtaatcgttgatcgtaacaaaaagaattgctctcagcgtgaatgaacctttacgatactcatccaacatttgaacacctgtttcccacaatattttcatatcctccattaagggctccaaaaatacatccatgtcaactccaggttgtgtaggtccagaaataaggatggttagcaaaatgtacttccgtgtctgcatcaaccatggaggaaggttgtatatggtgaggatcactggccatgtgctatgcttgctgctcctttcagcaaatggattcattccatcagtactcagtgcgaacctaacatttcttggttcatcggcaaagtctcggtggttctcattgaaatcttgccactacttcccatcggctggatgtcgaagcttcccatcgtttttatgctcatcagaagcatgccagctcataagtttgtcatccttagggttagcgaacaaacacctcaatcgatcgacgacggggaggtaccacatcaccaaagcaggaatctttttgagcgcataatagtctacttcttctttttc

SEQ ID NO: 41810 - DNA, 564 bp, Arabidopsis thaliana landsberg
  unsure (1)..(564): unsure at all n locations
tacttcttattattctgttttcagccaaatgggtgtatcctcttccgtgactatgctgtcggtgatcttgctcaggtttgatccaccttttattacttcagaaattcaaagttatcgctactcgtatgcccattttgatgcacttgaaacgaaaaaatatttctactacagtttcatgcttaaaaaaaaacattgtggtctggctttccttttaggaagaacaaccacttcttaagagatttagtatcctttagaatacgaaggcgnnnnnnnnnnnnnnnnnnnnnnnnnnnnnnnnnnnnnnagaggttctctgggaaggatcagaggatcagcgagaacttttatgtgagaggtgatggcactgtaagttctttctttctcctgcgctatttatttgcagtacacatttctataattttgcagatctgtgatgattttgttttctatgcagcgtgcattctacttttctaatgaattcctagaaactttgttttctgaacaaggatttgaagttgaggagcttgatgtttgctgcaaacaagttgagaatcgttcacgcga

SEQ ID NO: 41811 - DNA, 803 bp, Arabidopsis thaliana landsberg
caatctttatttattattaacctgaggaggtttttgtatatgtggtttatgtttgtttgttttgtgtggattaaaaaaaagagttggctactttgtagaaactatgagaagaaatcagattctctttaaaccccaaaaaaagtaagaaaagaaaagaagagatcagactcttcttctctttttctattttgtgtcagaggtcgaatctgttcttctgctccctttttcgttgtttctttcagtaataagatcttataaacgtcaaatccattagtatatacaatttttattaaaaaaagagaaactatggaagaagcagaggatttagtgatgttgatatctgaaaaacaggtaactatgatgaagttgaaggtggatcttgattgtgccaagtgttacaagaaagtgaagaaggttctttgcaagttccctcgtgagttacttctctctttttcttaacttttttttggtgaatttgattttgattggttttgtttggaaatggactgagtggatttacttgtgtgattgggaacaagagaaataagagaccaattgttcgatgagaagtccaacattgtcatcatcaaggtggtttgctgcagtcctgagaggatcatggacaaactctgttccaaaggcggcggctcgataaagaccatcgagatcgtcgagccacccaagcctcctcagccacaaccccaacaaccacctcaaaaacctaaagatgaacagccaaaagctcctaaaaagcctaaggaacctgaaaagccaaaacagcctgaaaagcctaaaaagccaga

SEQ ID NO: 41812 - DNA, 622 bp, Arabidopsis thaliana landsberg
tgctgagaacaggggagtcttgagagttaccttacggccgattaaatcaaatgtcataaccactttgctcttttttactcgttcagcttcttcaatctcctctcgcttcttcctcactagctctttttcctgagaacagaatccaatatattaagtcaatggcaaaacaaaaaccaaatgtagtttagcaatggagattctatatacctccgcagagagccaagtactgctctcagattcatagtaatcgctttggtcatcaataaccgttgtacgtgcggccgaatttctatcatactctacaagccttttcgcatatgcttcagctgccacatcagcatcagatactggagtataccctacctctagcccagcatatgtacttccttctttcagcacaagtgctccgcaaaaactgcaaggcccttctccttcttgttcgcacactattttcccacacgacaagcagttgctcactaagtggtgtctacgagcttggcatgcacacggttttccttgctgaaacactattgatcctttagctgcttcggcaagagaaataacctttccaccttttttcttcttaggattaacttgctgggcgggagctgtaaattcccag

SEQ ID NO: 41813 - DNA, 255 bp, Arabidopsis thaliana landsberg
  unsure (1)..(255): unsure at all n locations
ctaatcatatttggtatacaacattttctaagaaaaggccacaaattttaatcttataaaatgttttaaaaattcaggaagtaatactaaatgattgaaacatttcttataatttaagaagagttcttaaaaatttagggatactttatttcttaaacttttaggaacccttcgtgaacataaatgtttttttttttngtagtttggaaactatccaaagtttggcatatgaggactgtcccaatgcgtcttctg

SEQ ID NO: 41814 - DNA, 846 bp, Arabidopsis thaliana landsberg
ttttaaagccagggtcccataactttataaaataagaaaaatccatttttcctatatagagatgatatcgcgcttgcggctctttccccgatttatcgttgattccttttctttttttcgcctatgccaactgagctaactaacttgctgttttttacttgtttggtatctagaaatgccaattcagtgaaacataccagaatatcgtactagatagagactgggctcgtcctgtatcaagtactatctgcctttccatggccttgagcggacctttactcagctcctgctagaagggcttacgacgaataagattgttggaatggctttaagtgtgccgggcttgcccctattccagtactatatagatagcctcgcctcgatggatcgttgattcctcaatcatggcatgcacaatacgccagagaacctaaatcatcacatcattgtaatacgcattttcttgtaagttaagggaataggccctgccctggaaatccatctcgatcgaaagcaagtgagcttgtcggttgagtcgtcatagatagtggtttcctcaagtcaagcaagccctagaaactcgatcccacaggggaggggatattcatttgagttgccggtgccgatctacgctttccaggtagtgagcctgcttcatgactcgatctatatttgatttgccgaagatagtggtctccttttgaagaagtcgatttttctcttgcttttccaccgggccggtgctcccctctgttaggaaagctggaaaggtctctggtttgtgagtgacaaaggtttcattcatcttactgccgtttattggatcgagaatagaaacgattgctt

SEQ ID NO: 41815 - DNA, 487 bp, Arabidopsis thaliana landsberg
aaataatcaaaacaagatctgagatagtatcttgaactacagacaacgcagcaaattacttgtacaactacttggtgaaaatagaatcagtaagatgaaaaaccaaaagactagcaaaattaatcattatacagaagacagtcatgaaaaataacaaagagaaaacatgtcactgaatgagaatgagacctggaagctcggtactagaagcaagccttgcgtggtaatcggaaggtccgttctttagcaatccggacacaatatatacaacttccaaacccttcccatgtttctctacaaaatccttgagcaacctaataacaaacgagacacggttattagacaaaaaaccaaatctgtcatttgtagctaaactctaatgagctcctaatagagaatggaacaatgtacctcttggcagtatttgatgaagcgagaaatttcaactcagccatttggtaggatccctggaaccaaatgggattga

SEQ ID NO: 41816 - DNA, 879 bp, Arabidopsis thaliana landsberg
cttgtacccagcgattcttttttttctcttcgtttccgcatcgattaatctccatggagtagcagttgtacgtgttttcgatgtaaaccctggtggaggcggaatatacggttgaaactttggtgagtcgggtcgagttgagtagacttgggttgttccaccaacgccgtaacctttaccattaactatatccatccattgatcaacggcgagtgttcttggatgcgacccgaacccgtccattttccggagcttcgtccgaataggaaagaagcaccggttaaaggaacgaaatcaaatgattcttgatttgggaatgtgagactaataaggaaagaggtgagaggtcatgcgatcaatgaggcgctttttcgtttttttgaatgaaggttaatttaagtaaataaaaaatagattagtaaggaattattttctgtaatgatgacaaccaaagttccatcatccatgttgttaatattttcgaaattttactgtatttttagatatatattaagatttcatagtttatgctttttgtatttaagagtgtaaatttaagggacataaaaaagattgtttgtacatgcctggagatgagagatgcaattgggttatgtatccttagaatattcggcccaacttttagatagtgtattaggctcatagtaagaacaacatctggttgatttatgattccaaaacaaaacgaaacttctgtctggtttaggcccatctagtttctgagcacaccacatcacattggtttgtgacatatgcatgtgacaattttgattaattagttgcagaaatgcgtttgatgtaacaaaagacagtattgccgcatttccgcgagcggtgtgtagggaatatatcgatttg

SEQ ID NO: 41817 - DNA, 1157 bp, Arabidopsis thaliana landsberg
  unsure (1)..(1157): unsure at all n locations
aaggttcctgcttttgttttagaatggcatgaactaggtagagtccagagtcgttacagaaaatacgaggtcgtgtcagtgcttttaccaaacctttaacagtttttgactggatgcttgaaatggctcgagcagggttcacaaaaataaatataacctcgggcaatcaagtaataggcgaaactaaagtggaatagaaaacgatgaaaagatcaacttaaatggactattttgagctttaattaaaagcagatgacaaaaaaaaaaatggagacctattttcattggtcacattaaatttagtctaagaacaatatgcttgatataaataaataaaatcaaatattcaaccgtcctcatgtactttttttttttggcattaatttatttgcttaatttaatcatcatctcgatgactcaaatactagaagaaattgaaagttccagggtattttttagtatctactttgatcagatgtgatccaattatattatttatcattttttttttgtaacaaagaagaaaagtaagacggttaatagatattaactcaaatattttcagtttaaagttttaagcgttagttcatatattttaaaatacaaataattgaaaaacgaacactgactattaaatgaaagcaaatattcacgaggatactggttagtggctacattcaccaaaataaagtacaaacaagtacttggaagcttctctgcgactataaggctaaaggcaaacaattcgaacacttcttctctgtgtgccgccacgtagttggcaaagttcagtggagtcatattgctctgcaatcaaacaacgcgatcccacttatgatcaaataaagatattcagagatgtttgaataataatgaaaaacatatgaaacaaacctccaagaagtcaattgggtaaaattcagagccgatgtgtggatcaacggccgcctaacaataagtcatacgaccnggttcgccatgtaagaatgtcctatgcaattaaaccattaaggtcctctaaccttcctgtaaaacgcagattaatatattatataaaaataatggttaaaatttatataacattttttacttaatccatcgccctttggaagccaaaaaggagaaaaaataaaatataatttttaaatataggtcta

SEQ ID NO: 41818 - DNA, 633 bp, Arabidopsis thaliana landsberg
ccgcttttctcctcctcctctcttccatcgccgccggcttcctcctcctactccgccgtacacgttaccgtcggatgggtcttcctccgggaagccttggtctccctctgataggagagacttttcagctgatcggagcttacaaaacagagaaccctgagcctttcatcgacgagagagtagcccggtacggttcggttttcatgacgcatctttttggtgaaccgacgattttctcagctgacccggaaacgaaccggtttgttcttcagaacgaagggaagctttttgagtgttcttatcctgcttccatttgtaaccttttggggaaacactctctgcttcttatgaaaggttctttgcataaacgtatgcactctctcaccatgagctttgctaattcttcaatcattaaagaccatctcatgcttgatattgaccggttagtccggtttaatcttgattcttggtcttctcgtgttccctcatggaagaagcaaaaaggtaccacaaaaattcttgcttacacaaacattatattattattttattcggccttctcacttatgttttttttataataaaaatgaaataagaacccggaccgagtttgtgctcagtgagtcaggcgag

SEQ ID NO: 41819 - DNA, 1317 bp, Arabidopsis thaliana landsberg
aacgcctgcatgttcttcgatacaattatgggtcaataatatacgtttattttaccaaaacgtctgtacagtgtacacagagcgccgaaaagcccattaaattttttttttaaaggttataaccaaaccaagatccaagaaaatagtgtaagatcagtaatttaaacttaatcaggcattttacatagttagaacattctgagcaaataagtctacactagttaaatgttaatccacaactaacaaaaaataaatccattaataaactatgactaagacggactaaaatcgaataaactagcgataaattaacaccaataattaaagtgattaaggaagaatactagttagcaaaccattcgttccaataattcacaagacaagtgtcttctagctagagtccacaccttccaactaagcttttgccaaaaaaaacttatcttaatttactttctcttatccaaagttctttgtttaccattaaaaaaaaagaaccattctttcaccaagttcttgtaaaacaaaacaaaagaaaacatgaacacaaacgatcatggccttctcttcttgaccttaatctttgtcttttctcttctttacttcccctacctagtcatatccgagaccccatgcccgtacccgtgttatccaacgccgcctattggcggtggctcctccacaccctccatgactcaaccaccaccatatcctcctccaggcgttaactaccctactccagctgggaatttaccaaattaccctcctccggttgggaatatacctaactacccttctccaccgtatggtggcggagacggtagtggcagcagcttctatggccctccaccgccgaatgctatcttgccgtacttcccttactactttagaaaacctcctcaccaaacggatcaaacgtcatcgtcttcacacgtggcggttccagggaaatggacggtgaggatcgtagccgtggcaaatcttgtggttgttggagttctcggtaacattctgtttataacttaataaatacgtaactcttgtgggagttttttttgtgtgttatgtatgtaagagatattgtaatactttagaatatactgaagcggaactgtagcagaaaaaattgttgatttacttaagaacattattcgaagtatttcttgtactatttagatatttactcattatattgacacggtaagacatatatatgcatttgaaacgttacatcacataattatttgtcgcgatccatgaattaggataagcacgagcaacgtcaataacgtcacttttcgtgggtgagttcatggatag

SEQ ID NO: 41820 - DNA, 487 bp, Arabidopsis thaliana landsberg
gatgatctccccgagctgctgaaggcagcgctcgcactcctgatgtggggcgtttcttgtgcacatcatcagcacgcacaacggcaccgaaaacccgtttaacgagctgatccaggaagtccgcgccggcaagaagccgtattcgctgcaccgggtcactttcgacgaggccgtcgagcaagggctttatcggcgcatctgcttgcgcaaaaaagtcgaatggaccgcagagggtgatgccgcctggtccgccgagatgcgccgcttctatggcgacaacgcgagcgaggagctggactgcataccgtcgcgcggcggcggcatctggctgccgcgcacgctgatcgaagcgcggatgtcgaaggacttgccggtggttcgctggcgtgcgccggacggcatggatttgtggcccgatcacatgatcgaggccgaagtactgcagttctgccagaccgaactgctgccgttgctgatgcagctcgat

SEQ ID NO: 41821 - DNA, 973 bp, Arabidopsis thaliana landsberg
  unsure (1)..(973): unsure at all n locations
gatccaaaagttgatatttaggagtccaaaagcctgtaagtactcaaacaattttaaccattggacaaaaggaatatttattattaaatggattaatgctcctgtctaagggtttcggtctgagggtttcaaacacaatcagagtgaattggattataattcaccaatgtattttacatatgattgccaaaaaaaactactaaccttttctagaaagaacacttatctattaaattgtatatcacacaatgtagtagtatctaataatcattaacattaactttttcataatggaaaaaaatccagaaaaatagtagttggcctgtaatacctgtaaattaactaaattacaaagaaaaaaagtaaagacaaaaaacaaatgattaataaataaaaaggaaaataattgtccaaaaataattaattacccaaaaggccccatgtgaacaaagattttaattggcccattctctcattctctctttaactctataaaacacagagcaaagaaaaaacagaggaggttgattctctttggcatctccgaatcgaatctgagaagagaagaggaagaaaaacgaagatcgatgttcgagagggaattagatgcatgaagttggattatttgtggatctgaattccttcacgcagcttatattgacgctcttctttgtctctatcggtcttctctactttgttaaaagaacggcagccaagtacttcgaggtcggtggtggctccggtggtttcgatnnnnnnnnnnnnnnnnnnnncatggtttctgacacgggtgaatgttctgtctgtggggaggctactacaaaaagtgctctcgctgcaaatctgtgagatactggtatgttgaaaagattcaagtttgctccttattagggttttaagatctgatttggacgtagctggagatagaagagtgaacagttttgcttgtgaaagtttgatttttagattttag

SEQ ID NO: 41822 - DNA, 234 bp, Arabidopsis thaliana landsberg
  unsure (1)..(234): unsure at all n locations
tagatataactgaaattcatagttgcaaaaggggaagtggagaactggagttcgtgggtgaacggtctaataaaggttggctggtttgacattattggtccatcatgcaacaataatatattaagagtttnnnnnnnnnnnnnnnnnnnnnnnnnnnnnnnnnnnnnnnnnnnnnnnnnnnnnnnnnnnnnnnnnnnnnnnnnnnnnnnnnnnnnnnnnnnnnnnnnatcacgt

SEQ ID NO: 41823 - DNA, 2367 bp, Arabidopsis thaliana landsberg
tcaaaaaatccaaactttaaccatttctttatgttaatttcagtttttcttatctgggtttagttaaattcttgttcttgcgttaaatcttgatttacaagttctaatttatgcatcaaaactgtgttcatgtgattttaaaaatacattttttgtgtatctttatatgataatactacggctcacgtactgtgtgtgactctcctacatttagcatttaatgtcctctcaacaaattaccttaaaatgagggcacacaaatttcttctttttttttgttttcttcctgtgaaaccaatcactaatttggaatctgcaactaattctctgagtatcaatggactcaagagttttagttaagtgagtaatgaagtaaaatgtctccatcatcatttattgcctttttttgttcttatacttgttctctgactttctcccatatttctctgtaaatcaaacaaaattttgccctctctaggaagataagaggcttaatttggatttttgttggatactattcacttcccttttgttcttacttgttatgtgacttatgaaaatgatcttaaatgattggagacacagagccctttgtgtagttgatatttaatttccttcctgtcttgtaataactgttgcctttattctttcactaacagtaacaagccttaaagttttttgctttttttttttttcttgtagtaacttatgtttgtgttgtttgtattttgactgcagcaaatcatatgtgcttattctggaacgttaagaaagcttttggggaaatcaactagttccagtggaaatctcaaggtgatcttcaatgatttccccggtggagctgagagtttcgagtttgtatcgaggttttgctacaatgacggtcgagtagctgtgatgccttcgaatgtagttttcttgcattgtgctgctaagtttatggaagtcactaaagtcttggaacaaacagagaagtgtatggaagagattaggtattgggcttggccagaggttcttctttgtctaaaacagtgtcaagaagttgaaacatcgcccgaagttgattctttagccgcgaaactgatggatgcgttggtggagaaactgtgtttaaccattgaaatgagtccttctagtgctggttctgcttgttcaccagatagcagcttgtttcggttttcttgtgatagtaaaagcacagagagtttcaagaattgctctgttcggttaacttggtggttcgatgaagttcttgttctgagttctggtttggttgaaatgttcttgaagcttatggtattgcggaaatttgataatctcatcataagtaggttcttgttctattatcagaaggtcaagttttgctctgcgtcttctcatgagaaaagaaagattcttgaaaccatcattgatactctttgcgtcttagatcgaagttgtgtcccttgcaagagcctttttgcggttttgaggcttgctcttggattgaacataaacaaaagctgtatgaacaagctggaggttatgataggtcaccaactggatcaagcaacactagacaatcttcttgttccatctccatcgaaatcgagtcacttgtactatgtgaatcttgttcttagattcacaaaagctttcctagatggggcaagaagtggattgcaattgaagaaagtctcaagtttgattgatcaatacatagctgaagtagcacctgatccttgcttgaaaccttcaaagtttctttctctcatcacacttgttccagattcagccagagaatcccacgaagatatataccgtgctattgatatgtatctcgaggtacgtttcaacactcatctcaagttcaaaatgtaaaaaagaatgtttcgatctttatcacactaataacagtttaatggctcgttcaggctcacacaggaacaactgatggcgaaaaactcaacttgatacgaactttaagttacgagaagctttcaggagaatcaagagctcacatttcgcgtaaccaaaagtttcaggctattgagacactagatgaacaacaacaacaacaacaacaacaacaacaacaacaacagaagcagctcatactcagaatggagaaggttgagtcttcaggagaaaacgagaagctgaaggaacatatcgaagggattcaatggagggtaatggaattggagagagcttgtttgaaaatgcagaatcaaatggaagttatcaagaagagatccaagagctcgagcaaaggaagtaatagatcacttcctaagctctgttcttgattagtgaagctgtaatcttacgatcatatttgatcatatagagatagttagcataatgagatcaattatatttaccatt

SEQ ID NO: 41824 - DNA, 848 bp, Arabidopsis thaliana landsberg
aatttgaacagaagtgattatgcaaaagtataaaagcatatggttatttttctacatatttgattctttaaagtaatatactattaaattcgactatccaaaaatcgacacatgtcggcgacctaaaagcctcgaacatcccgctggtctatgagaacattacctgatgtgtcaaaacgtccccacacggtgtgcttcattgcggcaataactaagaaaaagctccaaaagcaaacttaattagacaactaatcttttgattactaaagcgattcgtttggtcctccttctaatgatttttataaaacctggtagttaggctgttaggtgtcgcgaaattcttataatttattataaaccttaatggagtcggttatcaaattatttgtatccatgctttataatagtgtatgggtttgtagaatgaataaaagattcgaaaatgtatgggttttataatagtgttttgggtttttaaaacagtgttatacttctacatatcttttatgaaatcataaatctgctgacttaattgtttagtgctgctccttgccaaagtttctgcccgtgaaatgataatgctagtgctatagaatttgataaatgtttagtaatatacattagaaagtagatattattattagggtaaaactaggctaataggcattaatcattcaggttattatacgtggatgttgaactcacaaaatgtttacctaaagatcgttggcatcaatatgtttcgaaagattgcgagcttgcgcatcttaccacctaatgaaaagctggttgatgtacatcacacaaatttttccaaaacagtacatgaacaatcatcacccgaatca

SEQ ID NO: 41825 - DNA, 602 bp, Arabidopsis thaliana landsberg
  unsure (1)..(602): unsure at all n locations
attcggctgaggtaagtaaactgagatctttttatttcatagcgctgtttgtatccctaccacgtgtttttattgttgtttctcctcccctgaaatttcttcttcttagaatgcagataaaatccacatatctgttctgcttaatagatctgaaaaacttccaacctctggtgcccctgttgtagaatattttccaggtaaacacttgaaatatagattattttatcaagcatatgttcgtggtactaagaatacttttgtaccatgttctcatatcttaatttttttacatttctacagctatggaagaagcaaggctcattgttgttgatttgaatcttgatgtacttacttatgcacccaaggatcttccacttatgcacgcagtctcaaatttagttattcctgctttggttgatcagttatattccctgaagaagattatcttaccacacctcttggtggaacatcctcaggtttttcttctacttatctaacataatttatatcttaagcaatattttccttggagagatgagatgggtttagttttattttgcaaatnctcacctttgtgtttattgtttaaaatttctttgctc

SEQ ID NO: 41826 - DNA, 1025 bp, Arabidopsis thaliana landsberg
atattctcattcagtaaaataaaaataatgcttatgattactccgtttaccaaaaaaaaaaagaagaaaaaaaggttgtgattactgagaaataaattacagaataaagcataatgatattatataagaaagaataaagatagtagtataaagttttgttctctccatgttaagtaatatttgattgatgtgattatatataaagtatttatgactttttgcaactgttgcactgttgcaggctctgagtcatccatactttggtacgactgcctcggggaatatgaggcaccaacaacatgtaagtagcaaattttcgtatatatactgatatacacaaacaaatcatcatgctatcgttttatacccttaacttcttctttttcgataacctacacgaaactttttatacttatatattatctcttaagtcttaactatggtttatatgaatagttgcaaggagataggagttgcatatttcctgaggaccctggtcaggtacgtccattttttcttggtcactatacttttaatatataattagagtcactatactttttattggatcaattgaatccaaatctaaaaaatgtggacagctttagtttccaaaatttatccttttttttcttttgttttttttcttttctactgttttctttaaagtaaagttggattaatattaaaagatgcagcggccagcttttttttcaccctcccttacattattataaaccaaaaaagttcgttaaaaccaacaaagccactaaatttatttaaatatcaactttttctccttacttgttttcttcatctaagtgaaattcaaattcctttggcggggttttatatatgcttttcactaggggaaattcaatgattttttttcttatcacctctttatataggtgttagagaacatgtgtttactttttttgttaatcaatgctatatatcatgattgtttttttttttttttgatatgggtttagctcgtgaacgatcagtgcatgaagagaaga

SEQ ID NO: 41827 - DNA, 681 bp, Arabidopsis thaliana landsberg
ttcaatttgtaatgcgaacatgtaaattaccaaaaaactcagtccctgtttcgtaaataagctttccaattcctatcaaacgctctacgcgagttagagtgtctatttccttttacttcttcaacttttaacacattttggacacccatctaccaaatcatccttgtgactacccttttgactacaagaaacatgacatagagtaatataagcatcagaaacttttttgaagccataacccgaagattgactcgaatcccgaatcttctcatcagctgcaacactgtgccacataccatcaccatccctcgcaacagcatcttcgcagcatctccaggtcctgcaacgtttcccacatcttcccctgatacatctacatatgatactgactctgaattctctttcttgtcgttgctcgtctcagatttgttcagcccgaggcgttcattgagccaaatagacatgttgattagcagtttagccatcaatgcaacctcgtcttctgacaccggacgggtcatccagtcccctttgtacttcacaccgcctgctgtttggttaccagcaccacgtggcttgaagagctcgtcacggtttttataaggatggtccggctctaggaaaaaagcgattggttttacgacatgcccgccaaagaagttggaaaccgctatttgagta

SEQ ID NO: 41828 - DNA, 528 bp, Arabidopsis thaliana landsberg
aggttatatgtatccgatgttagcgggtgctctagcacatggcgggttgggttctgatatggtacagtctagtcaaatgggtgggattggtgttgatccaagcgttggtgctgctggtctttcagctctaggttcttactttagaggtcagagtctgcctagtacttatcctgattcggatgctggtggaaaaagagggacgggtaaagattcggatgctggtggctcctcctttcatggctactcaaactattcatggtacgttcactgaaacctttggtgttttgtagcaatgtttgtgctgatattgtggtttgaatgtctttggataagcataaattcattgtagctccgtcatgtgtagataaatggattaaggcttttgtggtagtaccggaattttatctgacattattatgcctctctagtcaaatagttggcttaaatgcctaaatatggatattcctaggaggaactgctacaggaattaaataccttaattatgtctagaggtaagtagcattgtca

SEQ ID NO: 41829 - DNA, 596 bp, Arabidopsis thaliana landsberg
attaagtgaacataatgagaaaattaaatcgccataattttttttataaaaaattagaaaatccttataaactatttttaaaaaatatatataaatcttttaaaaccattatatatcaattttaaacccttataattttttttaaacccttgtaaatctcgttaaaatcttctataccagcaaagatacaaagataccagcaattctcttgaaccttttaaaaacaaccttcaaaaccttcaaaacctttgtaaatatctttaaaatcctgtataaaatattttaggaatctttttaaaacagttgtaaatatttttaaacccttataaatattttaaaaaccttataaaacccatgtaatttttattaaaacccttttaatggccttgtaaatccagatcccgctaaacttcctggaatcacatttcccgcaaaatttatgggatcattattttttggtggtaaattttttgtcaagaatgatttggggggggggctggatgttagaatgtttttggcacggaactttttattgaatctgttgacgaggaaattattgtcgggaaatgttttggggtattgtttaaaaaggctat

SEQ ID NO: 41830 - DNA, 175 bp, Arabidopsis thaliana landsberg
acctttcctgcacttatggtcaatctacgcagctggaaacacagtaccgataccgttcttgagagcaacagatatatccccaatcgcactcttgtcagagaacatgatcggaggcatgcaacaagatgggaatggaactgttgccgctgtagcacttcaggagctctttacttct

SEQ ID NO: 41831 - DNA, 687 bp, Arabidopsis thaliana landsberg
tataattggcttaaaacaatgttacaaaacttttgtatgaacgatatttaagcatgacatgtttcaaaactttatccaggacatttgaaatatagtttcgcaagttattacaataaagtattaatcaggttccatatcttacaatatcgcgacaaagaaaaatctgtctggaggcaagtcaccatggaccgcttaagatgatgatatgaaaactaagcacatgatgagtgaagccacaaaatggataaagcataccaatcttcattttttgttatctttatttttcttttgggatttaactttaacttcaatttgctttcatcatcgacatattcccgaaagggataaaatgtcataatcagccacgcgcattagcctctggacgtattagaggttttgaagggcagagaaggacacgtccacgtgaccgtcaacgtaccacacacccagtctcatagggcactcactgattaagaagaagaagaacatatcttctctctttaacattctcttctcatctacttaacgacatgaaaacgatgcttcttattttggacccacttggagtttgaaaccaaaatggaaaatctgataaggtcaatagaaacaaagagagaaacaaaatcgatcggccgacatattgggactacaacttctgatcaggattgttggtgttggaattcgtac

SEQ ID NO: 41832 - DNA, 682 bp, Arabidopsis thaliana landsberg
aaccaaataatatttacttatgacaattgtcctaaactatatacattaaacagatatggaaataatcataaaggcataaatcttttcaccttttttttcttcttctagaaaacagtcaatattattaaatacgggcataataacttcttactatgaacgtttagcaattagcattaagctctctttgttgaaaaaaaaaaaaaaaaaattctctgttcttcttttgtaattttctttttatcaccttcttgttcttctttgtttctattttttattggcttttttcgtcttcgttcaatctgaatcattttttcatgactattttttaagttgcgttttcaattataaaaaaatttgtttatagattgattgacaatatggacaccaaaaaaccatccgatccatatgttcgagaacaaacatgttctcaaagatcaattcaaccaccaacaaatcaaggcaaggtacgttatgaatttatatatgaaactttataatttgttttctgttcatatttaagtacacattcaatatatacatattcaaaagatgaataaaacttcatttgataaaaattataatcttagttcaaaggtctatattgataattccattagaattcttaacatagtgttcatagaacattcattcatacctctaaaaatccctgtggattggttta

SEQ ID NO: 41833 - DNA, 734 bp, Arabidopsis thaliana landsberg
cattatattatttaattttcaaagaaaaagaatgaatatttctttccaattgcattcattatatggatatgtcactattgtaatcttaaaaacaattaaaaaacactaaaaacactacgtcacatacatattgatcggcatatcaattaggtgtctgagaaggccacgaggagagggttgacatttgatttttgacttttaagggtttaggatgaacatgaaggaacatggctcttaatgaatctgcattgaatatttaggttctgttatttcatcttcttatttcgcaaaaatatttatctactgttttattaaagtaattttttttgttgttaactaagtttaaacataaatatgtatatatagaccatttcgtaaatttgtactaactgtttcggcactattaaatcatctttttcaaaagaaaatcatttttttgcgattatattgtcagaactgtgtaagtgaagaaaaatcataaattgatttgtagggtctgaaaccaagtctttaaaaccttttggacgtagcagaccgaatgtcagacaggataggactcatggacccgagaaaggacgtaggtgctcactggcatgggcggtcaggaaattacatatatattgtaagaatgttaaaactagctactggatagctatagaccctattttaaaaactttgttcaagttgcattatgtgaagtccgattattttctcaaacaaaacgaatctgtatt

SEQ ID NO: 41834 - DNA, 884 bp, Arabidopsis thaliana landsberg
  unsure (1)..(884): unsure at all n locations
ttatgcggtggtggcggagggtggtgggggcacaccgtcgtggacgacacgtggaataataatgatatttggatcggtgtgaaataaaatagagaaaaagcggctgatgaagccaccaagccaccgtagtcatcatggttggaggctaacgtgagccgtgttatacgggaccggtagtaggcgttggtggacttagcgaaccgctcttgccgtttttggggctgattaattatgtttttggcgtctttcattttttgacttctcttttgcattcgtttctttttaggaaagttatttattaatatctatcatgagattattgattcgtnnnnnnnnnnnnnnnnnnnnncattaacacaatttgttggatgggcttaaacttgaatgggctacttttaagcatgcgcacgaaggaatgtcacggcaaacatcaatatgcgagaccagattcttctgtctcaagcaaggtttagctctcttcacactgcttcaggcctcaatgaaattagaagttgtgggagagctcatgagagttcagaaacgtgatcatgggttcagaaaattgagatttataaattaaagattttattgctagagattaaggggaaaaaaacaagggggaagaattaatttcattagatttttagccttaaatcctttttagtagagcggaaagtttattttgttttctctctcgattggctaaaaatcccttattcctcgttgaatcgatttggtttggtgtgtttcctgtagttttataaatctgattggagataaggcagatctgaatggagcagagccagatcgtattcgtattccgcatgccaaggacaccaaggagggcatttccgaccttagttccaaaaaacgaggacgcgccg

SEQ ID NO: 41835 - DNA, 603 bp, Arabidopsis thaliana landsberg
tcaacgtcgtccacggttgcttccggcgtcggaatattcgccagcttctccgcaaagaaacctttggctttgtccaacaagcttgaaatcaccgaagccttctcttccaccaccttttcatccgctgatgccattcttttttttttttttttggtgttgtgtcttcaaaggatcagatctctctttgtctctctctctcttttctaaagtttatggctctgtcggttctatatattttggtacctcttttaaggatgataaataccttaattgccggagcgtgacatttttgatttttctttggttgttggaaaaggaataatataataatttttccatcattagaaaaggaataagatcctttttttagagcatcatggtcataacgtgcgttcttacttctttgctcgtccgaaaaaaagatgaaacatgtttattatagaatatactacaattatattttgtatattatgacttttaaattagcaatatgttttaacttttaagcaatatcctaaaaaattaattattagttgttttctattatgacaattattttaatagattttaacattatccaaaccttaacctttaaagatattt

SEQ ID NO: 41836 - DNA, 1047 bp, Arabidopsis thaliana landsberg
ggtttgtgtactggtggtgttcttaccttggtcgtgccattgtaaaacgtcttcttgtcatgggatactccgttagaatcgtcgttgattgtccaggtaattttcatctctaacggtttaaattattggcaagatttttggaaattaatcttgatcttgattcagtttatgcttgtttccttcctaggtaattatagattaacggagaaaaacctcaaattaatacatattttaacgaattaatgcttacatatgtgattcaaagatattataaattttacatattcggcttggagttatattaagtttgatattttcttctccaactttgaaaatgcagaggacaaagagaaagtgagtgagatggaactgacgctgaaacggcgtcgtttagcaacatgattacttcagtggtttctcgattaacagagatcgatagcttaattaaagcgtttgatggttgtgctggcgttttccacacttctgcgtttgttgatcctgctggagtctctggatattcggtatgtttcattttcatcttcctctgtacaatgtgtatgtgtataacaatggagagatacgtatcataaattcgtacaaaggcatacatcatatttaatgtacatgactagttagttacattctaactagtgaattcgtatgattaaaaaaattctcgttctggtcacacaaattttagtggcgtacgtgtcggggtgtgaatatgagaatgtgtatcttactgatatgtcaaattaagataatattttaatttccttatagaattttgtctgcccctagtttggttactagaacacctttgagtggctctgcttttcgttaataaagtggttatgagttgaggttggttcttagtaacttaccttagttttctgaaagtttgatggcataagtacatatttttaaccataaatttcaatgcctttaaaatctttaatattttttgctttcaaatacttaaattttgacaccctttttgcctcttgctttgttctgatcgctcttatggtgacaaaaaaaaaaatt

SEQ ID NO: 41837 - DNA, 583 bp, Arabidopsis thaliana landsberg
acgtaggtgccaaaataattattatggcagattaattatttgttacgaatttcagagatcagagaagaacggttgccattagtcgtatttaatacatcaagaaattgtaatctccctaatactcagtacaataactgaaaaaaatttcaggtatttttatattgttatcttttgttcaattttttctttatatctacaaatttcttccccatatctacaaaaacagttttcaaaccagcaggaccaacttcttcatctacattcacaccatccacagcagcataagcttcagccacagactcatcaattttcttcttcacaagctcagtttcagcgacagactcagcaacttccttcttcacaagctcagtttcagcgacagactcagcaacttccttcttcacaagttcagtttcaacgacagactcatcaacttttttcttcacaagctcagtttcagcacagacttagacacttttagaacaatcttctgaaattttggcacaaagtttacagatgtgaatttggtaacaattcttcttccagacaaatgttgtttcatgaatccggagcaggaaagagg

SEQ ID NO: 41838 - DNA, 302 bp, Arabidopsis thaliana landsberg
cagcgctcatcgcctgacgtccactggccagcacccctcgctttcgtgccagtcgatttcgaccggcattaacttttcgatcagccgcgcgttgctctggaggtgatcggtgatgcgggcggtcgtgaacgtgccgccgccggccagcgccagcggcagcagcagttgatcggccaggcaggcgccgaccgccgcgtttccgcgcaggtagtcgcacaccgcttcgcaggtgcgttcggcgacggcttcggcggagacgccacgtgcgccgaagccgcagaacacctcgcaaaccgcctcgt

SEQ ID NO: 41839 - DNA, 252 bp, Arabidopsis thaliana landsberg
ctactcatgcggttcttgcggaccaaaagcagaagcagaagccgttctcgttcaagaagacctatctttttccgtcggaaaaatgcttctgctgcggcggagacacaagaaccaacttcacctaaagtcacttgcatgggtcaagtaaggataaaccgatcaaagaaacccaaacccgaaactgctcgagtctccggaggtgtaacagaaaggcgacgcagagccgtcggtgcgggtgggtcaagaacgctt

SEQ ID NO: 41840 - DNA, 1649 bp, Arabidopsis thaliana landsberg
acgaattagtgagccgtatgcatctgaaaggtgatgcctctctgagttcggcttctgatagatatgtactgcaaatatggtatcattgagcgggcttttatggttttcaacacagctaccgagaaagatgtcgcgctatggacatcaatgataactgggttggccttccacggaaatggccagcaagctctgcagctattcggaagaatgcaagaagaaggtgtgacgccaaacaatgtcactctgctcgctgtcctgacagcttgcagtcatagcggactcgtggaggaagggctacacgttttcaaccacatgaaggataaattcggctttgaccctgaaactgagcattacggaagccttgtggatctgttgtgtagggcagggagagtagaggaagcgaaagacatagtgcaaaagaagatgccaatgagaccaagtcagtcaatgtggggatcaatcttaagtgcttgtcggggaggtgaagacattgaaaccgcagagttggctttaactgaattgcttaagttggaacctgaaaaagaaggcggatacgttttgttgtctaatatatatgcaaccgttggaagatggggatattcagacaagacgagagaagcaatggagaatcgcggagtaaagaagactgcaggatatagtagtgtagttggagtagagggacttcataggtttgtggctgcagagaagcaaaaccatccaagatggacggagataaaaagaatattgcagcatctgtataatgaaatgaagccaaaattggattgtttggacttgttagaaatagagatcaaatagcaatctaagcatttgagagagcatgcatcagggaggagatttctcgacacaaagtaattaaagcatgatttcaaagttgaaaactcccgagagaacaaatgccggtgctggttggcttacggtgtgttgataaaacaatcctcctccttgaaagagatatcacctcatttggatcaaccttatcatcaatcaattcagagacagtgccgccagcaatatcctctgtatttgaagatgaagctagcaaaggataagtggtaaagtcaagagtattggtaccttctcacgtagcgtgtttgttgcaatagcccacccttgttcacgtactttagagatcacaaagtcaaactgttgtattgagaaaatgcaaactgttgtatttaattatatctatgtccaaatatatatatagaagaatttcgtttaagaaaagacacatagtatgaactttccctgtatccatagtattttatcagatagtctattgtctctgtttgctgcttcgccagctccttttatctctcatcctgttcgcggctctttaattttatatgataaggaattgataaaaacagaaacaaatgtcgacgctgtttcttgctgaagttattaggatcgtaattatttctgaacttaagcagtgcttaggtctttttcttgactctcttttgtcattggttggtaattgaggcaaaacctctttgcactggaaaattcaaaggctacacaacatgtttttttcaagtccccaatagtaaagaaaaaaaaaaaaacagcagaatacgtatgtacacattacgattcccaaaactgacaagagtttgacctctctc

SEQ ID NO: 41841 - DNA, 556 bp, Arabidopsis thaliana landsberg
tctcatgtttcctagagatagaccatgctcttgtctccaccatgtgtaaatctactctttctctctttatctcttcacttacatttagttcttaggattttaatttcttggtttcttcttgcagcttcgagtggattctacagagatgttgtggttgcctttgttagctgtcattcttcctctttcagacttaacataccattgtatcttgtgaccgatcctacttctctcattctcctcagcccgccaaacacttttatacaaccacaacgcgacggcggcagtaaaactcggtggcatcggctcgtagttgtatctcccttcccctcactcaacatatctctctgcctctctcttctcttgtctttgctagggttcttacttcttcattgacacacacacgcacgtagtaaagaggagaagaggagcgtgtatgcttttgatgagaattaggcccaaattaagcccaaatagatttgggtcgttacatccatatcatggtaacaatcttggttcacatcacacacacttcacattaaataacgttgcatgggga

SEQ ID NO: 41842 - DNA, 935 bp, Arabidopsis thaliana landsberg
agatatggtttaattgttctaccaattattgagcgtaaaggctgcatgtgtgcttcgtcaagccatccgcagccgcatgtgagaccagtttaagtatttgcagtatttgcaatattggctacgattttctgtttttttggaagaagaagagttttcaaaaaaaatattttcgttttgaatcatcaatataaacacatagttaaatttgggtgaatattttaaaaagataaacaccaacctaaagttatgaatagctacgcaacctcaacttcgtttaccaagctatgaaaaaaatagaattaaacaatttggaggactaattctttaaatagaacttgttagaatatattatgatttgtttgtgtatatctatactttttttaattgtatatttactcaaataagatctttctcaattcagtcataccatctagaatgacaaaagattctttcatcttacatgatattaaaatcctttgatctctaaattctataaattacagcgctgtcttttttcttgcatgtgccgccaatgcctaagcaaaacaccgccaccaccatgtctataataaattaaaatttataataaaaacaacttaaaattaatatgataaaaaaacaaattaacaaatatcatggttggaatatgtttgttttctttggtatcgtttgctttatcagtaaacaaataattgatttttaccattcgcgttagtagttactaaatatttgataagattattgtgacggcaaattttattggaatatataaataaacatattaaattttaaatttgacataatactatatataatgatattattgtattttcagcttattaaaatagttataaatttttaaacagttagatttatatttactgtgttatatatagtgttaacatatcgttcggaaatattatgtaaaaatatat

SEQ ID NO: 41843 - DNA, 756 bp, Arabidopsis thaliana landsberg
cgttaatagtatcgctaccacctacagaaaccaaacccaggaagaacggttcaaatttataaattcggtaattgattccggtttaatgtttggtaacccggttattttatacctgaaaggattgggaatattcgagccagaggaaggagatacagagaagagaagactggttgataagctggaagaagctgagtttacgacgtcgtatcacggagaagaaagtacggaacaagtgaaggaatcttgagaggtaaaacgcgtatgaccagaagaacacgcgtcccgaagcgcgtgtacctacgggaaagcagaggaaccattggagagcagtggtgcgggtgcgacgccatagccaccgcgtgtctctgatctctgctgcggcggagaggaggataccgacgaatatgacggcggagattatggaaatggttaagctgtgtagagctgggattggaccgagggagaatccgcgacggcggttagagagggagagggttatgaggaggaggaggtggagagtgacggcggcgatgatgtaagatgagacggcggtgaagaggaaagaccacgtggaggcgtaggattgggttgactccgacggagttaacgatcgttggatgcccgctaaatagtaattgaacgtcgtcattggtacgaatcaagatcgcaatcgttgtcctgtgtgatgtgacagacaaaggcatcagaagaagggcatagagaatgcgagaggagaagagagagatcgtgaatgta

SEQ ID NO: 41844 - DNA, 591 bp, Arabidopsis thaliana landsberg
agggccgactcaaacaattgatggaccccgtgcaatcgtgagagaaggaccataaaaaagaattcttaacttaagatttgtaccaagaagaggaagtagatcaaagcaaaacgaggaaagtccttgaggctacctccgaaactgattaggggagagtgagtgactctgcacattctaggccatttaagctcgacaaccatcaaattcatctaatagtgattgtgaggcaaataggtgaactcaacaagttaactaaagtcagtgactaaaagattctttttttcttaatagacatcatcttttagcgcttgctcatagattgatcatacactttttctagtcctcttactacatggcgaaatattttcatatgttttttatttttaaggaatacatttattaaagatattgacacattatctacaaaagagatttaacaaaataatccaaagctatttgatattttatgtagcccccacagcccatcatgtaagtagaaacatatcgtcaagtctcactactaatcttaaatggatcaaagctggtctatcctgtaacacttctttctaatcaggacgaccaactttgctc

SEQ ID NO: 41845 - DNA, 525 bp, Arabidopsis thaliana landsberg
cccctccgagccgaatccgacctgagagaaatgcgaaggcgaacgcaaggtttcagtttttcatgggtatggaaatcctgtggggccgtgaagaaggacggccaccaaagggaccgtggacagatccttgatcccgaaaacggccaggtctactactcgaaactgtcgatgggcgaccatggcgacaagctggacctgcgcggtttaatcgggttttagctgctcgaggggacgcagacctggattcgcgaggagccccctgccggggcgaaaccagcggcgagcgcgccgaagatcgacccgggaaatccacgcacagccgcgtctggcggggcttcttgaacacggggcaagaaccacacgcactgtgcgccccgcccccgcgcccacattgggtacctgtgcagcgctcggcgagcaagcgagcctgacgtcttctagaatccggcatcccggaggaactgcggcgtcggagaccttccactcacaaccggacactccgatgcttgaacacgatttgaaaaa

SEQ ID NO: 41846 - DNA, 667 bp, Arabidopsis thaliana landsberg
gaagacaaagagtaatgataatactttacaactatatatatacatagatttgaataagcattttataaatatgcgggaaacataggagagttttatccaacatccctaattccaatcatacatcttccgcatacggtgtatcaaagtactgtgatagatcccatcttcttgagcaacataattatacgagccaccatgaggcattctcttgtcttgaacatatgcgtcaaacttcttttgtaccttgtaatcagctcctttatacattgtacaccagaaaagtgtttctcccataacgtcatcgtggaaactaaaaccccaatcttctccaggtttcatatatctttcacgaacatcattgtccccagatttacaacgtaccttgagccatttgttgtgagaaagactgttcctgaataacaacgacgtcttttttcctttaaatggattcgaatggccatatgcattgctaatcatgcatagggcaaagacaactagaaagattgaagtatttttcattttttctttctagatgcttagaggttttgtcatcggagtaattttttatttacggcattgtatatatagacatatatgtatgctatttttgactttacgttcttattatatattgctctcttaatattagcattttctaataatgatt

SEQ ID NO: 41847 - DNA, 187 bp, Arabidopsis thaliana landsberg
aaaaaagcccggagggcgctagagaacacgagcccaaacaataggagcgaaccaagcccaccgcaccagcaggggaacgaggaccagaacgagacccgggacaaccaacccccacacgaaagagacaaagagaaagggcagaacaacgagagaacaagagccaaccggcagcagagagcacggaacc

SEQ ID NO: 41848 - DNA, 560 bp, Arabidopsis thaliana landsberg
cttctttaccattttatcccttgccgcctcgctgcatagcacatcagggttcgccggatcagggccatggtgaccacggacgtaaacctccataaaacttggagcaactccactttcagcttcctgcatgaaaaagaagagttaaaccatagaattttcatagatgtaacataaaagtttgatttatatacttaccatgcggcgtgcggtaccaaggtgtccatcggccccgtacctgtgccccggtccttcagtgccatggttggcacggtgcttgttggactctgcaatccactcaggcgacacccatctcttagccaaccacctccaggcttccatgtccttcgccagccaatccacaacgctctccaggtactgctcctctgtgaggtagatctcattggcccctaatgatttgctcattttctgcccctttatcttcttgtagtagtagttgacggccgcgatgcgagcattgtacatggcatccttgatgaccttatcagcgcacttccgaaagtgcctcttcacacgtgcccactgagcctgatcgtcctcga

SEQ ID NO: 41849 - DNA, 164 bp, Arabidopsis thaliana landsberg
ctttggatatgacggtattatccaccgtgcttgcatgtactagagtatgtggccttggggctagtcgagatgaggaaaggcagccctatgaatcatggtggctagggcctattcagagtgaacagactaggaatggacaaagttgaagaggaccgaaactggaa

SEQ ID NO: 41850 - DNA, 999 bp, Arabidopsis thaliana landsberg
aaaactttatttgggccgagataggcattttaacgattaagatatattatgtagtgatattacagtatttgggatcgtggcaaccggtttattaggcttggtttagtactttaaaatacagtgtatcttttcaacaattatgggcgttgtagcatgatgtcaatgcgcataaagcctttccagtttccactaagtaataatgtaaatcgttgtattaatttaataactctttaagttatttatctcatacacgagagtgggaaaaagaaaaccaaaataaaaatctgttttgttttccttcttctctagtgtagtggagtcacaacatatagaaaacgagaaagtggaaaggaaaattagaaaactatcattttctcttcctaaccttcatttcatttacatagagagatagagagacatagcgagagtttcttttttgctttgcttttttttttggttattgttctaagtttttcgatattttttcttcttaaatattttgatctatcattgaagatgagggtggttttgttcagtcatgatcattctccggttatgtagttcccattgttgctgttgttgaagttgtctaatgatcagaatccgacgcatctccgacaatcttagccggagtatctcttgttctgtcacgagccggttattgtcggaattcactcgttgaagctggtgtaaaactaaccggagtcggttcccgagctcacggttttctaaatccaaccggtttacttgctctcgtaagttatcaatgtgactttgtttacgcattcttgaccgtttcgctgattcccggtttgactccatcctcatcctcttccgctcgtcggtcatctccggttggatcatttttttccggttatggttattctctcccgaaccgaaatttgtgatggctgtcaattgttttgtgtcgtccgagtccggatcatctgcttgagagcacggtagatcgtgtgatatgtcggcgtcgtcacacgagga

SEQ ID NO: 41851 - DNA, 619 bp, Arabidopsis thaliana landsberg
  unsure (1)..(619): unsure at all n locations
ggtgtttcgtcttggaggaagcggccattgaagcgccacgaagtctcattcttctttctccaataataacagagagcgattctttttactattgcaatttcattttcaatgttaccaacacgagctcagattttcatacaccaatttttctatatgcatcgttatacacagaagcaggcgcggatctcaatttcaggtgtttgcgattccgatttaggtttgatcggttgaatttttttccgatggtggatcattaccaagttctaggcgttacgagaaacgcgacgaagaaggaggttaaagatgcgtttaggagattggcgattaagtatcatccggataagcacgctcagtctccggagcatgttcgtcataacgccaccgtgcggtttaagcttgtatcggaggcgtacgaagttttgaatgatgatctgaaacgcgcgtcttataacgctggtagcgattctnnnnnnnnnnnnnnnnnnnnnnnntcgtatagtaatccgtatggaaatcgtggtggcagagcgcaaggttctggttacggttatggttatggttactctacgaggaatcgtcaggcctctagcttcagcagcgggtttgattcgacgtttcg

SEQ ID NO: 41852 - DNA, 649 bp, Arabidopsis thaliana landsberg
taatccgtacgcggtttctgtttcttattgtctgtttcttggccgtggatcgttgatctcgagccactgtatgatctctgttgacccagatcaaaaaaaaaccgtttagggatacgttaataaaccctaatctaaaactttggtctgtttttactctcggttaccatggggttggccgagactagtggccaaaaccctagatttagggttagttaaaccctaacctgagaggtctaatcttctttctctcgtctgttctcgggttgaacaatgattaaaaaaataatgagttcaatcatattgattcgagatctctctgtgatctcaaaaaaccgatgcggattaggagatctagggttcttaggacggctccgataccattgttagaatctatactgtataggatcgatttctaagtccctagaataccaatccgtaactgaaagtaaaaccttgatgacgtgtagatctgatctactgatctattgagaggaacggggaaacacacctttgttgttgttgctatcttcataccgtcgccctgcagagaagtagcaggcattgggatccgagccgctgtaggttgtcgccgtttccaacactccgacgcctaagcgatgggggctctgaggactagggttttgggcga

SEQ ID NO: 41853 - DNA, 884 bp, Arabidopsis thaliana landsberg
caagaaaaatttgggaatcgcatacaaacttggaaaaaagaaattgattctttttaaataataaaaagtaaacaaaacaaaccaaagtaaatccttttagaaaaacaaattcctttattttaacatctataaatactactagcaaaacaattaaaccaataaataaaaaaaaacaattagtccatacgaagaagaaagaaaccttaagaatgggagaagacggaatttgcttggagtgcaagaggccaacagaaacagtggttaactacaagaacggagatacaatctgcattgagtgtggccatgtcatagagaataacttcatcgatgaactagacggtgctccgaccaaccctaatctcaaatccggccatctccccactatcatcttcaaacctaacggaagatcttcctcccttgcctcaaaattgcgccgaacacagaatcagatgatgaaaaataagcaggaagaagttgtaatgaagaaagcctatgcggaaatcgagagaatgagtgaagcgctagggttaactttcggtatcagttatacggcgtgcaagattctttcgaaactagataaaaagaacttacgcggccgaagagtttgagagggctttgcgcggcctctgtatcaagggcatgtagccaagtgaatataccaaaaacattgaaagagatcacgacagtggccaacgtggatatgaaggagataaacaaagcggtgaagcttcttgaagattctttcggtactgtttgaatgatatgaaaattcaatcacatgtaaaaacaacggaaattaatcaataaaattatatatattgttctgttttgcatacctcgaatcagtcacatcaattatcaaagagtttgaaagatgaacatac

SEQ ID NO: 41854 - DNA, 118 bp, Arabidopsis thaliana landsberg
acggagcatttatatcaagaactctagagccctaagaacaccaggggtttgcgaaaatgcacccacatggacacgacccactatcatccagcataatgcatgcaaagctcacagacca

SEQ ID NO: 41855 - DNA, 521 bp, Arabidopsis thaliana landsberg
tgaaattaataaggttcacaatttaaatatggtattgcatatattagttttcttacttttcacacgatattgcatcaaaacaaatttcattttttaaaaatcacctggttataaaacataacttgtcacttttacttactaatacgtgaaaatttatcttatgttatctctcaaattgcagaattatatttaacttcttcaacaaaatattaattttttttttacatttaaaaaaatattatttttacattactttgacacaatattaaaatttaatattactaaaaacttttctagttaatataattttatatacattaaagtctaaagatagctgcgtatatatgtgtattggtcagtgttatgtataggttacctgaatatttttgccgacggagactggaaaagattcggcgaagacaatttcgccgagagcagcaggacggaggtggtgaatagagagatggattccagcgacgcgtttaaaaccagaggcgattctggcgctgagactggcgagt

SEQ ID NO: 41856 - DNA, 605 bp, Arabidopsis thaliana landsberg
agtgtacttatgatttatgcttcgaacccaatcattttgacacgttagaaaggggtaatttggggtcgtgaaactaccttcttgaatttgtccattttatacgcaagtcctcggatgggctgttctgaaatcactatagttgcatgtgtgcaataacccggcccataaaaattaatgccaattgtattattccattagcccattaagtcatcaatcattaccattaaatctgctatatgattagcttctctacctcttaagtctaaccaaaaagaaagtcgaagatatcttcatcgtttgcatgtaatctcctttacatgaccatgaagtccttctacccattatgttttgggattgcattaattaagaacagaatagcactctccccaaaagaattctttggagccgcaattatttaagcaaaacattgtccgtggatgattctttacgaacgggccgtgatagttgtgccaaggaacatctctgtgggagaattcaaagctagtaggattcaagctcaaatggacttattaagataggtagaaataatagaaagattgaaatgaaatcgcttataaaaacgtttattatgatgcaattaatag

SEQ ID NO: 41857 - DNA, 562 bp, Arabidopsis thaliana landsberg
tgcgtagtttgttgtcagtttctgctcttagtaaggttccgtgtcttgtttgaacatgttaactaacctttatatagtcgaaacctatcaatttataatccatagaaaacaactaatggcacaaaagaaaatccaaagtcagattcttttattttctctttcttataaactttaacaagtaaatggattcctgtctttgtcatttggcatctcatccaaatgaagggtacacaatttaagcataaagacaagatcttgaagctgattgaagcatcaagatcaattaaactcatctttgaatttttttttgttctcttttcctattctacctttatgaagccaaatcacataccaaaacgtgaggatcatccactaacatcacgacttataaaccacgaatttgaatcgatacgctgatattgcattcgggttacagaaaactactgacaaagacttataaccacactctgatatttgaattttctccttctaaatactgaaagacacagtttctattgattgatctgggaaacttgtctgtacacagacaaagacattggct

SEQ ID NO: 41858 - DNA, 336 bp, Arabidopsis thaliana landsberg
atatcggccgcgccgtactcgacctgctggcccagatcgggcttttggccggcttcaccggccgcagcctggccggcctggccagcccgcctttctatggcaggctggtgctgcagcaattcatccgcatcggctatctgtcgatgcccgtggtgggactgacggcgctgtccaccggcgcggtgctggcgctgcaaatctatctgggcggcaaccgctatggcgccgagtccatcgtgccgcagatcgtggttctgggcatcacccgcgaactggggccggtgatcgccgggcttatggtcgccggacgggtggcggcggcgattgccgccgaaa

SEQ ID NO: 41859 - DNA, 483 bp, Arabidopsis thaliana landsberg
ccacagtacatttctcaactggctcgttcttgcttccattggcgactctggctctgttctgactcaacattccggcgactttttccggcgaagtaaccgtcaagattccactaacggcgtgaaatatctcttttttgtctttacaagattttttagactcaaagtctaatttttttcaagattttgtgaaactctgttacataatgtaaagtttttcacattaagcaatagcaaattttcttgatttttgaaagaagaatttctattattatgacttttcttttctagtttacacttcactaacgctaaggttaggttatttgttcttgctatgataaataagaacaaaagattatgaataataaatgcccccaaaacaaaaaaaaaaaatcagaaagaaatttcttctctctatctatctaaaagatatgtcattgttgtttctgttgttgttgttggtctcggagttggtacagtctttgt

SEQ ID NO: 41860 - DNA, 666 bp, Arabidopsis thaliana landsberg
acatatcaataaatgtagaacagttttttttttgtttttttaatatgtgtgtcacaactttaaataaacacacttgtgtgatggtcggatagagtattaatgtctatttcctagttattttgttaatcatttccaaaaataaaataaaataaaagctttgttaattaaatctaatattatgcacattgtttggtaattaaatagattttgtctgataaacgtcagtggattaatagaaaaaaaaaatgttatctcataatcacagacacacgtgaatatacacatatgtggagattggaatttgcaattgtcaccaaagagaatcttttaacttttgatttgcgttttgatagagagatgaagccagcagcagcaacagtgactggttcgtcgttactctgcttgagtgctttctcgagttggcttctcctacccaaaagtctcccttatacatttctcagtgattgagtttactttgccaaagctccaatttttgggtctttttggaacaatcacgaagcaaaagtgtaatccttttctttcttcttccccccctaattcatctctctcctcttctctgttgctttgggtcttttaggatcactaaagcgtaattgaactttagtaaaggttttagctttttggaaccttataaaatctcactta

SEQ ID NO: 41861 - DNA, 547 bp, Arabidopsis thaliana landsberg
  unsure (1)..(547): unsure at all n locations
atgtagcctttaatgtaaagaagtttcactgataacaaatgtttttataacaggtggcttaaatcgcaaataagggaaaatatgaatcttattaattataaatagatgcactgtgatggttacatcaataacttattgtaaacgctatttaatcatcatcgtaaccgttgaatcaaacataaatcatagagtctgcttgtataaattaaatactaaattttatctgttaattggtaatccagttgacttgacttatctaaatcacttatctgtctctttatttatatataacagttttacaattgtgtgttgtctttcacatcaaacaatttttcagcgttttttccaaacaaataatgtgaagtgcgaacgaaaaaattatatattttgggattctcacaagttcaaaaattacttattcactacaagaaaaaaaaaaaaaattgactacaaaattcataaagtaatcaaataaagtttttaacggtttagcgccgncatacgttaactctccaatcctgtgggatctattctcattcttaagacg

SEQ ID NO: 41862 - DNA, 825 bp, Arabidopsis thaliana landsberg
aaagtccattctcgcgcaactttctcgtaagctttccggttttttttttacagtctcgcggcatgattgctaaccaataacggttcaaccgggttcgataaaatcgaacatatagagagcaacaccaagttaatggtcaaggcttatgaccatcgtgaccccaatatatcaacaaatatatctccaatttcgcttatattaggatgaaaaatctggatccaaaaacataaaacgaaatttttaaccgggaaccaaacatttccgaaagactaaattaaaccggatttctaattttggttaccttagtcttgaatgtgattttgggtggttcataaggatatttgggtgggatgtgaacagagacggtgaagactcctttttcgtaagggcaacccaccgggccgttaacggtggcttcccaccggaaaatattttccggcgaaggtaaccacgatctcacatggatcttcagaacgctatctatttcttgaaactctttccacaatctgttctccgctgattttgagacggtgtctggagatactttaccggagttcctcgacgtaaagaatttacgaactttgaagttttggaaacacatcatttttttattctcctctatgtattatgagagagagagagagactatgcttttcttagattatagttaagctcatatttatatttgtcttgagtatacgtttgttttacttatacgacataaattacatataatgctttgtcgaatcattgacaagaactttaaagagtttatagaaaacaatgatgtatacggtgaatgttagtagttacatatatggtgga

SEQ ID NO: 41863 - DNA, 545 bp, Arabidopsis thaliana landsberg
  unsure (1)..(545): unsure at all n locations
caagttttcggttgaaaattgttgaattcaagaaacaaaaaataaataaatgtaaattgatactaatcgaaagtatatttatttatctacatttgcattttaaaattcccttatagaaagaaagatttacgacaaaaaaggaaccctaatagaatcattatcacgatcgccgtcatcatcaaaaatagttctagccaaactcaactgattatctaagtatctatgaagcaaaccactttcttcattttcatcttcttctttcattccaaatccttcttcacattgccggagccgtaaattatctnnnnnnnnnnnnnnnnnnnnnnnnnnnnnnnnggaaggtggaggtttcacgatccggctgaggaggcggctgaaaatctcaacggcacagaggagaggtattgaaaggcagagaagaggtgaacagaggatcaaaaagatgatgcgactccaccgtgtagagaagcaagatgcacatgttagcatgacgtcatcggttgttacggccgaagaagacggcgtcattccttacacgctacttt

SEQ ID NO: 41864 - DNA, 1632 bp, Arabidopsis thaliana landsberg
aacatcggttacaagcaatatgaacttttgggttacaataagacttttctatttatcattgactaaacaagcaatcaaggggagtgggggtcttaaataccaatggtcctctaagagatggccaagacattttgtaagccatttcagcatgtcccttccttttttcaaatggctaatcttggttaatctaagtatctaacatgtcatacagcaataatcctaatagaaaataaccagacttcaaatatgttccacaggtacaaaataaccagacttcaaatatattgcagataaaaggccatcatattaccttgtcatccatcgcatctttgtttaacattgcttcaatcattcgtctcaacatcacaccaacgtagaaacatttttgacgaaaattgttgtcaggcaccttaaagagaagaaaatagcagtaagtaaagactaaaattttaagaaccaaaataaattaagatacttactggtacatgcgcaaggaataaatctctgaggatggatagagctcttccgtcctagtaaatcatgtaaatatacaatgcggaattttcagttagcaagacaactttcatattcaaatttgcaggggggtcaaaaacatattatccatctgtgatctgtaattctgtataaagttgaactagagagtctaaatgtggaatacagaataaataccttttcaggtggagttccgtatgatatttttttcacctacgtaataaacagataaaataatgtcacataattcttgccgcaaattgacaaaagtcaaaatctattgttaatataacataacctgatagtctactcttttgttgagagtgtttattcctcaatggaaaacatggaaataaattgcagacttactctctatatatcacagaatgaggtggaaggaactaattataccagatttctttcagctgaatgagatatgagctatggtcttttttaacactagaaagagctcaatttcaacaggggggtaaaatcttttctgggttttagataattttcgaagtatacgatttgtgttcactacaaatattgaacagaaaaactattaaaggactctgtaagataactaaatgtctaaaatactgcacctttgcctcaagatagtccagtgcttgtttttgtgtattcacaccttcgctaacacactcctgaaattaaataagcattttgagagataatatgatgcttcagagatcaaggctcgttaaaccccacaggatgaatagaatagcatggaagaataagaaattcatcaacttttacattcaacaaaaaggactagctaagaaattggtttcatatagcaggttcttttgtgagacacaggtatatgatattcacacattacctataactttcattagctagagcaagagggagaacaatgtcaaagcaaaaccttccattctaagagccataagtggcttctatatctttatgcgtcaccgaccgaccaacgttgctcacaagtgcatcagacaatatgcatggtatcagatttgaatatcattatctatgtattatgacttctttgttggcaacacgttagaattgggagttgagtttaaaaattagacattcaccctcctgctaaaagtg

SEQ ID NO: 41865 - DNA, 173 bp, Arabidopsis thaliana landsberg
tgcctttctttcgcttcggggtcgtataatatttctgctaaactcatgtcttcatatattttggcgattgattgcattttagtccagatataataaaaatccaggcggccttttatgatagtggccgtaagctgttccagcaggttcacctggcgctgcgccggtatgatgct

SEQ ID NO: 41866 - DNA, 511 bp, Arabidopsis thaliana landsberg
  unsure (1)..(511): unsure at all n locations
tcattaatttctgtaattctgaatgagaccttttatgctactgcaacgtatgtgaccataaatgactattgcaacaagaccatactttaggagtgaagctgtctatatgaagagtgtaggtagaggcaattggctaatattgtacaggtccagtttgcaggatcgtagcaacagggttcaaagacgtgtgtttgaaagggcagttctnnnnnnnnnnnnnnnnnnaaggaggggagttccatagctggtttaagctggagctagcttctgaagtccgatcaggtgtctgtatgtgttgccttttttatttcatttcatgagaaagggttgttatttgttccttaaactgtacttggttgtacttgtgaataaatattttagcatggttgttcgacttcttataatatttgttcgacatcagttcatgatatttgagttatcgtatttataataatattatatatttataccatcaatataatattagctgttacgtgatattttatcatat

SEQ ID NO: 41867 - DNA, 540 bp, Arabidopsis thaliana landsberg
cagggtgtagaggcgactctccgaatggcttggggtagcccgacgtcggcggtcgtgagcttcagcggcggcggaaaaccgcggcaatggcagaagttcttcttctctttatgcagtaggacgagggtcgtgccaaacttttatagggacagggcaagtggccagcgctggcgagggaatccacggccggttagttgcacccaccccgcgaagtttgcgcagtggctagctcggttctgagttcagcgccgatttggggaaatcgattggaggaacgcgagatctgcggggaagagatgtcccgacacccagccccacatggcggtctcccgagccaagcgcgtacgagttgcaggaggagaaacgcgcccaagcaacgatggccaagcacgatccgtgcgaattgttgagctccacgcgcgtggctgtttcggtgagagggaaagagatgacgtgcgggaccaatggtagtgacccacacacatgtgcatgcgcggaggtggactgaggatgacaaggtaggccactagtcagagactg

SEQ ID NO: 41868 - DNA, 736 bp, Arabidopsis thaliana landsberg
actttttaaaagggacaaacctaaattggtcatagcaaattcaaagaagtttgattcggtttcactggttaaagagatgatggagagaagaagaacggcattggtattgtttgtggtagtggtggtgttgacgtggcaagagggtgtattggggaaatggttagagtcgacggcgaaggaaaagaccggttcatgggctggttgggtctccgacaaaatcaccacgtaagtgatatctaatatccgaaactgaaacacacctgtggttgaatctgtcctttacgtaaccatcacgttgatccaattcagtctataatttctctcatttggatgttaagtacgtgtttagtgagattagtaatgtcttattgcgttttttattggaatctttagattcgttcactacattggatatttacgcatgtatttggccgtagttaagtgagtgattgagaggtaacgttttacttcttttcccagtggatttggtactaagaaagaagaaacaggaatttatcaaaaatctaaagatgaagcaagaaaagcggctcaagccgcggaaaactatgcttatgacaaggcaaattacgtcaaggactctgcttacgacaatgcaggttacgccaaggattttgctgagaacaaggcagagtacgcaaaggatttcgcttatgacaagggtggtgatgcaaagaacatggcatacgaaaatgcgggctatgctaaggattttgca

SEQ ID NO: 41869 - DNA, 1304 bp, Arabidopsis thaliana landsberg
aaaaaggtatcttcaaacttacagcctttttacatgcctgatcaagtgccacattttcttgctgctatagaagtggagtgcacgactttcctttgataaaatgattaaaaatctaaactggattctggttttcactggggcctggttcccttggaagtaatgtttcatactaaaaattccctaccagacaagacattacataactataggtctgtagctctgcctcccttgtccacatgaaacctgagaaggagatagttgaaatgagaaactattatgaatattagaatatcctgctagagtgttgctattcaccctgaaacttcttgttttacagtaggccaagatttcctgtacagttcttctatatgtttcattagttcaatacctattgttttaaatacttcatgtccccaatgaagattcatgcttgaaccatattagaaacaactgagtttcttgttcttcctatctgcagaatttttcttagtttctcagctgttgttctggttccaaatcttatgttttccctcatgcaggacaattcagttgaatgcttcagaagagcatgcaagatattcagtttggattctgagcaggtaaagtgtttcatgcatgttcttttacgtactgtgtacacgatatgcatgtcagtttatgcaatactatatgttacatgatttattcatgcaattacaacttatacgtgtgcttttgattctgtagttgcgcatttgggatatttctggccaaacaaccttgtttttcgaaagtgatgtgagcaattccaaggattgtcaacaacaagcagatcaggaagtaagtgtgatgctttttgagttgaatgcggatattgctccatagttttacaattaaactgcattcgccttatttcagacttgccttccattttccattttttccctcatatctttgatgctgtatttcttattaatcttttcttttggtccaacagatcctcctagagctgcagatttatggattatcagactccatcaaattgaaggaatcaaaaaaagaagatggttccacacagcaaaccaatgggattaccaatggcatgaatggtggcacagtgttcagatttggacgaagtaattctttgagctttttgggtaaagctggagaagctggaactttggggttgacaggcttgcagaatctaggaaacacttgtttcatgaacagttcccttcagtgcttggctcacacaccgaagcttgtcgacttctttcttggcgagtacagtaaagaaataaatcttgacaatccattgggaatga

SEQ ID NO: 41870 - DNA, 873 bp, Arabidopsis thaliana landsberg
ctcttctctcttctctaatcttttttttaatataaatttatatatcattttttgccatcttcttcttcaatctcgtaattcactttttctttgtggtttgattgattctttgaagcaagaaaagatgatgaacagctgtggaatccaacaaaacgcttttgaagagatgaggagaaacgccgccgtttttgatcggagagacgccgtgatttgtcataaacctcgtcgtgttggtgctcttaatcacccctcttctcgatctctccgttggcaactcaagtaagatactttttgtaataaagttcaaaacttttttgaggcaaatcacttaaagcaatcagatttattggtttttgattttgtagtcatcagatggaattatgtgaatcgaattcaggaagtgagattttggatttcatcctcacaaaggtatatatatgattcaataacaatcccttttgcttgttgatgattgtttgattgaattgatatctaaagtttagatttttatttgttatgtgatgatttttacagggtggtggtggtggtggtgagcaagatcagacgaggacggtgatgacgccacctctgttctttacagggtcacctccaagtagagtttctaacccattaacaaaagattcgctttttcgagaagagcttctcatggtggcttctccgagtccatcgactccacgagcaaccaaaccgcagccaccgtcttctccaaggaacggtagttgtgttatggcggcgacgagtttcgggaacaatcctgtggttcgtgttgtggggtttgattgtgacagacgcagcagcaacaggagcatttcgactcttgcataagagtagtccaatatgcatatatatggg

SEQ ID NO: 41871 - DNA, 653 bp, Arabidopsis thaliana landsberg
ttttttttaatgacattcgtaactattttgtcgttgttttttttttttttttttgggtattaaactgaatgtcctaaacagctgttatgatctgtttagatatgtattatacgttatcatcaatctcaaaaatacgtacccacgattgaagtcggtaacacattatgttttgcctatgtatgcatattataacaagtttcgatttgtaaatttgtgaatgtaacactttaaaaaagaaaatgtagatgcatgtatgcatattatatgcttcatatcatgggccaagttgagaaaccgaaccaagtaccaaccaacttgagaaaccgaactaccaaaaaaacatcatgggatattgggatgtaggaccaactacacttaaatatatatccgatgaattcgaaactatatatattaacatgtttctctagctacacaaactttctacgatgtgaaaaattgaaattgagtttttaaatatatacgtttagggtcgaacttcaaaatttggtatagttttaggctgacttgaaatgatatttgggcatttgaagtatacgagagcttaattacgtttattgcatcccccgatatacaattttgggtcacagactctgaggaatctaaacgtttctattaatacttttgcttggtat

SEQ ID NO: 41872 - DNA, 636 bp, Arabidopsis thaliana landsberg
catccattcaaaacctctgtcgataattcataacttcaaccgcgttcacgttatcattacccaaattttaaatgatatttttttgttggagtgaaacccctaaatttaaccccaatgtgaaaaatccacttaaatctaaccctaatttgacatttttagccctccaaagcacaaacatatcttcgtcttcgtcttcctcctctaacctccactctcacatgacgcaccaccgcatcaccacctacttcaatggcggatccgcctccatcttcctcctcctcctactcatcaccaccacttcctcttcttctccaccaatcccaggcctagacaccttcctaacaaaccaatatcgtctcgacccaaaatcatcaaacgactcattcacatcactctcctcctctctcaaacgatctctctcttcttcatcaatccacttctcatcactctccaaatctctcctctctctctcaatctcaatcccactcaacgtccgtttcatcggagactctttcccttcctccgccgcctccactctctccgaattcatctccgccgccgtaactaacgacaacttccatgtaatctctccatctccagattcatcaacaaatcacaaactcgttaggggattct

SEQ ID NO: 41873 - DNA, 1648 bp, Arabidopsis thaliana landsberg
  unsure (1)..(1648): unsure at all n locations
tgcagcttgagagcaagaatgtattcctcggtaactgatctcaaggagcatctgattttcatcagatctttggacttgtttagtggcttcacatccttgagactttctatacgtgcatctatagtatcttctgtacccaaaaatagacatacagtattagttgaactttcttttctcgtataccattaagatttttacatacatgtttttttgaaaaaactataaaattttataaagcgaaaattgtcgtaaatgtgatcaaacagagcactatgccttgtatgaagggctaaaatgacaaaaaaaaattattttcctaaatagttatttattagtttaaatgacgagactaaccttggaaatttggctccgagaatatccttctggccgtactttctccaactgaatccatcgtccagcgttctatcaacaccagctccaggggcaattctgacttttgaactccaccttggcattgacttcttcgaactatagtacattttcaaaataactatgagtttatgagaaataaaacaaaaatacgttaggacagtttatagatatgaatgtacctcttgatgacaagtggttcttgatcggaatcatcgctcttggggcttcctccaccctgagaaacttggtcaagttcgccggagtagttcatgatggtgagagacttgtggtaagattgaagaatctttttggctaaatgttcacgtgtttcttgagatgaagctgatccaaactggtgtgcatagtctcttccttctatcattagctcgttgatctcgttcttcatcttctcccactctccactactatggttcttctccattacgttcaaagagtggagaataagattaaagtggtgtaaatagtttaaagtattgttactatgtttatttttgcatggcttctggaaactgagaaagaggagaatttaaagaggatgtgtgagagagatagtttgactttttgactgaagaacgaagaaagctgatgtggtttgtgagaagtgagaccagtctttggtcaatgaatttggaaagtccaacatgctgaccagttctctgcttctcgatcctttttatttttgatttattggattttgaattacatgatctggttttgttttaatattagggtcacaatcatttaacttacattcgtaatattaatttgttaataactattcattcttattaggatatgattttctattgtaaattttaattttgctataaaattctaatattgagtttagaaattccaagagacaaatatggtcattatgttggaatattcattttgttttggatcaagtttaattatcgatccatttatggaaccaaattcaatacaagatagcatttctagagtttctataaaagtgtttaagataactgtagacaataaggagtgacaattgatcacctagtgtcaataatcaatatataacnnnnnnnnnnnnnnnnnnnnnnnnnggcgtttaaaaagtttatgagactaaacaatatacattagaaaaatatagtataacatatgaaatttcataatatatataataaataaattcgtcatatataaatcttaaaatagattcaaaatcaaactctaacaagaaaaaaatagaaatgccaaagcaaaa

SEQ ID NO: 41874 - DNA, 783 bp, Arabidopsis thaliana landsberg
tagctcatcttcgatggtagatttttcccagggaaactcgtgattgtcaaactcccacgggctgtgaagactcgtttcccctgtttcatagacaactctgtatctttcccatggactctctgggaagtcagtggattttacttgtgaagactcaatcctaccttcccaccaagccccgccttcaccggttgcgtctctccaccacacacggcactcattaccaattttccagtttgtttgaattgcagcgtcgtatcgagtcttctccacaataaaatcagggaaattaatgagctcaggaagtgtcagttgaaactctttgcgggaggcatgtgatgaagaagaatccagaaccctgagggtcattttgcagcagctatctccagaaccaggatatgtatcatagttaagtttctcgactttgcaaatctctactgctcctaggtttcggggaaggtaccttgatcggtccctgtcatttaattctttagttttaaggaactcttgatgaccctgaaaacgacagtcaaggaaagtttattaatatcacagctggcaaattaatacaaggaagtgaacaacgaattagcagccaagaggacgtacctgcttgaagtaaataacttcatcccctagctgaggtatataacggcagccttcctcgtgttcagacaacaataaccatgagatttttcctgagacactattcaaccttatcccagtatgaagacttggtttgctgacgcttgcagatctagacctggacccagcttttgaggtagg

SEQ ID NO: 41875 - DNA, 437 bp, Arabidopsis thaliana landsberg
  unsure (1)..(437): unsure at all n locations
gattatttggtcgctggtttcttggttttgacggccggaatacttctccgtccatggctctggttacgtctacgaaactcgaaaacgaaagatggagatgaagaagaagataatgaggagaagaagaagggaatgattccaaacggaagcttaggctggccggtgatcggagaaaccctaaacttcatcgcttgtggttattcttctcggcctgttaccttcatggacaaacgaaagtctttgtaagtcattttctattaattcctattaactagaaaagtcattttctatcaaattcttatatatttccgccattttattcgaagtccatctttttaataccctagagtaaataattttatttttcgtttacccaaaataagttagtaacaaaatacctaacaccatcgaattagcacaanaaaaaaaaaaaaaaa

SEQ ID NO: 41876 - DNA, 641 bp, Arabidopsis thaliana landsberg
  unsure (1)..(641): unsure at all n locations
cgccaaaatgtaagtaaagagaacatgaagtggttgagaaagttgatagccttcatgatttttctaaattatatatacgtatttaaattacaaagtgtgatattagttcagaactagatatcttgaaagaaaatatggggttgcttagtcaaattacgaatactcatgggtactatcaacaggagaagttacgggagcgcggcgtcttcgggacgctgagaagcgattttnnnnnnnnnnnnnnnnnnnnnnnnnnnnnnnnngcagacctacctgacccgtctctgtctggaccggaaaagggctcttcttctgttcacatatggcaaggctacgaagacaaagtgatgccatttcagctgcaaagatgtttgtgccgcaagctaccatggattaggtaccatgaggtccctaaaggaggccacctgatcgtgcactacgacggcatatgtgatgcgattttgaaatcacttcttttaggagaagatccccaatgtacaaaccaaaagctgtgatcactgagccagcttagagactaagttactatacttaatttattcggtttcttgcttgattctttgattttgtttgacaaaaaatcgaattctcttatttgtanaatatatatgtacttatgaatt

SEQ ID NO: 41877 - DNA, 529 bp, Arabidopsis thaliana landsberg
aaaaaaaaaaaaaatgggagatggagaattgtagaaaccggactaaggacacgagaactgaggcaagaacccatttagtagaatgatgaagaagatcgtttttttttttgcacttttctctgacaatgaatttcttcttatgctgtttttgggtggagcagattctatcagataaaactcattgaagcgtaataataaagagaaaaaaaaagagaaagagaaaaagtaaacactgaagaagagagaggatgagagaagagaaagagaagatgtgtgttgatgagatggtagaggcaaccgaaggaagaagaaaggtctttttcttgtccaaacaaaaaaaaaacgaattcagacaaaagttatatttttgaccaaaagataataaacgagttctaaataaaattagtaataacaatttaatgatcagtgggacttttctattgtatgattttttaaacttttgaaattcatagattgattttgatgatcttaagcatctgagtaaacgtgcaaaaagatcactaataga

SEQ ID NO: 41878 - DNA, 686 bp, Arabidopsis thaliana landsberg
cctcgttaatctcgattaccacggcctaaaactgaaaacgctgtttatttctaaacgcggatttttatactttagaacctatttgattatttaaaaaaacccatcattttcaaaacaaaaaatgataaaatagaatttgcaattatacactttgatatacggattaaaatgttaaatgcaaacggtatcatgccattataaattgcgttcgtatttgtatataataataacagcatataatgaactaattgcagatctatatagtcttctatatatttttaattatatgattctttgacttgaatatatccatatgattgtaaagattttgctattttgcatgcatttccatttgataaaatttctacttaattttcaaactactacacattttgagtgtgacgtttgtcatgattctcgacctgtaatgatggtttgactttaaacgcaaacgctccgagaatagcggccatcgtcgtaacggagagaaagccagacgcagcgaacacaccatctttcacaaggtaacactcacggtttagccacccttcgccgtatatctgctctctattcatgcttgcaccaacgcttatcaacgtaaccgcaacggcaaaattaaccctgcaataaattcatgtattatataattatgtacttgcaaatttaattcggtgacacactataga

SEQ ID NO: 41879 - DNA, 345 bp, Arabidopsis thaliana landsberg
aatttttctgacatgatcgaaagcagaaagtacgagaggaaaacaaagaaaaattttgcttataagagataattaaaaagaagacatgttttcccacttttgagttaatacatactgaccatataaattctatgtatagattgtgaattgtagtttttttttggtaactattcaactgagtagtgagtgtgtaggaactttaccaaacaacgaattgatataccactaacgcatggaataattaaataactgagtgatttaaaaccacgttggtcaaaacttaaatatatatatttcacttaatgcctacgctttagttcatttgactaatcgtaaatatgcaca

SEQ ID NO: 41880 - DNA, 593 bp, Arabidopsis thaliana landsberg
  unsure (1)..(593): unsure at all n locations
nnnnnnnnnnnnnnnnnnnnnnnnnnnnnnnnnnnnnnnnnnnnnnnnnnnnnnnnnnnnnnnnnnnnnnnnnnnnnnnnnnnnnnnnnnnnnnnnnnnnnnnnnnnnnnnnnnnnactgggcctgctgccgcgcatgctgaccgagctcggatatggtccggcacaggtgagcgagcggctcgccgaggcccaggccggcgtccatgtccccttgcgtccccggcagtggctggacagtgcggcgtcggatgcataccggcacctgtggctgggccagctttccggccgctacggcagcgtgatcacgctcggcgggatccgggacctggcggccctgcgcgcggtcgacacgcccgacgtgcgcctggtcgacaaggtcggcgacatttcagcgctgctggcccgctatcaacgcatgacgctgtggattgttgcgctgggctatgccggtgtgctgctgctgttttccatccgctacggcctcgccgacgccttgcgcgtcgtgtcgagcccggcgctggcgagcgccggcacgctgggcatcttcggcatcttcggcgaacccttgaacctgttcagcacgtttgcgct

SEQ ID NO: 41881 - DNA, 604 bp, Arabidopsis thaliana landsberg
tacatcaatatgttatgccccaaacatctcgctgtacaattagggccagcacacacgaaatagccagcttatacattaattggatgtcgcatatgagcagaatttttattgatccattaagtttttttatgtttatgtgttgtttgatttggctagaacatcatatatgaagaacgcagcagcacgtcttcctatccctacctccaaacacttcctagtgggccctagcagttctcccggccccctttgttcgtatttattttgcacaacgtgactagatcttagtagtgttgttgcatgcttttttatgtagtaatggaatgcatggtcatgaactgaactgaactgattggcgcttatctttttattgctccattacgttttatatgtatatgtgttgtttgatttggcaggaacatcatacatgaagaacgtagactgacctccatctaatccaaagcggattataattcagtctactcaagagtgttttagtgtcaacataccccgtgttccggcgaaaattgttagacacaaaccaatgcaggctggtgatgaggatgatgactttatgccattatcgaagaagcgtaactttgatgac

SEQ ID NO: 41882 - DNA, 234 bp, Arabidopsis thaliana landsberg
aatcaaattcatcactagtaagtaaatagtaagcttatttatattttaattccataaaatccaaaagagattcaagtgttaagagcttgcctggttagcagaatccatataggtaacgaaaatcgctcgactaccacgagatggaaacccagaaacgcatgacatctgaggccatgtgaagcttagctttgaaatgtagtgttcttcctgtagatattgaacaattaaacacca

SEQ ID NO: 41883 - DNA, 533 bp, Arabidopsis thaliana landsberg
tgcttatttctattggtacttttttaacaataccagagaaaacttccaagcataaactgtgatactaaacagcttctgaatctaataatccaagagaataattacaatgacttgactctctaatggttcacacaaaaccaagcctttatgtctcttaacctcttggatttttcggttctcaccataacaaaggcctccctgaacctcccattgttcctatgatcacccaaaacaaagcacataaagccccaatgatcgataagcaaaagaaacctttgttcttcttcttcttcttatcgttgtttcctccagacttgttcctcttcactgctgagtcactatccataacaacaacattattacctgtgcttttagaagtaaacctgaaacgaccaccactggttgacattctaacaaggttcagcttcacaaatggattctctgatgcatatgctggctttgcaggaatggattccaggaaagtccatacactagaagcaaacttactagactcgtcttttgacgggtcatct

SEQ ID NO: 41884 - DNA, 194 bp, Arabidopsis thaliana landsberg
ctgaatactgatcgcccggtctaacactttttcccgcagggcgtatttgtgaaggtgatcaaggtcgttcatgttcaatctgaatgtccagagaatcgcccgagtcttcgaaaacaggccttaaatgaaagggtcttgcataaccgtactgaaacgcgatcggcatgcgaaaaccataattgtaaaaagacaaa

SEQ ID NO: 41885 - DNA, 548 bp, Arabidopsis thaliana landsberg
tcaaggttagatcggagatgcatttaccgtgatgtcttgttcacatgcctctcaggtgagaagatgatggtaaaaaaacgctacttgcaagtcaatgaggagctcttcagtgtgcaccccgagttcttggaccctgcagctccaagtctgcaaggcaagctagctgtcgtggccggtgccatgccagggcttgtggctgctgccgcagagaaagccattgccgactggggccgcccggccggagacatcacccacctcgtcttcgccaccagttccagtgcccagctgcctcacattgacctccgcatcgctgcccttctcgggttaagcaccactgtgcagcgcacggtgatcggctttcacgcctgcagcggcagtccgccgcgctccgcgttgccaagtacatcgccgagaacaaccacagcgcgcgagtcctcgtcgcttgcgcggacatgtggagcgtcatggatagttacgtagttcctaacgtagaccaccgctacggaattattggcacgcctttatcggtgacggtgccggcgcagttg

SEQ ID NO: 41886 - DNA, 1240 bp, Arabidopsis thaliana landsberg
cgctcgtcaagtgttattagctgcggtaatgtgactaataagacggccacgcaggacatccaattaaaattcgacacgtaatgttataactcaacaaatctaattatcgtgttacagtgtcgggaaaaatttcatcaaaaccaggtttcgttcaaaccggttatccaattcatcaaaacttaaaagtggatttattttcttattacacttctagaaacaaaaatcaaatggaaactataaaaaaattctttcgaaaatgcaacaattttatataaatgatttgtaatttttttttttttaacgtctacttttattgatgaaaaatcatatctaacataaacaagaaaaaaataagaagaacttacaaaaaaccaactaaggttgaagcaatttaaagttttaacttagttttttcattgatttaaatttcaaaccaattatgagtaaaagtttaaagcgaaagtgcgaaaacgattttcccacggcttattttatcgtatttataaacaaaagtttccattatgcctaaacttacattaactaagtcagaatttaaatatttttcgttgtaaatatagtttatcagctatatttacaatctcaaatatatagcattatctacaccctcatggtccttccattgactggcagtcaggcccggcccatgacacatttctaagaaacatgggtattgagccaccaaaagttttaaggtttttagtatcaaaattatacctcaaaaatatttgttgcctcattttctaaattttttagatttagtctcaatttttaatttttatctatttctattgaatacataggtttcattttcataacattttaagatttggtctcaaaaaaaaaaaattcttctataaacccataaaaaaaaagttattttgagcctcatttttcacaagacaggcactgctggcagcctggcagcaaataatttggttcaaatgaaggatttccaagtatgcctttatagcttcggtgacaactagacaacgacttcaccaaagagatggaattttgctatgggatcttcaagttccttacctttaatgcaaatttaacgatgaaacctcgcaacacattctttgagtgcacattctctagtgaagtatgatcttaattcatttctaaggccgatattgatccccaaaactgtttgtggatactgaatagagttcatggataaagactctgccaaacaaaaatgtgacagcgagaaaat

SEQ ID NO: 41887 - DNA, 232 bp, Arabidopsis thaliana landsberg
acgctaagtagtggagattatcaagcacattaactatctaatcgaggtcaaccatacagctctcacatgaccaatgaaaatatatgcaccattatcttgtcttactagttgtggataaatattttaaggataaaaaacgtttacttgaccaattgaaagttatagaattattataacgaaaaatgtcttaaattttgcaaaacgatgtgtaccatacttttatttagtacct

SEQ ID NO: 41888 - DNA, 1528 bp, Arabidopsis thaliana landsberg
attcattttagtgagagttttcatgtctagatgttatagagttttcattttagtttgagttttaaacaaagatagaatgaagatattaagattgagatataagaatgaaaaggaaataacattatcacaactaatttgtagcattttcgaaaatttattcataatagtcttggaacagaaaatagatgtaattactatttagagaattccccataagctaaacaatttaaccaaaaaaatatattgaaattaactaatttggtgaaagataaactgataaagattccttttagttttataaactatcttggagagaacatcgacaacacccaataattgctacccatatatattgagttacaatattgaccaaaaccatatggtagacagccaaaaataaaataaaaaaacttctttgggaaataatatttatttatggtgagaagagaaccactaatatttgggaaagattcaccataataatgaaacattaatttaaacttttttttcattcgctgacaagacttcttacctacacatataagttttattttttgaacatttaatttttatatgttaacagcagaataaatctggctaagttactgaatttagggtttaattgacatttcttgcagaattttactgaataatttagagcttaaatggtaacagatgattttttttttaaaaaacttacctaaagacatattattgctgctcaacaatatttaattttatattttatagatatttaaaacttttaatatcatttaatcatatgataaacctaaaaaattcttcaactttctcttttcagtaacaaattatattctaaaattgaaatatttgatgaccatcccaccttctcgttatagatgttgtacacgtcaaaatatagtggtggaaaaaaacattatgtcaaaatgttgatgaaaagccttagcgaggccaatggatatgtcatcacatcatgaaacatgtgatgcaacatcatcactctgcaaggacatgaagatcaatctgcaggtgcttttttattcttggtgaaacagatggcatatacgtataaactcttcgagatattaattagtatggttccatagtttttgtccggtatacacatttaaaactaaaccaaaatccgaaccggacattttctcttacagttaggtataacaagagagaaaatgacatgtacaagaaatgtgaaggaagattacatggattggattgctatgaacattggtttgggttctgatctagtaccagttttagactccttaaccgggactactgcatctggaactctttgacatatgttcttgatagaaaggatcatcagagccttgaactgaactcagtcttggagatgaaaatgaaaaactccatccttccttatgcattgcctcttggaagccttcttcttattcaagacaaataaattataaccggaacatgttaaaggtccaatgatagcaatgtgtagcatttcttctttgcaacagtcctgacaatagtccaccca

SEQ ID NO: 41889 - DNA, 716 bp, Arabidopsis thaliana landsberg
tttaaagcatggttttatatataattgtgacgtaaatatcaaggtctgaaagcatggtcattttatttttatttcgtataaatgaaaactttagtctaaaacacccggtcatgtaaaagttaaaggaaaaagaaaagaatgatagctgattaattatggcaatgtcgtactatactacgtcgagaactattcatgattagatattcatcggtatgataaatcatatatatgtgatgtgcctagtgcagaaacccaaactattatttatttatctactcctttgggctttgacgtgcaagtaaattcttagatgttgttttcgaagtttatgggtaggcaaaccaaaatctggaatgagatatagaagaaacaaaaagaatttcgagaatgaaaattatgtctcattttaaattcaaatgaactataattcataataagaacatatgttaaatgatgtttttacaacttgatatggatttaaattacataaaagagaaaacacaacttttacctactccttctcacaactcattcatttttggtgtaaagttgatatatgtggtggacaagtgaaatttggcaaaacttggtttaacaattggctaaccctatgaaacaaattaggcctttgggtagagctttcttttatcaagtaccaacttcgaggttatatatatgctctgcttttatatatttggcatgatctaggacttttg

SEQ ID NO: 41890 - DNA, 556 bp, Arabidopsis thaliana landsberg
gcctatcaccgggaaacacttccgatgcccggaaagtcccacctttcacctgatttacaccaaacaatgtgtaaagattcaaacttaaaaacaagaatttcaaatttaatataagggagggactgaccacaaggtttcccccgccggaggaagggaacctgagaggttttccgatcatgtaactgccaccttggagatcaataactagacctcctagatcagcaacacgtggcagcatctcaagtccagtttgtaactgaaaagcatcagttaaagcttcaagtattgcgtcactactgtcttgtccccctgtagggtcagctccgtaaccaatcgggtatatcaccttcccaacctgcacaaaccaaactcacacacgctcacaaatcacacacacgtgcctgtaatacattagaaactgaacaagaggactttaccattttgggagagtgagaagaaggagaagacactggtgagagagtgggagtgactgcgagtctttcttgaatcttctcttggagctttaaaagcttggtcatgtctcttcttaaggatg

SEQ ID NO: 41891 - DNA, 369 bp, Arabidopsis thaliana landsberg
ctaagaacatggttaaggaaagatatattttcttaatgttttgcaattatttaaagtggtctaaatagtctctatccttttaagttaataaattccagaaatatactagtggtgaataaaataaagtaatgccaaaagaatctggtcctacacaaatcataattaccttttacttttacatatcttgtaatattaattattcaaacacatgttgataacactagattccccatcacaaaactatatcctaaaagtaataacaacaaatccactaaaaagtcattgtcatcaaatgaaaagttcataatttagatctttgcacacatctctatacaatacgtgtctatctttcgcaaaacaaactcaaac

SEQ ID NO: 41892 - DNA, 463 bp, Arabidopsis thaliana landsberg
atgtagaacaaggttgtcataaattttggtactatattgttttttttgtattcaagtgtatccaacttggtggggttcaattgaaaaacgaattaccaaattacatagtatcagtttttcagaactcaatcatagcaaaaattaatacaagaagacttcaaattaaaagtgaaacgtttggtattaattcgtgtttttcaatttaaagagagaataatataataatgacttcaatcgtaattcggacgtaaccgaaaaaagctttaaaacccaaagcaatacacgaattccaaaacacttcacactctcttcaatggcggaaattttcttcagaatcctttcttgtttatttttctcgtaatcctctcttcttttaaaacgtctgtagctgagtcgacaatgagtcaactcggtgttgaaactagtcaagcccagccggagacgccacagtcaacgacatttc

SEQ ID NO: 41893 - DNA, 578 bp, Arabidopsis thaliana landsberg
  unsure (1)..(578): unsure at all n locations
attagtcaattagtttcgatttgggaaaattaattatagtcaatcaaaaaaactataaaaagacatcctttttttttcttcttctgaaaaacaaaataaaaagacattctaaggattaaaatttcatgatgagaaaagtgaccgacatattattgatttgttattcaactttgataaaatgcatcttgttattgaaaataaaagcccatgataaacttattggaaacagaaattcgtccatgtcccaatggaggctcaattatttttagcccaaaggtttagtaaagtagtaatcagcccatgggctacttagattggaaaggaagaaatacgccaattttcaaaccctatagtcgcgactcgtgagctaccttgatcgtcttcctctgttctcttacnnnnnnnnnnnnnnnnnnnnnnnnnnnnnnnnnnnnnnnnnnncataagtaagtagctatgcgtatgtctgcagctatgttttcatcctttcgatgcaagacgaggtcttcaaaggtgatgttgagaagaggaagaaaaagaagaagaagaatagaagacgctttggtcgcgccggagat

SEQ ID NO: 41894 - DNA, 595 bp, Arabidopsis thaliana landsberg
gactcacaacattctgaatcgtactaacaacgtcgagatcagtcgatgaatctgagctttctccactagctttcaccatcagactgatgctgctagggtttcgagtaagagataatggagaaagatcattcgtacctcgagttagagaaaatgggagtttttgaatcgatgtgagattggattttctctgtgtgagtaacaatggcgaaggcaaagttgcagaaattgaagccattctttaaaaaaaaaaaaagaacagaacaaaaaaattgaaactttagagattttgattcgattttggagacagagacgaagaaatttttggttatggattagagatagccttatctttttataatccacgtggcatttcctaagtggcatatcaaatctcaaagatgacaacccaattcgccacgtggcagaacaagatctatcaaatgagtgaagaagattctccactatacaaattacatcaatccactcacttactttggcaacaaacaaacaacaacaaagagagaaattaacatggcgtcttttgcaaccatcgccgccgtacaaccttctgccgccgtgaaaggacttggaggta

SEQ ID NO: 41895 - DNA, 576 bp, Arabidopsis thaliana landsberg
gttaaataaaatcatataaaaaaaaaggctgtgactttccaataaaggaagtgatcttatttagacgagtataaaataaccttaaacattaaggatatacaaattaccaaccatggtctaaaagactaaaaacaatctaatctagtggactaataaagtgacagtagaacattacacggaattcttaattagatcatataccatagcatgcttaataatatacactgaactaaagaatttttattcaccaacgaatctgaaaatttcctaaccaatgaaagtcgtctgttagctaaactattcccaaaaaagaatgcagagaatgcggatatgacgtggcagttatatacacaggtggcgtacgtaattaaaacaaaaataaaaaaatttaattaaagattaaagaaaaagagccaactgattcacatacatatttgagtttcttcgcttctctctcaaattccaaacagaaaagaaaaaaaaatcccctaattctcgagtttctagggtttttgcttcttttgctttgggtttttgtgtatcacgtgtgcgttcgcgagaatcaccggctgaaat

SEQ ID NO: 41896 - DNA, 858 bp, Arabidopsis thaliana landsberg
acgatacccgtccttccattgtttcattctctattggtcatatcccaaagagcgcacctattgtgatatcgcgccatcaccttcattcggctaaagcgtaaggtagaaacagtttagataggtgtagcgtagatatctagttttatatttgttattaaatattaaaatattattctcaaatatcatttctatccaataactttaatcaattaaaaataaatattatatacaaaatatttaacgtatttttgaatatatttaattctattttaaactaatatatggaaatgatttaaattgttataacaacttgtaaagatacatttattcaactatttggagagacaaatattgttactatttttttcttttttgcataggaagatcaagtgataaactaattaatagtttgttcctacccaaaaaaaaactaattagtagtatgtttataattataaatgtattttcgtaatattattagtaggatggatgaccctttcaataaacgaataatgttttttttttcaatgaaataaatggatagttgagatattttattccaatttaatggctgtatggcagctgcatatagttgagaccatcgagtaattttgttaaagctttggtgctactagtttttttttttcaattaacattgatgggttgacttgacttaatgattggaagttggaacgcatacgttgagttttttcacgtcgtgttacaaagtgtctcctattatccaatctaaacaaacaaagctccaaaactctctcatggcgacttcttcctcctcctcctctgcggctttcatgatcgaaggacccgcccaacatcaaatgttcatcaatttccgag

SEQ ID NO: 41897 - DNA, 539 bp, Arabidopsis thaliana landsberg
tgtgtcgctcctccctaggcgcgatcgacaaccgggggagctggaatttctcaccggagcaggatctgcgctgccgcaacgtcgcgcgtgtggccggggacctcgcaaccgtcgatcttcggtaagctgctgcgctctcggactatgatgttatcaagatcatttaacacctagcggattagtgaatcgagcagctcggggcttgggagatcgccggggagcgcgccgccacttccctcggctgggtgagggacgaacatggtgacccattgatttcttgcgcaacgacactgattagagattgcttaccccttcgttcagtaagatccggacggttgaatcgtgatcgattggctcagatctggacctactctcataaaactgtgaccgttggatttagatcgtagggattcaacagcgtaccggttcggttgtgacttgatctaatccaagtcgtccctgcttcatctcacggctctgattcactcacacccgtcgctgcgtgctatttacactagagaccccggaattctagagta

SEQ ID NO: 41898 - DNA, 678 bp, Arabidopsis thaliana landsberg
ctatgattaactgcagatattgatgcatatattatccaaagaatggatttggacaaaattatgcaacctattgtatcagtgtcatgtcgagaaaataaagcctttggactcacaaaaacgttttctattgttttggttaattgaggaccaaacagaaaaaaattgttggtcaatgagggcctaacataagcccatgggcttatcccaccgaaagacagacacactcgcttacataaaaccccaatattttttgtacgtgatcaattaaattgagaaaatttgtggcggctttagattctttgtttgccttctccaagtccaaccataatatttatactctgtcggtatactatttgtctagcgacacttcccggtctgctttggctacttcaacatcggaatacagtctctcttcttctggagtgttttttatagcctcttattgatatcgagaaagttatatatggaaacttcgtggatttagctactagctagtgcgagaaatagaatcccatcgatacgaataccggcggcaaatgtgtatctagatgactagataagaaggcttcctagttcagctgtgttttgcttctttctttcatctggtccaaattagtaactggtctcgctgtcactagccgccgagttggctcactagaatggtagcgacttgacaag

SEQ ID NO: 41899 - DNA, 825 bp, Arabidopsis thaliana landsberg
tttagaacataaaatggactcatgcatatatgagagtatgacacgtcgaattggtgaagcgagcgatgacgtgtggaagaagagattcggaaagagaaggagcgtttaatttcgagatgatcgtgatcagagagagaccagatccttggaagaccgtgacattgccagtcacgtgcctcttttttgactaccttcctctctgctgctttaactgcagatgtacttatcatttattttcttactttaccatttaaataatatatcaaaacactgtagtttgcttagcattgttaaacaagactactcacttggtacttggtcgtggaatattatacggtatgcaatgaatttgcataataatctagattcggagcagtatcattaattaattttgttaggttaaaacgctttgttattaaaaatcgcttagaactgaacaaaaaccaacacatatttagaatattcattgcaacatctttgtagacaaactaaaggagcaaattcacatgtaaatctaaagaacaaaagaataaagcatagattaatcatacacacataataagaccgggaccaaattttcctcttttgccaagttcccaaattctctataaatacttcttgtctccatttcacaacagcaacgtggactctttctttgttttggctgactcttctttcaccgtttccttagagaacttattcatctcataaacaccacacacaacacacacttctctttctccttctctctatatatatagatatcaactttctagggtttccaagttcatatatagtgatgggtttccaatgtcttctccccga

SEQ ID NO: 41900 - DNA, 626 bp, Arabidopsis thaliana landsberg
ccataaagcgccgacgtgccaagggacgttggaacctctgtcctaagtccaaccctagcagcggcaaacgggcttgaagtttgtttctctcttcactctatctgtaatcttgtttatgtgctttttttccaccagaagatacaatgagaaacatggttcgttgagctcttttctgcgttttaactctcttgcatccttgattcgtttataaatcaatgttcttggaatccatcacaggtattactatagtacttgcttcattcaatttgtttctaacagaaggaataacttcaaagtcaaaaattacttgcttcttaatccagcgacacttaccttaacattcatttatacatacggacgatatgtgacaagattgccacttggtgggcatcgaacgtaacaatgcctacctaaatgattgatgtatagtttgggttcaatccctgaaggattttactttaaatcttactagtgttcattttttaaacctatacaataattttcagttttaagtactactaacctaaacctaaattgtactattatttagaaagtttaggttaagagataaagaacactaaatatgagaaggtactgcttattggaattagggagggacagattgt

SEQ ID NO: 41901 - DNA, 521 bp, Arabidopsis thaliana landsberg
  unsure (1)..(521): unsure at all n locations
tgggatgaaaattataataataatttctatgtattttttttttttttttttgttaaacttcgtttgcatctaatactatgcagcccatatactaaatgcctaaatctatacatatttagattgatctttaaatatcaataaaaaatttagctaaattttgactggtttagaggatttttccgatgtgtcattaggattatacaactatggtttaaatatcaataaaaaatatagctggttttacaatgcaatatgattggagtgttaatttttattgatcagcctcctttggatacatattcttttgttacatgttaaatgataatatttttgcccggtatgttgaagtaaacattaaaaatgtacatacaacttctctaagaaataaatgttgagacactaaaaaaaacgtgaacttaaggtcaatatttaatatttatataaccaatcacggtataaaggcttaccttttgaatctgtctagctagttattgaccgttaattntaaaaacacttattga

SEQ ID NO: 41902 - DNA, 503 bp, Arabidopsis thaliana landsberg
gaaagaaccggatcaatgtctagtttatcgttttgttgtagattaactcgaaatcttttccctcactcacatcacatggacgtgatactgaaaaagtcactagctagatcattcatcctacaattgtttcaccacatttaccttcaactttggaattctctcacaatgaattacataaaagaaacatggttatgatatacgtagtcaaatcaaaaaatttagtttctcttcatgcaccaccatctttttagaaatcggaataaattgcaatgttcttctttcttgaacatataatattagacggccaccacatgaacggtcctaaggtcaaccaaaacttttgaacatccatcaatattctctatcattggcctctttgagttatcccatgaccatgagtggtgactggataaatactcatttggtttaagatattatgtacatacataattacttggtaacacataatgtaagtatacaatattgatggatgttcaaaagtt

SEQ ID NO: 41903 - DNA, 476 bp, Arabidopsis thaliana landsberg
gaaaattgctcagtgttgacgattcgtgcaacttttggatcaaccttctgtgggttagtcgcttcatattccattgggggttgtcggctgtagatggcggcattggttgcgccaatcggaagcttgagaagcttgtacacgatggcggagaatattcgtgagaaaatattctgaacaacttttacgttttgtgcgtaatttttgaagaacacatgagtcacgttatctttgataactcggatttgttctgtttttgatttttgaagtttaccccagataaggatgcttacacgttgcgaaagttctgacgaacaactttcatcgagacgaacgacatatggttcgagttttttaacaggtccgaatccgcgaagaatagagcggaactcatcaccttgctcattgttctgtttgatttgagcaaactgagcattgttaaatccgagagtgaattccttaccagatgagtattcata

SEQ ID NO: 41904 - DNA, 1303 bp, Arabidopsis thaliana landsberg
tttctgcttatattcggcaacatcaaaagatatgataattgaattgcgactatatttcatggaattcatatttcgtaaataaataaaacttataaaacgaaaaaaagttaaattaaattcaccaagatacatcaacataataatttgtgttactcttttgatttaatcttaataaagttagttgatgaaagtatttgaccaataagcgaaagatgaacaaaaccctaaacaatagatgactcacggaaaccaacgccgagaattccgtcgaacacttgagctgcgttttaaagttctccaaatggcgccttttgcctactaaaaaacctttaccttcttcacagagatctaacctctccttttcccaatgttcggcactccgtcttcatcgccgtcattcggcactccgtcatccacacccgcctttggcacatcttctccggcgttcggtacaccgtcagctacgcctgcgttcggtacgccatcgaatccttccttctcctccggcggatttggctcttcactcttctcgtctcccttctcatctcaacagccacagcaacaacaacaacaacaacaacagcagcagcagccgagttcactgtttcagcaacagccatcttctaattttggttttcagtcaccattcaacaacaccgctcagcagcagcagcaaacgcctttcccaaatgctcaattgactactcagatggctcccgttgctccaattccttactctctcgccgatcgtgatgtccaggtttgctatttctttgattccagatctacaatccctaaaccctagtctttccattgattgataagccttgattttgatttaggctatcattgaagcttataaggaagatccaacgaatcccaagtatgcttttcaggttagtttaggtggaaaattctggattctttagctatgtggtgatgatttttgtttatgttaactgttgtttcctttgttatgtagcatcttttattcagtgtgactgaaccacagtaccgggtgaagcctgcagctgtatcagatgtgagtatcttcttcatcttttctactatatcatggaaatgtgcagctttcttgtgtttaatgaatctttttaattagtttctatatgatttctcggagatatttctgaaggttttactcgtatttggtggtagataatgtgggcagaggccatgagcaaacttgaaggtatggattcaacagaaagagagcgcctttggcctcagcttgtgcaaggtttcaaagatctctctcagcgccttaaggttgatttcatcaact

SEQ ID NO: 41905 - DNA, 557 bp, Arabidopsis thaliana landsberg
tttgcaccactgtactttcatgtcttgatccgcatctatctgactttaatgtcttgtctcaaatttgtcctgcgcatttagctttaggtagcatatataatccagctaatttcattggaaaccgatgaactagtaaatttaaatcctgttgttttttgggtttatggttcatattaaatccagaatttaagagtatttttgtaatgaggttttgtagttttaatgttttgaagaatcttggaattacgtttaatacttcaaaacattataactacaaaatctcttctgatgaaagtgattatagaaaagatcatttaacttaacttacataattaatgattaaagatttacatgtcatggaggagtgactttgaagctctgcatcaaaagataatgacactaacacataactcacaaaattaaactacaagtctacaattgaaattaatgggcttacaagcacaatatacagactgtctgattagtttatccaaaaaaacaaaaaaactgtctaatgataactttttaaaaatattataattgtgaagttttatata

SEQ ID NO: 41906 - DNA, 701 bp, Arabidopsis thaliana landsberg
gcctacgatgtattcagctgcgggtcagtgtagtctctttcctcaatcaaccattggaagtacctggccagtatataaggttagcaagaaaaaagttttagaattttcccaacttcgctacaacaaactctggtggactttcctcttactagtaaggttttactaaaattcaactgggtgaaatttatttatacggttagtaactatacctctgtatgatttcaacctttttgggatcaatagcttggatcacttgctctgcaataagattaagaaacacagacctttacatcaatcaagactttaagtatttaatcgaccattatacacataatatcatatgccattcaataacccaaaggcgaagaaaaaaaattgaactatgtaagtttttttacagcaattctggaacagatgcctatattaatcttaatcttaactatattgatgaacagcacactagagacatgagaatatatgcacggacaagattctgtttcctaaacctaaagcagccttagacttcttgcattaaattagtcacctcagacttcagctaagccatatttcatcaatacgagtccagaataaatcacaattcaaaacctacgaagcagttggcaaaatgtttctaaacagaacgaatagagatcaacatctgacttccaatcaaactcaaatgccctgttaaccctgattcc

SEQ ID NO: 41907 - DNA, 136 bp, Arabidopsis thaliana landsberg
attggagtctctttctgcattactgtttgcattgttcaataaggaaatcaaataacttttgattctaccattgaatcttacggagttttgataaaaagcttgacgctttgaactataatgcatcttctattgatac

SEQ ID NO: 41908 - DNA, 451 bp, Arabidopsis thaliana landsberg
tcaacgcaccggtttgggtggttcatatgcttcgtgggcttgtctcttggtgggtattgatcttgggaatgcaactcatgagagttgcttggtttgctggttttgcatctagaacaacaacaggtcagcaaccacaatctgttgcttctaagtaaagacagataaatgtttcttcgtttagtttttaaagtcatgtcaaagatttgtaactctttcttcactgtatagcttttattattcgtgggttggtgataaggattaaaaaaaaacacatattctttatgatcatattcgctcttttagttaggtatgtgatgttattcatttcaatattaaaggctgataggtagacgttaaggttgagaatatgcaaagaatgacacagattcctgtcaaagaaagacatttaagaatttacgaaaaatgatgaaaatgtttctattaagaaagt

SEQ ID NO: 41909 - DNA, 693 bp, Arabidopsis thaliana landsberg
aaaacccaagtaatacagggaaaatgaaagaacagctcttatattttttttgattataaacagctcttatctgctgaacgggataatataaacagctcttatctatagtatattatagcttatatcaattctttatttgttttaatatatacaaggagatttcgaaccaaaacaacactttttatatatatcattctactgttctagttatatttttgatatgaatcttgttaatagtttcagtaagttgttattctattaccactgttacgttttttggactgaaacatgtgaaaatctgaaaacagaagcctcactgccacagccgtatttgtgaacggtttgctctttgtagcaacatagtttcatgattccctcgtataggctggtttaaggttttaattgtcttaatgatctatatgttattcttatgataaatgtgctgaacgaattacatttttcttaaaagtaaagcgtattgataaaattaggtagaagaagttatatacatacgtgagggtgggccaaagtcgtatatatttcggaagcgtgttctataacattagataactcgtagctgcaacaagaaagttcaatgtacgtactttcgaaaatcaagtggcaattggagagaaacacataatttgcttcaacaaggaatgaactacggcatgtcatcacccgaatcacatt

SEQ ID NO: 41910 - DNA, 542 bp, Arabidopsis thaliana landsberg
cgcgagaggagtttaggcgtgaacgccttagtgttgtacaatagtacaccaaagcggaaagggtcaaagatagagtacatacgaaaacgtagagcactgttggctgacacattgagtcatgagtccatcgccatggagtccccaacatatacccctgaggttgtacaccctacaacagatgcaattgaacctgatggatccgcagttaccccccgcgactgggttatccctgaaatcgccagtaacccgttcctgccagcttcaacacagactgaggatgccaattcactgcatatgtctactggaccactaagacgtaaacaacatgtgccacatggtgaaagacaatctatcttagcccgtcgaaaccggcaatttgaagcatccatttcaaggaacatggctactgcgactgatgataccatcaatgacgctggggaaggggatgattggacacaaccccatatgactgcaaagatcaacaacaatggtaatatactatcattgttttcaagtcagatgagttgtcggtcattttggct

SEQ ID NO: 41911 - DNA, 600 bp, Arabidopsis thaliana landsberg
attcaaaaaaacaaaaacaagaaaaaaattcaaaagttctttcaaacaaaaaaattattagatgtttttgaattttatataactaaattatagttattaaaataaaatcaaaccaatgtacaagagaaaaaaaaagtgtggtgtggtgtatatggtggagagaaaaaaaaagtgtggtgtatatgtccagcgagaactaacggggtcatttattgatgaataacaagtttctggggtgttttatgaaaatactattttttatggggcaaaatccgtaaaccctaaaaatacagagttcttgcgtcaaagagactgatttgttcttgtgacactgaaccattggagttgactgatcccgatatcatgcaatatctatcgcactctcgtagaatcgctcgggctttgaaaccactagctctcgtcgagaccgatgtgagatttgtatccaatgctccttctcatgttgttcatcgatctctttcccactctgtatttccaggtactatcttcttcatttttcacactttgtttgtttcgtcgttgaagctttgaaaaatgggaactttttggtttataggaaaaatggatacttgtaatcag

SEQ ID NO: 41912 - DNA, 570 bp, Arabidopsis thaliana landsberg
aactgaattgatctttatgaaaacatagaggtaagacatgagagttgacataatctcatcgatacatattttaagaatttctcttgttgaatatctaaagtcagaaatcgatcattgtctttcaagaaaaactatctttgatcaatatctctgcatattataggtcaacaactaaacatttattttaaatttgttttcaatctctctattctttatccccaccttcgttttttctttaataatgttaaataaaaatatttgtaacgttcatattttgggaagtcttcaacaatattcgacgaacatgtagctgtaacgtccaaaagtcaccaacccaaatagaaatttcgaaggccaaaatatatttgtgctaactaacttcaatatcgttaagcttagctcagagcaaataattgtgttggtacacacaattaaaacttaacaaatactacaagattgattgaccaaattagaagtgttaacatatggaccaaaatcgttgaataatatataaagcttttgacatttattagatttgttaataaacatgtgggagagagagactgacta

SEQ ID NO: 41913 - DNA, 257 bp, Arabidopsis thaliana landsberg
acaaatttgtctataatattttaattagcgtattcaagtagttaatttcactgttgctccaagtaaaaaaaaaaaaaaaagaagttaatttcagaactcattagtgtaattatgaatcaagagttttctttgtgtgtttgtcaacaaatcaagtttaaaatgtactatattaatattagagggtaattaaaacaacagcaaatcaagtttttacactaatattagagggtattagaggatatttttttttgtaacta

SEQ ID NO: 41914 - DNA, 522 bp, Arabidopsis thaliana landsberg
cgttgcgtttaatatatcgggtaattactcgagcaatcaccaagcttctagtatccatagttaactgtattagatcgactctatcgatttccaaaagttaactccaagttgctttgatctgttgaactaattttggacttagtataagaactgaatcaaaggttgcatcttcagattgatgtggaatactcatcatataaccattgattttgttagtttttctttagtacaacaaagttagtagttttataaacaaaagacaatgagaatgagttttgatggaaaacgttaatggactctaaacataaaacatttgtggcccatattaattttagcccgtgacccatctgcaacataaaatcagtttgttttctttttctcgttaacccaaaaacggcgtcatttcacagacatttgcaatttgcattaagtttcagatgttcttcaatctctctcggctttactcaacacaaagcttctgtttttattcagcctcgtcggaatttaagcgaagcacgattc

SEQ ID NO: 41915 - DNA, 476 bp, Arabidopsis thaliana landsberg
caagtactaccaaataaatataaaaaaataaaaaaatgaaaaattgaattcataagaaagagatgtttatcaactaaccattcatgcatcattactgacactttggccctcctctataagtagtagaatttaattattactagtaattatgtacgtacaaagatgaagacacaaaattgtgactgataacgataaattcttcaataaatgtatgagaaaagcctatttgaaggttggaatttgataaaattaaagagggaaatcttttaaatagcaccaaatctaagaaattgtcggcagaatcaaactttttacttttaatctttagactaacacaaaactaactaagctattctcattagggtgccaaacatgtcggctaaaccggagttcaaggcattttaattcggtctgatttaataatattttcgtatcaataaaaatctattgagtcctatgtaaaatggtcatcgagt

SEQ ID NO: 41916 - DNA, 402 bp, Arabidopsis thaliana landsberg
acgaacaagtctgaatcttgacttactctaatcactatgcacctggttgagctttaccggacgctttagccactgtagtatcgccgatatccataggacccgacctatcggctgagaaaaatgggacgtcctggacaccctcattggcatccccatcgctgatcaaggggatccccgacgggctcagtgatacgaagcgaccaattaccggggagagatgtttgactacacggaaacaggaagacaagctcgaagaaagagagggctcacgtacgagcgatggtggaagcgtctgtagacggggtgtagaaggagctctactctttattcccgccgaaagggggagagtcatcaactggatcaaccaaaggaaggatatacagagagggacgacgaactact

SEQ ID NO: 41917 - DNA, 549 bp, Arabidopsis thaliana landsberg
acgcatatcgcaattgtcgaaatcatcgattccgtcattatcaagcttagttacctgagattgctcaacgcgttggtggaacagatcgataacaaagctacgccgatcgagaagatcgagaccgtcgtcggtcgtgaatactagatcggacaccgaaacgtcgccggaagaaaaatcggtttcagagatgtagagatcgccgtcgtctgattggatccagtgaggaagcggatataggatctgagaaaacgattgatctctcaggtgatcatgtagccgccgttggtggcggtaatggttgaaaacggcatcgttagcatcgtcgatctgaaggtaagacatctccgccatattttccggtggatctctttctcttttttatttgagaggaacaattttctatttgttttttaaaatttgcgtcaaaaaagactttttgactttatttatggaatcaatccaaaatatatatttaatgtaaaagtacaaaaatgccgctgattcacgctaatgggccgaacctaaatgggcttgattcgagtgattttt

SEQ ID NO: 41918 - DNA, 417 bp, Arabidopsis thaliana landsberg
tgacagggcatttcggtcggttattcctagattccgacaaaggtgcctctgtggcttgcagtggcactgacgaggagaggaaaatgcactttccggcctccggggtggatgtctgttggtaagacaatttcaaatttagcagataaatttctaatgttaacgaacattaggtgcttaagtgttaactgtttcttgttgcttctttgtttgtgaactagataatttgactcagatcttggaagcagaacgtgaatctcagtcgacattccaggcattaccatttagttacgtggagattgccagactactttttgaccagtaggttcttagactcttcttgtttctttgctcgcccttacatttataacatccaagagtgctgatgagtatcgatctcacttttggcagtgcacgtga

SEQ ID NO: 41919 - DNA, 479 bp, Arabidopsis thaliana landsberg
gacgcttctggcgaggcgcgcgcgaggcgctgatcactgccttcgccaccagctcgagttcggcgaccctgcccgtcaccatgcgttgcgtgcagacacacctgggcgtgcggcaggatatcgcggggttcgttctcccgctcggggccaccatcaacatggacggtaccgccttgtatgaagcggcggcggcattattcatcgccaacctggtgggggtcgacctcagcctgtcgcagcagctcatcgtctttttcacggccatgatcgcctcgatcggcgctcccggtatccctagcgccggcatggtgaccatggtcatggtgctgcaatcggtcggactgccggccgaggcgatcgccatcctgttgccgatcgaccgcctgctcgacaccttccgcaccacggtcaatgtcgagggcgacatggtcggcagcctggtggtgcagaagctcgttcgatcgtcgttcctgaggagc

SEQ ID NO: 41920 - DNA, 673 bp, Arabidopsis thaliana landsberg
catgaacagtttgtattattctaataattctcccatggcatatcgttatatcgtgatcagtcttaaactcttaatgatcataaatttaagacgttagaaaactgtcgcagaataaatatatggtgatagcaatcgagagaatctccctattcacgattggttattgctagagtcgccaaatatttatgaaccaatgacacgataatacaaacaaaaatttgtcaatgtcgttgtcaaaaacaaaacgatgagacattttttttgaaaattttacagttcaaactgtgtgttgtttttcatgtattgattatttagatttattatgctaacgagttctgtctgttgagataaaaaaaaaaggaaaaaagagagctagagatgtattttttgattctttcaagtttcaacaaatatatatacatcatgtgataccgaggggattacaaaacattacgtgtatttcaaagaagccaaaacaagcaggcccctacttacctttttctaaccaaaaatgtaattcttattttcattacaaataaccatttttcatttttattcaaaatattaattgattttagatttgacaaacttctcctaattaaaaccctacggaaaaatagttgacgaaaaagaaagcctatgtaaaaatatacgtatttatttattcgtacgg

SEQ ID NO: 41921 - DNA, 738 bp, Arabidopsis thaliana landsberg
aactttcaactttcttttaacttggttcgaaagggtttactaactttttgtctcactttttcttactttaatattaataagatttgatatttgtaagtcggtatatactgagttttcatataaattctcatccaaaattcagaaaaaaatcaaactatacggttaaaattaaaaaatagaatataaggcataagtatatatgcaacaaaaatatattaattatatcaatatcaaaacacatgtatctctctccgatatattgccaagctaattatagttaccgtttttagcatacaattaagtaaccaattgccaaagcaatgatatagagttttaaaattgttttctaaggaaaatgatggtttttaattaattatgaatctcttttgccggaagaaaagaaagaaaaaagttttgaaacactagttttctcgtggaaatatgaatttgacctacaaaaatagtcatatcgacgaagaaggtggatcggtcagagtttttgatatcaaatcgggacccattgaattattatttttaattgagtattcaaaatagtaatacttattaggattttgatcagtttgaaggttagaatgtacgtatttattaacaattcatttttttattattaccagtcagtctgatttgtcatgtatttattctgtcaaatatatcatttttcttgaaataagcaaaacaattttatgtaatctgcaaaaagattagaaatgtaataat

SEQ ID NO: 41922 - DNA, 498 bp, Arabidopsis thaliana landsberg
gtataaggttaaaaattacctgttcacatctttcctcaattcctttcttgtcgccagccccatcaagaataacagtgtcgtccttggagactgtaacctatacaaatagccagacaagtctcaactacacttacaatccaacaaggatatgctgagaatgtaatagccaaatctagttcatactaagagccaccatgtctatatcagttaaggtttcaaaggctacctttttgcaggttcctagcatgcttaggtccaccttctccagattcatgccaagctcgtctgtgataacctgtatcaagccaagtcaataatattccattgttgacaagactaacacattacacaacaaatgtactacctctccaccagtaagggcagcaaggtcttgcaaattggccttcctattctctccaaacccaggggccttgatggcacagacctgcagggagaaaactattaatctaaaagcaaagaagtcatagctaaaagtca

SEQ ID NO: 41923 - DNA, 623 bp, Arabidopsis thaliana landsberg
cattttttatgtacaagagacatatcatcccggcataaacagccgaggtggataagatcccccttgtctagacaaatcctacacactggtggattctcgatgtccgccattaaacctattaatccaaataattagtaataatgttttgttgaattattatagaactagtattccacccgtacgacgtacgtgaaaaaaattagattggtattatttatatgatagcattttggataattagatttatatcaaattaattacatgcaatattttacttataaatgtttggatttaaaagataatatatacatacacattcgttaatgatgaactatgtaaaattccattggattaacaaacattaatctagaagttccagttttctacaataaactttatattaaaatggtttattttcttaaaactgatttaattgtaactttaatttgtgatttaaattcattaatgaagttgttataagacattaaagaattaaactaaaaatacttcgatttgctaaatgagttagcatacaaaaatctatcataagccaatataagagtcacattatggcctgcggtagattgacaaaagaaaaaaaaaacatgcaggtaaaatttgtc

SEQ ID NO: 41924 - DNA, 794 bp, Arabidopsis thaliana landsberg
cggatgcggctgctgcgtgttagtccaccgcctccgctgtttctgtttccatagactccgtattgtcctccagaagtgcagccgtacatgccgtataagttctgtagcacatcgtattagtattagattaaggctatgctatatgaatatatgatcatgaacaagtaagtaaagattcgttgagacagacaaagattcttaagttcgttatacaaacacttatgtcagagaaggaaaaagttacggaccgtagggaatgatgagtagtctggcgagtatggagagtacctgcgaatatcaaatcaatgttttttgcttttacaaaacaaattacactttaagagtgacaacaaatatgaatgcacgtggcacgtggtcatgagacaggaggaagcatgtgatgagagagtaaaatgattggtgaaagatggaatcagtataatttttagttttacaagctgtccgttgaccactttgtcagtcatttaaatctctctatagactgtgaaaattaatcgatctattactgataataataatagtgtcggtccacaaagaaaatggaaacattagaggacagccagctatgtaatgcaattgcattgttcagtttaatagacaaatatgagttggcattcttttggtctcaaatggtatcatgttatgtttgatgcatgcatgtactatcatcatcatcatcattacatgaaaaaagagggaagtagaagagtgtacccaaagagattgagagggagaatgggatagtgagtgaggtgggtggttgtggtagtgga

SEQ ID NO: 41925 - DNA, 252 bp, Arabidopsis thaliana landsberg
agcaaacaaaaaaacatccgcggctggagggggtgggagggccggactgtagccaagatctgttgtgatcccaacgtacactaaatagcacaatgcgtaaagaccaaccaatcgtttgacatctatacggttatgaacggggatcaagatgcgctacgctagggaactcattatgctaagggccggtcatgagacacagctgggccgttgaaggaggtggagatagaagtgccaagggaatcttagggaaag

SEQ ID NO: 41926 - DNA, 1205 bp, Arabidopsis thaliana landsberg
  unsure (1)..(1205): unsure at all n locations
aaagcgccgatttgcatcattctgtgagtcagcgtactctgctaggacaagatcagtgccaaaagcgaaaggctgatgctttatcttaacacccaaatccggcaacctgaagactttatcaccaacttgatcagatgaataaggaaccatctgggaacatgaagaagaaactgtaacctcttcctcaaccaaaccaaaaccctgagaccacaaaattgagaatcaaaaaaccgaaaaacagagcttgtgaattttgtaaatcatcattagtacctgagaggattgacggattggtttgacgtttttgcccttgagtcgatgagaagaagaagatttgggattgaaactcgaactcgatgcatcagaggagttatgaagaatcctagcgagtctcttttgtctgctactccagaaattcttcacatcgttatcagttcttcccggtagatacgtagcgattctcgcccatttgttaccaaactcagattgtaactcaatcacagtcctctcttcgtcagccgagaacttgcatccactataaacaaacacaaaaaaccctaaatttgaagcaaacaaaaccaaaattgaatttgcagagagagagcaacaaagagaaggagaaaaatgtatactttttgagattgggacggagtttattgacccaacgaagacgacaggatttgccggtgcgttgaagaagacctttggatcgaatggagctccaatcacgaggaccgtatctcttgacatggttgatgagtacttcgtcttcttcggctttccatggacctttctttatctcttccttcttcgcttccattttcctcatcgctaatcgatctctctctcgattttgtgtttttgttcttctctgtttttgtgtgcggaagtttctttgggttttgtagtggcggttggatgcggttatcacccacattaccattaccctccactttcagtaccccactccccaagtttctctcgcatttcgaatttgatattattaccaaaatgcnnnnnnnnnnnnnnnnnnnnnnnnnnnnnnnnnntcatgtgagccagcccgtgtaaggccctctatttcacatgcatatatggtggaaagaaatgatgtgaagccccttcgcccctcgagagccttgaaagttgaaactacgaatttagataccgtattttacagcaaatgtagaaagaatcaaggtttt

SEQ ID NO: 41927 - DNA, 374 bp, Arabidopsis thaliana landsberg
atggcgagaccctacatacatatgctaaatgatgaatgtgaatattgttattagaatacctaattaggctaggtttgggtttactgtccgaataatattaatggatggtacacatagtttactatctatggtcttacatcttagatggccattgctttcaccagatgttttcctttgtaagaatggagttttgttttctcacagtagacagttgcggaaaaatcgtatctcctgctgattgatgtttagacttagcaattttatctcgaaggagtgtttattagtaggtttaaggattagcacaaataaaataaaaaggctggttacctgcagagcaaacgtgatgtctgattcggatactctcaggctaactc

SEQ ID NO: 41928 - DNA, 567 bp, Arabidopsis thaliana landsberg
gcagactcactcgccttattacaggcgcgtgcgtcgccctcaagcggtcgaccttgtcagtcttcacccggtcgattcccaggtgcaaagcatgattcatcttgacctgtgtaactcatttcccccaacatttggatacatttttttctcccatgtagactgcgcggattcattggtcatggagtggcctttagatctggattggtatttcgtgaaagagtgttataaactcaaggagcgtggctgttgtccagaagcatcaccgttggttttttatggtgatcttaaacaacaaatgtccttagtgacgggtctggatttggaaaaaaggacttgaaaaaaaggtttaaaaagttacgaagcttgtggggaaagtacactatgactatgcaggcatcacttgcacatgagggaactgtctatggtgaacaagtatgtactcacttaaccactttattgtatttctctgtttgaacatttcgctgtattcctctgtttgaaccactaagtttgactttccattgcagaagaaaaatgagttgtcctcagaaaagtacacacttattg

SEQ ID NO: 41929 - DNA, 329 bp, Arabidopsis thaliana landsberg
tggtgtaacctctcgacatggtgtaacctgtcgtcatggagaaacttctgggcatggagtaacctctcgtcatggtgtaacctctcgtcatggtgtaacctctcgacatggatcaacctctcgtcatgtgttatcgagtgtgcctctgccgtgctgctgcagaccccgagtgccgcgagacgacctcggccgcgctgctcgtgcccggcaacgccaactacttccccactggccgccgcggttgtaccaccagccgactgctagtgcatcttgatgctatattgtgtgtgaccttgtgcgtgtatgcaagtcccgagtgccgagaaacg

SEQ ID NO: 41930 - DNA, 676 bp, Arabidopsis thaliana landsberg
aacaaatcatgtacagcgagagggataactccaggttcaataggtgagcctcgcattgtatgcgtcttgccactgttagtttgcccgtaagcaaatacggttccttcaatcgagcagatatcattagccaaaaacgaaaaattcagtacccttgaaacccagaaaaaaggaaaagggagattcaaatcaaaagaaccccaaattatcaaaattgaagcaacaattcgaaaagggccaagtaaatcagctaaacccattagtagaatagctgcattttaccgttgaatccacgaacagcggcagaaacaatctccttggtccgtgcctcatacacttggacagttttacaatcttctctaaaaatccgatctgttattgtaggaatagagagagcttgggtatgaaaattgcaagccggagaagaaaatagaaagagaagtgagaagggaattgagaaaaagagtaccaaattcaaaagcgagagaagagtgattgggcatgaaaattgagtcggaagagatcttccagggacttgtcttcgcgtcctccgacgaaagcggtcgcgctctgactgagacatggattctctccattctccgataatcttctccggcgaacaaagtaccacctaaaatatctctttctcaggtgttcgaaattagttttccctcgctct

SEQ ID NO: 41931 - DNA, 214 bp, Arabidopsis thaliana landsberg
gcgactggagatgaaagtgttacagatgaccatcaccttgttttttttttctaggctaggttcaagaacctgcattctcagtcaagcaaaaataatgtataagtacagcaggagcataccacaaagaatgtgcatgtaactcggacatgtttgcacccaaacaggagcactaacatttctgattgccttcaaaaatcagagactgaatgatgta

SEQ ID NO: 41932 - DNA, 365 bp, Arabidopsis thaliana landsberg
catgcacatgcatgcgtggtatatgcgtactagctgatatatacctttcctatataacagattgactgcatcatgagtttatcttgtttctctctctctctctcttaataagaaccattacatgctagcaacaaataaagtgaggacataagattgacactatactgttgagcaccaaaagtggcgaacagtccggcccttggggggtgaagtccgcgtgcctcattgtaagagttgttggctatacaccctactacattctagtgaaccgtaagtcattgtagaaaaatcgagatacataaactttgctccatatgcaatttatgattgctggagagcgagtacgaagcaagcaacttgacatg

SEQ ID NO: 41933 - DNA, 413 bp, Arabidopsis thaliana landsberg
agaacgttctgtgcaaacacaagatcaaaataaatccagagacgtagatatatatcaattcactgtaatgtcatgggagaatgaatgtataccaaagcggcgatgtgggcttcctgcaacatattgccgtctatttctagcctagcgaccgggaactctggcaagtgcccagactgtttcttcccaagcaaatcaccaggtccacgtagaagaaggtctatgtttgccaagtaaaacccatctgatgatttccccaacatgttcaaccgttttaggctattggtacttgacccaactaataagcacttggattttctggttcctcgcccaacacgtcctcggagttggtgtaactgagcgattcccaatccttcagccttccttccacccatcattgatgcgtctggaacatc

SEQ ID NO: 41934 - DNA, 600 bp, Arabidopsis thaliana landsberg
tgcaattacctgctagcatcagcaacaggagcgataccggaaacagtccgattaaagagaacggccaagagagaagcgcctccgacgtagatcggtaagcttcgaaccaagtcatcgttttgggaaatgaaatcagctactaaattcttgctcggtttcggaccttcgtaagttttcggtttctggtgacacaaaaacacggaaattttcaaaaccaaaaagagaaagagagaagaaaagacggaaaagaaagaggaggaatgagaacctgtgaggttgaggaagaagaagctctgataaagcgagggaaatctaaaggaggactagagaattggcgattagcgttccaagggatttgaattcggaggatgattctcgcttccattgaagataaaggaagtgactcacttcaagtgaggttagagatggaagatggaagatggccgttaggagaaagaacctatctccatacgacgacgtttcttgaaggcaattctaaaccgatttatatttcggttgttctcggcaacattttaaaaaatcaagttaactgaaaaacaagaacgaaccgagcggaataaaccgaagttcccgggcttt

SEQ ID NO: 41935 - DNA, 625 bp, Arabidopsis thaliana landsberg
tggttgaatagaaagagacgtcatgattgaaggaaacagaaacaaacaccgagagggtaaagaaagcgacaagctacgggttttctttcttataatcactgactctaccgcgacctttccgatttctcttacaaatccattactgagacgacgctaacttacggcggtgacgatgatcggataaaaatctaaaaccgtcctgattcccctaaattccagagttcttcacactgaagtggtcggagttagccgccgcaggggaaaagagagggaaagctctcatagtgtgtgagatctgccgggtttgtttaggatccgtttaaccacccgacccgaaccgaaatcctttccaattaaagtcaacattgggccataataaggcccaaatattaggcccgataatgtttttccttttttcggtatgaaaatgttttaatcccagcgtctgataaacgctgcgccggacgtcaatgtgacgcagagagacctttataagtacttcgtcgcattctctctcttccgactcaattcgttttcctcctcttctgcttactggaaaagtctatatctccgacggaccttcttctctctaggtttgtccttttatctgataaagcttttagag

SEQ ID NO: 41936 - DNA, 517 bp, Arabidopsis thaliana landsberg
acctgagagaagttctcccacggctgctccttgtcctatactatgaatggcgcgcgtcggcgggagaggggggtagtttccttcccagatgacctgccacttggacatggcccggagcctctcaaacaccgatggctcgggggccacgtcccactgcacgttgctgacgttcaggagtcgattcttgagggtgccagagccctgctggcgtggcgacttgcgcaccacgccgccggccacttcgcccgacaggttcaggatgccgtagggcgggtccgtgaccactgcgtccacggattcgagctgcggcagcacctcgcggcagtccccgagccacagttcggcggttccgatggtgacgcactcaggcacagccacctccgctttccacacgcaattccggtttttgaacttgcatggtcatgcctctttcaacacgggaatccggagagccgtttttccgctgaccgaccaaacccaataccgccggccgctgggcatctgtaacaccacgccg

SEQ ID NO: 41937 - DNA, 661 bp, Arabidopsis thaliana landsberg
tgtttcagggacagtttctaaagtaagaccaccgatttcgctcaccatttttaacaggccaatgcgaacaagaagatccacagtttctcccttgcactctgacagttcgattcctgcaacagaaaataaccagcatgcaactatgatcacctaaattaacaaatgacaaaggtgcattcaccatgatggctaccattcactaacttatcgtatgaaatatttttaagaacatgttcggtttctacaggtgaattttaccagttggtttgtgttcgctaaactaagttcttacaaaaataatcccaaaaagatagctaaaattgatagatggacaccaaacctggaaatggagatgaaggggtattgacttttgaaacagaggagacattgccaccagttcgcatggtggtcgaagggaggcctgatgatccagagtggttatttatgacagcagaaagagcatctttgtgttctttccactccctctctgcttctcctcgaacacttaaaagccaacgttttgtcaatggtagcgaggaagacgcttggtctggggaaccatgccgactggaaaatgacttcttcagatattccagaccagcaggtcccttaagaagtggctcaagagtttcaaacgagatttgctgatttccttctttag

SEQ ID NO: 41938 - DNA, 218 bp, Arabidopsis thaliana landsberg
aattttgggcacagctacggatagagttgttgtcagcaagtgcttttctccctaacgagtaaccaaattctagtcagttgtggagattatactggtcaagccaccaggtataatcttaccacaggcaaaagttagacaatgttattactgttgctgattggtcaatctatttcatgtctgttactgcagcgtttctttagacacctgtgtatgtcagc

SEQ ID NO: 41939 - DNA, 153 bp, Arabidopsis thaliana landsberg
atatgtaaaataactaataatgaaattataaccatttaaattgcaaatgagttgcttctgtatgaaagaggagggttgaaaaaatgaccaaccaaaaaattgcttctttatgaaacatgacattggtgaaaaaaaagttttgaacactgaaat

SEQ ID NO: 41940 - DNA, 484 bp, Arabidopsis thaliana landsberg
tatatattctctctcttttattggtttgatgattgatcatacaattaaacctctacatatgttcggatgtagtttcacttttctttattttttaatttctgttagatttatctcccgttactctaccaaaaaagcgctaggcgctaattaggcgatgaccgaatgccaaagacctaaattgccgagctggggcttaagcgattttatacggttaaaatgtttacaatataaaattttatacaaaacacataaataagaaatatataactattaaatcatgagcaaaaattagaaaaaatgttcatttagttcatatcaaacatatcaaacaacatatgaatataaagaggaaacttagaaatttaaatttatgtttttagaaagtagaaaaatatactaaaattaaacaaatataatattaagcggtcgaaacggttgtgtaggcatcgtgtgagcgcttagcgcttaagtcggagcctagacg

SEQ ID NO: 41941 - DNA, 434 bp, Arabidopsis thaliana landsberg
acaatcaaaggaggaacactttgttcattcctgaagttatttgttggatcaatcttccctttaacaatggccgatctcttaaaattacttgcaagatacctaaacccccataatttcgcatcttcaaagctcgtattaactcctctgttcatacctaaatcaagatctcggtaattcaaataagctcctcttggcgatgcagagacataaactctcatatgcctataaagcaatctcatccatgtcacatgtttctgcatcactgcaatgtccttcaatctccatttaaccatatactggatattatatagattccctcttctatgtggaaatggagtctctgtttcaccaatctcatacatgatgccacctaatggctccattatcattatcggagactcgatctccagcatcgccaaatatataccttctag

SEQ ID NO: 41942 - DNA, 593 bp, Arabidopsis thaliana landsberg
ttcataaacatatatcgctttctggtctgattctggcgttttttttttttgatgaaatcgtaaaccattcggtgtgcgtagaatgggagatacgttatttggcttttagatggcacgatgtttcgaataaatatggagattcggcaagctttgtccatgagagtcgggcacttcaagacgacgtgtaggtgattgctgctgacctataagctcgtgatgtcatgtctaatatcaatgttgcatctatgaaccgaagtcttcttttatcaatagaaccgaagctaaaatttacacattgtatgttgtttttcgttaccaacaaaaaaaaaaaggtatcgtgttgtagtcttagacatcgcgcggtttcatcttcggaaacggaaagactataactataaaaccaatttcgtgttttagtttttgtatattttgtttagacttcagccaacttcgtgttcttcgtgttgtgtgtttttcacccaattttttcttctataaaagaagaaaaaaaaaacaaattttaccatacgtttctaatttggggataaccaatagaactcagttacacttattattttatttaataatcagag

SEQ ID NO: 41943 - DNA, 613 bp, Arabidopsis thaliana landsberg
taactcttgtcagatccttttgtctgaacaaaataaaaatcttatttttaaccatttttccgtttaaattgatcaaatcccaaaatgcaaaacctgaaatgggttttgatgaatctcttgtttgtttctgctcttgttcgtaattttgttctttcatcatcacaacaagtaatctgttcaagccaagacagagcaacacttctgggtttcaagtcaagcatcatcgaggacacaacaggagttcttgattcatgggttggtaaagattgttgcaatggagattgggaaggtgttcaatgcaatccagccaccggaaaagtcaccggcttggtgttacaatccgccgtgaacgagcctactctctacatgaaaggcacattatcaccttctttgggtaatctccgatctcttgagcttttgctgattactggaaacaaattcatcactggttcaatccccaacagcttctttaatctgaccaatcttcgtcagctcatactcgatgataattctctccaaggcaatgttctttcttctttaagccatctttccttgttggagaatctctctttagctgggaatcgcttctcaagtcttgtcccggcgagttttg

SEQ ID NO: 41944 - DNA, 708 bp, Arabidopsis thaliana landsberg
ttgtatctgattcttgcgccttgcctgcagattcaagattcttgttcttgtatctgactctgtgttaggagaatgtgtcctatggtttgcagtgtcgcttgtccttgagtcttgtgaatgtttaatatagtaaatcaaagagttctctttaggtacagggctgtatccaggtcgctgatgctctttctctgtatcaaaatgatcattagacatttaggagtaatattgcttttaaagggattttgtctctgctaaaaaagtggtcaatgtggttgctttctagatagttataggtatatatgacagggaatgtagttttatgaatgcagcaagcttctattgcattagaattagctacttttggtgaattgactaaacaacatctgtgataaatttttgttcgacgacatgttcttgttgattgtgtcataggattagctacctaactaaactttacttcaaccatgaattttctctgctcttgaactcaatgagttcttgactaaacagaacaatgtggctcactcttcttcattggctttgtcactctccacataagtggggtgtttttgtcgaaattttcacatgtaatattaatcatttgtttctctctttaccaggcgactttccaagagaaccccaaaaactagagacactgcagtatactcaccgagcttgagatgaaagagacgagacgaatgacatatg

SEQ ID NO: 41945 - DNA, 591 bp, Arabidopsis thaliana landsberg
caccacgacgtcagcgatcaaagaattctttaaaaactccagtcagccgatgggccgcgcggggtgtttgcgctgacttcaagtgggccaacacaagaggggaggggcccgctgaacgagcgccgagggggaacctgtagcgggccggccgattgcttcaatcgtttttttttctttctcttttttacttcttcctatttctattttcagtttgcatttctatttcactttgaattttttaaattcaaatttggtttttggtttcagattaaatgtgcaaacaaaagtaccagcatgtatgcaaagcagattaaaatcgatcagttgtccaaatctccttgtcgaacttagcatcgtttataagctacaccatcagagattgtttttaatttagcagcaacagcaatgtttgtatggacatgttcattatactccttttatatgtaatttcaaaaattgggagcttcatcatataggtagattaaaatcgatcagttggccgccgcggcgagtttctggtgggatggctgcgaaggagatgacttctgcggctgggtgaagttagtacgtacaccactgcctatacttgta

SEQ ID NO: 41946 - DNA, 794 bp, Arabidopsis thaliana landsberg
ctagtgataataaagagcataaccatgacccagcaattttagaaactaaaccaacaaagcctaccaataacactaccaaaagccaacaaacaaacaacagcttaatccgagaatgaaaatgacacataacaagggttggtcaaagaaccaaggagatgccggaagagatgaggagagccgagagaggcaagaccaaagataccaacgcaattgcacaggaacgacgacgagggagaagtagatctaggaattgatttgaagaccaaactctgatgccaccggaaaactcgtcgcaccactacattttttagatccgactaaaccaacaccaccactcacagatcttgccctccacatgcctccaaactcatccacgccaaaaacctcctcacaccccaatcgagacgtaataacatcacggtatcaagcagcaacaaaaaagatgacaagagatcaaatctaagcgactccggtgctgtggaagctaccagagccaaaagcggcggccaaacctagttttagtttcttagagagaagttagagaaaagaggagagagaggggtgtttgttttgttttggtatacaaccttctatttacatatatattttcttaaagattttggacaacaaaatacttaaaataaatagtatttagtttgtaatctttacaaaatctatctaaaaaattgattttgaatatgaataagcagaaagtttatatgagaccattatggttgtaaaaacaaaatggcttgatttatcaggcattcaaattactccgattctttatttta

SEQ ID NO: 41947 - DNA, 598 bp, Arabidopsis thaliana landsberg
taaaatacaatttcataaaacaaatgataacaaaaaagcagaaacttatgttttacatttttccattcttctgtttctttttatcattcattgcacaaccaaccatccaaagcatggcttatcctgtcggcttaactaggagggcagacagtgcaaccactagaggcccacatagctaaggcgcccttttttttattttatttttgtcggaggaggcacaatttttatttgtttggggttcagcaaaacagaaaaaaaaagagggctattacagaaatagacactttttagattaaaaattaaaaattaggcagttttatcatgggcttatagaaaaaggcatttttgggagataacctaatgaaaataccccttaaatccaatactatctccttctttgatgaatccatttgctatgattcacaatatatctgccaccaacgacaatgttccgatgaacccaatacacaattaattgatttttaatggaagaatactaaacccgaagaggatacctcatcgagaacccaagagtatcaaccttagacaaatgccaaatcggagaagtgttgttgttggcgacgatgagatgatcgat

SEQ ID NO: 41948 - DNA, 679 bp, Arabidopsis thaliana landsberg
tgggagcttttttcttttttttttttcatccactgggagattttataaacgtctaagtatttggatacatgatacaattatacttaagtagtgtattatttattttggtagttgtagatcggaaattcattacgaatttcgatttcaaaataaattcttgttataaagatcgacaaaataaataaagagtgtgtttagtgaaaattattcaagtagggcaaaaggcaagactcatatagctgcctaataaaccagctgtcgtcctctgtctatatgtatgttgaatattaatttatcttttcgtaatggacccatatgtttcttgcattctgttaccattatggaaaaattgtcctacacattagagagaaaaaaaaaaaaaaactttggactgaaataaacatttgctcatttttcttattgagagagagaaagagagaatgattaaggagaatataagaaataatcgaccctatcggagggttttgaaaaagtgttttcttgtgtggtatcttaatgaacataaaaattctagcactgatttttttcttagctattataaatatttaatttttagggatatttctttagaaaggaaaaaaatctaaattttgcttaattatatataaaaattatatgcgctcactttttgtgtattaaattatgattgagcctacta

SEQ ID NO: 41949 - DNA, 537 bp, Arabidopsis thaliana landsberg
ctcactgaaccacagctcaaatgtttccttcacgtatcggagaatgttctcaaagatgctcaagagattgatcaacgaatcgctaaaggtgaggaattgggtcctctcgccggagttttgatcggcgttaaggataatatatgtactcaaggtatgccttctactgctgcttcgagaatcttagagcattatcgtccaccgttcgatgcgacggcggttaagaagattaaagagttgggtgggattgttgttggtaagactaatatggatgagtttggaatgggaagtaccactgaagcttctgcgtttcaggtttgtcttatgaatcttgtgatgattgttaacaaagttgcagcctttatgtttagatagatggagatggtgttgttagggagacttgtgataatggtttaggattgaatgattcagcaatgttaataaagttggagcctttatgtttggagtcttattggtgatggtatagggattgaatcttggggtttgcttttggtttaaaggtaactgcgaatccgtggg

SEQ ID NO: 41950 - DNA, 502 bp, Arabidopsis thaliana landsberg
caaaagtgattttatcaggcttacattttctctcttccatttgtatgtataattctttcattgtagcctaattaccagcctgaccatatgcattgattatgcaattgaagaacggtgtatccagtaccacatctgaattcacaatttgcctcaaaaccgaatctatcttaacgacaagacctgctttgctatacgcgttaacaagcgaacaataagtgattgagtttggtttcactccttgatacttcattttcctgaatacatcatccattttctcaattcttccagcttttccaaacgtctcaatcactatattgtaagtgacagtcgtcagggagaagaaccttttctccataaaatccataacagagcacatcttcttatacataccagcttttccaaatgacaggatcagtatgttaaatgtagtgatatccggttgcacccccatcagctggaaccgactataccagctctccatcttcctcatgttgcgaccatt

SEQ ID NO: 41951 - DNA, 629 bp, Arabidopsis thaliana landsberg
ttgctcagagaatgaacatcagtttttcagtgatattcaggaacgatgagaagcagcgtgaaaacatgaacctcgtgccacgattggctagagcgagatgcaacgtaagcgcgtgtcgctcgagaccaccagcttgcgatttcctcggccatttcttgaccaccacagcgatcttgagagtcttcttgggtttagaagggaaagtgagatggttccaagcagaagagaatcgaagaagatcgatggtttcattgttatgctgatgatcgaatgtgttaacgtaggtgttgtgatcgtaaagacaagaacagagtgatgtgttgtgtctgaagagaaaagagacaaaggagaggagagagaggagtagagcaaagtgacagagatatctgaaactaaaggagaagctcatcaatgggttttctctagccatgggaagtgctagatcgaatcttgaaacccaaaaagttacatctttaagagaaataagaagaagtaattaattgtcatcagtcgattgaatcttgaaaaaaagtttgaccaagagacttgattagattagatttaagattattgtcgtgttctctaagtcacatgcacatgctatctattgaattatcgtagtatagtca

SEQ ID NO: 41952 - DNA, 602 bp, Arabidopsis thaliana landsberg
gaaaattctaccaaacataaaaacccaaaagcctaaacatacacacaaattgtgtatgtaaaatgtacgtgggaggatagaatccaaagcacaattctcctaaaccctctccgtagcagaaatctcaacttctgatggcttcaccgtcttctcctttggagttgacttatagtacatgaagtacactatcaactgagaaagtgccaaaaaggttccaatcccattacttgcctgtaaatttaaaaataatcacacagttaaaatcaaaaccataatcaaagttttatgaaatatttaataggttttgttttatacagagaagagaacttacgaggacgtagtaatcgatcttgaagatgagcgagtaagtagtccaaattccagcattaacgaaacagaccaaagacaacaagaatggcatgtattcaacactctttgtttttaccactttaatctgttaattaacaacaacaacaacaacaacacaacagtatcaatcaatcaattagaaacaaaaaaaaggcacaaagtaaaatgattttagctcgttaaggatcagagagacttacaatggccaatgaaggagctccatacatagcaat

SEQ ID NO: 41953 - DNA, 565 bp, Arabidopsis thaliana landsberg
  unsure (1)..(565): unsure at all n locations
tgtgtaaagtacgacgtctatgtttgcaaacattttctaagagctattatatcataacctttatgaaaattttccaaatacacgcatgattatttatagagatctcttatttatatctctataagtttgagagatatttttttgttggtataaagtttgagagattaatacctagattaggttatctcttgcagatacattcttatggcagattatatggatgatataaccacagctatgaggtcgtttaatgtagatatgataagattataggagttaaattaaaatcttcggttaaatttacaaaaataaaaataaaatgttcacagaaagtggtattacattgttttttttttttgttttttgggtaactagaaaggttcagggccaattaaagttatcaatctcactaatttattaattgacacgcgcattaattaaaattatatttatggtttagacattaattaaanatttgaccaaatgtttatcatactatttatatgaagtcttagccgtccgagcttcaaacataaataagctactttgtattatactgaatatg

SEQ ID NO: 41954 - DNA, 455 bp, Arabidopsis thaliana landsberg
  unsure (1)..(455): unsure at all n locations
nnnnnnnnnnnnnnnnnnnnnnnnnnnnnnnnnnnnnnnnnnnnnnnnnnnnnnnnnnnnnnnnnnnnnnnnnnnnnnnnnnnnnnnnnnnnnnnnnnnnnnnnnnnnnnnnnnnnnnnnnnnnnnnnnnnnnnnnnnnnnnnnnnnnnnnnnnnnnnnnnnnnnnnnnnnnnnnnnnnnnnnnnnnnnnnnnnnnnnnnnnnnnnnnnnnnnnnnnnnnnnnnnnnnnnnnnnnnnnnnacccccccccccccccaccccccccccctttgggtttttttgggttttggaacacaaaaaaataggaaaaaaaacccccccccccgcggggggggcggccccccctccccaaaaaaaaacagaaagaagggggaaaatattttctccccccccccccccccccaacaaaaaaaaataaaaaaaaacccctctcccctttttttttttttttcttt

SEQ ID NO: 41955 - DNA, 543 bp, Arabidopsis thaliana landsberg
  unsure (1)..(543): unsure at all n locations
aactaactatcatcaataatctgctccaagatgagatattgcagcgcgatcgaatacttggcgcttctctcggatgtatcattacttgtcaatagaaacgatccatcaccatgaccttcatcacattaaatggatatcacaaactaagcgtcagcaaaatgttgtaatgtttataggaacataaaaaacacaaaaccttttatagtaaagatcttcggaatccatcgtttgtagatgaacaacgacctcggagagtctccatggttagtctcagataagacaagctcgcacaaagctttcctactaaaaccaaagcactcatataaccattttgcaaaataccaactagtcatggaaaattgaaaaaaggttcactcacttagcatcaactatagcattgtggcatagagcaagagtccgaaccatcgccatgtctctagcccgagaattcatcaccgagttcctaatttaacaactcgagtcatgagttttgtatcatcatcatcattcttataatggatttgagcanaatcttgagcttac

SEQ ID NO: 41956 - DNA, 504 bp, Arabidopsis thaliana landsberg
acccaggcctgttctttgttgcagccttgaatttgcacccacactatttttctatgtgtgaaatgctcctgaccgatgacatccattgaatgcacatctgagccatcatcgtgcctcatcaaaatattctgaaatgaatcccaattctcgttgcttcgtttttcttcaccagaaacttctccctcatgagctcttttttcgttgagcattccaacagcagcatctacagtctctttgatggaaccgttgtccgtaaactcatttccctccatgtctccatttcttccctccggggttatatagttaatattacggatgataacagttttagatgacttcttccggtttttctttgatcggcgtgagtttttacttgtacgagagtgtcttttaccttgatcttccaaagatgaagcagaatcatcgctggccgattcagattcactagattcacttgattcactagactcatctccatcagaatcccccttcccttttttcttg

SEQ ID NO: 41957 - DNA, 661 bp, Arabidopsis thaliana landsberg
gatccatcgaatgatcgatcatgacgagaaataaaatattatggggaatatataaagaaagaaaaatgtgcaagatgattagtatgaaaataacattcccttagtttcacaatataagtgttttggagaaatttttgtttcgaatgttttcaaaattttatgcaaattatagattaatttattttttataattatatatattatgtggtctattttatgattggttaacttttaaaaaaaataaacatgagttattgaggtttcaagaagaaagttttatgtttatggccatcaagactgaaataatgttttgtttttcttatttccgtcgactttcgtctttttcaaaatcgcaacttttatatatatttttttctctcgcctttcgatcatcggaaaagctctttttcaagtctccccaactcataactttgaattttctatttgctccctcataaaatttgcttctattctctttgtatggtggagttctcaagatctgtatgattctgaatccttggaatttttgtatccaaccagtaacaaatggggttctgtgaaggtttatgagttcccatattcaaatggcgatcttttagtctgagcaaaattgtggttcttatctgtttttgtgaaagtttcgatttgtattttgagggtt

SEQ ID NO: 41958 - DNA, 1012 bp, Arabidopsis thaliana landsberg
gccaccagttttcgattgtgagtgtttcgattgttacactaactactggtttcgttgggattcttcgccgaatcgtgagcttatccatgaaatcatcgaagctttcgagaatcatcacggtgaagaaaactctgcttctcggagcaaatctaagagaggtaagaagaaagagaaaccgggtcgtcgggtcactgattcggatagtaaaccggctcttcgggtcacggataatggtgataaggattctaaacccgtcgtggagccaatgaacgagaccactgtttccgagagtagccacgtgtcgtcaccagttagattgagtgaagctgaggtggcagaaggagaaccggaggatgagattgttgttgaagaagatggacaagaagaagaatcgacggtggtggtttttccggcggcggcgagtaatgtgacgggacacaaagggttggcgaggaaggtattgccggacgtgttgggtttgttccattccaatttttggaggctttggaatccgaacgcgtaaaagcatcgaccggaaaaaagttatgctttttttaatttttttgttgttgctgttttcaggaaaaataatctcatcttttgctttcattttgttcttctattctcgaaaaatacatgactactttggggttatgtttaatattcttggttgaaaaaaagcagctcttttagccaccatttctctttatgaaattctctaacaatgtgtgattattgttctggtggcaaaaacaatttctggggatatacatgaaagatttgcaatgtagttgatgttttgcattttcaagttcttttgacttgcaatttttgtgtttggtggtgagactctactctctctaggcgctgtacaccgaatttgagattttttttatttgagtgtttttttagcttaggaacaaagtttgtggattaggtagactgtttcgaagagtgggcaacaaatatttgccttgtgattaaggcacctcatctcatagtggggtacgag

SEQ ID NO: 41959 - DNA, 675 bp, Arabidopsis thaliana landsberg
ggtttagtttgataaagctacggcccgtcacataaaaactagttacaaccttacaagtgtaccattagtgaatggctgttacgttttaattggtcacagccttgtgtgtagttaaattcttagcggaaagtggacggctataaaataattaaaagttttatcgaagggccaaaaatgagacgatttcgtgggattataaaataagtcattggtcgattggcgtagtctttgtttattttaattattataaccaaatctaacggctaactaatacataccacgtcctacagactcctgttattacttttaaaaataaaaactgagaagatttaatcgaaaattaattttgacgattcattattatttttggtagtactttgctttttaaaaaattgtaaaatcctcatcaaaaaaatttcagcaactgtgaatattttttaaaaggcataacaactttatttgttttacgtaacgaattccttggaaaattgcgtaaaacatgggcctcaaagcccaaatgacagctgtcaaggaacaaaccggtcgacaaaagtatggaccccacttttaatttacatccggacaaagactaaagagctgtctttatctcaatcgttttcttgtttctttaagcccattaggtatagctacctcaatttatgggccatcaggtcc

SEQ ID NO: 41960 - DNA, 947 bp, Arabidopsis thaliana landsberg
  unsure (1)..(947): unsure at all n locations
gtttcttcttttaaaatctcgttttaattttattacacagtttacttaattcatttgatttttattttctagatttttaactttacttttagattcaatgtattaaaataaacaaatcttttatagatactactaatacaatcttaatgaaaatgtctatatattattttatttttggtatatatagtacattgtatagtttgtattcaaaccaaaagttttatatctacctcttgataacactattatatactatattttatcaaattttcacataactctatttgtatatttctttctttaaacaaattttgaaaactatttaagggtccacatttccgaatctcggccaaagccctgtgtttttttcatcatgacaggctgttattttaatttaccatttttgtgtgtttaatctaccattactgggtaaatttgtttctagccactacttgcctcttcataaacgccagttctatcattcccgaaccggtcaggtgattcatgttcctccttttgcatagtctttgaatttcacgttttaatatattatcagagtatactaattggtcctaattcacgatactctctggtttgattcttctcatttaaattcgtatttctgcttcggtttgtatatccacgtgaattttttattgtcactaaccaaaaactgcatgtttttgttgttacaaagccattgtcacttgagcaagttatgtctgaccgagatagcgaaaatgacgtcgacaaaaatgatgatgctgcacatctcgaagaaagccaggtatatatattccatgaattatttatgcttttactaaataaacaacaaaagtggtatacgattattcttgctaatgactaanaaactgtagatgcttaatggttccatggatgagaatgaaatcgtagcagagagattcataaactttggaactcctttg

SEQ ID NO: 41961 - DNA, 526 bp, Arabidopsis thaliana landsberg
atgtatgtgggagtgtatgcactaatcttcatgtaaaattcacttcaatccaaatcccctttctctacctgcctaacctagatcactctcataaattctaaaaccattcgatctataagatcataagggtaaaggaagtgattttgtaaggagaataaaagggtaaaaaaaaattggtaactcttatatggtaagaagagaagaaaagagcatacctgggaaaatcaggggagaatttgctggagggtgtactggattgtatccatgacatcactgcggctttggctttagcgaggatgactgattctgcttacacagtagacaccattttctagactcgcccaatggccgaatccacatatctttgcttcctccacttactcgcaagttccgatccctttcaaagatgggttcttttgggaattggtatgatgtctttcactcctccttgtgttttttcacactgaatcaaattatttattccggccattaaaatgaggaatatgtgggcccgcccttttttggt

SEQ ID NO: 41962 - DNA, 540 bp, Arabidopsis thaliana landsberg
gttttaattagaaggtcgtctttgaataactatagaataccgaaattatagataattagttaaccaattaaacttgcgacataactagataacattactactacaaaatcggcatttaaaactatacctttattttaattagaatgtcattcaaaaaaacctcggattaactacctaattaacgaaaacatgtgttgcgaccaaataatattactaacccatagtcgatgttattacgaagtcactacgactgaaacgagttgagacggactcgcaacgcaacatatatattgattaactagcgttttctcggatctaaaatatatggcgcgattcttttgatcgaaaatgtgccacacgatggaccacatggagagcagccatagaagatcctttgtaacaaatatcctataggaaaaagccacctaggatagctacgtgagtggggtatatacgttttcctctctggtcgcacgaagcaagagggtggggaggagaatcgccatgcaagtgggcccaggagatttttaatgcatgcag

SEQ ID NO: 41963 - DNA, 576 bp, Arabidopsis thaliana landsberg
tcttagcctaagaactaatttaagagttaaccaataatgatgctcttagtggcatagtgcaatcaaataaattgaacaaaataaatctaaagtcatgtgaatttgaacacgaaatttcaaaatagaaacaacaattatatgattaaactgaagatgtatcacaaatcttcttcttctcctctatgctaatattagataagatgttttacaaatttctgtgtttattttactcaaataaatctcttgaacttaaacaccaaatgaatcatatgtgttgtaaccaaatgaatcatattcatatcttttaacttaaacacaaatttcatacacttcaacttttttatacatttaaactaaaataattttcaaaaattgaattctttaagaactctaacttaagagtctgtctagcattggacacataaaaaaattaaaatcattacacaacctcttaagtataaaattttcaaaattaatattaaaaaattcattagagcttctactaaaaaatattgttggagatggtctaatagtttgtctaaaaatagcacaattctagtagactccacatgcatg

SEQ ID NO: 41964 - DNA, 604 bp, Arabidopsis thaliana landsberg
aggactgtgaccactctaataacgttgaatttgaatttggatccatgttatggtgattattcgaagattgttcttttatgagtcgggtcattttagaatcagtttcattttcatttgtaggcattatccgaagaaatcaaagcgagatatgaaaaagcagcagtcaaagtcattgacttggtatgatctaattctattcacttcctctagtttaaactacttttattgaacttttccgttgctggttattggtttaattaggatgactatgctgccgatgatgaccagtatgaagagaaattgaagaaggaaactttggcatttttctgtgttgctacgtaagaactctccagtctgattatgatttcgttttctttataccctttcatagtttgttggattcatttatttgagaacatgtttagttatggagatggagagcctactgacaatgctgccagattttacaaatggtttacggaggtttgttgcctcagtgtttgtttccttagatttgatatgctctgtgtagctttagcgtcaatactctgtgttttatgtttctaggaaaatgaacgggatataaagcttaacaactagcata

SEQ ID NO: 41965 - DNA, 852 bp, Arabidopsis thaliana landsberg
tccaatgcaaagggaaaccaggaatctgtctgacaaagaattctccggtctctgtctacgttgcaaaagatccaagaaatatatattcaatgcaaggttttacatccacaagtcgccacacacactctgtacgaaacacatacagagattttggctttttgtctccaactatacagaactcatgccgttttagttttcaggcaccagaaagcttaatgtttcttctatagcttttaataggtacatagcacgtcgttttccctagggtcacactcacattcatgctgtctcattcttggtgatgatgactgtgtgtcactattattaatgctgattgtaacaactcagcaactgcgagttagctccacactcctaaggttgcaataaggagtgtctataacactcacctaacagcacatggctttgcctctcttgacttgattgtttgtgaatttggcagaccaagacggaccctccgattcaaatgaagtagctggagtttctaccatcagacaaatccagttaagaagaccggtgtgacaatgagttcgtgattcttcctgttcaacaacttcaaagtcccctgtgctactgcaactgcaatgtcccaccatgtgaactctgcccatacatgtcaccctcttgtaggccaccgagcaatcttcaatcaaaacttcacctcattggtttctatatacagagagagcaccagctttcatctcaaaacaaaccaaaatcataatcagcagctcagaacttggacactaagtcttcttccctgatcaaactttgagagaaatggctatgatgcgaggtattttggctgcaagaaagattcctacaagcaagggt

SEQ ID NO: 41966 - DNA, 457 bp, Arabidopsis thaliana landsberg
tcatgttttctttctcatatttccatagtttgtcaccttaagtatctctatttaacctctcccatttgtctcctccacatcatatgcacctctaagttctcccattgaaagatctttcattcatttagtcaaaagcagcacctttcaatcttcctctgccctcctcacccgtagaagatccgtttttttatttctcaaactaaacccgtgttttccttctgctgcattgcattgttgtcggggaaaagaaaactgggtgtaagaaaaaaaaatgaccaaggaaatgaggtttgttcaaacatggggagaggtagcaccaaggcttattgcatctcaccagaaacaacaacagcaattctcagacttgccaaagcttgagacgatttttgaagaaggatgctgcgtcgatagtcttactgttagggcgccgaagcggattgtaatctttcttcctctt

SEQ ID NO: 41967 - DNA, 1819 bp, Arabidopsis thaliana landsberg
attttcttttgagccttaaaaagttatgttggttgctaaatagtctgagaagcttatctgtcaaacagtgacttcaattcaactagtgcacttggtgtgttggcaatggacaaaggagcacctcctagtatttttgtgaatgatgggtcattcatggaaagattcagacagcttcaacaggagaaagataaagacaaggataaggttgtccaagttgaggattctaagccggtgaagattatatcaaatcccaaacctgctgctaataaaatttccattggattaaagcccaatgatgcccagaagaaaggtggtaagcttgctttcagcttgaagcaaaagtctaagcttcttgcacctcctgtgaagcttggtacagaagaagatgaggatgatgaggatgttaaacatgaacaaggctttggatccgtaaagcgtcaaaagttagagcagagagacacacctgtaaagtcagcaaaagtatcggatgttggtaatgcctgtttatataaatatctttgttctttgtggaagtttctgtgttggttctacttatcttgcttttttatggttccatattctcgtatggggttctctgttccatttagtaagtgtaccatgagggttctgaacaattatgccatatgatgtcaagagtcccgagtttcatgtccattgcatgtatttagtgatgaatctgtgtgtcttaactgaaaatgaggaaggcctatgagtcctaaggtgtcaagagtatcatgtatgtcttaattgatgaagctgcgtttttccactggaatggagaggacaaaacagtgtggaaatttaattgtctacttaaatgcagtgtcttccttaaccaacaatccaattgctggaaagatttggaatatctcccacgcctgccacaagagtgatttgcattcattgttcatggactcggtattaatcagttttataagtgatatgcagcaccacctccgcccagtgatcctactgtgaagaaagttgctgataaactagcaagttttgttgctaagcatggaaggccatttgagcacattacacggcaaaagaatcctgtggatacaccatttaagtatgtacttccttgtttcggagctggtcaacgcttctggattctctcttttatacacatactatgttggtacttgggttttattggcggtgttttttgaccttatgtatcttgtgtccatttttccaaccagatttctttttgacgagaactgtgcggactacaagtactatgtattcaggctggctgaagaggaaaaattaatttcacaaaccaaggattctggtgtacttcacagtggtaagtattagacaccatataattattttcagaatatgcttagccaagcatgtgcaaggaatatttggctcatttctttttactctccgaaaaatttctatcctacaatacgaatttatatgtgttctgtagtgtgagtgataatgtgaggctgctcttcctgctaccatattcttagcttcgatttccttcatttgtctttccaggtgatgcaggctcgcgaacgtccacagcagcaatccctttgcaaaagccagcttatcaacaaacaggatatcagatccctgcctcagctctctatgatactcctgtggaacctggagcttcttctagatctgctcaggcatcaattacaagacccagcgacagtatgttcattagccttatatcgatctaggttccttcctattactgatatctagttttgattgtgggttatatatgtctgatctgcaggtgactcctttagtgggccgaggggtg

SEQ ID NO: 41968 - DNA, 236 bp, Arabidopsis thaliana landsberg
  unsure (1)..(236): unsure at all n locations
aatgtctttggctanaaagtcaaatttttcgaatgatttttatttttctattgcaagtcgcattatataagtctctgataatctcaaagtaaaagcaatccctcacctcttataccctctcgcactttttatagagagtgacaactctttgagatctaaaatactcccccaacatcatatttgattaacatgggccaaatccgaaaataaatgcaccttatcgaatattttgttcg

SEQ ID NO: 41969 - DNA, 606 bp, Arabidopsis thaliana landsberg
atgatgtctctataaatatatatgtaaatgtaatagatagagatatccatatattattttcacctttctctctttatatttgtcctactcggcacctccttagaaaatagtattttaatttttttcagttcttaaacaatttgtcttctattctttctaccgaatgttgcatttaatgtaaaaacaatttgtcttctattcgcctcgagggattctgacttctcatacccggtactcggtagtgcgcagcgctcgtacagatttgatgtcgctttattcatggcaggtaggaccaccaatcacatttaattctccttttttttttttgacaaacactttcctagtttcctttgacccaccttctctataaactctcttcgctaggcattttgcacactccaaacatctctcacatatccaaaaaaaaaaaaaaaaatccttctgtagacgttttttaatttctttctttagcttcttcttattattatacgttccaatcctatcgaaatagaatacgttcgaattcgatggttgtatttaatttgtcaatgttcaggttttggaagaggccatcatccaatgtagggccgggagatcttgagattg

SEQ ID NO: 41970 - DNA, 514 bp, Arabidopsis thaliana landsberg
gcatggcatccagtaccaccggaataattgcctcgctatcggcctgcaacttgctcttgagcatggtcttgtagagttccagggccagcgtcaggatagattcggccacgctcacatcctgcatggacaaggcctgctgaaaactggcagacagctgcagcagttgtgcgctttctgcctcgattcttgcctggccctgcaccaggccatcctggtagccggttttaaaaccttcttcataggcttcctgcctgacctgtttcaggatatggctgacagtgcgtgcattttcttcagcctgtgccttttcgcgcctggcacgctcggtgttggacacctcatcaaaactggccatctcccagcgttcataagcagtcatttgttccttgggagttgcagaacctaccatgtgacgtttttccttgttgtcttttttaatctaacactaaacatactgctcgctgtcgcccttgccggccagcatgatctggccttcatcggccaggcggcgtac

SEQ ID NO: 41971 - DNA, 651 bp, Arabidopsis thaliana landsberg
ggagagacgagtgcctgcagcgaggcggacatggccaaatgagcgcagggagcacgacggcggccgggcagaggagctcacggcagcacgcgcaggaagaacggaacgcgcgcgcatggaagaacaccagagagagatgcgctgagcaagcagccatgggagcaggggagctccgaccgacgctggagaccatgactgggcgcgcgcagaggagcaggggcgcgccaacttccatgcccgagaggatgcagcggccggcgacgagaagccaagctcctgggagccgcgcgcaccagagaaggagatccgagctgggcagagggagcttcgagcagggcaccagggaaaaaaaactcacgcgcggcagacggagcagagagaagcgccatggagagaataaaaatcctaggcacgcgcgcacagggagttcggcatggcgtggtaggagattgaagaaaggggacgaacgccgtggggcagggcgagatcgcagagatggagctcggtcgctgctgaggaagagagggagcagactctgacggaagatgtgacaccgcgcggtgaagaagcaccggaaggagagaaaggagagatgcggcaaagaaaggaggtcagtacttggtagattagttggacagatgatgatttgag

SEQ ID NO: 41972 - DNA, 510 bp, Arabidopsis thaliana landsberg
ttttgaaaaacttgctagctattactagagagagcaggcttggaaatctgtttgaaaaaaatatcataatcaataattttctatagattcataaaacttgtgaatatatttgtaaatcgtttaaatgagaaaacgctccatgttaaacacagaagttttaaggaatcttttttaaaaaaatacgttaaaatgaagtttttatgaacccttacgtcaaatcatgtaagaatattgctatagtttaggagtgaaactgttaagaaaaaaatattatcccaacaaatatacttaacaatgttacctaggaagttaccaaaagagcaaatccaaaccaccggaacaccatgggttatacataaaggtgatacatctttctttacttcttcatttgggtaaaaaaaaaaaaaaacagataagcctcgttttcatgaacacgtgactctctttcttctatactaataaacaagtaacaccttctctcgcatgaggttggaagaaatattcaagatg

SEQ ID NO: 41973 - DNA, 569 bp, Arabidopsis thaliana landsberg
caactcaccaccaccccctcctccgaaatcccaaccaccaccccctcctccgagattccaaccaccacctcctccacgtggcacatgtcccaggaatgccaaccaaataatgacatgttccaatgtcctaagattttttggcaacttcttagattttagactggcacagccctgctgtacgctcattcgcaatctatctgacgcggaagcagctgcttgcttatgtgatttggtgagagcacgacgttccactctttctcccaatatcatcatcctctgtagggcttgtggccgcaggattcccagaggctttacctgcccataatcatttccctgttccctttctaaaacttacttgccacctaaacgacaacttaagtctaatatatgacgtttttactttccaccaataataatgtaaccaaacatcaataaattttgtgtaacttttacattgtgtctttattatttttgtttctaagcacactagataaaccatatatattggaaattctacgtctgaaattgcccagaaaatatggacacaataatatgtaatcgtacaaatg

SEQ ID NO: 41974 - DNA, 808 bp, Arabidopsis thaliana landsberg
atcctataatcttatattcttgacataaatgtcgtcaaaatttggtatacatcaaacatggatcgtgtttaaagtaatcatcaaaaatcaccacacgagagtagattccctattgtcaaatatagatcaaagagaaaacatgtaggctacaaatataacctagtccctacgaataagaaaaatgtcattataccacaaatgataactgcaaagtgtgtgtaaattttgattttaaaagaaggtaaaaaaaaaaaaaggatagatttggaaacaatcttttacctctttggtattgaacattgtgacagtatcaatcagtatggtacagaaaaaacgtcagaggaaaagaattatcaaaaaacgtacactcttcattttcattaaaatcttttttttttcttccaaaaaacaaaagcagaaaaaatgtgtcagaaagatttatgcagctttcattcattcatcacttgcactgtctcgtgaagaaaattaaacttttttgtatcagaaattaattacattaaaagaaaagaaaaaaaaaattccctcctttccaagtgcgtttgctttgtggagtctctctctctgtctgtgtgtgaagtgagaggatctgtgtttggttctgcaatcataatttcgtgatatactaaaaaaaatgcattttcctcttctctcttataagcagagaccctactactctttgatcgaattttccttgctctcttctctttggtctctcatgtttttttctccctaaattatgggctttgctctctctctagccacactcacactctaaagcactcgtctt

SEQ ID NO: 41975 - DNA, 434 bp, Arabidopsis thaliana landsberg
actctataaaatatttggctgttgctttatacataattgttataagatatattaaatgattatatcacaaagcatcatcatgaaaggctagaaaacataggtgtttaccatctcgcaatcaagagccacgatttcggggggacatgatcctgatggtgcaggaagtgtaggtgtaaactctgcataaccaaaggaaacttatcaaaggatgttacacaaatgtaaaaagttaacagcacaatcaggattaagctgttaatcttaaatgaatggagctcgtaccgagtgttccaaaagtgtaaccattttgttccatatgctttagactgagagtgcagtaactaacagggaatggtatatctttcgtgcgctcaacgaacgatttacccatcagattgcatgcttctacaagcgacagatatcatctagttaat

SEQ ID NO: 41976 - DNA, 657 bp, Arabidopsis thaliana landsberg
ataaacccgtaagataaaaagaccaaattagtttgttatttcttattgcatgtatttaaactcgtgattttgaaaacttttccattaggtggcaagatagtacgctagttgaacttatcggaaatattagttttgaagttgacctaaatacaatttaacggcttgagagtaagaattgagtcggaggggaccgttgttaggatcagggaaacggtagcaatcggaaagaagaaaagcagagagaagtgtgaccccggcgaaggctataagggcggccggaccagcgatccagccgagctccgccgtggcccaagccaacgacaacactccagctcctatcactcctgttattatatgtgccaccgccgtccataacgttcctttacaagaaaacacaacgtaataattatttgattgattactaatgattatggattatatgattactaacagatttacctgttcttgcagtaactgaatcatgaagttgaagctcggttggtgttatactcgagactcgtcatcttctttaatgtcgattttttgtgtggacgaagatgaagttatttggtaatgtgtatgtatgttctatttatgcgggtaacgatgtgaatcattttatcttccgaggaatgaaccttgtctagtgaatggaag

SEQ ID NO: 41977 - DNA, 589 bp, Arabidopsis thaliana landsberg
ctggctgatcgtgacgactgacgacgagggacatgtatgttccaaggattacctactgcacggtactactggaatactacacacacagacacaatgcacatccttggcttggcttcagcgcaattctcaattcctcggccgggccggggtccactgatccacaagccgttgtgtgcggcccgtgcatgctgctgtccagtccaggcagcgcagccggtatgtactggggccatgatgagtccatgtccatgacgcgccctcccgccctgctgcgtgtcatgtctgcctctccttttttaatgctgacagacgacgcacagaaagaaacgtgatggtcctcaagtacgcaaagcatagcactgcacatctgacatctgcactgcaatctgcgcgtagaatgcaatgcatggcacagcacacaaaacatggagccaacgggcaagtacatgggccctcccggttcctgcctggctggccctttgtgtctacggtacggaatgtaggagtacatcttatgcagcagtgccgtgtattcatagtttcatacatgtatccctccgatttatagttctttcatttttttaatgta

SEQ ID NO: 41978 - DNA, 851 bp, Arabidopsis thaliana landsberg
actgaaataatttttttaactttctaataaaaatattttccttttggctcttcatgtaccctcaaggggggacggcctcctagtctctatttttactacatgtggaacaatcaaatcaaggaagagtcggtaggtgatggagattcgctttaaatgtctacgtaacagttttggtggcctttgatttaactactgtaacaatttgtccggacgaaagactattgggcacagtttaaatttcaggcccaaagaagcccactagtatccggttgagagacacgtggcaacagtcaactttgaagaaaaataatgaacaatcattgacatttttttttgtttctcctgatccagttcttaattgaacaaactccaacagcatcatcatcatcatcatccttcaaattatttttcctattttgaaaaatttatttgaaatctcataatttacgttaatggagattgctccatctacaagtagattcaagctctacgatcaattcgagcttctggagtttcctgacaagtacgtcgtcaaacccatcgaatcgcctgaggaaggcttctccgtcaatcggcgcgatggcaatatcaaacctcttgatggtaatccactcttcattctcagctctctcccttccctgttttggtttcaagacaaaatttggcaagagatgatatgaagcaagagtattaggctgttgtagtgtatttgatgttactgtttctttgttactgcagaaaacgcatcttctgggagtcctactagagtctctactatctatggcgtaggaggaactattaggctcttagcaggtggaaaatgtttttcaacatttctctatgtactgtgt

SEQ ID NO: 41979 - DNA, 555 bp, Arabidopsis thaliana landsberg
gagagagcagcatggcaatgtaaaacataaataaaacaaatatgttactgaaaaatcattttttctgatacttgaaaaaaagaaagatcagatcatataaaaatcatttttaactttttattatttatatatagagctgtctccacataattactattattccaaaaataattgttcaaattttatgtaaacaaacgtcatcaaactattccatgaataaaattgttcaaattatgtctattcgcttacgttaaatatgtaacaatatgttacatgtatgatacatcagaaacgaaacgacgacaacaatctcgtggtaacaatgtaaatgatagtgaattagtgatgaggagccaactataaagatttatcatatcgtggaaaatactttaataagaaattgtatgctaatgtttatgtataatttctgaaaataattaacaaaaataaaaggagatatttttttaaataacaaagtgattttgaaaaataaagagaggataataccattttggcaaattgtatattatgatattcatgaagaccataaacaaa

SEQ ID NO: 41980 - DNA, 893 bp, Arabidopsis thaliana landsberg
catgttctttgttctttttttcataagctgcgtttaatgtatctcctaagggtgtgacgtaggcagcatggttttagctgggctatagacgaccaagaaactaacccttcgaacaaaaaaacttaattgggcttttgactttggtttaggcccaaatcgaagcttatggtcatcctgtaacgaagtaaacatgcagaaggttaaaacttaaaaggataaagaagaagtaaatattttgctaccaatcgttttctttttcagtttttgctctacatttggttgttactaagccttatttaattttatttttatattaaagtactatatatcaatggttaattttatgatatttttaactactctagaggttagctaactagtagtaactactaagccttatttaatttttagacatatctatatatatgttatattatatttttctaaattagtctccatttttatatatctgttattaaattttttaactctttttgcagaggcactatcaccaggagcctgcacctgcctttgtctaatttcatttcaactaccaataccattaccatccaccatttttaaatagtcttatatgcaaccattggcaaaaagaattatctaatattgatgattcaacaactaatattgaactattttgatatatttactccgcttgatgcgtaatatttttttgcagcttgtttcatggtattgtcactattatcaaaccctgtgacaacagcaaaaaaaaaaagtattgtcactattattagataataactgtaacccccaccctataggggttttaacaacagggcatgccatatttgaatttggattattaccccccaaaaaaaaggtacctttttaaaattttttctattctttggggc

SEQ ID NO: 41981 - DNA, 483 bp, Arabidopsis thaliana landsberg
  unsure (1)..(483): unsure at all n locations
gtataaataagttaggtttttttcccaacaattcgatctattataaagcttattcatatacttattatgcattagtttatgtatcgccttcctacactgaacaaaggggtggaacaggtgtaggaattccaacaactcctgaaactatattctctgttctcccatgggagctcggaccagaattccaccagcaacctctcgttgacgaagcatgtaggagctggacgtttttctgtaaagaccctcccaaaaataattaccctacaatgggtgagacttcattgtactggaaaaaaaaagaaatcccatttgataaggattgatacatatgaagtttttcatgccatatattccctcattgccagtgtaatctcaaaacctcgagggaaacagggtgattcagagcttatctatactcccacatgggtgtgtatttgttctgtttgactcttaatgcgacgagatcnactttttgaatatatg

SEQ ID NO: 41982 - DNA, 160 bp, Arabidopsis thaliana landsberg
cagctacggctctttacgctctttgctcgtttcccgataatcggaaacgggttgtggattgtgggtcggtgcctattttggttgaagctgctgattcagggttagagagagcagtggaagtgttggcgacttttggttaagtgtagaggaggaagagaag

SEQ ID NO: 41983 - DNA, 638 bp, Arabidopsis thaliana landsberg
ctgtccaaatttgcaaatatattaagtgacctaaccctatctatattatgaataaaagtcttctctaaaccggaggcagagaatatactttacgactaggacattgtagctaacgtgcaattttgtcttaatatataagcaacatgagaatcaaatttaaattaagacgataatataaaattgtcaaattatactcatagtaagttatgctttttggattcgagcatattcgtcccatgaatgcaaccaattcaataacttctactccgagtcttattgtaatataatcaaatcatttttgttatcatgtgaattgtgtatataattatctttatataatttggtcgacaaatatttagtatatactaagacgaagatccatttgctcaactctggccgccatgttcatatatacaagctgtatacattattaattattatacatatgtatatataatatataggcatataacatgcgatataatatcagcatatatatataataattattagtgcaaaacagcagccacaataatatcaatttactgttgttgagatagttagactcgttgtttgttaattgatcagttagtttatataatatcataaactctcttaatacatatttatatatgtat

SEQ ID NO: 41984 - DNA, 1156 bp, Arabidopsis thaliana landsberg
agatcgatccacaagaaaagagatatgttggatgactttgaatttggctgatccggttgcagagttgtctttccactatgtcccatgttcgataatcaaatagcatcccattttgcaaaagtggcccatcagcaacccattacggtacaaattcactattaacaccatgtagttcattttcacatatacagatatcatgcacgtggaaaatacgtaacttatgtgaaaatgaactaattgtctacttcacggaatgaacaataacaatactccacgttgttttcaatccattctattggcgcacgttggaaattgtttgaaagttattttaattttaactttctgtattctcccaaattttaattaacaagtgttgtaaaaaaaagtttattagatgatcttgagtaaataaagaaaagaatttagtctgattgctaatgctagatgttaaagtcattgtagttagcaaaaaaaaaaaatgttaaagtcattgttcgtcaaacgaacaaaactcaaaaatagtaaaacataaatttttgttacaaaatgtatttgtcactccatcagtttatgatgaggggacggttggtacttgttttaaattgaaatatatgaatttttttttgaggtagaaaacgatggtacgctaacactgatcaacatcaatctctatcaaagtatcaattaatgatacaacaatatttgatcaacttgttgttgaaacaattttatacataaaattaaatggttgaatatatgtgtacttcatatcgttctcaatttgacgtttgggttgtgggctcgaaataacacataaggcccatataaaaaatgctgattgtaagttgtattatactttaccaaactatacaaaattgattctttgaaggggcttgttttctactgaccataagcttaaatcaattttgaactgtagaaattattgaaattcagattgcaaggtgtataacctgatagtagagcaatttgcttttatgtctaatctttaaactctaatttctatttttgagatcacattgtagattcacacaaacaaagtttcataataacaacttaattacataaaccaaaaacgtcggatgtgattgtcataaccttaaattacttaggaggaaatcacttaagagattgagag

SEQ ID NO: 41985 - DNA, 742 bp, Arabidopsis thaliana landsberg
tgttaggctcatcattctccaaaggcttcactggctcttcaagtctgatctgaagtattctctgcgttttctgaggttttgaattcccctgtttcagccaacagaacgagttcaacgcaaaatctgtttcgccggaatattcacaagaataatactaaatagtagtaattacgttaccttatttttctttctacggataaatccaaagcatggtaatatcttcattttagaaattagccgtaatctattggaagttgcgagagcaccaaatcgatgaatataaaagaagaaacgacgccggaaaaaaaggaagcacttcttgatccgaccacagtcgaatccgccgatgtgtcggccagagttaaagatagccgcacttgtttttaaattatgtttcaccaaatacaaacgaccacagccactaaacaaagagagagggcaaaaaacagaggatagaaggagaagaagaggaagaatgaaatggacgggtttatgacagaacatgcaaaagagccacatgtgacttaaatctaatggtgttttcgttaactcttaaagacagagaaaaagatgtgtgtacgtatttatttcttttattcttcactttcaattttcaaccataattataataatatattattcattcctaaaattttaatgtatttctatctatgaatccgcgtccaatacacggagtttcttatttatatatttcttccctattataatgttttattgaata

SEQ ID NO: 41986 - DNA, 493 bp, Arabidopsis thaliana landsberg
acggtccagacgcatgcgattggcgacttgccggttgctatatccgggacctccagcagcacgcaggtagtgagggctgacgactcgcgtctcagcaatgcacgcactcccacagcccacactcacgccatcggtgatctacctgtggcagcgtcgggtacgtcgagcacgacgcaggtagttagggccgacgatgcgcgcctgagtgacaagcggattccgatcgcgcacgcgcacgtaatcacggacctgcccgtcgcgccttcggggacttcgtcagcagagcaagttgtccgagccgatgatcttagactctataacgcacgaactcccacgtaccacacgcataacctgtccagcagcgctctgactgcggagggccgcaccctgtgggccgggcacggcggctacggcggcatcgccccatcgaactcgatcgagggcatgcaggccgcgctcgacgcccgcctcgacttcatcgagaccgacacct

SEQ ID NO: 41987 - DNA, 1995 bp, Arabidopsis thaliana landsberg
actgcctcttcttttttcgcatgggcaactatctctgccgttgggatgaacaactcttcttactatttcctttgttcgcctgcgtcttctactggattttcgctattcctagagtttcttcattcaagaccaagcaggaagttaagtaccatggaggagagatccctgatgatagctttatccttggacagctggagagctgtttcctttcactgaatttgatgtttatgccgcttctctttcacgtggcgtcacattactctgtgatattctcatctgctgcttcagtttgtgatttgctgctcctgttctttatccctttcctgttccagctctatgcttcgacaagaggtggtctatggtgggttaccaaggattcacatcagctgcagagcattcggattgtgaatggggctattgccatggtcattattgtgatctgtttggagattagagttgttttccgctcttttggaaagtatattcaagtgccgcctccattgaactaccttctggtgactacaacattgcttggaggtgctgctggtgctggtgcttctgttcttggaatgatctcgagtgctctgagtgcagcctttttcacagctttgtctgtgattgtgagttctgctgaagctatcgttgtaggatttccagttctggtaagtatttttcttcccgttgcacagcttctattactattgtcattaataactagttacctgcgctttcctgtagtcaaattctgttgcaataagacgagtaggtatccctcaatagtaacaatggaattcatattctgtgtttgtgttgcagtttactccgcttcctgcagttgctgggctttattttgctcggttttttacaaagaaaagtgtgccctcttactttgcatttgtagctcttggaagcttaatggttatatggtttgtaatgcataattactgggatttaaacatatggttagccggcatgttcctcaaatcattctgtaagcttatagtggccaacattattatagccatggtgatcccgggtcttgttcttctcccttcaaaatttcacttcctgactgaagctggtatggtgacccacgctttattactgtgttacatcgaggaccgctttttcaattactcaagcatatactattatggaatggaagacgatgtgatgtaccctagctacatggttatcttgacgtcgctaataggattggctgtggtgagaagactgtttgctgaccaccgaattggacaaaaggcagtctggatcttgacctgtctgtattcagcaaagttggctatgctcttcctatcatcgaaatcaattgtatgggtgtctgcagctctattactggctgtttcccctcccttacttctatacaagtatgttctgggcattttaacttctacaagtattgtctcatcttgaatttgaaaattgattttaattaatttcagtggtggaatgtgcagggagaagtcgaaatctgcctctaaaatgaagccatggcaaggttatgctcatgccgtagtggttgctgtctctgtctggttttgccgggaaacaatatttgatgctctacagtggtggcatggaagacctccgtctgatggtttgcttcttggttcctgcatcgttttaattggtctggcctgtataccaattgttgccttccacttttcgcatgtcctggtatgtctgcttagctattttcttatgtctcgttcgatgtatttctgtctaattatctgtaaaaagaacccatcatccatttgtgcatcaagccagttatcattgctaaaaaatgctgctgaccaagataattttataattttttcagtcagctaagagaagcttggtattagtagtggcaactggatgcatgtttattctgatgcagccaccgatgcctatgacgtggagttaccattcagatatgatcaaggccgctcgccagtcagctgatgacatttccatctatggattcat

SEQ ID NO: 41988 - DNA, 1138 bp, Arabidopsis thaliana landsberg
ccgatcagagcaagatcaacaccagatgcatccatcacatcctaaacaaaaatctcaaaggtatcactcaatgacttcaattgtgtataaatggccaatctttttaaaccaaagatcattctgttaccttcttttctgcaagataagctgctcgtttccgacagagcacacatctgaaaacataacaagcaatcttagatagttacacatagtcataaaccagaatcatcaaatataatgagaaaattacccaaaatgacgagcaaatgcaacaacggccttcctatctttccataaatcagaaatcggaatctcatttcctctcaaatccaagactttcactgtatctagcgaatcagctgtacctttccctattccagctcctgtggagaatcaatataatctagtaagtaatctagaatctccgtattcaatataatatagaaagagaagacacttaagctcaccggaagaagctccggtaatggccgacacgaccacggcgctacgccggagagagacactacgaaagtgagatttgaccgaataaccaggaagtactgtccctaatccatgaatcgtcttcagcttcggctgcagagtaatggacgtgatcgtcgacgacgacgagagagcaatcgccattgttgcttccagagaaagctgaaaataataataatcccaatttaaaatcgaaatcgattttctcataccgttggttaatctcgtggagttgggttattacacgtgtcagatgatgtaaccatgatctcagagaaaaagtcacatgccacgtcagttaactttagggcaaaatgggaaaagaatctaaagagcatatgttcgtgcacgttcttgtttagggtaagctcaaagctcaagccgcttctatctctctacatttctctttctgcaatggcgagattagtgcgtgtggctagatcctcctccctctttggctttggtaaccgtttctaccctacttcagccgaagctagccacgcgtcgtcgccttcgccgtttcttcacggcggcggagctagcagggttgctccgaaagatagaaatgttcagtgggtgtttttgggatgtcctggtgttggaaaaggaacttacgctggtagactatcaacccttt

SEQ ID NO: 41989 - DNA, 781 bp, Arabidopsis thaliana landsberg
  unsure (1)..(781): unsure at all n locations
gaattaagaatatgatgttattttttgccacagaaaattcataatggagtattgggatcaattaataacgttcagattaaccagcatatatcgtttattttgtcaataattaattgtaaaaacaaaacataaaagtcaactagtcctctttacctcgcaatggctactctctcagcatatggagaggcttcggcaatatctacttaatggtcaaatatttgactttccttcaacggctatattttccgaccgttaaacactatctcaaggtgtttttgcttaaacattgtgaattgttcgtgatgatgttcaaagtggaagattcatatgattattcactcaccaagacaccaatgtaagttctgattccaattcactgctatatatatccttgtattattttatttatttttcttaaaaaaacacttaggaatgtaaaccaaaccaaaagatgtaaaaaaaaattgtaagccaaaccaaaagatgtaaaagaaaataaaaagaaaaaaagaaaaaaaagaagaagaatattttgtagccttatgcattgaaatttgtactttttagtcaggtgtacattaaataaaaactataggctatatgagaaaacaataaaattatcactaggttatatgtttgagttgtactgtttcttacatatatatatcaacacaactcgtgggacgtagatcttgctcttacataaatatctacggcttctcctactgncatatatatattttctggctttattttctcgtccaattttgctcgcttcaat

SEQ ID NO: 41990 - DNA, 518 bp, Arabidopsis thaliana landsberg
caatcatacaagttacgttgcataattttcttgaagagtagaagcaattatttttgactattcaattcaaagctcttggtttcgccttttctggtggaagtgacaagtgcaacggacgttgtgcgttccgccggatcggtcactgcctcactggtccggactttcaggaatcgtatgattcaacaaccaactcattcttttcaatgattttttaaaactcgagtcgccgcgtggaaatttttaaagtttaagagataatcataatgatcaattataatgatttcaatcgcaatgaaattactcaaaccttagttcttaacttcatgctaagtctatcaagaactaaatcaccacaaattcgttacgagttagcattaggaataaaaagaaacgagaagtagataaataagatgactgtgttttgtttttcgatttattgtcaaagaaactgtatttactaattaaaatgaagttattgtcaaagaaaaacaattgatcataagaactaattggaagtg

SEQ ID NO: 41991 - DNA, 597 bp, Arabidopsis thaliana landsberg
tgtgtttatgaaagctacctatgctttttggttaacttagaacagattgagtttcgcttttgtaatgaaatttgatctctttgttttttttcctttgaagattgtgttgaagctaattaaaaatcagatggaagggtcggaggattttgagccgttcgatgtatacgacgagggattgaacggaatgaatgatccagattgcgacacgtgggaagaatggatgggatgggagggagcaggaacccgtgattactcctctcacgttaatccttacgcttgataaacgaatgatttcactaattaatttcgaaagaaatcatccaaatgtgtataaataacaatcagagagagactaaaagcacaacaatgtaaataggtgaaatttgtctctgataatgattgcttaaatgtgaataaagtaatctctcctttgtgtaaaagcgtttttagctttcctgattttggaactaatctttgagattaagctttcctgattttggaactaatctttgagattaagcgaaggttttatttgacttcttcaaagttcaaaccgtcaagggtcaagttcccgtttactttaagttgtggatcaaa

SEQ ID NO: 41992 - DNA, 700 bp, Arabidopsis thaliana landsberg
gcaacagttatgacaatgtgttggtctgtgagcatgttaatctagatttggactttgacttctctgtaccttggtctatacattaaattatctgttatctctttcaatattgatgtttaatgatcctatctatagtttcttgttcgggttaaacttgcatatgattcatttctttggacattcttgaacagtgattgagaaacagaggaactactaaatcttatttaagatcaagaaattttttgaaacaacaacattaaataaaaggaagtatccatcataaatattactagagactataggacacttcaaattctactgagcaacacaaatgacaagataattaattaagattgtttttgatataaaccaacaaacaaactgagaaatgaaactctcttaacttcagactctaggctttagacgaccttcattagcaagcttgaaggtatgggcctgctttgtggctgccttgtttgaggaaagtcctgcaacaaagtggtctctaacttgaggggttgtgaaagggaaattatggttgaccatggagtttaaccaagaagctgtgccttcacggtagagagcaccaatcggatcagagcgggtgttggaaagtgcctgaagaagaatcatgtgaggatcaaaccctggaatgctactgggaatactgactgtaccaaaagctcctccaacagttccc

SEQ ID NO: 41993 - DNA, 1086 bp, Arabidopsis thaliana landsberg
gtagcagtctctaacgaacgaggtcagactttttctttataacttcatctcaaagcctcttctatagttttcttgaagaggagttggtgatgacgacacttcatctcctttataattaccattatacccttcggtttagttgttactcttactcctatgtatctaaattttgcttctccttttcttaaaccaaccttaggatagttttcaaagaaagaaatatgcttaaaccaaaacatttttgagaagacgatggctcgataccgaccactgaagtcgttccaacctcttcaatggatagtactgtaatttttggtaatatttcaaaagttcaacactcaacagtcaacatctatattatttttttctttattcaacaagtcgaatccaaatttggtgtgttttggtttagctaatcacttgcgactaaactaaacacaatccactaatcatttaataacgaaacggtccaacccccattaaaccaaactatttttcatatttataacaaagcttttccctccacgcaacttcaatatccaaaataacaaaacatctcttcacttctcatcacaccatgcatcatcatcatcatccatgcaatcgcaaacccttcacaaccatcttctccttcttccttctctatctcaatctccataaccaacaaattatcgaagctcgaaatccatctcaatttacgaccaacccatcccctgacgtctctataccggaaatcaaacgtcacctccaacagtacggttacctcccacaaaacaaagaatccgacgacgtttcgttcgaacaagctctcgttcgttaccagaaaaatctcggtctaccaataaccggtaaaccggattccgacacgttgtcacagattctattaccaagatgtgggttccctgatgacgtggaaccaaaacggcaccgtttcacacaggaaaaaaatacgtgtacttccccggacggcccaggtggacaagagacgtcccactgaaactcacgtacgccttctcgcaggagaacctaactccttacttagcaccaacagacatacggcgcgtgttccgacgcgctttcggcgag

SEQ ID NO: 41994 - DNA, 687 bp, Arabidopsis thaliana landsberg
tgtgcccttccaaatctgattatgtttcattttgaggacgtttcacatcttgatcattggttatttgagtataatagcaagcgcaacatattcgatttattattggtcttcccacttaaattatgtcaacaacaaaaaagaaagaacaatcacacttttaacctcaaacaaacctaaacatggaaatactccccagtggcagcaaaatccgaaatttttagtaaacgaatatctcatccatagtaaggaggttgacctgagggtgaagccccgttgggatcagatgatgggtacatatatgggcttccgccataacctgagtattgactttgcgcttgcgggttctgccaacctgctggtggtgcagaacccgacaccgcgggacctttttgtgccacaagtaggcttagatcaggaagtgtatagtctctgcttttgtcgctaaaagccttcattcaatcacaggaaaattgaagaagataattagacgttgatttaatattttgctgcgaaatgtataaaagaaagaagcatacgcaattccgatactattctcttcccctcacaattgtttttttttttaggtacacatctcaaaaaagcaacaaatcttatgtaccttaacattcagatcagtatgacgagagtatgatagtcgaagcttacagtagccaccgtcataaatgc

SEQ ID NO: 41995 - DNA, 225 bp, Arabidopsis thaliana landsberg
tgctatctaattgaatttaaataaaaaatgttaataaattaaggttgggccattaactgctctcttaatagtataagataaaagaggtttgtagatttgcaaaaaactagaaatgtagggagaaaacactgatattggacgaaattgaagttgtggttgaagaaggggacattaaaagctgaagaaggtaaattttattgtaacatttttgtcctttgaaaaacg

SEQ ID NO: 41996 - DNA, 392 bp, Arabidopsis thaliana landsberg
  unsure (1)..(392): unsure at all n locations
gctgggcgtcgctcggctacgcgatcacgccgtcgctcgacgccggcgcgcagttctacctgcacgttccgctgtacgacgattccgacctggacgcgctgtcacgcgtcggcggccagctgtcgttcgggttccgnnnnnnnnnnnnnnnnnnnnnnnnnnnctggctcggcttgcaggaagacgtcgtcaccgaatcgtcgccggacttttcgattcacgttgctgcggattttcgctgacggtggtcgcgggcatggcccgctcctacaaaagccgctgttgtaaaggtccnatctctacaaccgcagactgcaatcgaccgtggacgtgctcgccaacacgccgaacgtgatgtacgtcggcaccggtaacatcgtgccggcgatccg

SEQ ID NO: 41997 - DNA, 725 bp, Arabidopsis thaliana landsberg
cagcataaaaacagatgaggggacacctcatgaggtagaggttctcgtctattgagcacatgctgctcaactgtatgctggcgaaatatggatcaagatacggttgccaagtcacctgcaaaagttttagaaagcccatgtaagcacgctggtgtcgtgcgataaaagtagaaaggacatgtaaaaagataaaaggagacaactcaccatcgaaggagtaagtgcgttgagctcgtttgagtactccacgtaagcacgctggtgtcgtgcgaatggctcctcgacctggtcccagcggtaagcagccgtgggcttaagccgatgtccggctaccacgaaccactcacgaggaggaaactctctgggtcgcccgacgggtatgtgtgcccacatccacagctgtagtaggtagacacatccacctaagctggcggtcctcgacgaacgacgacaagcctcgcaaagttgcctgtacaggaaggccaacactgctgaagcccagctgtaactccggtcgtatcccagtcagtcaggcagggcagaaacatccatgacgcgctgtcgcctgtcgcgtctggaaaaagaactgaaccaaagagatggagaatccaagctcgacaatggtatccaaccgtctgctcatctgcaccaggtggacactgcccaaagtctgcctaagccaggtaagtgggactccggtgttgtggctacctcgtagctcatcc

SEQ ID NO: 41998 - DNA, 497 bp, Arabidopsis thaliana landsberg
  unsure (1)..(497): unsure at all n locations
gttttattttggaaccatgacaatagaaattgtttcgtttgcatgtataaccagacactagtaaacattctctagaaactatgcaaaacactaaacaactcaatgactatgaatatgttagaatttttaaaacttagctttcttcataccaaaattgtaaatacaaagccattgagtctaccttcgacctgtagtgtttggtnnnnnnnnnnnnnnnnnnnnnnnnnnnnnnnnnnnnnnnnttgccagccctccttgatactaaggcgtcgtcaaattcgaacctcgatatggcgccgaaccacgagtaccaagtgtctgtcgattccccacactactcaacgacagtactggagaggtttctanaggaccatgttggagtcatcttctatgagtagtttatctttttaaattagtagctttcaaacaatcgtaaattgtagtttttaactaaatnaaaatttaaaaatatatctatagttantaatttagggaat

SEQ ID NO: 41999 - DNA, 2223 bp, Arabidopsis thaliana landsberg
catatatatatatatatatatatatatatatatatatatatatataaataaaaagatagttttttgtttacacacacactctgtaaagatattgcagacacacataaaattgagacactttttttcttacagcaaaaatagtaattgataaactttctaaattattattttttgtgtgtgtggttttgaatttgtattttatgtttgtaattttgtgaagttattgtggttaaaagaaattaatttttgttgtaatttggttttagaaattactcatgatattaaaatcatgtagaactgcattggttgttaacaaaacaatgtgaattatttgcatcaccacttttagaatcgtatgtaattttttttaacatcaattataagtaatacaagaaataatattaaatgatacaaaatgatttttcttttcaagtggttgatccatatttctcaataagcacaatgcaacaacctaataataaacctaaaaatcaaaatcaaaatcgtcctagaggcttatgtttttggtcaacagatggtttttctatttcttttgtaagaatctcgcaattaccataatcaagaaaagagtcttcttcttgaaactcatcatcatcatcacaagacatctcctcatctattcttcccatcacaacaacgcaactattgttcttccgatgatccaaggacaatgattgtctcattgcaatcgtaggttgtccgccacgtgtcagacaaccttgatcatgtcgccgccgacgtcaaggtaaagcttcgaggaagggcggtgctaggcggatcgcagatttggaagtttccggagagttgaccaaaaccagatgatccaccaccggaataaattccggcgccggagcatgacgtaatgcttcgtatgtaggcgtcacgtgccatgatcaacagacgaaaaggagccttaaccaaccatacgaagcagttctctttctctatgactttcgctttcattattggattctcaagagtatcgaaatcaaagttgtatatatgtaaatatataaccttttaaatatattataagagacgaagaagaagaaatgctcaaaaatttcaagacactaagacaggatcaaagagaagacaaagtccatgatgactgttgtaaatgataataacaaaattatgaatgtgatctattcttaaatgtacctagttggatgattaaatacatttctttcagttagatgtttaaatttattaaggtgttgttgccttgttggcaaatcagtcttaacttatttcatataatatggacaccaatttaaatctggatatttgagatgggttagttagtagttaaaagggtataatggcttggttcaactactttcttcaaagcatgtcatcgcttgacgcttggtatgatagttcggcccatatattaaatttgatccaatgtatagacccaatagattagcactgttgtttgcatcactacattactctaacccactatcgaatactacaaaactttaactgattattgaatcctatcgtttgggattaatttggttccaaagaaattcatgtgaggagatcacaaataaattgttatcgagatttggccattactctaacttatctagagcgacaaatataatttataactggaggtacactatttagatcctagattgtaggtttcgaaaatcttgggcgttacaagcaaaaactcttggtatcattgaatccatacgtcatatagtgtataatttatttacaaatatataggtgcctcatgcatgtgtctgatatgtacatactactatagacatagatttagggggtagagcgtcacgactcacgtgacagtccaaagctaaaatggctagaaaatcaaacatatagaatacgcgtaggaatgcggtatataccttttttattccttcgtgcttctacttttgcatttattaaaagattgtttcacacttctttaacgttaaaataaatgagctaaagcctaaaatactaaagataaacatatgcgtaggcaatgcattatagtgtattcatgtttaccgatgtcatggcctcgattggtaacaccgagaatgacgaaagcgtagacaaaaatggtagaataaaatggcataaagtcataacgacaaagcaagaaaaaaacaatttgattagaactatgttattgttgaattagtttgttatttttcattaattcttccataatcg

SEQ ID NO: 42000 - DNA, 746 bp, Arabidopsis thaliana landsberg
attaattgacgttgcttagaaataaaaacgcgcgcaacggcaggattgacattgaaacgtctcaaatccaccactcatattatttcgcagtaatttaggtttatgcagtaaattttttagaaacatatagaaaactttttacttccgtaggtgtttgagtcattctcttggatgttcagacgtgtcttaaagctttgagtccgcaacatggctttcatcttctcattgttggccaatccaataattttcttgcctacttttgtcgttctctaaagtcaatatgttggagttattgatgattatccggttatccccatatcacacccgcttgacattttgtccttagaagaaaccatttaaattgatttcatttgctgacaacttaattatattctctccaccaatacaaagatgattagaattccaataagtgaacatcgtcgaacatattgaggggctagaccacacttaccttaatcatgaaggtggtaaatagaatctagaaaaaaggacatcgaaaatggaacgaacgaagtcgagagagcggtggtctcctaacgcgcgcatgactcgctggaaagtattgatcaatgaacgtagatgggagctagacagatcattgtaacgacagcttcctcttttctaatctttttctttttcgtaataactaaatccttaaagcatgatccataataaccatagagcatcaatcgatcatgtaatagaccaataataaattattaaca

SEQ ID NO: 42001 - DNA, 372 bp, Arabidopsis thaliana landsberg
  unsure (1)..(372): unsure at all n locations
ggcctagatgctcgggttttcgtcttcatcgaacttctgcgcggcgttccgccgctcggtcggtatgacgcccggccaataccagcagtcgctgctcgctcaccgcgcggtccgcgcggtcggcttcacgcccgacgagcagatcgtccgcagctgagcgtcggcgcggcatctcccttgcctccggtccgcgctggccggatttcaacgtccgggccggaatccagcctatacccggtcgcnnnnnnnnnnnnnnnnnnnnnnnnnngacgaacgcgcggtacaacgcagcgtcgcaggggagaaaaccgtgaaagaaaatgccttgaaaaaattcccgcgcaatgtcgcggcatcggtgctgctgggccc

SEQ ID NO: 42002 - DNA, 700 bp, Arabidopsis thaliana landsberg
tggtcaaaacaaggaattttttaacccttgtttactccgggacagaggtacaaaaagatatttttctattaccttctggatttcattctccttcaggtcatcccaccgcgtaaaagactatcacagaaaaagaagatcatatataagatgttgtaagaaatgcaacaaaacgagcttagtgatgtttaaaatcccaaaatacgctgcatgaagctcatcttaagatcggtttcctttaggtcaatgccaaatcgtacatgacggcattaatttggcgtctttatcaaaaagcgaggtcaatgttggaaagaaaaagaatgacataagaaccttgatatcaagctgcatgtacaatgaaggagcttcttcccattgttctgccatctgctgtacttgatctactgtgatgccatgtacgtttcttgcagcacagccctgtaattttgcacacgcttagaaacaccaagtgaatgttattctatttaatatgataatggtcgtagtgtgctcctatttatctaggctaaaaatgaaaactacaaatgagatacaaaatcaaacttatcgaagagtaaatagtatgcagagaactcacagttgggtccttgtatgttgcttccaatatgtaagcttcatatccagatctctgcaaaaagaaacagtaagtcaaggaaactttcaagaacgattttaaccacga

SEQ ID NO: 42003 - DNA, 489 bp, Arabidopsis thaliana landsberg
  unsure (1)..(489): unsure at all n locations
cgggattggtgggtggagcccattagggagttggtgttatatttacttttaatttcatttttgggagtcagtaccaacaattcttgccacacaaatttggagatttgtttggtaaacaaagttggtgaatgattatgagatcctccacgtccctcttatggtttgatcttcacataattttttttattcaacaatgaagtttgaaacctattaaccataagttgtcataatattcaccttaatgaggaatatacgtctataatgtatgtaaagaagtctagtatgaaatggtaaactagttcagtaaagaatattcaatgctctgtttggacgactaatacgaaaattctatgtttcgaataaagaagtgtatttctaccatctcttgaaacttgttttgtagcaagaactcttttttttaatgctttcacnatgagaagtccgttcttttgttgttggactcaaaaaactttaatccatcaagacgct

SEQ ID NO: 42004 - DNA, 2859 bp, Arabidopsis thaliana landsberg
  unsure (1)..(2859): unsure at all n locations
gcctttttactccggtaaggaataagactagacatatgaaactttaccaaggcttagtgtcttgaatcttggaataaaacctatctatgaaaaacaagattgtttgtttgataatctgaactcgcacttcatctgatttagtttacatctctctctatcacaggtggcaatgaaaaatgatgatcgatgaagtcggttgagccttatgcgactaattaaattgtagaaccaacatttgatgattctgttatgtagaagaaccaacatttgtttcatttgatttagaattaagttctgtcgtgtgaagttgattctgagtatcttcccatgatactctctttcgatgttctccgatatctctttattaaagccatcatgatacacattcagatggtttctcgtatacgtttagttcaattttttactttctcattaatgcatatatatatatatatatatatatatatatatatatatctactggaaaattttggttaaagttgtgtgagcattggcgaaaatcctcccactaaatgatgaaaaaagtttccaacttgctatgttgttcttgtaatcttcttactatttttacagttcttttttttcttcataattgtgtttttaaattgggaaaatttcctaattgttaatggtcctccaaattatgtgtcaaataaaatttgtagaaataccaaaataaacacaagagattaagcatgatatacccttgatcttaaagtgcgattccacttaaaaatcaaactcggatcgctaaaatagtcaaaagtatctagtaatcaaagactaagaaatactggcttcgaatatgagtggataattattaatgtctgtcttatccatatataaatcttgttttatattattttcaaagtttcaactcaggagtatttcgtaggaacatatctagtaagaacattaatgtacacttaattcttaattttaaccactctcttgcatcacaagtaaaataaaaataaaaataaaaaaaaatgggttaattaacatgaaacattaaaaaaaaaaaaaaaaaaaaaacatgaaaggccaatagaattaaagacagcggtttttttcccaccgattttcgtattagatttctagtggaaagtgttagaatataggaaatatggaatatttccttattcctgattatgacaaatatgtaaacaatatacttgtagagcactcgtgttatgcctatataaggcttatgttaatatcataaatctccatggagattcataatattacagaaagatgaggagtcaagacggttttgtcgtgtgtgtgtttttcttttgttaatctatataaggaaaacgtgtgcgttgatcttacaaatataataaagttaatctatacaaggaaaacgtgttagaaagttgcataaaagtatttaatcgtataaatgaaaatggtctcattcttaataaaaagattttaacaagaaaaaaaccaaacgagtcaagacgaaagtaaaacgaattgacaatggaacctattattcgttgtgtcttaatcgtggcttagttgtatcatgtatggtacatacgttgatacacgaagtaggtagtgagtcgtggttttttctcttctgtatttacattccactcactttctttcttgcatcatccttacacaactacttcctataaatagaaagagactactaagaactttacatctgaagtatggaattaatttagcaactaaaaaaattcaagagagcaaaaagaactatatataccccctcctacctcatgaagtatcatcgctctcaagcatcatcacatatacagcttgaattagagctatgaaactgaaaggtcacgaatactcactttctctacttttagtttctctcttcatattaatcttctttctatgttactggtacttattcgtcgtctctgtagattaaatacattatacttttagtttcgctctacatagtccccctacccaattcatcattctcaagtatctatcgtcacacataccttgaaaactcaaaagtctcacgaaatatagttttctcttcttttactttagaccgtcatttctttaaatctatagtagtctctaatctacatatattgtatatatatatatttttaattggttatatataagtatattttaattaactaaagacaaatacgtagttgatcataactaatttactatgattgcgccgtaactgagtttgtgtttgaatctttcaggnnnnnnnnnnnnnnnnnnnnnnnnnnnnnnnngcggactttgttgctcatggtggaaccgagtgggatgatggggccttcgtgaacgttaagaagataaaaatatttcacgattgggctggtatcaccttggttcagtttgactatatcgacggcacgggggctattgtaagcggtctcgatcacgggagggttccagtcgagggagctcgagcagaggttaattaccaaactaatatttttttaattcttttttattgtttctattccaaaacattaatgattttatttgttttccccattttgtttggtagttttggctgagagacgatgaatacatcacaatcgtcacagcattcggcggatattgtgtgaggaagattgagttcatcacaaacaagcgaacctttgacttcggtggttttaattgaccaccttaaatgttttctttaaagatatcttccataggattataattagttcttacaaagttaaggtcagattataatttgcatctcaattaatatttaatacatatgcagtaatttttttgactaatgttaaaatgacatttataattatttttatctcatgaaagaaagataaagataat

SEQ ID NO: 42005 - DNA, 784 bp, Arabidopsis thaliana landsberg
ctaacttactaacaaaaagtcaggagtgttaaattaccaactacaacttgaattgtcatttggaagattgattcattggaatattgtgtatcttaagccatagacaaatcccataatttaatagtgtgccagaattttgtattcatattttaagcagtaaaaacaaaaacaaaatacatatatatattctcaatcaaactataatactttagatttaaagctattaagaaaaacatttagctagtcaaaaaaaacaattaacacttttcgaaaggtccatttccaaggaagctagagaccgtccttttttactaattcgcctgcaccatccccttgtatcgagggtctaattctacaccttattccattttctattccctaacaatttttttagtttttttttttatattactttaattctaatgaaaactcctatcttccttcctctccatcctttttcatctacctttgaatcttttgacacttgtatataaagctttacttcctcctttgttactccttttctatcaatcaccaaaacacattcattgtcttaaaccctaaacctcaagaaccgaacaaccacaccaaaaaatgagaccggttggcttgatctttacggtcatgttcttggtctcggccttttcggaatcaagaaccgcggattgcagagttctccttggtggttcgacggaggaaatcgatcaatctaaaattcatggggttgatttacgaagtgaagacttattaggggtcgtgatacatggttataagaggtttaggt

SEQ ID NO: 42006 - DNA, 445 bp, Arabidopsis thaliana landsberg
ctttcaagaaactcagtaactcctggtcgtttcaccacaaacattggtataacggctccttcgatctttatcctcaccatgaaatctacattaacccggattggtggttccatcgttgaatgtaccaatgtttcgtcaagatcaagaaagattgtccttttcttgtcattacgtcttatcagaggctcgcgtttatggagttttttgtagccttgtttcatggtggctcgacggctaggagttgcgctagatgtggtggcgagacggaaaaacctggagacgcaacgcaagaggcggttgtggaatgtgaagatagacatgttgagggatgtgaagatggagccagctgctgcaacggctgcagccgaacatctggattgatgattccggtttctccttgcatgtttatgacgcccaaatgatttcggcgtcggtttccccagaa

SEQ ID NO: 42007 - DNA, 457 bp, Arabidopsis thaliana landsberg
cttgttgattctagttctcccattatgattccgattgatgatggtgtttcaaactttgaacagtataaatagaaagtaatgccgatcacaaacaagaacggtgttttggttggttgagacacaaaactaatgtgtttacgaaagaacattgttttattaccatcctctttgaaaaccatctttcgcattcaatcatgagagggattgtcactcctcgaattagaaaggtggtaaaaacaatggaagcccacctgcaatcacagaacatacagagatgattgatataagacatggtcatttttgggtgtaaaaaaacacaaaaaagtgatccaacaataactccaaggatgacatgatttaaaagttgaccaacacaaaaaaaagaagaagatttcttaccagcttaagcctgcgagtgaatgcacattatgaactatctgctgaacaaaatctaatt

SEQ ID NO: 42008 - DNA, 1716 bp, Arabidopsis thaliana landsberg
tgattacatatccctaacattatcaaccatagctaaaatttcgggatgggaatgacataatcatctatcaacctcaattattttgtttactttttgctgtccaaaagttttcatcaaatagtttataggataaaataaaggtgtaaactccatgtttttgtttaaattttgtaaaataaaaaaagaagaagaaggaattagatgtcattccaaccctatgaagcaattcttaaaccgtctaatttaaacgaaaatactaattactgagctatgatggtagaaaactcagttatacttggctgttttgaagaagaagaagaaaaaaacaataacgacgtcatctctctataatgccgtaagcatacagaccaacttccttacaccattaatttcttagatttttctgctttctcattttttttcttttctttttcggtacgggacagattttgaggatcctttaaccattcttttaagaatggttgaatctttttcttttttcctcctttagttatcttcacataactcaagtgttgacaaattttaggagacattttaaaaatccaatatcttcgtttaaaataacatttaatttttaaaagacgttattaaaagtaattgcattttcaacggccgaatgaaattaaaaaattcatcacaattaaacaattaataataaaaataatccaaaatctgtaacctcagtcgctatttatagctaagccacaagcttctctcaccacagacaaacaaaaaaaggtttggttccaaaagctaaaaagcttccatctacattagagtctctctatttagcatttacacacaatcacacacacacacacacacacaccaaaatgatagcttacatagaaccatacttcttggataacgacgccgaggctgcctctgccgccaccgccgccggaaaatctacggatggtgtttctgagtcacttaacatccaaggagaaatcttatgtggtggagctgcggcggatatcgccgggagagattttggcggcatgaactgtgtgaagcctcttgctgtggtgagaccagtgggaccggaagatatcgccggagcggtgaaagcggctctgaggtcagataaactaacggtggcggcgcgtggaaacggccattctatcaacggtcaagccatggcggaaggaggactcgttgtcgatatgagtaccacggcggagaatcatttcgaggttggttatttatccggcggtgatgccacggcgtttgttgatgtctccggaggggcattatgggaagatgtattgaaacggtgcgtttcggagtacggtttggctccgaggtcttggactgattatcttgggttaacggtgggaggtacgttgtcaaatgccggcgttagtggtcaagcgttccgttacggaccacagacgtcaaatgtaacggagttggacgtcgttacgggaaatggtgacgtcgttacttgctcggagattgagaattcagagctattcttctctgttttaggtggtcttggtcagtttggtatcatcaccagagctagggttttgctacagccagctcctgatatggtgaatacttaaaaccaacaatataaataacaatctcagttatatatatatattttctctaatccaatcaaaaataagatatttggtccataatataaatgattgttgtgttaggtgagatggataagagtagtataca

SEQ ID NO: 42009 - DNA, 605 bp, Arabidopsis thaliana landsberg
  unsure (1)..(605): unsure at all n locations
tggtacaccattgaacttgtctgtgtgatgtagctgaaagataatcatgcacgatcaataacaataaaaatatgatttagtaagatactattaaaattaaaaatctattttgggaaagaaaccgtttgtatttacctggtgagcggcggcgacctttcggaggtaagggacgtcggcgatgggacctacagggaaacgcttgtgcacgagaccatcgtggacaaacatgtaggcgattccaaacaccgttatgcctaacccctgtttcaaggacgagcttaaaattaagccaccaggtcatttgtgttaatgcagccaacaaagtcatttgtcatcacatgtatccaatattaaaatacaacatacacagagagagagacacacaaaatcctgctacatagatacgttaattaaaattctgttttaacgtatgattaatctcagtccactactattattatttttattttctaacattaagtagcgattaaaaaaggcaccgaaatgtcctaattctggtgattagttagtgtttaacctaattaaaacaaaaagaccaaccatagagtcaaagatcttggnaagtgggttttgtgcgttttatt

SEQ ID NO: 42010 - DNA, 469 bp, Arabidopsis thaliana landsberg
ggaagcatcacctccttgatacggtggcacttagccctcgcgataaacgcctcgttgtcactcctccgcaaattaacaccggagctcgcaagcaccaccttctccactttctccggaaacattttcgccatattatacgccacaaacccgccgtagctcgtcccaacgacactgaatctctcgacctcgagcttctccataagcttccccatgcacaacgcttgaaacatctccgatcggttctcaccggaggaagaggagccgccgaagaagactaggtcggggacgtagagacgaaagaagtgagagagtggctttacctgatggctccattgccatacagcggaaggtccaaaaccatggaggaggaggagcgacggtttttgtgtagtttccgatgatgaagacggtggtggtcccagaactgtatggtggattccgagtcgatcgatctggtttgtaaggagag

SEQ ID NO: 42011 - DNA, 468 bp, Arabidopsis thaliana landsberg
caagattgcttgattgatcgaagagagtaactcatgcttaatttccagagtttgaatacaacgtgaaggacaaaaagcacacatcaagtctcactaaaaagcacatgatttgtcgacaactttcaaagcctctgcaaaacaccaaatgcacaacaaaatgatgcagataaaaattatactaaaaaaacacgcttaacacgactctaaccagtcccttgcattctggaacatcttcaaccacgggctcgggccagctttctcaacgtcccagcttgttgggtaccatggaaactgccacatcaagaaacaacgttcaggatgaggcatcatcgccaaatgtctcccatcaggtgaacatatagccgctattcccaacggtgaaccattgaggttaaaagggtacgcttcagtcacgttcccatcatcatcacagtatctcaatggtgccaaatctgagtgaagcatatg

SEQ ID NO: 42012 - DNA, 569 bp, Arabidopsis thaliana landsberg
tgcacctcttgaatccagagaacccgggcatggatcattcaacagttttggaacaagatgcaaagggtcataaggagagtgtggagacattttgtacattctaagtaaggaggtagggctaagcgggaacgcatgaaccctcttttggcattgtaacaattggcaagcaaagcccatgttaggatcagcaatacctctagcagacttcacatactgaaatgcatcatcaaaactttgcccttctctccacatcagatatgctattaccaacgaggtagatcgtgaaaccccttgacaacaatgaacaaagatccttccactttgctccctcacatcttcaaagtagtcaaacacatcgtacagaatactagttatatcctctgacggactatcctgtaaccacaaggatctgtaacaaaaatcagacttgaaatattccggacagataaaaccaacgcagttcaagatatgcgtgattccattgtttttcagtatgctcttgtctttcgccacagcatctccaccacatatatatgatcagaacctttggacattctttatcaaagaaa

SEQ ID NO: 42013 - DNA, 740 bp, Arabidopsis thaliana landsberg
catcgagtttggtccattcaagcgtgtcccaactaccggtaccatccatcttttctgattccgaagaataatcacgcagcgaccttactcgcccagacggtggtctcggcggcgtcatgaaaaaggggggagagaaagagacggtgacgaggcttctggtgatcacctgccgatcaacggagcaaaacgacggatttgtttcgccacaccaatcaattaatacgacactgttttggtttggtacgaagttgtcgtttttttccttttgtactttattttgtttagtgttatctatttgtatttatcggcaaccaaaaaaaaaaaaaatcaaggcaaaataatctgaggtcaatcaaaatatttaccaaaatatttttccataataattctttatcttaacgctaatttagaaatttaactaaagttaaattattcaaaatactgtttttcgtattagatataatgtacgaggtgtttttcttatataaagttaaattttggacggtagaagaacttatctctagttgtgcacaattatatgtcaccgtcttaacaacaaaaagtcacaaactactaaataatccacaggtgtttatcaacaatttgaattgtattaaacatcaacatcaataatcttcaaagccatgtcacctgaattatccaagttgaatttataaaagaccaaaattacctgcaacactcttgtcggttcagaataattccgcaatcgtttccccctt

SEQ ID NO: 42014 - DNA, 291 bp, Arabidopsis thaliana landsberg
tttgatcacattttcaaaatgactcatatattctttactaagatcttaacacaaattaacgaaaaaagatcatgatttcggacaatagctttccaatatggtttagttgttcacacaacaacttgaaatcacaaatataactagacatatctcgccttaattagcttcctttcgtaataactcccattgaggtcaatgaatcaaaatcccgagatatagctaatgcaacccaaagatcttgcttctaatttgacttttccatatatagactcatgaaacatttaatgtgac

SEQ ID NO: 42015 - DNA, 618 bp, Arabidopsis thaliana landsberg
ctaaccatatcactggactacaaaaaataaaaggacacactttcgtggttttactgatgaagctgaacgatctatcttctttgatttgatatttcttattttttcgtgaacaatcattattatttgcttctaaaatattcccattaaggcattaaccatgtgaaaacacttgtacgtgtggactatatagttcacgtgtgtatgagtacgggagcattgaataattatcgctacggcaaccacaaataaatggatgtgaacaacgctgaatacttcccatttttcaactttgtctaataaaaaattactaaaataatgttccaattatggtttttagtgaacatcttgttgtcattggtggttagataatagatgctacgagacatgttatttgttcttggaagaaagaggtacgtaaattctcaaaagggtctttcggtgtaaagaggcagctttgactttgctaacacaaaaagtctccatatgattattttctttttcttttcagaagttaatattctcaatttctcataaacattttcaattctttcttttggtattggttgaataattttgttgagttttataaatgatgttttaatgtgaaaaccaagaaac

SEQ ID NO: 42016 - DNA, 542 bp, Arabidopsis thaliana landsberg
ttcctttcctgcataacaaatgaggcataagcaaatgcataagcttagtgagagcagttggctcgtctcaccatgctacaataaacaattgcattcaaataaagcacagaaagtctatcgcacatcataacaaaaactgttacacatgactatccggagttaacgagcaatctagcccaatcggccagtccccaacgagtactcttaccccccaagcgcaccctgatctacattctcgcccaacctgaatcaatcatcgcaacccaacaaatcagatctcggttataacatacatgcatcagaataaaccacacaattaactcacataatgaaactacacaagaaacgatctcggactcgtagccacggtcacacactcaccatattgatcactaacacagatcagacacccttttgtcgcccaaaaaccagatcgcacttacccaacaacttacaagtcgaaggaggcctacaaacaaccaaataaacgtttgtttacataaatgatcaatagaaagtcgttggtaatgagtctacacgat

SEQ ID NO: 42017 - DNA, 408 bp, Arabidopsis thaliana landsberg
  unsure (1)..(408): unsure at all n locations
cccccccccccctctcncncncccccccccccccccccctcccccccccccccccccccccccccccccctcctccccccccccccccccccccccccccccccccttcccccccccccccccccccctttttcccttgttcccnncccccccgccgcgcncncacacgccacccacacaccaccccccccccccccccccccccttntccctcccccccccccccccccccccccccccncccccccccccccccccccccccccccccccccccccccccccccccccctcctccccccccccccccccccccccctccccccccctctctttcttcttttctccccccccccccgcccccccccccccccccccctccccccccctccccccccccccccccccc

SEQ ID NO: 42018 - DNA, 590 bp, Arabidopsis thaliana landsberg
gcgttggtctctttcggcctttggtgccactacgccgcccattctttctacccccacgtggttgtgctctcggtctcaacatggtttcgccatttgagtttgctgcacctcgtggtggtttaacagaaactgccggtttcttgccattgccacgggcacgaggccggccacgtcctcgtggtggtcgacctcctctcccagagctagacacaccacctaaaccaggatccgtccagttctcttcttgcttataagcagcaacttgcaccggagtttccattacgtccttctcatgtaagtttctcagaatatttgtctccaaacccttgtaaacaagaaaactttcagtatatgaataaagaaaatatcagcattcgttattatatacttaccacgaaatcttcagattctttgtcttttagaggatcgttgttttgatcgggtgtgtaaacaatcgagctgtcgaaatcaaagagtctcaaagctacacctcctgctgtctttggtatccacggtagtacattaaccccacaagtaagatcgctggcgagagctccttcttgtaaacccaagagttcagaagttgtttc

SEQ ID NO: 42019 - DNA, 1780 bp, Arabidopsis thaliana landsberg
  unsure (1)..(1780): unsure at all n locations
ccatgactgacagaatatgaaaacttatggttttagcattttatgaacaagaacttatagactcaaggatcagaaacttacgatgcatggccattgaagcaaagagatgattcaacaggatgaatattgctccttcctccaacttctgattgccaagtgcatacagttccatccagtgcagcgctagcaaatctgtgtccgaatggaccgaattgcacnnnnnnnnnnnnnnnnnnnnnnnnnnnnngggaaacatttgcagcaggaagaacaccataagttgcagtagctctttcgtttccaaactgtaacatgcaaggtttgcattataagatccacaaggatagataagaaatgtcatatcatttactccgaactcctaaaacagatggtgcaagtgtttaggcacaaacctcccacaagtatatgtgagtgttgcttgagccaaccaagaagaggggcattgtcgggtgattagagaatgctctcgtaataacactttcaactgttgggggaggatcaacaaactcttcaaattcttcttgagtttcccaacctagaccagagactcctaaccaccggcggatctacgtgaattttatttaatgttatgagaaaatatatatttggcttatcaaatttttttttttttagctatgtgtgacctgggtaaaaaatgatcctggatccgctatcgctcctaacccagagtagccaggaactctgtcagctttcccaggcttgtaaagagaaacaactccaacagtggccccacctaacccaaggtgtgctcctttcttatccccaagaccaacaccgagtgaaacacatgttggaacgggagttgactcagagttagcccaaccattatgtggccagtcagcatctgaccagatatagtctgactgattttgggaagaatcaccatcttctaggttaaagaaaattataccctgcatgtcacgaatgcacatttagggatgtgtctatgtctcctgccacattaccactaagcataataaaacactgcaacaacaaaataacaacagattgacataaacttggtcttcatatgggacatgcaatatcatctgaaaattttatctcgagatactgatgcaagaatgcaggatacagataaaaggttaatggatgttttccaggatgcagactcatctttgcatatctaaagttttggtgcgtagcatatggcaagttacaaaaacttatgaatttcacaggaaattaaagatagaacaagtggtaaaggcaaattacgacgatatactgaccttgcggttgctagctaatgcagcttgccgatggttaatggcgttgatacaaagggcctgttataaagattagaatactcgatctcaaaagataagaaagtttcaacaatatcagtgacttgttcgtcaatgtaagaaaaataagtacctctataagctccccggtcctcttatggatttctttggggttctggaacgcagagttttcattggcaattaccgcagcttttggtgaagaatttgaagcgtggtttgcaagtgaagccacctcattactacttcgaccatcttgattgcatggcacatagagctcattcttcctgattacttctctgtacatatcgctccaatcttccaatggtttagattttgaccattcaaatatgtcaaaattttctaacaagaaagcttcgtgtagtaaatgaggatcaacacaaagcttccagaacctcacagaaaccacagggtcaccgtttttttccgtctct

SEQ ID NO: 42020 - DNA, 626 bp, Arabidopsis thaliana landsberg
tcggccaagtccttgacgagcaccctcacgaggcgaagtagacgaccatgtccctgatcgagcaagcgaggcgcgacaagtccttgtcgagcaacctcgcgagacgaagcagacgaccaagtcctcgtcgagcaatctcgcgatacgaaacagacgactaagtccttgccgagcaacctcgtgaggcggggtggacgactaagtccctgttgagcaacctcgcgaggcgaggcagacgaccaagtccttgtcgagcaaactcacgaggcgaggaggagtgaacatccaacttattgacgagcaaccccgctaggtggggcaagcagccaggtcccgtatcgatctaaccggcataagagaagggttggcccaatgctacaggctcgcgtcatcaacaaaccacggctgggcctcgggtacagtgtcgaagggtccctgtcgaacatcaaacgatacatcgttacgtactgtcccaggtaaaccctactgatgtatggggccagttacccagacgtagggatctcagcgtcggagcctctacagtgactgcataccggaagggacgtgacagatgcacatacagtgtatgctatgcatgcaggtaagtgcgcaggtccatgatgaag

SEQ ID NO: 42021 - DNA, 364 bp, Arabidopsis thaliana landsberg
accccagctgctcaacaaccaccaccaccgtcactatccgtcttggacgacggaagctagatcatactacggcggagggggacatcaaacgccggcgtactactcaaggaatactcttgctcctccttcttctaacccaccgacaatcaacggaagtcctttaggtttgtggcgtgtaccgccttccacgtcaacaaatactattcaaggcgtttactcatcttcaccagcttcagcgtttaggtcgcatgagcaagagactaataaggagcctaataactggccgtacagattgatgaaacccaatgtgcaagatcatgtgagtctcagatcttcatctctgacttcttttattttatttttt

SEQ ID NO: 42022 - DNA, 388 bp, Arabidopsis thaliana landsberg
agtatcagttcgctttcgatggagttggctgtttcgtgaaaatcttcgggagtatgttccaacgccagaaaaacttccgggcgggcttccaggcggttactgttcctgaaaatgcggttgcggaggctcgtaagcaggtagggcttgatctggtcggttttgccgagggattcccttcgttcccataggtagaggaaaagatcgtgcacgaggtctttcagtacatcgcggtcgctgacgaaacgtcttccataatcgaacaatggccggtagtaattgcgcaggagttgctcaaaggcaagcgggtcgccttccctgaacttgtgccaaagtaccgaatcctgttccacgaaaaatgggttacgttaaaagcacatgtaccattttt

SEQ ID NO: 42023 - DNA, 412 bp, Arabidopsis thaliana landsberg
gcataaaccgatacgccttttgacaatttaggatttgcttcaccaaggagactgtatcgctcattatcagtcattgtcattgccgccctcatttgtgggggtaatgtttgaaatacagagggagaccaaagggaatgaagaacacggagtagctgtagatgtaaaaaaatgaatgttgtcatgttattcttgcaaaaacgaaaacgaaaaaatcatcccaatatggcactaaggaacttaattatgaattatactaagcatgtccacatttccaggccatacttttaagaggggtggcaacatccaagaaagatgatgagccataggatgtgaagctggagttgtcgtataggtcgtgttcaaaatgctttttctgtattcacttcgattgagtgctttctcaaagaatgta

SEQ ID NO: 42024 - DNA, 500 bp, Arabidopsis thaliana landsberg
aatgcctcatggcgcgtgtcttgcaagggaggtatttccctaactctaatgtcctagttgctactaatggatcacaagcttcttttgggtggcaatcaattctcaagggtagaaatctcctaaaaaagggatgagatacatagtggggaatggagacttgattcagacttgggctgacccctggctcccacttcacacacctagacccccaagacgtctagaccaaaaccaacaaagagtgctgcacatacaggatttcttcttacccaacaaaaccggctggaatgagcaattattacgggaacacgtggtaccagaagatgttcctcacatccttaccctgaaactcagtcaaacacagatgacggactatttgggatggcactatacagaatcaggaatctattcggtcaagtcgggatattggctagcatctcatctaccagaaggagaaccgacaacacgaccacaagcaggaaacccacaactaaaacaacgca

SEQ ID NO: 42025 - DNA, 307 bp, Arabidopsis thaliana landsberg
ttactatatcatatttttctcaatcaatatatatatatatatatatatttatatattttaccatatttttgaaaggggcgggtttactttatttgttatcatatataacgagcagaaaacatgccaccagagacaatccaaatgacaaattttaacaaattgtgtacaattttatgtctcttttgtcttatttatatcctttaaaacattgaaatcaaaataactaaaaactagaaaacataatgagagatatctcatagtgaaattgaatttcaccctcatgattttgataaaatggattcactta

SEQ ID NO: 42026 - DNA, 745 bp, Arabidopsis thaliana landsberg
cgctcctccactgtagttattgtcacgtgcgccatcattccaccatcaaattttttatatatattatatcatatttctttcatgtattattcaacatcatacacaattgatatttgatagtgttatgtcttttttgtccatagagaccttcttgtggaaacagagggaccgagtttctttgtttttgctagaggatgaatagactaatacacacctcgaaaggaatcataagtagattggaaaatattgtgtgtaacgtgtgttaggtatcctagatttgttagttcattaaaaatgtgatcaaattatatttggttactaactcttttttttttttatatgtctgactgttaacccttcttaactcttaagagttcactatgttcaaataggagcatttattttcgtctcatttgctatatgtaatgtcatatttagttaccaatattacattttattttccacataatagtaattttattaaatgcgtgaaatagaccacaaaagactttgattccttatcaacaagggaagacaatcatagaaagaaaagcacgagaaaacaaaaataattttgtttcaccaaaaaaaaaaaattagacatagatattcaccaagcgagttagcctaacgacccaaaacatgttttgaagtgataaaaaaatatcctgcacattcatcatcatcgttctaatttcggacaaaactttggcaattttgcagattcacatcatctaattctaaa

SEQ ID NO: 42027 - DNA, 703 bp, Arabidopsis thaliana landsberg
cgttttggatgaatctgttgattctagggttttcttacattgaatttttcgaagctcatttatctttgattttgaactaatttctgtaattgattcgtgttccagggtcacatgatgtggctgcagaagcaagaatctttcaagcagaaatttggaacaatcgatgaagacgaccacaagtgattcatgactttattacgtctctgaaactgctttctttttttgtatttgtgagtcttgaggaagagttagatttatatgaaatttaatcatacagactctggcttactatctccaatggttaatttgccaaatgctagtagtttttgattgctagagatgtctctgtattttgagattttatagtatttcagcttgagctttgtttagtggactagttcgagatgctttatagtgatacttcctctcagttagcagcaaaccaaccatctttctcccgaaacatttcctgtgaggttgaacaacaaatttcagaaaagggcttgtggtgagtcaaaggttaagttttggtgttgtttcagaagatttacttcagtgaagcttgtagtgtagagattgttgaatcaactataactgagaggcagtgtactgaagaatgaagcatgatagagttatgaatgtagtctctgtagttttgtgactcgtagctgtaggattatgtactagtcaaatttgagaaatc

SEQ ID NO: 42028 - DNA, 580 bp, Arabidopsis thaliana landsberg
  unsure (1)..(580): unsure at all n locations
atgtgccagttgtaacgtgtgaggattcgtatgaactaacgttagttaacttaaaataatgccaactaataactacacaaaaattccttaaaaggaaccatgcataaaggtgaaagaaacgaaaattcgtggttggttgactaagcactttacgttaaacatatatgtttacccaatcatgacttatctatttgttagacgttacttgacctccacaatggatggattagtcatatttaaaaattaacgagataatcaaaagattcctaatatccagtttaaaagtgagaaaatatgattcgagaattctagatcaaagttattaaattgaaagggtcgattatagctgatgttatacgaccctctttgtcattgacaaatgacacggtctcaagaatataggatattgataacatttnnnnnnnnnnnnnnnnnntatgaacaaataaaaataaaccatcaaaacaaaaataaaaacaaaaattaaaagattttggtaacgactcagatatgtcacgaaactttatagacaccctgaaagaaagaggattctaaacgtatcaaatagagacgtaaaaat

SEQ ID NO: 42029 - DNA, 643 bp, Arabidopsis thaliana landsberg
tgtaaaacgcaagacgaagaaaaaaaaacgcgtctttaactaaacaagtttccttctttttaaagcaatcagagaaaaagaaagaaactatctttaaacaaggtttttactttgatttcaatcagcttattagttcattttccataattcattaagaaacgtttaactcacaaagtttcatcccaccacataagttagttttatttatagcatctgggggattacgaaatgttaccaatcatagctagtattttacaaagtatgctgaaaattattattttttgtatttacaagatactatttagttttatcttctgaaatcttcgttgatgggtatatattcagaggtctttgtaaattttttttgtaattttttagtttttgaaaataactgatcatatctgtttattaaaattcttttaactaatatatgtttgtaggttttgtgaaaggcgccctctatatcactaactttttctgtgaattttcatacttgcatatagagtaatagcaccagtaatttaattgagattttgcatattactatacccaaatagtaaaataaggaactagtaactttatcaaaaaaaactaaattagttgatgtgacaattagtatttacaacaacaatgaatagggtca

SEQ ID NO: 42030 - DNA, 492 bp, Arabidopsis thaliana landsberg
acgccgaactcttccatgtggatgtgataggcgtctaggcagacgccgtactcggtgctgaccgcgtcggccagcgccatggcctggtcgccgcggttgaagaggtaggtctcaaagcggttcagcggttcgacggcgatgcgcacgccgaccttcttggcgtgggtgaagcactcgcgggtggcgtcgacgacccacttccactcttcctcgggggaggcgtccggcacgaccttgccgacggtcgccggcaccagcgtgatgatctcgccttcgagctcgctcaccatggtcagcacgtccttgacgtactgcacggagcgctcgcgctggccctggtccttggcggcgaggttgcgctcgcccagcatcagcgtcaccgaaccccagcagcgaatgccgtgttccttcagcagcgcgcgggtttcctttgccttgtactgctcgggctcgcccgaaatctcgatcgactcgtagccgaatttcttgatg

SEQ ID NO: 42031 - DNA, 142 bp, Arabidopsis thaliana landsberg
ttagaaatatatttggataactcccaaacacttctttacataactcctaaatatcctaagtattatctctattgttaataatagcgggggactcaagtttaagcttaaaccaacattctcccccttaagctccgaaatcaca

SEQ ID NO: 42032 - DNA, 937 bp, Arabidopsis thaliana landsberg
  unsure (1)..(937): unsure at all n locations
gtgtctggagaggtcgtgatcttcgctagcggaatcaaaaacccgcggatatcctactattttcttcgttaagatggattcaaaaccatcaaattggggggaaaatcgatcttattgcgaacattttgggtaaattttagtcatgatcaggttcatagatacactgagatccgtctatattgttagcatggtgacggcggccgggatggacaaatccactcagcagttcagttcagctctatttttaggatggataacagacccatgtagatcaactctatttaggtatataagcacaattctatgaatggtaaataactacagacacaatttatgaatggtaactaaatatcggacacgtccataaacagatttgtgcgccttaaccgctgcgaccattcagaccctatggtttgaaacgggtggttgcgtccatgatattcaaaccgagaaggttgtccaatggtttcaacagtttgcgacacagttattgttagatacatcaaagaaactataagacactacacaaatacgtctctgttttggaacagaggatttttttaactttttaattatattaatctaattaatcaaaacatgaattaaaacggctgacgaatatcaccagccaagtctatagaaaaaagattattactacaagcttttacttaaaaaatgtccacagtttttgagcataaacttgcggattagtttgtcttttcgtgtgctacaagtcttttagtcaaattagacgaattttacgctttcttgtatacattgatcctagagtttcgtaattgctataaatagatatcagtttaggagttaccaaatgcanaanaacaaaaaaaaaacactatcattaatcacngtccactgttcattttcatctgcacaatgatgatgagtcgtcgctatggagccaagctaatggaaa

SEQ ID NO: 42033 - DNA, 567 bp, Arabidopsis thaliana landsberg
ttccccgccgacaaattcctggagaaatctgatttctcttctgctcagatccttgggcttcgtcttctaggtttcctcgattctcgttctgtcactgacgccgatcgtgatttcattggtcccattcgtcgtgaagttgcctctaagattgatttagctttggaaggcctcgtttcagattcggatcggtacctgagcttttcccctttgagcctgtttaatttcgaagaagagagggttcgaattttacttgcttagcttagtagagtcttatgagtgtggcttgaattgttgggtattggaatcagggaaatgtataactgagtgatattctctaatctttggacttcgttcacttagttactagctgaaatctaaagatctttttgaattatcgtcaatattagctacacttgagatttttagagtacccttttatggtgtgcttcttgttgtatccaggaaggcgtttgagcttgcaaatacagctccaggggcaatttttggcagcaaaggtggatttgatgtggaaaagattaagcagtctaagtactttggttttcatgt

SEQ ID NO: 42034 - DNA, 715 bp, Arabidopsis thaliana landsberg
caaaagaggattctaccattggcaataaatgaattgtcaactagtttgaggctttgagcggttcgtttacagacgagcttttataaatgaaaccaatcatacattcatagcaattatctaaatcgcttatcctattagtcgatatttcaattcaaaaaagaaattctatttgtaattcttaacacacaaatattgaaccaattacgaaaagactatttaaaaaatatatatcattagtttttttttttcgtcaaatatatatatcattagttaaatttaacttttttaactactatcttaaatatatatttttttttacttccgtcacaattatataataataactcaagaaggacaatttatacttatttagttttaatgaagaaataacttatgtaaagtgaaacataatgaatatatgtatacatcataccaataatgcaaatacatggtcttattaaaacttgatcacacaggtgatgccataaaatattggtacgctttaacaactcctaaaactgcagcagccacaaccaccacagcggccacaccctcaactactgtcttcctccatagtctttgcttcaatgagccaaacttactataaaattcgcttgaacagtttgcaacatttctcataccctcatctgttttaggggtttgaatgtgtggcgtggccccttcaaagaaactgagagccagctgctatagggat

SEQ ID NO: 42035 - DNA, 565 bp, Arabidopsis thaliana landsberg
aacaatgttcaataaaaaagtctacagaatgcaattcaaacaaatccgaataggacaaggaagaacaaaccatgggagataatggttgactcaagagcgacaacagcacgtccattagacaaggcttcagatacttggggagaaatcttgaccagactcctgagctgcttcaaaactagttgttaagagaaagtaaatcaagattggaaaaagtcttaaaacattggaaagtacagaaactttgttgtttgcttcaagaggtgaaagatgattctggagattcgagattctagattgagctaaagaagaagccattctccctgaaagatagagttttttgaagtcatcagaaaagccaataaactactcaaaaaaatccagcttccaaattctcgatgacgaatcaaaacacgaccctaatgatcagaaatgacaaaactttcgagtcaaatacataagaagcatgaaaatttctgaatttacggtaacctaaaactaaaaacactacacagatgaattgtcttctggagcatcataaattcatgaatttagaacactgaaacct

SEQ ID NO: 42036 - DNA, 390 bp, Arabidopsis thaliana landsberg
cccccccacccctttctccccccccttttcctcccccctttttcccccccccccccctcccccccccccttttttttttcgcttgttcccccccccccccggcgctccccaacaaaaaattattccccttctcttttttctccctctcctcccccccccccctcccccttctctcctcctcccccctctcctcccccttcccccccccccctttccgccctttcttcctttcccccccccccctctttccccccccccccccccccccctttcctctccccccccccttgccttctctccccccttctccccccctccccctcgtcccctcccctcttcccctctccccccccccccccctccttctttttttttacccccccctctccc

SEQ ID NO: 42037 - DNA, 537 bp, Arabidopsis thaliana landsberg
  unsure (1)..(537): unsure at all n locations
cttaatcgtaagcttgtaaccatatataaaaaataaagagtgatgttccttannnnnnnnnnnnnnnnnnnnnnnnnnnnnnnnnnnnnnnnnnnnnnnnaatttaatccttatatattactttagatcacatcttatttcagatgtgagatatttcatacgctccttcaaaatgcttgtttttgttttaggatcggcaacatatccgacttaggccatcatacttagatcaataatttaaaaattcgtataacatgttaagattcaggggttttgaattcaaaaccagttaacacatattcttatgttactacaaaacctttcttaatttaaatgcggaaatcctaagtcttaacaaacaagaaaccctaagttcttatactatatgcattaaaacatatatggttttcgtggaaaggggacttcatgaccttgtatgtatgatttaagtatgtatgtatgtatgtatgtatgtatgtacaaaagtttataggacttgattgacataaaaagaggtctttagaaagaaacttaaca

SEQ ID NO: 42038 - DNA, 419 bp, Arabidopsis thaliana landsberg
cgggggccatggactgaccttactcgctgcctacctttccaggattccgatgagggttagcgcgcgggggtatagggacgccccccatctttcaaggattgatgacacatgggttccgaattgatttacgtgacggaagctagcctcggtatcagagcggtcatcggcctgcagctgtcggtgcagggtttccaggtctgctgcctgtcgcggtcgggagaaccgcctcggatggaaggcgccacccatgccgtgacctcgcactggcacccggtggcctgcgacgtcaccgacagcgatgcgctatgcacacgccatggacagcctggagcatgaactcaagctgtcggtggcggtgttcgctatcaacgcaaggcatgatgctgaggaccccaccattgaatggcctatgaatgact

SEQ ID NO: 42039 - DNA, 685 bp, Arabidopsis thaliana landsberg
aaatagtgcaaaactaattttagtgtaaaagttgaaagaagagaagaaaaaagtggaggttcagaaattgatgtgtgctttttatgaactgaaaactttatgtgcctaatcctcactttagccagcatgtttctgggctgccttttttagtgggccatttgatttcggcccgagtatttattttaatgtaatccttaatctaaaccattgattttataattagccacgtcgatcgaaaatacgcgcctattttttctttcctatggttaggatccgaagcttgggtttgaatatatttttatactagttttcaaaaactactgaaatatgcatgtcctaagttataaattactgtaaaaaatttgttatatcaaagtttcacccaataataagttatgtatagtaataaataggatgaaatcattaaaaagattttatgatataaaatgagataaatttgtggaatctacaaatcatgcacatttatattttatagatggatagggaaaactaatgtttgtaatatgcagagagtttattctcagctacagaagtataaatgtgtcagattttgattttgtaatcaagtttattcaagcattacattaattaaggatactataaatgtatcgacaggaatttaccttcttcacatgctctaataattggtatgctcctttattaa

SEQ ID NO: 42040 - DNA, 668 bp, Arabidopsis thaliana landsberg
  unsure (1)..(668): unsure at all n locations
gtagtgattatagcaatgttgtgcttacacatcaagcgcaacaggtgtactatctaacatatcctcatgaaaacttgaagtcttgttgggttgtatacaaaattaatcctgaagtccatccgttacgatatgattattacaacacaaataacgaagatgatgaatttggtaaatatttatcaagaagaaggcgatcagtcagaaaatagagaatttattatatctgaggatttagggctcaatgaagtagctagtctcaccatagatttgatggaagaagaaccaggtccttctagcgcaaggactcgtaagtcacagagaattcttgaaaaacaacaaagacttgaaataattgagcagcgcgttgctgaagcagattctgatgccgatgatttttgaaaagtatatatatttaaattcttgtatatgcattcctaattcaatactaaaagtatatataattaaattcttgtaatgaaatttgtgcagatgatgagggtcatggacaagctcaaagggaagaagcgcggagaccgtggtgactcctcgaggtcacggtcgactaggggttcaggtggtggggatcatcctctatgttgttcaggtnattaatttgtttatttcttttctctacgtatgaatagtatatcccttattccgagtcttga

SEQ ID NO: 42041 - DNA, 578 bp, Arabidopsis thaliana landsberg
aatatttgatgtgtatagataaccaaataaattcaacctataatagcggtttttaattacacatgtataatgtgggtctgggtctgtatatagaatctagggtaacgaccgcttaactatatacatgcactttttatactttttcttttacatcatatatatatatatatataatgtattattattgcatgaatggtatatcattttttcattttgaacataattctgctataacttttactatatatttagaacataaattttttaaggtttcaaacgtgatttcattgtatacgcgtattattgtattaagttataactataaaactaaaatttcaataataaactaaatccatctcacgattgtacaagttatgtagtattttagaatatttttcagaaacaaatgtaaatcacatgtatactacattagttaaagtcatatatgaaataaaatttacgtaaaacgtattatatatatcctatatatttggaacaagacataagaaaaacctatgggctatggtaatattatatactcctcattccaaaagatataagtactcagacaaagagtc

SEQ ID NO: 42042 - DNA, 765 bp, Arabidopsis thaliana landsberg
catacaacaaatcaagtccaattctcaaactaacaagaacaagaccgatagttgagacattagaaccagatcggaaacacaaacctccataactagatcgaagaaacgagacggctccaccggggaatagatccgactacaaagagcaccgatccgccccccatcctccatgatagtcaccacatcggaaccaccacaaaaaagagagatttgaagaggagacgacgaaactagggtttgagaaactaaaatcaaaacaaagaataactaagagacaacaaactgaaactactaagaacaggaccggcgacggtgctatggaagccaccaatcaccggccaaaacgaggaggaagatggccttgacggctagggcgaacaaggagaggggagagaggtcgggaagaaagaaaaaaaaaatttgaaaaccataaaaaaattaatttccattttcattactaaataatttccattttttgaaaaccataaaaaaattactaaataatttccactttttgaaaaccataaaaaaaaaattgaaaaccataaaaaaaaaattgaaaaccataaaaaaaaattttgaaaaccataaaaacaatttccatttgctataaaccataaaaaaattactaaataatttgtttctatggtctataggtcacgtattttaattgatcaatttgatgatgatgctatatagttgtgctatagactatcaaatttggaacaaattctaggactaaaaggataaataatttgggcaata

SEQ ID NO: 42043 - DNA, 238 bp, Arabidopsis thaliana landsberg
ggcgttgagagagagaggaccggggccggagttgtgggatctatgtccattcgcacaactccagatcataaaatttgcctgacgatgagtggagaagtcgtaccgcaatggctgaatgtgcattgactaggaaactgtcacaagctcctattaatattttcgagacacactcgaccatgggcattcaaaaaccctagactctgaggaagctcgggaagtggttcgtggtttttgcagg

SEQ ID NO: 42044 - DNA, 472 bp, Arabidopsis thaliana landsberg
ttattcatcatcctcaagaattgggttatgtttgttcctcttctcacatttgctcttctctcttctgctcgcatcagtctttcattttcaggtactttctctccctctttttatttttctgtatactcagtttcaactatttatagttttgtatgaatatgttcttggttatcagatttccacgaactaaatttattgcctcaccagaatctttatccgttatctcataagaatttctttttttttcctctggttttactcaaaaaagtatccataacatatactagttcatatcatatctttcctcacataagaaaaagtgaaaatgtttgatactacatttattggccggtgatgtggtggtgttcacatgatccgtatgtaaaacagtgtttgtcttaaaagatcagctccagaatatcaccaaaagaaaaagaaaaaaaaattaattctccaaaacactaagaaaaaa

SEQ ID NO: 42045 - DNA, 815 bp, Arabidopsis thaliana landsberg
aaccaccatccaaacattcatatcgcgttaagaaaaaacttgacataaccgatacaggatatcgagattcctaaaccacattacacagcgagtgatggataaactagaagtcttttatatatataatatattcatttatatatttggtaacaccaatcacaaaattatattattggtataactatttagcaaaatagaacagacaagaaattttgagttttagttgagcacaggtgtagggatcacatatcgggtgttctttatgtgagctttttgtgtccttcttcatacagatgatacaattataaccaaatgtacctttttcatacaaatgattatactaccctaagtctttgttttcgctagattagttcaactcattaatgatataatcaacattcaacaaaatagactaagcggttatgtttcattgtttctatatttcactttcttttttatttaatggaattaatatcttcggtgttgttattccagagatttaaaattttcaatacatttttaaaattatggtagaaaaagaaattgaactccagtgatatcattaactaattttatggattgtaataatccgtctttttctccggcaacaaaattgaccaacttctcaaaactattggtccaagtactaaaatgataaccttgtagatggccaaaagaaatgttacggcaacgggtggaccccaaaaaaaaaacatggatgactgactaactttgggaaacttgttaaacaagttatcagaatttggatgaagctatttccgaatatttcagacatgcttggtgttaaattttga

SEQ ID NO: 42046 - DNA, 640 bp, Arabidopsis thaliana landsberg
gtgaatatcacatattgtgacgttcaacctcatcgtagaaaatatttttaacggtttataaaaactttcgattttttttttttttttaatggttcataatctataaatttaaataagtatgaatacataactattgtcgcttacttttttattgttaagtatactttgaatttataaacgtgataatgacagtttatctacattataactaaaacatttgtgcaactaactagaacatatgtttttttttggggtcaaaagaacattagtgacatttagctttatgtttaaattatctaaaattctatcggatccaacctaaatattcttaaaatcggtataaaagctactattaagttaatgatatgtgatgctaaaatatttatttaaattatgttaaatatgatgtaaatttttaatacaatgtaattcaaatgttaccagtataattttatatccaacattagaactagatatttctttagaaaaatataggttgtatttttttcttctacaaattctctttttttttgggatttataatttggctactataaatagataatatttttgtttagtttggaattattatagatatcataagtttttgatatatcaaatttaaaaatattttaatgat

SEQ ID NO: 42047 - DNA, 579 bp, Arabidopsis thaliana landsberg
agtcaagaaaacatgatatttgaatcaaactcatgtgataaattttgttagaaaactttattcaaatattcccttcttgagagctcaaaaatcaaaattaccaaacttacaaagctcaaaatcaaagttgacataaaggtactgtagtttctcaccagatcgggatcgaagcgtagctagaaatctcttggaatcagcgtccatctttgcccctacgaaattgtcgaacttttggagcaaatagaaggacgaatttgtaataaatctcaagccggatcgatcctgaatagatgaagaagaagacgatgatttcttggtaggaggagagaggaagagaaagtgcgttgtgaatgaggactattatcgatttctcagaaatggtgagaccggttctcgacattccagttcccggtttgttgatttgttccggttatcagtcccggttctttaattttatctcgtatcatcgattctgatggaccggttaacaaattccaaatcccggttggtatttgtctggtattatcgactttcagaaatgatggaccggttctcgaatttacaaatcccggtcgtttt

SEQ ID NO: 42048 - DNA, 578 bp, Arabidopsis thaliana landsberg
acgagcgagagaatcagcttgggtcggctagtttgcgggatcgagctgactcgtttagctaatgagacacaacaaaaacattatatatatacataattaataagttaattatagaccaatttaacactagaaaagtgtaataatactcagtttcatataccacgtcaatttaacaccaagttaacacagaatatcacttattaattcatgcaacacaagtgtagactttgttttactgagaaatggttgctcgttagagctaacgagagttagcttgtgttaacaaaccgaactaatatattagctcagttcatgaaaaaatttgaaaggggccgaggtgagctgacaaagccgaacgagctcacaaagcacgagtacttagtcaccactctttggatcgggcctacactttccttttactgactatggcctttttatctctctcacttgtcgctttccttcactctatatttcctatcccgacgactaggagaaggcatatgatttctaacggaacggccgtagcatgccatccgaagttaggtggcaaggcgggacgtaggatttcgaggatgggt

SEQ ID NO: 42049 - DNA, 1120 bp, Arabidopsis thaliana landsberg
  unsure (1)..(1120): unsure at all n locations
gagctgaatatagcgatctcaattctttgattactactgcagtagctgcagctgagcgtctttgtattgctattgcttgcagttctattggtgagctatggcaatttacctgtagccctacaggcgttaaaagtaatcaagtacagttgaacattagctctttcctctgtaagtgaggggtatccaaggtccttgatttggcggttttcgcaaggattggcaagagagtcgtgttgggaatttcttatgttgacagactgtgacatacattgttttactattgagccttatcctgatctgactgtttcagaagtctggcaacatgagattgttggcactgatggtgattctggtatcaagaaagatatagctagtcaaaagcagatttggcctctagatttgcaggtagatgatcagggtaaagtgattacagttcttgttgccactatctgcatggaccgcgccagcagttctagctatacacaatattcacttttaaccctgcaacataaatctgagatgagatttgcagatgggagagaggaaaaggttctggagaaacaaggtccaatccaagtcataatcccaaaagcaagagtggaggataaagacttcttattctctatgaaactcagagttggtggtagacccccagggtcagctataattctttcaggtgatnnnnnnnnnnnnnnnnnnnnnnnnnntggaagttctacccggctctataagtttgatttaccttatgatgctggcaaggttttggatgcttcagttctttcctccactgatgaacatgaatatggtgcatggactgtactaactgagaaagcaggagtgtgggcaataccagagaaagcagttgtgcttggtggagtcgaacctccagagagaagtctgtcacgcaaaaatagctccaatgagaggtctacacgagatgagacaaggataacaccatatggcgttgatagaactgccggaagggagaattctgacatacagaatattggagacaaaggaaccctaaaatgggttttactcgcaaacagcccgtgatgaggaatcagaagctttgcttggccagctctttgaggggttcttgtatctggggaagttgatg

SEQ ID NO: 42050 - DNA, 706 bp, Arabidopsis thaliana landsberg
ggagtctgtgctttgttatctgaatcagattgtgagaagagattattcgtgtttgccgataatgtatttttagtctctgattttgtttttgttttggttcaaggttgagaatttctcatcaatcacgatgagtcctagtcagttgccttcagattcgatcaaagtagttcctggcaggagtaagctgagagttgaatcttcaaatccagttgccagagggaatccaacacctagagcttcaaaggtgaagctgctttcgccggaggaagctatgaaacttacatctggaggcaatggagtggcggtttctccagttaagcctgctcgtgcaacttctcaagtaccaaaacgtgtcccgccgagtcgaactcctgaagcaccaagacctgtcccggcttgtccaattcctgaaataccaagacctgtcccagctcgtccaacccctgaaacaccaagacctgtcacagctcgtccaacccctgaaataccaagacctgtcccagctcgtccaatttctgaagtacaaacacttgtcccgactcgtcctacttctacagcacccagccctgtctcggctcatccaacttctgtagcacaagccctgtctcggttcatcaacttctgtagcccaagccctgtctcggcttgtctaacttctgaagcatcaaaacctgtgttggctaacctgcagcaggtattagaagag

SEQ ID NO: 42051 - DNA, 1250 bp, Arabidopsis thaliana landsberg
ataacgtcaaaatccaagatatactctagagattttgaaatccaagcaaacatattcttaaaagcaatatgccaatattggaaagccaatcatctaaactttaaataatagattttaactccataattgaataacaccacctaaatatattaaccttctcaagtcgttagcttggatcataacacattggcataagtcaaaagtcttttaagcaaacaaagaaagccatgtgcagcatagacaatcatgtttagcattatcaaatgggaagtatcattttccatagtcaataccaatttatgtttttttccgacttatagattataaaagttcccaccaccaatagaagtcaacaaggttacgaagtcaatccttttagttttggaagttttgttttatgatacaagtaaataaaactaatttgcggttctaacttaaatcgcatacaatttttgttgcatatagaatgatatcaatcaactcataggtccattccatgttccaaagaaccatgatgacagatagagctagtttcatttataagataaacgaatcagaattttaattcaatcgatttttttaatatacgacatggcaatgttgtattataaaataaaaatgcaaggtgtaacgaaattttcaaactagttcaaattgcacaggaatcatcaacctttatataaaccaaacctttcattctaatttttttccacacaaaaaaagaagaaggaaaaggttaaaccctatactttcaaaccaccctaatcacttctctttggtttacaaaaatgggtcgaccagaccaaatgagcccgaggatgaacaataactttaatccggtctttcatgcacaatctgaacaaccggttgacgagaaacgggttgtgcaagctgagcagatatatcccaacaatggtggagtggttaaccaaccaaaccaagtaccgatgagacctggtccacctacgtatatcaatcaaattgcaacatttaaccaaccatatggagtatcaatggccggaccggtccatacacagccatcgaactggacttcaggtctatttgattgcatgaacgacggcgaaaatggttagaattcaaaattttgaataattctatcttgaaggtccatccttacattgcaaaatgattcttatgtcttcgttgcgtttttgtattagctctcatcacatgcctgtttccattcgtcacgttcggacagatcgcagaggttttcgattgaagagcga

SEQ ID NO: 42052 - DNA, 1010 bp, Arabidopsis thaliana landsberg
tgtttcgtcttccggtttagtttggtttatctggattaaaccggtctcatcttcatcgtaaagaaagaaagtagaagcaaagcttgaagcttttggatttctaatgtgtgtgaatcgtgatgttgtcatcaggacagatgatgggccatgtcgtggccgaactcagatgatcttgtctcgaagtaacttcgccgattgtatacggtgtcagggcgtgagagtttcaaaaaccctaaaaatggggacaaagcgacccacttgcccttcttgcgataaacctagccagctctgtctctgcaagaagatgagatctccatgttttgataatcaggtgagtattactattcttcagcatagtctcgagagaaaacacgcgctaaattctactcgaatcgctagattagggcttaagaatgttggtgtgactactgttttcgatgttcatgatgaggcagagttcttaatcagggttattggatcgggttgcagcaagattgacacgaatcatttggattctgagtatagggtagagaatgttgcttctttggaacttgatgatagctttaagttaggtagtagtggcaatgtggagaacttagaatctgagaagaatgtggtgcttgttgatcatggaagcttggaaattgctgaaagtttgaatctttctcaacatttgagtgaaatttcttatcgggattcgcgggttagggataagataggttcttatgaagaagatttgatacaaatctgtatgaagaaacatggtgtcatcagcaatgtctcacactctttgatgcttgaaaccaatgtgaaggttcctagttttgatcatatattggcttctcctgcagccatggatgtcttggcaaaaggttttatggtaacaaagttttcagaaggaaagcaagagtttgagctcgaggttcctcctggatcagataagttgttcccgagcgaagaatcggtaaagatcaattatcttaagagggagaatagctaaagtaaggaat

SEQ ID NO: 42053 - DNA, 998 bp, Arabidopsis thaliana landsberg
ggtttccgaagcgtcaataaagaatcaataacattctgaaactcagcctacagagagaatggttagaagtaagacaagagtagaaatcgatagaaccaccaccactttatagaaagataagatacctgaagttgccaattctttagctccaatggattcaagagctcaaaaaccctaaggtacccatcagaatatgcagcaacctgcaaaaataatcaatgaatcattcatagatgtttagcagaagagcttgttcaacatctcaaaacaaaatctctcaccatctttagactctttctggaaactccaaattgaacatcgagcacttggctagacttattcttcatactcttacacaatttccattcaagaccatgtgcgtctaccaaaaacaaaacaactctataagataaaacagaacaacaatcatggagatttcttcacaaagaggttaccttcagagagctcctcccaaatcgataagctcccgtcttcgcaaacgcaggctactgcgtcgccgtactctgaaggcaaccaaacgatctttacgatactcgattcactaaccctaactttggaagtgcaactgaaagtcgaagaagacgaagtagaggattcgtatatagaaagttttccgttgagagatccggcggctaaacggtcgccggattgattccaggaggaacatgtggtgccagaatctagcgtcgccattgatttcgccattttcgcctccgatgagcttcagcgatttttttcgtttaattcgaattatcaagacttgggccaaaatattgggcctgttatgcatttaactggcctatttatgcaaacgactaatcgcaattgttgaaattgactctccataatttcatattggaccgttagctgatacaaaacgtaatttttattaaatattttcttaacattttttaatcttatacattaactcaaaataattgtaaagtttaaaattattaaaattttactaatgatta

SEQ ID NO: 42054 - DNA, 803 bp, Arabidopsis thaliana landsberg
tgtcttccttccatttttttttcacaaagatggttttgagttttgagtttttttttttttttaggaaaatgttttggtgtgaggaggaagatgagtgaggaagggttttatagaagagaagaagcgaattaacgttgtggattgtgtgtgacgtatcaatttttaattttattattttgcgtatgagattctttttacttctgatttatggaaatttttcttatttatttatgtatttgtatgtaatgagtgagttggagaaaaaagcaatatgaattcagtttttatgtttctcagttatcatgaatgattatatggagtcgtgacgtgagtgcataacttatgttatgtcttatttttgccgtttgctaaagtaatcgagatggtgtgtccaaaaggattaaccactgaatatatatgtaatttgtaaatgaaaaaataaacatttaacaagttttcctatgatttccaaacatatttttaagagaaaattcttaattcaatggtaaacttttttttttggctgttgagatttaccatactcattttttttggtccgttttgagtcgcttaccaacataaaagataactaacatatctacttttttctttctagagtaatgtgtgtatgtgttttacttagaagtttacataaataatcgacgttcacattcacagcaatagcattttaaaaatgattggtaacatttataatctcagcaaggttaagggtttatatatttcaaaaattgaaactacatgctttacagaggaatgttatgtatagttagcaagccgtgtaa

SEQ ID NO: 42055 - DNA, 668 bp, Arabidopsis thaliana landsberg
gaccatgaggaggcagaggaagaaagtttccatgatttttcaccggaatcgatctcgacgttgaaaaagatcgccggagcgatgatctccgccggttacgaagcagagtgttgtatgtcatacgaaatgtcgagacggcacgcgttcaaggaagagctaaccgaggttggattcgaagggatcaacgttgaagacgtgcagagaataggttgggaatctctcgaaggtgaaatcgcttcgtggatctcaatcgttcgccgttgctccaccgtgcttttccccggcgagctttctctctgtaacgccgtctttccggatcaagatcattcctctgtccgtaaacgtcttttcaccggtttggtctccgctgttacaatccggtttcttgatttctccggtgcggtggtgctgacgaaacggtcgtcggagaagcttttcaagttcttagacatgtacgagacgcttcgtgatttgattcctgcggtggaacaatctgattcagatttgatccaggagattaaactggctcagacgcggctaggagaagcagcagtgacgatattcggagagctagagaagtcgataaagagcgataatggacgaactccggtaccgagcggcgcggttcatccattaacacgttacaccatgaactacctcaaatacgc

SEQ ID NO: 42056 - DNA, 431 bp, Arabidopsis thaliana landsberg
tttttttgatgaacaagaacgtgtggcagtgtcattgtaaacgaaaattatgcactcttgacttttggttattattgactctaacttggaaggaagatccaaaatcaaaggagaaattcccctaacaacacttttcttttgcattcataatcatttatttgagagattagtggaattatactaatcaaatgttgttaagccggcttttaactagctaaggagataccgtcactgacagttggccaaacctatcaagagagaagaggccaagcagaatctgaactttattattttgattttgttttgttaacattttagagagataaagttactggtgggtgaggataagttgtgaaaccgtcgttgtgaataactacgtggctgtcacaaactgaaacaaaaaatgacagccatatgaaaaatgttaacat

SEQ ID NO: 42057 - DNA, 2610 bp, Arabidopsis thaliana landsberg
gtggcaggtcgactctagaggatcccctcaaagttaaatactctcttgaaaaatcgaacttgtagtttagatgttaggtcaattataaaccagcaaaagtaagattttaaacacacgatttttgccggtttggtggagaaaaaaaaaatgataaagactattgccggttcataactgaaggtaaaaccggaactgtaggtaaccggaaaccgaagaaaaccctaactatatataataaactcatcatcttcttcctccattttcgttttcactttctccgaacatccaaaagcttgtagcttcctgctcctcaaatcttcttggtaactcttcttccaatgtctctgaatcgattcccttgtgtttaattctatttctgtaatttgatttggttttgtattaaaagcagaaaaatgaaggttgccgctgctttcctcctcgccgttttgggcggaaacgctaatccttcagccgataatatcaaagatatcatcggagctggtaaatttatgtgcttttgaattcgttttgaatatgttttgatttgattagattgtgttactttgaacaacgaagtagtagcaatgatgatttgagaagattctgcatttgctttgttttagttgtaagagttttagtttgattgttgaagagtataagaacagaagagagttttgttcactgtatatgattcattaaaggactttgtttgttatgttttgttatgtagttggtgctgatgttgatggagagagcattgagcttctattgaaagaagtgagtggtaaggacattgctgagctgattgcttctggtagggagaaattagcgtctgtgccatctggtggtggtgtggctgtttcagctgctccatcaagcggtggtggtgctgctgctgctgctgcccctgcggagaagaaagaagccaagaaggaagagaaagaagagtctgatgatgtaagcgtttctctctttatcattttgtttccttattacttagtctttgttatggtcttgatattggtctttatctgactctttgttatatccttcacctttgatgcaggacatgggattcagtctcttcgagtaaggtttttgtccccacggaaaggagtcgagatttgattttttgttctcttagtggttctggtttttgcttcttggattacgaattttactccttagataatgaagcaagaagagttttttcaactatgttgcgaccttgcgggttattcatttatcgttttccgtttgatttacatgttgaatctggtctaagcttgtaatttacatagtttagttcatagtatgttagcatatcacaaaataagtgcctaagagggctagaatttgatacactcatggaaaagtttatctttagtgatcccaaataaacagaaaaatccaaatccaagtgaaattgagattctatgttattaacttcagacattggtgttgtcgtttcagacataaacccatgaagcttggataaattagaagaaagtagatcaactctattacaagaaaataagaggaattgaagtaacattagaagttgaagtctttttgttcactaagcattctcataaaatttgtttgacaaaaacataaaataatgtttagtgtcaagaagatgatgccaccaacttaacctgatctgctcgggtacaacaaacatatcccacagttcgatccatctccgcaagaacaacttcccagcatagaaccaatcacggggttacggatcagcatagattgttcactatctttgagacagtatcaaagatgctaagatttcggaacggtgacattaagtatcttcacatcttggtaaggcctgtcgttcttgtctgtcttcactttctctataccctgttcatttggttttatggttaggcactaagtcacactaagccaacaagtaaaaatattctttttggttttcaaatcatacctgaacgacgtccattcccttcacaactcttccaaaaacagtgtgcttattgtctagccacggtgtagccactgttgtgatgaagaactgagacccatttgtgtttgggccggcatttgccatagacaatgtgaacggcctgtcatgccttagactgcaggccaagtaaaagaacaacgtatcaaactaagttagatttcatttgtttctaaacggatggctaaactcaaagcagcctgtaagaaatgtttaccttttgtgaaactcgtcctcaaattctctgccccaaattgactgtcctccagtaccatccccaagaggatctccagtctgtatcataaatcctctgataacccgatggaaaaggtggttatcgtaatagccatttctacagtgtgttgtgaaattctccacagttttgggacattcttctgggtaaagcttcatgtgaatgtcaccaagcgtagtatgcattatctggatgattaggagttaaaaagaattattgtgttaaggatccaaattacagtacgtaatgaaaagtaaaatagatacaaacattgtgggttatgaaaacataccacgttctctggagggatgttgtggctgagtttccaatatctgagacagacatacgttcatcagcagca

SEQ ID NO: 42058 - DNA, 503 bp, Arabidopsis thaliana landsberg
  unsure (1)..(503): unsure at all n locations
atgaaaatcccctttttggtatttcatgatcagtggagaagtagtggtgacaagttttatatttcacccaacgatttccaaacacgtatttaaagaggatatactaggttaagaaacacaaacaaaactacttctgttcctttgtttggcgactcttcaaaaagcttttggattttattttattttgggaaatactggaattagaaaacttatacacataaatcaaattctttcagatacattgtcttctccaatatactttaaagttacgtaattttaattacaaatctacaaattcnnnnnnnnnnnnnnnnnnnnnnnnnnnnnnnnnnnnnnagaaaagtcaaaagtattgatgaagtaatatggtgactttgatgcaaaaccaagcttaattccatttaacaaagaactcatcttcttctaatgaattaataaccttataaattctataaaagagcttctatttttgaggtaaaactgcaaaaataagcagaggaaaa

SEQ ID NO: 42059 - DNA, 160 bp, Arabidopsis thaliana landsberg
ctaaaatgattcatataatcaacaaagataccatgacagattgataaactattgttcacatcctaatttcaacatttatagataaaaatatgagcatacatatttatatagagattagttagcaaacactcccaattataagctacatatttacacacac

SEQ ID NO: 42060 - DNA, 588 bp, Arabidopsis thaliana landsberg
acctcccgggaaaacgaaatcgggctgaggttcgctgagttcgccttggtcatcttgttcttaccacttctagcaatgctctctgtataaagaggagaattctaaatacatagatcatcggaattaagaacctagctaactaggagaccaaatcatttatatctaacataaacctgatacgaattaaagattgttggttatatctctcaggaccttctcctccaatcatgatcaatctggagtagtagtgacgatatctctctcccttggtttcaaacttattgaagaattttgggggccacaatcaaatgcttttcatgaattcttttccttcgacgaatgctttttagtttggttttatcttcaacaactatatactagacgatatctcatgcttatatgcaatgataacaaaataaaataaaaattgctaaattaattttctcgccaattattaaaaattttataaatacatatcataattgttatcatatttaagaagattattatcactataaactgtattagactgtttatgataatgtcttaaagtaaatccaaagttatgtttatggatggtagaaatct

SEQ ID NO: 42061 - DNA, 652 bp, Arabidopsis thaliana landsberg
ctgtaacgctttggccccttttcctgcaaagattctttcaaaaacccccatttattctcactaccccctccccttccccatatatttaaaatacaagtttacccttcttccccttttcctttattttttttaaatttcaattaaatatttactcccaaacaaacaattaaattcaaccaatcatattcattctctctcttctcttcattaaccatttaaacctaccaaaaccaacaaaaaaacgcttctacacaatcgtcttcttcttccaaggattttgagagctcttcttcttcttcttcttcttcttcttcttctacttcttcttctgctacgagaatagagagagatgggacttgttacagtcggagaattgaagccagctttcacaggaaagagagggtttcgtctgaattcaaccatcagacatgcctctgaatggtaatatatactctgtttcaaaaaccagttttgtaactattatcaccaaatgaaatccaaatttagtaacaacgattcttgtttttttttttgcattcacatctttgtttttgataaaactgtcagaaaaagcctaaaaaatttgttctttctgaagaattataacaatcttgtatgtgatgtgaatctgtagccaaaagtcatttcttgt

SEQ ID NO: 42062 - DNA, 1578 bp, Arabidopsis thaliana landsberg
tagacacctaaagtaaaccacatgaaccaaaacataacatagtttaaagttctgtaatcaccaaaatgaatcatgggagaggtgtaagaagcagccaacaaaactgaggagcattggatcttaagtaccaacatgaagactcaaatgatttcaaaagttctataaccacgtatgacctaatactagaaattacagcataaagaaatatggtcgggagcatgttaccccagattctcgcagtcccatcctctgaacccgtcaatatctggagaaagagactacaatcagacaaaaatccaaatgtggaactcagatttggataggtgcatttctaatatttatggtaacatcattacctgacttgcagaactacgagaaactacagtatgcaaatagtctgaatgacctttaaaggtcattttaatcttaccactctcctgaaattgttggatacacataaatgattttagaaagttaagatatctggattcacataggacatacatctatcatggtcaaatacataccacgtcccaacaatatgcgcaagaatcaccagctgctgtaaatacacttcctgactatcaaaacgaaagaagtgagagagggtgaaaacagttatcctgtgagactgtctaaccaagcaatgaaatttaaatacaattccaacctgaggatcaacagacatggcattgatctcaggcatcggtgaaagcgcaccccaaggacctctataagaaaaagaatggtgattatacacacaactattacgaacactgacatttgaacccacaattatagcattttcagtaacagagttatcaagtagaataaaaaatgaacaaaactcatactcacttgtgttgtggattaatcagttcaagcaatggcttcagatgattctctgtagatcataagaaaaacaaccactaagctccaaaaagcatcattcatatcaaaaaccacaaaaatggcacacacacacctttcaaatgaagagacacatctgattcagcaaattctctccatttccatcccctaactctaccatcatcaccacaactacacataaccagatcaaaatttcaaactctcaattacaattcatcaaagactcatcaatcaacaaagagagatttaagtctctacctaagtagcaaagcatcttcgtcttcaccatagaacttaacatcataagcaggaccttcgtgtgccctaaccactctctcaggttcagccaccataacatcttgacctttcgagtagccaaaactcgccgattgagacacaagcgagttcagtgaatggaaagctaaagttccatcgctggaggctacaacaaatgcgtctggattagagattctcgccgtgagagcccaggcggttctgaagacggtgcgtgtctctatctctcgctccttcaaaattgattctctatactcatcttcattccagtttgtagcgtctccgtacatggtcctctgcttctttgcaattcccggtgatacttgcgaaacgccagcgattattaccaccagtgggtttaagtgcaatttgacgactgaagggggtacgagc

SEQ ID NO: 42063 - DNA, 512 bp, Arabidopsis thaliana landsberg
  unsure (1)..(512): unsure at all n locations
ggtccttgcgcttgaagatttcatgaaggatgttatgcacatcctgcttgtgacccanaaggacgccggacaggacgatcccacgcggaacgacatctacaatgtcggcaccatcggcaccgtgctgcagctgctgaaactgccggacggcaccgtgaaggtgctggtggaaggcaacagccgtgcgcgcatcaccggctatgccgagaatnnnnnnnnnnnnnnnnnnnnnnnnnnnnnnnnnnnnnnnnnnnnnnnnnncgcgcaggaagtcgaagcgctggcgcgcgccgtcgtctcccagttcgagcagtacatcaagctcaacaagaaaattccgcccgaagtgctggtgtcgatcaaccagatcgacgagttcggtaaactcgcggataccgttgcctcgcatctggcgctgaagatcgccgagaagcagcagctgctggagacccagtcggtcgccgagcggctggagcgcgtctatgccttcatggaaggcgagatcggcgtgt

SEQ ID NO: 42064 - DNA, 716 bp, Arabidopsis thaliana landsberg
tattttctacttttgttttcttcttcttcactttgcaggttcccctttttacgaaactcctcttcatttgtggaccctcttcttatctctttctctctctatgtatgtttatatatacgtacatagatacatacatatttggtaagagtgcgttacttatatttattacagtgttctggtgaacactttaatgctcttctagggtttctttctatattttcatggtttgagtaatatacgttgttgcagaatgtgactgacttatattaacattcatgggttttgcattaaatgaagaaggtctttcactaaattagcaattgactcgacctctatattcttctttcattctctcctttaaatggtagccacaataactatagcatttattgattatgactcacggaattaatatagtataaagttatatagatgaattaataactttattatcgaccgttgtcttatttacatttctttttgttttgctttgtagacgtgatagttacatcacgcatagggctttctgcgatgcattgatacaagagactgcaagaaaccctaccgtgagctttacgtcaatgacagctgctagtagtggtgtcggctccggcggaatctacgggagacttggcggtggcagtactctctcacaccaccatttgagtgaccatccaaattctggatttaaccctctcgtgggttacaatctgaac

SEQ ID NO: 42065 - DNA, 526 bp, Arabidopsis thaliana landsberg
atgctgcaacgttctttaaaattttgacacatttaaccaagagactgataccaaaaaccaaaaaaaaaaagaaaaaccatttgctcaagctcagccaccacttcatcgcctccgccgccgtaaaaccaaccgtagggttccgatttacgactactcaacgccgcattcttcaacagctccaaatccaagcactgagtgattaaaactcgattccagatctccattaccaaaaaatcgcatgtacaaactcatttaaacttcgaagaaacaaacaacaaatctatcaccaaagctacatttctctccgatgtaagctctaaccatctgttttttttctccccgaacataaaaaaaaacatcctcttgttctgttttcgtcatgtgtgttcttaactttgtgatgcttaaattcaaaactcgattacagtagtttttttaagcttctgtagagtttaatttagttttgctattttctcttcaatttttgtgtgtcggcaagtttactttaccttgttgatatttccta

SEQ ID NO: 42066 - DNA, 523 bp, Arabidopsis thaliana landsberg
tcattacggtatctatgtaagttcttctgcttgttatatgtacataaaactattagaattaaagtagtctgcttttatatgtattcttcttacttgacctctcctatcttaacaggatggtgcgtccatgtggtgcattggttttcagaaagctccggaagaacaaaccattttaggaggtcagacattgagcttcaaaaactgctgattaccgcctcttcttgtttcaacagtgtttatttatctgtcctgttttattttgcagatcttgtgcttaaagataaagtctttgtatatgatcttgctcgacaacggattggatgggcaagctatgattgtaagtgtaatcatagagtcatgtcatataggaaactctagtagtcggttatcttcatctgaaataaacttgtgcattgttttgacaggttcaatgtctgtgaatgtatcgataacttcaggaaaggatattgtaaactcagggcagccatgtttgaacatctctacaagagacatactcatacga

SEQ ID NO: 42067 - DNA, 629 bp, Arabidopsis thaliana landsberg
tgattatgtgatgtccttcatcagacagagaaactgtagcccattttacgcctacccaccatattcgaaatgattgatcaatagaactcagtccaatcaaaagcccataaatattatctgggccttttagttatctcaaatagtaagaaactcagagcccaaacaactaaaaccctagagtcttcctctatataaatatctcatcttaaagacgacaagagagatccggcgaaaactgaaaaaccctatttttttctctgctttatggttcactcaatgttgtgtcctggttttttgaaaccctaatctccgttagtatatatgtaaaggtaatctatagatgtatcagatactgtctcgaggttctagggaatgttgaattggtcctgcactcctgcttagtacttagtctcgtgttctctctattctagatttaaggggtttttgtgaattttcttgcttagttatggttgcaatgatgagatcttataatgaaattgaaagtgtttacacttaatgaacggtcgacaaaatagtcgaacctgagcggttagctgagcaaccatacttatctcattataaaaacaaagatttactctttctgctttagatgtttcattacttgctta

SEQ ID NO: 42068 - DNA, 525 bp, Arabidopsis thaliana landsberg
taaggacgcctgggagcttgatagatatatgaagccaaagatactctatttacattgtcatcagtcatcactacaccactttgaaacttttacttatagtttgacatgagcttaattgaagctagtcaggttcttagtgtagtcatccattttcttaagatcaccttactaaaccagctaaacaataagtccttcatgtttgatgaataaatagatcaatacaaaataagattgatgaaaagttacgaaatctcgaaattactttataatttctctattatatgggttatcgatctaacttttgaactttagctttttagtatcacttgaacatcagcatgttatttaggttgataggagtaggacatttccgaagagttccttcaagacgtggatttttatatcattagtaatttaccattgttggtgcattgattagcactttcaacaatagtgacttaaaccggaagaatcacgacttataaccggaagaatcttgaattaagctgataattaagtcaaacc

SEQ ID NO: 42069 - DNA, 583 bp, Arabidopsis thaliana landsberg
ttgtaatgaaaatggcattatcagacaccccgtggatggtaacttaaaggctaatgctctatcttctctgattgcgtctaaaattccaaggtaaacagagtgagcaaaaacattgattgtgaaagttctcgtctctggtctgaattggctaacttgacatcttaatgaggtaattaagaatgatagatagatacctcttacattgaaattggcatgtctttccctcgtggtagcatcatcattactacttcgaatcaaagcttcaataattgagcagacctgtttcttagtcctgacatggttaatgattcccgggttcaattccgtcagcaatccacttggagcagtaacattggcgaacctatctaccaactgttgttccttcttagggacatcgtttttcttcttgagagactcaccacctctccgcttattcttctgttgctttggcgcaggtacttcaacaggcgtagtcactactgtagaagttggtgctgcaactccacccaaagggcctgatagaaaacattccgcatcattccctccatcgccgcatcgaatctgactcacctaatgagccatc

SEQ ID NO: 42070 - DNA, 591 bp, Arabidopsis thaliana landsberg
agaaacttagaaattaagttcatggtaatctttagatttttcaccatttagctctttccacgtacaatgtatgcttttttgttttcctttctcaaacataactgcatcaactgatttgtagagctaaagtagtgtgtatatactatctataacttaatttatcctatgaagtagaagttgaataaatttataacaaggtaacgatcaaatgtttagaattaggatcccaaccaaggcctctccatgtagcaaaacaaaacataacctaaggacgagtagaatatttcacggtcgatatcactgaaaatcacgtaagacaaattgtataggtaatgcattttgtaaaatcaactctttcattttttctggaagaaaaacaactctttcattaatatgatatttacaatttagcaaaagaaaaaaatggatagttagaataatagacgcatatttcttctcagctatatagtattcgaattgcgttgaaaaatgaattggttttttttatcattattgtcgattgtcatcagccatcactaaaaatgattcacccataagctaagaaaaaaacaatatgatactcaaaacttg

SEQ ID NO: 42071 - DNA, 698 bp, Arabidopsis thaliana landsberg
cggtcgtggctcaaagccgaggagaacaaacgccacacgcttcagaaatcggatatctccaacgcagtggctagctctttcacctacgatttccttcttgatgttgtccctaaggacgagtctatcgccaccgctgatcctggctttgtggctatgccacatcctgacggtggaggagtaccgcagtattattatccaccgggagtggtgatgggaactcctatggttggtagtggaatgtacgcgccatcgcaggcgtggccagcagcggctggtgacggggaggatgatgctgaggataatggaggaaacggcggcggaaattgaagtgtagatttagggtttgtaaccgcctatgtgggaaatttgaaatttggtggtgtttattagggttcttcaattcgtcggatttgctttcatgtaaacaatgtgtggaaggcaatttttttttttttagtagacttgtaagcgcttttctgagaatttgattgccttttggagttagtctcttacataatattctggtttaaaaatcttcgcctaacaccggttactcttcggttaatcggtaagtcccatatattcggttactctccggtaatcgctaagtccattctatccatgattaatgactaattccttaaaaaatcactcattcgattactctccgtttaaaccgatttccaatataattattt

SEQ ID NO: 42072 - DNA, 465 bp, Arabidopsis thaliana landsberg
taacccagctgctttcttcttcttcttcttcatctctctctctctctctctctcgtctcctactctctctttgctcggaccaaaatttgctcaaattcctcctctgttaatcgccggcattgtctttcttaccgatccgactatctcagcattcgaaatctccggcgacaaagcctgatctcaaggttagttgcaaatcgcttttttattttccctgaaatttctctgatctccgtccatgtcggtttagttttttatggtcgtgaattttcgttagagctggctgcaatttcgtttgatctgatttattcttacgcctttgattagcttatcgttcgtgaagcgggaaaatgccggtggaggtagagagagaccaaggagaggtgtcggtgaaggttgattttgagaatgcgactgagattaaaccggaggtagttgtttcggccaccaaagaggacgtggtga

SEQ ID NO: 42073 - DNA, 522 bp, Arabidopsis thaliana landsberg
tatcaccaaactaaccataaaaagaaaacactttcatgaaaaataagatctaaatcttaccttgcaaacccaaaatctcctatctttagcaatggagttacttccttggaagataaaagtaaattctgaaaatattgaagaagaacagaacagtgattacaaatacaatcatcaaactacaacataagagagaatcactgggagttttacctgaggctttaaatctcggtgaataaaatgcttctcttgaagtacttgtaaccctaaagctacacaacacaagaaacaaaaaaaaaacagagattcaaagatcaacaaaaaaactccaaattacaaatatgaaaaacaccaaaaaagcagataaattagttacccaattgcctcataaaatgtttagcaacagcttcaggtactttgccatggcgattgatatagccagcaagatcacctccactacaatactccaacacaagaaatatcctatctccagtctacacaattccaaatcaaaaccctcaaatt

SEQ ID NO: 42074 - DNA, 1190 bp, Arabidopsis thaliana landsberg
tgatattgcaccaaggagagtggtgagggtcgtcgcaatcgaatactaattaatcatttccctttaccatatataagtcgagctactttgtcagctgagattcacttatcttgtttggtctatttttacatggaaaatagacaattaaaatgtaattattatgcctcaagtgcaccttaaacacgcatatctatatatagatgcacgacactattttagatactgtacgaagtaacttctttttatgagataaattcacctttttgaactctactagtaacttaactttttaagatgtatacgtaaagaccattgaacaagagaacaatagcattgtgtatcaaaacaagtcatcataagttaacaatcagtcgtatcaagagctgttgttttcttttgtatgttaggccaaatactataccaatctatgtaagtttttgacttttgaaggaaaatatttacagttttttcttggtttactatttacatgtgagaatgttcatttcatctgtttcagatttcttttgggagatcttctctacgagatttctcgcgcctataactcctgccaaacccgatttacggcatttggcttcaacgcgattgtcattttcaaaaatcctattatagcaaagaaatcctgacaaaaggacatgcaagcggaagctattcaaattcctcacgaccaaggcttgcttagttttttttttttgtcttcttttttggtctatctccacaatttatagattttcttagtaatgacaatgtttgtggaatcacacaagttttaaatatataatcatttgtttacatatttgtttgtcttccgttaaccacactataaaatatatattttttttttatcgtttgctcatgatcaactgtgtaagaaagttttacaacaataacacccatagctatgtttatgactgatcgatctcaacaataatatatatctgaaaatataacagatatatatatatatatatatatatatatataattagctttggtattaacctagtaatatataaacttgaagccaatgattataaatcatcacatacatttgtacttgtgtggggggggctctttctcttggaatataaaaaaagaaactctcatctaatatagaaggcacaaatgcatgggcatggtttacgagaagggcaccaaatattatatatatt

SEQ ID NO: 42075 - DNA, 625 bp, Arabidopsis thaliana landsberg
gtagctcattgagaaaatcagacgttagggttttggcagtattccagaattcatgtagagtcgcacgtgattgtctacttagggaaccgaccaacttgactagtgtctgaattaaccccacttgctattttcatttttgcattatttttcaagtttttagattgcatcatttttgttgtccctttgggattatgggtggtggaaatgtctgtcttaatgttaattaagacatgcatgatcatgatgcaaactacattttgatacatcaaatgtaatttactatacaaaagccaataggtttttttggtcgtaatgatgtcattatgatggaaatgtggaggttaaggacgattgggacccttacctagaaagatgattcctttttctatggatccataataataattacaagtccttttaaatcgcattaattgtatccttttgactttttttagctagaatgaataatatcgtataacttctaatgagatggtttttggtggggttagggatgatcaaggtcagagtggcaattcttactctccttatggaggcgacggcggtggcggtgggacagcggtgggagcacggtggagggatggacgtatgggaggtcgacgagagg

SEQ ID NO: 42076 - DNA, 565 bp, Arabidopsis thaliana landsberg
catcatcagttagcactgacctcttcctttttttcccagacccacttccagaaccaccactaacaggcacctccttcttgctgccatcctctgcccccttaacattctcatcagacttaaatgagctctcagcaaagtctgaaggagaacccagtggctcactggagcccatggcaaacttgccagtggccaggccattgccaaagatgacctccatttgcttgtagttctctatgggtttattaagtagttcaacatccttagggtgagcctagatggttatgcaagaaacgaagtcagaattgtaaaggaggttagaatgaaatgcaagtcaggaacttaaacctaacaaaccttaacatggccattatagtgttcttcttctagggtgatcatatggttgtcctcatcaaatagagcccactaagctctctaagtttgatgatcctaacccatctctgcctccacttgcgcaagtgattatacactgagtctcagtgacatcatgccactgaactccttgaggtcctttgcacctgattaaggtgcactccttgaacccttt

SEQ ID NO: 42077 - DNA, 636 bp, Arabidopsis thaliana landsberg
aaaaaaataaaaaaaaaaaaaaaaaacaaaaaaaaaaaaaaaaaaaaaaaaagaaaaaaaagaaaaaaaaaaaataaaaaaaaaagatggtatgaagacaaaaaaaaataaaaaaaaaaaaaaaatgaaaaaaaaaaaaaataaaataaaggaaaaaaaaatttgaatttaaaaaaaaaaaaaaagaaaaaagagggaaagagaaaaaaaaagaaaaaaaaaaaaaaaaaaaagaaaaaggaaaaaaaaaaaaaaaaagaaaaaaaagaaaaaaaaaaaaaaagaaaaaaataaaaaaaaaagaaaaaaaaaaaaaaaaaaggaaaaaaaaaaaaaaaaaaaaaaaagaagaaaaaaaaaaaaaaaaaaaaaaagaggaaaaaagaaaaaaaaaaggaaaaaaaaaaaagaaaaaagaaaaagaaaataaaagaaaagaaaagaaaaaaaaaaaaaaaaaaagaaaagaaaaaaaaggaaaaaaaaaaaaaaaagaaaaagaaagaaaaaaaaaataaaggaagaaaaatataaaaaaaaaaaaagagaaagataagaagataaaagagaatagaaaagaaaaaaaaaaaggaaaagaaaaaagtaagaaggaaaaagaaataaaaaaagagaaaa

SEQ ID NO: 42078 - DNA, 576 bp, Arabidopsis thaliana landsberg
tttcttgagggatgctaacatcttaacttttctttgtatgcatcaaaagattcttctctgatgtccaagcttttcttctgtcaacatgttctttttggattctatgtgaattctgtcaacatgttcacatttatcctttgaacttcgaccatgacaataaactagctattgggagaaaaagaacaagccaagtatcacaatgttcgtctttccaaaaaggtcttacttgctagctaacaaattcaataacccgcgacaaaaatggccaccacgagcaaatttcgcctcgtttaggtattctttttaggtctctctcttgccacattgcttttgtggtggatgttccataaattcaggagggaaccaaattactgtacttaaaaaataatcatcactttttctcagccttgaaaaagaaatcactaattcactattagtgagctgtataattttatcagtaaatacagtaacaaaacagtaaatttgaaattctgttacactaaaggggcagacggtaatttcgccctagatcatacctcgggaaaataaatcttcccgtcgataaactccgtccaa

SEQ ID NO: 42079 - DNA, 525 bp, Arabidopsis thaliana landsberg
ctggcttaagtgatcccactatggaaatgaaagatcataataagacatgatgtgtgtctttttttttatatcgagaaagtgggactttgttttaggcataatagcatttatgactagatctcacccaataattcgacaaaccaaaaaagtttttaccgggcattttacgccgccggcgagtaattcggaataaaaaagtttaaaatttatcggcaacgtacacacaaagaggagttgaaaagtccaaagacttattttttccgatttcccacctctcgcagaaacttccaaaaattaaaactaaaaacaatacaaacagacagctttgcctttgctaagacttcttccgataagcaaaaaaaaaaaaaccgaagtggtttcttaccaaaaaatcaaccaatctccttcacgaatttccatctgagaagaatttgaatcggtggaggtgagaatcattcattggctttcgaattttgaagttttctttatactgtttttgattatttgttgttgcctgattgattt

SEQ ID NO: 42080 - DNA, 583 bp, Arabidopsis thaliana landsberg
cctgccgtggggtcctgcgaaggtcgacccagagcaaaaaatatcatttccgaagccgaacttgcttttcctgaggcaagtcgctaactcctcgttcatgaaaaacaactcgcgcttcgggtcaaaatcgggttcgcgtccgaactctacaaactctcgttccggaggtacttcctcccgtggagcttcaaggggctcccccaccgcccgtggcccggggagtgtccgtacccgcgatcccgaaattccaaaggcctggcgaatgattccgggcttccacgcgatccgagaagctctgcgcacgcgaccccaaggggttcgcctgctgtggcttcctcaggatttcgagcattcgcaagagctcaaagagcttcatggccaagtccaacgtttccatggcaagattgagatcaagccggccgcggctatggaccgcgtctgcgcgactcaccagggcgcgattctgatggtcgaaggaaaacccgagctttcttttgaagatctcgaaactcaatcgaagtccatcttggtctatcttgacggcattgaagatccacataacctcggcgcgatccttcgcacg

SEQ ID NO: 42081 - DNA, 155 bp, Arabidopsis thaliana landsberg
aggatcgccgcacgagctggccatcctcgaccgccagatggagcagcagcggcaggggcacacccattgtttggaggagattcgtgtggtcggcgacattgccgagagtcatgcggtctacaacttctccagccaccttaccggctgtgaaatgg

SEQ ID NO: 42082 - DNA, 432 bp, Arabidopsis thaliana landsberg
aaaaaacctctctccacaccaatcttgtatactccctaaacgaacttgtccccgtgatatcataagcgcagtcacagtctccttcatgctttttagctattgcgttgataaggaaaattgcatccattaaataactcaaggcaattgagctaaagaagaagccttgctgcaagaagtaacgaggctgaggcatattttaggacaaagattttagcattttgtgagccaaagaagatgtcatcagcggcagtgatgagatgactggctttaaatgcgttgttagttaccgcagctagagaaaggaagataaggatggcgattgtagcggttagaattgtcaccatttttttggtcctcaagctttgtacggccaacatcccagtcttatcggcaccctgcggtttcattatgatccaacaaacaagaagaaac

SEQ ID NO: 42083 - DNA, 519 bp, Arabidopsis thaliana landsberg
acatcaaagaatacatgaagggagcgaaacaagaaaacactaatacaaagggaaaacatgaacaaggccttgaaatcaaagagcagaacaataaagctcaaaaccatatcagtctaaaaccaacaaagtcttgtaggggaagaaatatcaccttcacgattaatcaaattcctcttgcttttgagttttgacaattatcttgtcctataaccaacaagaccctttcactagcgatataagatctttcgtgatgcttttggaaatctcaattgtagtcccattgcaaggttctagtgtacattctactttccattcgatgaatttcaagaatcaactatcaattgacaaaacaggggaaaccaacgtggatgctcaatcgcctctaccagttggtgagaagaaagttcaaaatgatctgttctgtcttaggttactacggctttcagtagcccacaagaaactcatcaaatccgtttgaaaagattatgtactttgaggatgatcatctctcaaatgatg

SEQ ID NO: 42084 - DNA, 697 bp, Arabidopsis thaliana landsberg
catatacaccttattagtattacagaagaggttaaaatatatatgcaagatatctcgtgctcaaaagtaatgggtgtacacttgttatccatattctcggaagaataataaaatattaaattttcttaaacatactacatataaagacaaaatatgtatatggttattaatctcataagacaatgaatttatgcaacatacaaatattaactaagagaagtatagaattaagtttacaatccaaaaaaaaaagaaaaagaaaaaatccaagaagacagtaatataacaatgtatatccaagaaattcattaaacgatttattatacaggtaaatatatttataatatttcacacgtagactctaataaaaaaaggttccaccaatcaagacaaggtaaggacacaccgcaagtggacttttgactcctttttccccctttcttatttattgattttgtaattactaatcagaacactggcacatacattgtgctcgctaaagtatttttggggaaatattgattcaggcaaagtagtagtatttactttttcacaatatattaaagtagtctatagtactcgaatatgaggtagagtgaaacaaaaagtttgcgaaactcattgtgctagcttcatatatgctcgactttttgacaaaataagttctgatgaatttcaatataaggttcagatgagc

SEQ ID NO: 42085 - DNA, 503 bp, Arabidopsis thaliana landsberg
ggcgccgtcctggcgcacgaactcgcgcatgtctcccggcgggacactctcgtctcgttttggtcgtttcgggctggcgtcgctggtggcgttcgtcccggtgccgttgacggcgctgctggtgcaggtcacggcgccttcggcgcgggagtaccaggcggacttcgacggggcgatgctggcgggcgacccgatggcgctggcgagcgcgctccagaagatcgaggcatcggccaccgaactgccgctgccggcccgcggcttgctcgccgcggccggccacctgatgatcgcccacccgttcccgctgcgcggcctgggccgcctgttccgcacgcaccccccgacaacggaacgcgtccgccgcctggaatccctggccggctacccgcgctaggggcttcggccctctggtccccggctcccggttgggtcagcggtagttgacgaattggagcgcgaagtcgaagtccttgcccttgagcaggctgatgatcgactgg

SEQ ID NO: 42086 - DNA, 285 bp, Arabidopsis thaliana landsberg
cttttgggaggacaaacagtagaagcatacccttgaatcgataaaggaccacagacatagtttacgtcccttatcgatctctacaatttttactaaaccacgataatttcattatttcttcacagataatttcattatatatagaaagtttgaagaacactcgagccttttcttaaatttcattagcctaaatatgcatggaaggtaatctatatatacaacttatatacctcaattcatattaaaatatttgaaaacttcctgctttcactggtaataatatat

SEQ ID NO: 42087 - DNA, 845 bp, Arabidopsis thaliana landsberg
caaggtacattttcctattgtggcttccactgacattaatgacagggaaaatgagaccaatgatgtggaagaagaggagattcgccgtttctgcatccatctcaacaaagaggacaaggcactcttggttaagctgttgagaaggaacaatgaacaaggcgagacgcttctcaggctagaggagtccctcatcaaaaccaacgaacagcctagagaagaagaccaaagaacatgagaagctaaagcactctcatgatgatttggtccaaaggtatgaatatgttttaattgagcaaagaaatagtcatgatacattatctgatattgctcaacttaaaacggaaaattctatgcttaagagtcaagtagaaacaatggacctagaaaaacgtgctctaggtaaaaaatatgatatgttatcttattctcacaatgaattagttgatgaccatatcatgcttgatgttgctcatgaggttgtaattgcgaacttaaattcatgtgaacctcattcttgcacacgtgcgcatttagataatatatcaccatatgctaacccctgttgctcaaaagaaagccaatttttgaatgagcatcaagctgcaggatcaaaagaaagaaacaagaaagcaaaacaactaaggagaagacgcattgctcaacctcttcaagttatccacggacgcgtggtgaaggagcttgagacgggagaaaccgcagcaagtgttaaactccataagaaggatgttcctaaagcaataaatgaagaaatcaacatgaacaaggaaaaggtaaaaattcaatcagtcatgttgtttgcactgatcatctctctatgtcatcca

SEQ ID NO: 42088 - DNA, 822 bp, Arabidopsis thaliana landsberg
  unsure (1)..(822): unsure at all n locations
ataattccttgaactcttttaccctctcccatattgcctttcttctccatatctccttcctcgccactacaactgctgcataagcagctgcagccattgggacagggattgctgttgaaaatatgaatgaacgacctctcgactgtatcagttgcttccattttttgctgtttccgtcaacaaacttaagctgttaccagtctactagtacattgaaatctctgtttcatttatagagatattgagacgatacagactgattattgattcactttatcataagctttcatggaccgtatactatagggatcttaaccaccactaaaacaaattctgggttcacgaatttcagatcacataggaatgagtacctgcaagctatgaaaccgccatgacaccctgctgccttactcaaagtgcccacacataaatctacgtcagcttcacagttaaattcctcagccacgccaccaccgttttctccacagacaaatgttccatgagcctgaccgatcaatattatttttcttcagcaaaagtagtagttgacaccaacatactaaaattttacttgaacattttcgatcaacttacatcatcaataactagaaggaagccatccttcttccgaagctgagagagctcttctattggtgcaaagtcaccgtccatactaaataagctgtcaaaaccaaaaatgagattcaaccataagaacttctttcatatgtcgacagtctgaaaccaccanaggcgttaataagcatagagacatggnttagccattgtagctagcactatgaataggaaaaataaaaaagg

SEQ ID NO: 42089 - DNA, 800 bp, Arabidopsis thaliana landsberg
tcgaacacacatgttattgggctgcttaagtatgtcttctaataattttagttgtataatctttatcttattttattacaacgagtataaattatgtggacactatcgttctccttaatccgttttcatacggctatgtttcgaaatttggttatagacttgggctgtttatctctataatgaaactatatattggatgtaattttcttcaacgccttgtgtttttttatatcacttaatatatagtatatcaaatcggaaacacttattccatctaacaatatcctgatattcactaatgtcactatactatagagtttcactacttccagcaccagctcacatgatcgttagctactccttctctaaagttattttgagtcacttatatttcactctaatcaagtatgtgtaaaatacattgcccccatgtaaagtttagcttcattacaaaattaacatcttaccaaaaactatagcaagaccaaaaaaaattagcaaatcattttattattggaaactcaactttatttttcatctaaaatcaaaactcaatattaatataaataaatagttattcaatcaacaatgataaatactaattaaaattataatgacgtcattctaatagatttattatattttgggattatgcattaatatcgaccagaggaaaaaaaaagtgagcgtgttgatgcataacgaacgatgccattttccgcatcaatctcatcgccttcttcttctgtcgcgcttcttcgatcgcctctctctttcttcatcttcactcccaaaaccct

SEQ ID NO: 42090 - DNA, 826 bp, Arabidopsis thaliana landsberg
attgcgttattataaacaattttgaaatttgagggcatttatcataaaactaaatatttttgggggtctatttacaaatagtttctgctgtaaattacaattgacaatggcatagaagaatatgaacttgtcaattgcatcttcctctatttctagttgctcttatgtacctgttgagcatatttgctcatcagatttctcgggattcgcgtcaagaccaatccttcaccaatcagcactatagccatcactaatattcatttaaactacccccatcagttgcataatttttctccaaatacttaacaactttagatagtataataataccaaatccaacgagcatcttaaagcagttgaggtcccaaaagaaaaataaacaaacacacatatgtggaacatatataacctttggtgcattatcttattgattgtggttttagcctccactttagaaactacttttctttttcccacgaaatattattaattcctttagaaacttcatacgaaagaaaataacattgtcgttatttaaatgtggttgttgcatagaaattacatcaatgtttgtgattgggagatagaaaagacattcgacgtgacaccaatattttcctcgagtgtaaaagattcagttgtctgaaccctaaaaaccaagtgcctcgtataatgtccaaggaagaaaaaactagcctctcaattcaaggcaacatgtggcccgatatattatttcaagcaaatcacatcaatttttttccataaagtataactcccaaaagaaatctagatatgcagttaatacttatatacgcatattctcatt

SEQ ID NO: 42091 - DNA, 569 bp, Arabidopsis thaliana landsberg
acactcccataacatttgggtcccttagttaactcgagcatcaatgtatatgacacttttagattcttcggaagttctaagccctctcttttcattctttgaatgcttttttttttactgccatgcgtgcatttccataaatgttacaaatttttgaaaaaatggtctcaagttatataatattcatgcttgcttcgtgaattcctttgtccgattagtaatcaaatgagcgattgaattttttaaaccattttataaactaattaagccccaattaaactttagtatgatttaccccccccccccccaaaagtcttaacagtttagatgtaattgtataaattattataagcatgtatcgctaagttaatattataaacttaatcaatagattaagaaaaaatgcattcattatcttcttcttttttctcttcaacattcttttaataacttaacaaaatgatatataaaaatgtatgcaacagtatacaaacaaatttttgtaaatatatagttaaattgtataccacatccctctcctggaacctggctagtcatattcacaccga

SEQ ID NO: 42092 - DNA, 727 bp, Arabidopsis thaliana landsberg
cccttttatcaagaacacatatcttttagtacaactttgttaattcacttatttgcatcttgtaaatccgtctcacattcagtataaaccataatgatttttcataaagtttatgtgtgttagtgtccatacttaaaatcaatacatgactaacataatcaaactaatttttttactgtgaatttttttttatcggatctatattttttgtagaatacgaaaagactaatttacattgcatattaaaaaatctgtttttctgtatcgaaaaggcttccaaaagttttcactaatataccagcagtatcaatctctccatagtagaagaacaagtagaagaccaagtcgctggttttcttaagatatcttctctgttgttccccccttcttcgttcctatcgccaccttcgacattcactatttttctttttcttttttttttttgtttgagaaaaaatgaaaatttgttttaagagaccatgataaaataataaaagacaactaaataaaaaatactaattatataaaaataatatcctcatataataattatgttatgtggctcaattggccaaactggaacctaaccgtaattattaaactgaaaaaatgatataggaatgtgtttagtttaatttatataatatacgaatttgcttaattttatacttttatatatgtataaaatttacatgtgtgtaaatatttactagttatggacactctt

SEQ ID NO: 42093 - DNA, 373 bp, Arabidopsis thaliana landsberg
atgataatttctacaaagttaaacactttcctgataacagaactttgtaaacccaactacaagaagcacaagttcatgtccaaatcctagctttcacatatcaatagacttacaaaacccatttactcaaaacacaaatttttgttctttgttcaccaaattgagtacatgcaaaatcatatgcttacaaagctaaaccatttctgtataaatcattcacaaatcatcaaattacttaaaaaggacaaaaaaatcccattttccctatcccctgagtccaaatctacaatttcacatctttcaaaaccctaatattctaaaaccacattaacagtatcaaaattcaatttagaaaaaagacaaacacacagaa

SEQ ID NO: 42094 - DNA, 128 bp, Arabidopsis thaliana landsberg
aaaaaaaaacataaaaagatctaacggtcataagattagcgtcatacctaagcgaaagaaccttccaaattttgtcatcttttaaagcgtcgacctatctttgaattacttgttttgtttgtgattaa

SEQ ID NO: 42095 - DNA, 581 bp, Arabidopsis thaliana landsberg
atccccaattgatattggaaattagaaaaatttgcttagttgtggtgtacaaatgccaataattagatcatagctaaacttgagctaaccaatttcaatgatttatcggaccatagtttcaaaaaaggatccggcaatgataatgttatgatagagtgcgtgtgggataaacaagaggcatatgtagatgtcggaaaatggaattagctaatttaataagcaacccaaaattataaataaatgtcacgtgagaggagaggccatgttggcgccgaggaatgtggggctcgacagcttcctccaaacaaaatataaaacgtcaaacacattaatatggtaaaactaatactataggttatagatgtaacaaatacataattatcaatataatatttatgaaaaactagtgaaaacctttaatgaggagggaatattggggaactcatgcagcatctacgtgccacgacaaaatgctacacgttgaatagaacgccttcccctgtcctttcctttctatcaaccgttttgtaataaatgattttactatttaatcttactactatatagttttgttgctcaat

SEQ ID NO: 42096 - DNA, 585 bp, Arabidopsis thaliana landsberg
caaacctaattttatggagaggctgtctctccgggttaagcaaagaaaaaataaacaaaaactttgaatttcaaagacaaagaaaaaaagaggaagattatgaagacgcgtaagttctaaaattggaatacatcagggtttagtttttttagaaatatataaacgtcaataaacaaacaaaaaaattacaaaaagtaaacggtttcttgccacaaaagctacttgaatttgggggtaagaggaacgggtttaccgtttgaccgttgtctcattgtcctcgttatttaacattgttcgacgcttcatatgaatttacaaaaaaagtccttgaagaatcaaattaattaagtttgactgattttacactaataaatatatattcttctgctgtccttcaaaaaaaatactaaatacgaaattctataaactactagaatatcttttgaaatccattaaaatctcatctaaacatcctttattcaatggataatttgaagcaaacctagtctttttttttttcaaacaaacataaactcaaaataattccgttccttattaatccaaattctaagtttttcacacatg

SEQ ID NO: 42097 - DNA, 658 bp, Arabidopsis thaliana landsberg
cgcaggtcgacgaatcaggatcccaaccaatagaatagcatttttccaaatgaaatttagccagtctctaattatagattgtagtttcaaaaaagaaaagggtatgaattaaaaaattggcattagaaatgtaaataaactaattataacctagttttgttttgtacttaatctgcggtttctatatatatcactaagatgtagaaaaacttatataaatattgtgtggttacctcggggatggcagtctcaagacaagagcggcagtcagaggaggaggcatcaccgcggcaaagggccaaaccgttgacgttgtttggagtgttgccagtggaggaggcggcaaaaccggtggatggaactttgtaagagagctgactaaagagattgttgagatttgactcgtagagactttttgaggtaaagcttccttcgatgtctgagcacttgtggaagagaaacgcattgttctggctttgagacaaaacggtatgtatagagagaatttgtatggctatggccaagatagggaactaaacgatgcgttttaatgaagacattggtttggaagaaattgatattttgtggaggggtgtctttttttttttgatagaagaagtgttgaggtaaggatgttttatagagtggctagatgatt

SEQ ID NO: 42098 - DNA, 1119 bp, Arabidopsis thaliana landsberg
  unsure (1)..(1119): unsure at all n locations
ttctgtcaaatcttctacttacagcaccgtcaaattgctatggttgctttgtggtatagaagatacattgcttggagacatcgagaaaattgcagaatcatctttcctaatggttgtcgtctttgcgctagctgttacgaaacaatggctaaaaccaatagtgtctaaaaaaagaaaaatgagaccatcagttaagatattagtttcgttctcctgtgtagagtatttcaggcatattcgtttacctgaatacatggagacaattagagaggtgatttcatgtgtccaggagaatgatgctccttgtgtttcatttgtagagtccattcctgcctatgatagcttgacgaatccgaaaggtttgagaaatcacttgtttctgcaatttccatatcacaattttctgttggctattacattaataagctttggaatctctccttttttttttttttttttttcttgttctgcagacttgtttacgcaaaggataaaatatgaatggtcaagagatgatgtgcagacatctcgaatattgttttatcttcgagtaatcccaacttgcatcggacggttatctgcttctgccttcaggggagtggttgcatcaaccatgtttttgtatccttgagaaaagatcgagaagtcttttactctgttttacttaactacgagtactaaactatctttcctattccttaacaattctgtgactagatatattggacatcctaacagaaaagtggcgcgagcatctcatacgttgttggcagcatttctctcttcagcaaaagaatcagaggaggacgaacgaactcaattcaaagaacaacttgttttctattacatgcaacgatctttggaggtaactaagcaaaaaaagaatatgaatgttacgtagctctttttctgtttatttcttatctctaatgtatatggttggttgaaataactgcaggtttaccctgagatcacaccttttgaaggtttagcttccggcgttgcaaccttggtccagcatctacctgcgggaagtcctgctatattttattctgttcatagcctngttgagaaggcttctacatttagcaccgaatcattgcangggcagaagtctga

SEQ ID NO: 42099 - DNA, 642 bp, Arabidopsis thaliana landsberg
tggtacccacagaacaaatggaaatggagcagaagacaaaaacaaaacacccccaagtccccccccgacgactcaaaatcttatccatattattatacattactgtggagtatatgaactttatgaattaggagaaaaactaaatggacgtagttaatagagatatacaatgccaagttgcttttatatagtatgcatgtaggtcatcctttgtcccattattattcaacttgatatcccatcccttcgatttaatctccctaacaatcccctaattataaattgttttgaataaacatcataaaaactgttcctcttccttaaggatctttttctaactcagttatatacttatataagatttcctaaaaataaaggggaatttttgtttatttaaacttgtgttaattatgggaacaagtgattttttagtgtattttgggtattctctttaaacactaactaaagtaaagtaaagaagacaagttaatgataagaaatagggcgaattttccattaatgagtattaatgagtagagtaatatacattttgcattctttaagcaatagcctaaaattccataaaccgcaaaactcgcaagaaaggaaaaaaacaaaacaaaaattaatactaaaaagcct

SEQ ID NO: 42100 - DNA, 645 bp, Arabidopsis thaliana landsberg
gttcgatcctgacaacggaagaatccacctttggaggagggcggaaattgttcttgccgactttgaggaggtgggagactctggcataaagctgagtgttgacagagagacggcagtagagattgtcaccaggctgggcaacgagtctcatggcgaattccctctggtacatgatgacagcacatctgaagcttgttggatggaagagaagtttgaatgtgagaggagatgatatctgatacggaatgtttgccacacatatgtcaaacctgggaagctccgtcttgagcacatccccttgaattacctttaaaagagacaaagtagaacagtcagcatatgttccagtaaccaagacacaagaatctatattccaagacaaagataaatgaatcatcacaatgaatagatagatgctcgaattcaataacaatcgagcagtagagtaccttcaagcggttagagaagggagttccttgaaaacggcgctgaagctcgagaaccatacgagagtcaagttcgacggcgataacttctttgccagcttctagaagcttcttggtcaagtttccagtaccgggaccgatctcgagaatcacatcggtactcttgataccagctttctgaacgatcgaatccacaagc

SEQ ID NO: 42101 - DNA, 704 bp, Arabidopsis thaliana landsberg
tttataatcaattttagggagcgaaatccaatataatgatattttaactttgctcttatttggaaaatcaaatattcgagctaggtaaaattgattgagtataggcggttaatcaacaagaatcaatcaatcattttgggtgcatggttaaaagttatggcatatacaaaatgaaaatataatctatgacattctgattctgcaatacatatactgtatattgtcaaaatgagaagttctctgttgaagaggaatatacaaacaacactttttttttttgttaattgtagacacaacacattatgccttttaaattccacattgttttgaaatgtatgtatcaaataaaaaggaatgtgatttatttatgtggagattataaatgtatagtcccaaaagaagatagagtcttcattatgggctaaagatgtctttaccaaaaagtattaaattattgtgcatagtttttggcttttctttatttgtttctcgtgttaatcagtggttctcattgtccaccactagctctttccttttagttcatattgcttcctatatatggtcaaaggtataataattcgacgctaataaagaagaaacaaattgccagcttttgaacctcttttattctggtgtatatgagaaaaaatccttatcaacaaattccacggaaatagacataatgtcaatactaaaattaatta

SEQ ID NO: 42102 - DNA, 683 bp, Arabidopsis thaliana landsberg
atattcctatttacacaatacaatatccaagttttgcaagaaaaaagaacaataaaaataatcattgtaaacttccattgactgttaaaaagtggtgaacttacttgatgtttgcaaaaatttctttgattgaagaaaatctttaataatttgacggaagtatgttttctattgtatctttatcgtgaaacattttgtacgctatataactctggtttatattaccaaaaaaatctgttagtttcaaatgacttttgtaaatttgtgtagcaaaattgaggacaaaatcttaggtggaacgagtacgattcagaaaatttgattttgatttcagatcctttttatatattttgtttgttctttacagttgcgaacttttaacctcaaaaataattatacctctttaatgtttgcgtttcaagtaaaccagagtagtatcccattatagcaaagggaattttcagcagaccagtttctactctctagtacaattcattcccacttttgcgtgggatggcaaatcaaatcaagagaggattcaaataataatgattaattgtagagctgaggtaagttcttatttgattttttaaaggttatatgtttttcttaaaacaacttatttattgatcatatatagcacaatttccagatacccttgaatgaaaatgatgagaaataaa

SEQ ID NO: 42103 - DNA, 629 bp, Arabidopsis thaliana landsberg
tggtcccctagtactatactgaaaaagacaaagaagttaacgaaccttgacggagttttctctggacaaagcggtggttgtcgtcggagtcagccttgctgcgtaggttagcgtagagcaaagaaggagagccatgatgaaaatggttgtgaacttacccatactgatttgcaaaatagagaaagataatgggagcctgagaagagagatagagaattataagatgtgaggatgaatagcagatgaagccagttaggtgaatttatagtgatacacgagttgacaaatagcgagatgctgccaaatgtgaaccatagaaacttataaagggtaaagttaactacctttatggcgtcataaaacgagtcatatatatcgctcaaattttaattattgaattatagttttatgttagttagtaataattatataagaagatgctctttattcatgccgtgttagattataattttacggtcctactaaattatttgatgttgttgctgtgtgtgaatgattgctcaaaaaagcaaaatatcatgtgaccacggaaaaaaggtgaccgttggatgagaacaagacgatacacattttgatttaatttcgaaaatgtttcaaatttgacaatg

SEQ ID NO: 42104 - DNA, 402 bp, Arabidopsis thaliana landsberg
  unsure (1)..(402): unsure at all n locations
cccccccccccccccccccctccnccccccccccccccccccnccccccccccccccccccccccccccccccccccccccctcctcccccccccccccccccccccncccccccccccccccccccccccccccccccctttttttttagtccctcgccccccccccgcgcgccccccnccccccacccccnnccccccccccccccccccncccccccccgcccctccccctctccccccccccccccccccccccccccccctccccttntnttttgctcccccccccccccccccccccccctcccctcccctcccccccccctncccccgcgccccccccccccctccgccccctcctccccccccccccctctccccccccccccccccccctccc

SEQ ID NO: 42105 - DNA, 1379 bp, Arabidopsis thaliana landsberg
gctcctccacgttggggctcaatgcgacggccacgtttaagcttgctattgcggcgagtgcataacttgagccgcggcggcagcagcagaagagtgtcggtggtccatagccggacaaatatacttagaagggtgccacgtcggttatacatatcacccacatgaacttcccaatgattcataccacggtacgtacagttattaaagaaaactgaaccaaaacaaatatcagttgattatgtacttaagttgcgaattgtttcctttgacagaaggaggttccaaagtaaacacggggaagtcgttggcgaatgttgtaggaggagtagcggcattggtctttgttgctatcttttttatgttcctaaaaagcttgcggaaaaaaggagatggtaagttattactattagatgtgatatcgttttactctattttttttttaatttgaaaagaaaacattataatgtagagacatgctactagatgacaaaaaaataaatagaaacatgctaattataaacgaaaatattagaaacttaattatatagatcccatgtttatgaagtttgttaaaactatttaattatgtacatacaaaattgaattgactaatttatcctattgcagattgttgaagggtacatgatcagagagatgttgggaaaataattctgttccttgtatttgttctaccaaccaaggaaaacctccttctttccatttttcgattgtggaaataaaagtggtaggatacgtaattttaatcatgtaaatatttgtactgaaataaatatttgccctaaaagttatataacatcctttaataactacgacgtttgctttaacaaaaaaaaaaataactacagtacgacgtttgaagtaagaagattatatatttatgttttgtaacccccagaactaatacatatcaggttatagcccataacttttatttaattatgctgtgctttttagtcaatgggcctattttaatggacctacacaatcatggaaataaatctggaaataaatctgtccacgacggaaaaacaaaatctataaacaattgtatgtatactcagttactcacgcacgacgcagtgaaacagagatactgtgaaaaagtgtgtttaaaatggatctgttttagggtatttatcaattcgaaaattgattaatttattaatttcgtaagctttcacagaaagttcgaactctttgcatgcaatcattcgccgtcttcttccacaattgtgtgtttttaccggcggcggctggattcgagaagcttccgattgttctgtataatcaatctctccggactaaccagtaaggttttttgtttgtatgttacgcattctctttgcttttctcatgca

SEQ ID NO: 42106 - DNA, 606 bp, Arabidopsis thaliana landsberg
taaaactacaacactctattgggacaattctatttggatcaaatttgttctatagtcatgaatttattactcaaaattggctaaaaagaaatgaacgacacatattttaaatgttttctaggtttaatatcaacttcagatgtggaatattccaaacatgttcgagtttttctattgcaatttcaataataattgatcattgtggacgttttaaatcactagaacattttggcctctcacatgtttcatgattagtctttattttatatacagaattccggattatgagagaaaaaaacacatacttttattaataattacaaatttaaattgaaaatttatttttatgttattacatccaatgaactaatgtcaatgcatggaaagaattacttaggctctgggaacaacaacatgatcccttcacacacatactctaattcaactaaccaagtcttcttaattctgataagtcaaattgaaaatgtcattaccactgattaaaaaggaatcaaaagaaaaaaagcttttagtattgagtattgaccgtcgctatcggtgacaggcagagtcacaagccaaataaaggggaccgcgtggtacgta

SEQ ID NO: 42107 - DNA, 139 bp, Arabidopsis thaliana landsberg
cgcgcgcgcacctgtgaagtggccctttgcaatgatctgatcgaacagctcgccgccgctgcacagctccgtgaccatgttagtacgcctggtcgttctcgaacacctccaccagccgtaccacgttggggtgcgactg

SEQ ID NO: 42108 - DNA, 563 bp, Arabidopsis thaliana landsberg
  unsure (1)..(563): unsure at all n locations
tgttggaatgtgataaactgataattgtgttatgctatacttggatgcatgaggataaatgaaaactaactattcaactaaaccctaaaacctatacgatcaaaataatagtaaatagtaacacttaatgagactttaaagttgagatgtgtaactagtcaccactcactcatgttagtgattcatgtgtgtgtcagtgtgtgtgtgtgtgtgtttatcaaggtcttctcttaagattcataagtgtgaatctggtgggacttaattggtctggtggagtagaacctatgcgggcaatggggaaggttaaggtaggctaaccgagcccactctctaattttataatttgtaacctttattcgtaaataaaagctgtttaatttgtaacctttattagataaaattttgtctttttttttgtcaaaagataaaatgttgtcaatcattttaaaaacaaagaaaaaaacttttttggcaagaatttatatanttgcttgtcataaaatttccattttgtagtattntggaaaaaatattttaacgaatggaagcaataactcgac

SEQ ID NO: 42109 - DNA, 245 bp, Arabidopsis thaliana landsberg
gagttcgtgtcggaactgatgatggaagggaagaaaaacagagtaaacgaagaggaagaggaagaagaaggaggaggagaaggagaaggtagggtttgtactacggtgaagttgaagaaagactatgttcaattggttggtttacgtagatggaagccaaagcttgagacgataacagagactaaggcaatgaaagcagcaacgatggagaagacgaagaagaagaggaaaaggtttactgtgat

SEQ ID NO: 42110 - DNA, 781 bp, Arabidopsis thaliana landsberg
gcagtattataataagtaataacattaatagagcatcacaaaccccaaggtatggtattatagcaaatgatgtttctgatggaggatatgagtgaattgaatcaaattccaggtataatcattatgaatgcttatatagtatgcatagtggacaataaaaaatggataagaatacaaaaaaaactggacatatgaacatattaatgtggataagccaaaggaaaatgccttacagtagttgaacagaaggacagcacttcatcccatgttccattaaggatatttgaaacgggtgcttacattgtggtgtatttataatacttatgcaaaaacaatgtaaaaataaagtatatgtatttggaatggtatgatgtacctgattatggattggggtcttgaacacttgttcaccattaggctgatactgtgaaacatgatatggaacatgaaagataaatggatccatgaccaaattgactgatacatgaaagtaacaattattcatgcacatcaggaatgtagtggtgagtagaaaaagaaacattaattattttaaaattaacaaattgtaaaattgtattgacttttatttttcaaatgacgaaaatgaatgctcttgaaaatgaatcctcttgaaaatgaatcctctgcaaaagaggtattaaataattaactctcaagcttggatacaatgtttagcagagacttatttacaacttacgatattgatatgcacagaagggaattcttcacgtctatcctgttgtatgcaaaaagatgg

SEQ ID NO: 42111 - DNA, 519 bp, Arabidopsis thaliana landsberg
  unsure (1)..(519): unsure at all n locations
cgcctggcgcatgtcaaccgggcggcgggccatctgcagcagcagctgggcgccctggtggcgcagcatccttttgtgttcgccggggtgcgcggccagggcctgatgcttgggctggaaatgcgcgttgccaacaccgatttcatcgttgcggcgcgccgtgcggggctggtcgtgctgccggccgccgacaatgtggtgcgtctgttgccgcccctcaccatcaccgaagaacagatccgcgaaggggtaggcctgctggaccaggccgccgccgccttcgagactcagaaggccgccgcacaatgaacgcccccgtgaaagcgccagtcagaaacatgccccggcatttcctggacctgtccgaccatgacggcagcacgttgcgcgccctgatcgacgacgccaaggcgcgcaaggcggcccnnnnnnnnnnnnnnnnnnnnnnnnnnnatcccgaccggccgctggacggcaaggtgctggcgatgatcttcgacagacagtccacccgcaccc

SEQ ID NO: 42112 - DNA, 608 bp, Arabidopsis thaliana landsberg
caagcaaaacatgatttaccttccacaaaaggaaatatatctttgcccaaaaaattataagatactctcaccaaaccccaaaaacaatgttgatggcaaagtatgacaaatccacaccactacactttctccattctttattaaaccaagcttattttataccatacttttcacatatcccctccataaatgccaactcactctctcactttttaagctaaaatgaacattcaaaagaccatgaaggaatctcctatatatatacaaatatgtatttttacatctccatgttttgtaaatgtgatgtgacattttaaaattttatttttccaaatcataaaaaaggtgatagtgctgctgtaaagaaataattaaagagacaaaaatgaggtaaataaggctgtttaaaatcatatatttataacccaatatctatgaaaaaatcacacttttgttctgtactcttataatcattaagcttgctactatttatgtaagatgattccatttactcattagtgatttaccaacactttttgttttctcttttgtgattcttcccatattctactttgtatgttaactctttaataaagcctttcagaaag

SEQ ID NO: 42113 - DNA, 564 bp, Arabidopsis thaliana landsberg
aaccccccgaaataataatacataaccaaataaattaaccggtttgaaaccaaacgttcccgaaacgtttccatctttttgtcaaacacgttcgttactttataatttgcatttctcactttcctcataatcaccgactcaaaaacaatctccaattcttctgttttctggtaagctttgtgttttttttttgtatcactgtattctcattctttaatttattgttttgaaacttatgttaaagtaagtgttttgtttagattcatcattcattcatgcaaatatttttttgagaaaattattctttagaattgaaattgtttttcgtgtttatttttggtactttagttttttttgcctctctgttatgaaattgactgacaaaaacgtagagattcttctctgattcgaagtcatataactatttttagttttttttttgttcttatatgtttttctcccaatatcgatcttgaagttaaccttgtcgtgtaattttcttgttctcttttacgataaaatttggattgtacttttttctgtgattttttcagactatttttc

SEQ ID NO: 42114 - DNA, 789 bp, Arabidopsis thaliana landsberg
  unsure (1)..(789): unsure at all n locations
tatattcataagaaagagataattctcatttaatttttagttttataattactcaattttatattataccagaagggaagtgggggcaaaaattattaaggctatatcatatgtaaatacaattaagaaaaatttatgtaagaaaattagaaactgaaatttcatatcaagaattaacaaagaaaacattaataaaatttcttgttaccttaaatataccattttatttaaatgaacattaaatcatagtattttagatttaagaaaaaagaactacacacaatttctttaataaatctaatatatatgaaaataaatagaaagcactactgaaagaagatccatataaattaaagatagtttggtcaatgccaatcatcattttgaaccaaatccacatttaaggaaaattgatgttattctttaacccgaaaacatgttcttctctttgcacatgtgtctcgccctattttttatttcttcattcaacaagtcaaaatgaatctattttactacatgatctctataaacgaatgtcataaaagattttatggccttcaaacttggtctcaacatcgatcatgtatatgattatctgattcatccatatagaagagggctaacccgccccttgtaccttgctttcgccttaaaaggttttcaagaatttagtttctttcttatttgattntaactntgtaaatgtcacatttttccgttaattaattctttcgctgagtgttaaatatgtaatatgacatttgtaatcaagatatatacttttaacat

SEQ ID NO: 42115 - DNA, 475 bp, Arabidopsis thaliana landsberg
tttctgttgttgttaaacaaacactcccgtttgtataaaacctcaaaaaccaaaacagaaatgttcaatagagcaatggggtttgggttcaagatcggatcaagattccgattagccaccgcattcacatggtgccttctcatcgcatcagcgtgctttgcatacaccgcatcagcagcccggttcgaggtaagaaacgagatctccagatacccaggacggaatcgtagcctcgcgattaactgttggtcgtcgaataacaaattgggcacgcatgctctcaaaccaggccaatccaaaagctggtcgttcaagccaatatttattaagataccgtttttctacacatactttgagtgcacgttcttcaccgcgtttggctcgccatttggtcagacagcaacggtttttgccggggagagattattcgggtggcaatctcaaaatccccacgaggaagagtgcatttgggtgg

SEQ ID NO: 42116 - DNA, 523 bp, Arabidopsis thaliana landsberg
tgctccacccatttgctcgaattatccccattgttgtaaaaattttctaaaagtttagtggaaaaaaacattgtgctagtatagatgctttagattagcaataaatgttaaaagacatgtaggaatgtacaaaaaaaaaactactaggattctctagagaatgtatacacataaacttttaactcatcaattgcattatagcatggaataatattgatagtactttaaccatcgatcaattgcattttataaatcataaagtttggagagagttggtcaagatttatggttatcaaattacaaacaaatatcttgacatttcattagacagtggtttgttgatagtaacggtggtacaaactaggaactaaaatttcgttgaggagaaaccaaaagttcgggacctttgaaaaagaattgttttgttaggttctgcaaatcatgtgaactctataaattttttattttactcaaaagagtcaaaaattacgtacgatttttttttagtattagttacttctcg

SEQ ID NO: 42117 - DNA, 827 bp, Arabidopsis thaliana landsberg
tcacttgtttggcttatggaaacccacacatgcatgagcagcctctgaagtttactttatgtcttagatgatcattgttgaataattcattgggagtttatgacaatgggagctttcaaatatctgattattttgtattgatacatgcacaatgctagatttgtatccaggagatagttgcataaaccaatatactataccctcggatcttagcttattttcattgatatcttgttgttttgtgctgtaaacatatcagcttttgaatacatttggtccatggcgcaaaataagactttttttttttttaccataccttaattagcaaagtaacaaaattgttagttttgaaaaatactcttaattaaataaaggaaataaacacttgccgacagccaaaaaaaaaaggttatgaacaaattgaaagtattgttttcatcaaagcccaaatatgtaaagcccaaaaacggaaaacatctttatttcaacaatacatatattaaggcgtaggaaaaactaataagagaggaaaagagaagaaggagcaaaaaggttttgccgaagttgagagatcaatcaaagatttgaagttccgatgaattcaggaggtggaatcgttgctgcagcagctccttcaagcggcggtggtaattgttgaatggcatgtccgaccaccgaaccctaaaaacccagttgtcttcttcgacgtctctattggtggtatccccgccggtcgtatcaagatggagctcttcgccgacattgctcccaaaaccgctgaaaacttcaggcagttctgtactggtgaactcaggtactcgattctg

SEQ ID NO: 42118 - DNA, 364 bp, Arabidopsis thaliana landsberg
tgagcaaatgatttacatgtgacaaggaccactattaatttatcaccggagggaccaagaacaatcatttgagaactttaaaaagaagaatctataattaacagcaagcgtcatactatgaaagtactggaagaactagtactcattaagaaacccaataaatggaaaatttggtatatgtttacgttgcaactcataggattagattttacgttcttgaccattcaatcatttgcccatatcgattaaactgaatctaacaaggaagcgaggcggtcgagcatgaggtgcataggaagagtcagctttgaaagaatggatccaggctatgtgtggaccatggataacgatgatgctccttggc

SEQ ID NO: 42119 - DNA, 176 bp, Arabidopsis thaliana landsberg
tgcccatcaaagtgcttcccggccagaggttggggtgggccaaatggcgagggaatgcttccatcggcctgctaagacagacgcagggccggctttgggctttcctcagaggcgttacatgcgacgactgacctaccggtctataagttctggagttataaagatttaaccaaaaa

SEQ ID NO: 42120 - DNA, 884 bp, Arabidopsis thaliana landsberg
atttaaatattaatagatacccagtaggaggtccaaataatgcaggttacggaattactcttttattttttgtaaaatagaattgaaatagttatcagttttttttatttcatttatgggatgagcctcgggcttgatttgtaacaaactagtagaatacaacttatagtcaatatatatacataccaaaataaaatcctctacagtttatttaattaagagaattaaaacacataattataaatttttgaaattaatgtcaacttaataatttataccctccaaacagcttttgccataccatcatccaacacaaaatttcctttatgtgaaataccattgcgaatccatctctttccatgaaatacagaattcgtatctaaaacgcaaactgttggaaaaaaaaaaaaacataatgcacattttctctaaaacaaaattatattctcatacaactaggaggaactggagaatataactatttgacaaatgtcgacgtgaaagtgcaaccatgtcttaagattcggatacatgaaaacaaaacctcaaatctcaaccgttgatgatgttgcgatggtcgcatgtgggctccgatcctttctttttatttgcacctgctcacactgcaactagtcttttcacatgtttattaaacgtccatatccattgcgtatcagatatataatgctaaagatatactgttcttaagaagatactatttcaatataatatgctttgaatataaaaaccatgacatccctccacagtttccattattaaaaaataatccttttggtaaaggttatcctttaaggcaaagcaaatccttcttctctgtcacgaatcccctgtttttatatatatgtatatacccatattaagag

SEQ ID NO: 42121 - DNA, 1006 bp, Arabidopsis thaliana landsberg
tgctggcaaaggtatgttgatgctcgtgagcaaccttgaaggtggatgtcccgcaactagagagttcaaacaattcttttcaacgttcaagtcttacatgagctttatcagctcagcatcgatatccgcatcgaaaaacatcgatgtggagatgaatgggagatgtgaattgctttccaaggctatgtctgcattgactggaagcaaaagcagccaatcagtaagtctaataccaaaacattcataagatataaaaaaaacatttgttgtgttttctaaacctaaatgttccttgttttacacgacagtcggagttaaaaatgaccatgttgtcaatgggaaagactttggttgagcagaagaggcaaggttcaaggatgatgtcattgaagcaaaagaaagagttggttgtggctatggtgaaatggactcgaatggttataacattcgtaaagagtgtcgccgagaagagaggaaagtcgattgatgaatcgtcttacggtcttgatgttgatgttaatgccagcattggaagttctagtggaagtgatggttcctcttcatccgataatgagagttcctcaaacaccgaatcacaaggcacgtccagcaaatccggaagtgaatcaacggctggaagcaccgaaactaacaccggatcaaaaactgaggctggtagcacaagttcttcttcagccaagacaaaagaagtcagcggtggaagttctggtaacacttacaaagacactactggttcatcttcaggcgccagtccaagtggaagctccacgcagagcccttctacacctactccttctacacccactcctgctacacccactcctacgcccactccttctacacctaccccttctacgccagccccttcaactcctgctggtggcaaaacctctgagaaaggaagtgagagtgcttcgatgaaaaaagaatctaattctaagagtgaaagtgaaagtgctgctagcggaagtgtttccaagacaaa

SEQ ID NO: 42122 - DNA, 676 bp, Arabidopsis thaliana landsberg
aaatcattagattctcaatcacttacattttgtgatccaaaataaaattgaacttgttgtcgctttcggacacgatatccttagaaacaaaatcccaacatatttccccatctaatccaataatatcatcgtcttctctgcctctatataaactaacacttactcacctatttcatatatccacacaacatttacacaatacccttattctccacgtagaatcaagagtacttcttttccttaaatctctacaaaaaaaaaatcgatctatatactaagagatcataaatatagattcatagacctatttaagaaacgacttaagaagctgttggatcatataccatataaaatagcaatggatatgataacgaagatggtgatggagagaccggtggtgatttacagcaagagctcttgctgtatgtctcacacgatcaagtctttgctctgcgatttcggagcaaatccagcggtttacgagctggatgagatatctagagggagggagatcgagcaggcgttgttgcggctcgggtgtagcccgcagttccgggcgttttcattggtggagagttggtcggtggagcaacgaggtcatgagtctacacttaacggatccttgattccatgcttagcggtctggtgcattgtgggttgcgtactatgttttact

SEQ ID NO: 42123 - DNA, 837 bp, Arabidopsis thaliana landsberg
aactacaattataaagggtaacaatccaatgtccatatatagtgaaacggtgagatagtagaatggtattcggtggattctcttactgtaaaattaatgtgttacgataagcgtatgacataactgcttcaacttgtccaataacacatatttgatgaatttaatgttcgataaataattttatacatcaaggtttagattattgatttcagcttgtaagggtcgattattggtccataaatcaattttcagtaattatttgtactaatagagcggtcgtttgatcaaaggacaatgaaaataataataatactattagctaaacaccacttcatttctggttgtcatcgttgtgatagttgacaattaaccacatattgaccatcattccaattccaaaatttgactataacacattattctgaaccacagagaacagtttatattattaatttcacttagttatatataaaataatatatccgaagaagcaagaacaaataacgagatgtcaccgggcaagaagggactcaacgagtttaagccatcaccaatagaaattgtcggattcttgtaggacccatttaaaggtacgtggcgtctcctggctcgaaaatacgatgcgtggctgctccagtttagcccacgtcattcccctgccactcccttctcttgctattcctacactttcgttttgttccgtggactctcagcgctaaggccacgtctattggtcacatatatttattcatatcatattagtttatcactgaatttctatgaacactgtatatttggacgttgattataacgtaacctaaggacatgagattttgc

SEQ ID NO: 42124 - DNA, 944 bp, Arabidopsis thaliana landsberg
gttaccaaacacacaagcgccctcaccctccaggtaaacctatttgcctctccttttctcacaggagagctccatcttggagataacgagactagcaatgttgattgtgttacgcattgtgcaggttcttggaaatgctaaaggagcagttgcagtggtgatttcgatcttgatctttcaaaacccggttacggttatgggaattggcgggtactccataaccgtccttggggtggttgcttatggagagacaaaacgcagatttagatgaactctcagacattagcaagtgagacaacatagcttctctatgtttgtttcttcatctgttcaagactcatccttaggacctgaaatttttgggcatttaggagatgagaatttatcaatagtgattttttgtaactattttatacgcactttatcatgtaatatgtatttggactatgttagatttgatggtgagataatcatttttgtgtgtttcctggttgaaatgccattttggttattgaacttattaataacaaatattactccaagcttacattttttttagcaaaaaaaaaaatattactcgaagctatgaaggtttggccaattacgttttgcttagcccaaacaaaacttgttttttgttgtttgcttattttaatcatttaatgtctctatatcttcttttttactttctttttgtgaaaaaaaattacaacattcaaatgtttttttactcaaaaattataaattaaaaaaaaaaacaattatagattgtgaacgcaaattttcatgatggtgcgcatttttataaatgaaattttttctaagaagacatgacattattataacttggaaacgttaacatactgtaaaattttaaaatatttagagaaaacttactaatgatatatgttttcttatgcatgccgagataattctgattggaa

SEQ ID NO: 42125 - DNA, 136 bp, Arabidopsis thaliana landsberg
attttctgttttaattttccttatatgtctttgtttccattctcataattcgctgcgtgtgtctgtggtaattggattttgagtatagcgattgaaattagctcaaacatttagcggtttttaatttcttaagttt

SEQ ID NO: 42126 - DNA, 747 bp, Arabidopsis thaliana landsberg
ctccttatgtgcatccctaatgtgtctactctatgcatcaattatcaaaatgatcacaaaactgtttatatatcacataaaacgcttaatgtaatgtcataagattttcctttattatttttcccctaatgcctttctcattagtatctctgtttcttgagatattggtgcttctaaatcagccattgtttgtttaatcagtatcaaaatgtaagcttttggatttataagcactctagtagttcataatttgagcagtagcaacaaaagtgcttatatgaatcattaagagacctttattgaatcagctatacatcaatttgaaaatttgggataacaacaaagtagtcgcatttacatcaaatttgagacaaaataagcaaaattttcaacagtatattcgaattctcacaaagtagaaacaacgtgaatgctttaggagtccaattagaataaatccaaagtctatcgaatttctcaaagcatgggatcgatacttacatgaatcaacaaaatatcacaaagtatcctccggagactaatcaacgtcgggagtaattttcctttaaactctcaaactacggccttggcctctcgattccggcggcgacttctcgtcgcgaaggagctctgttttttttctagctgtctctgtttttttttttctattatccgggattatcgagcgttggttatttattttaaccgtagttactttgtcatttaccgtttgattttatttttttt

SEQ ID NO: 42127 - DNA, 637 bp, Arabidopsis thaliana landsberg
tgtggattgcttgagggaaataaataatttatttgcacattaagtactttaacaaaaaaaaaaaaagttgctatcaaatttttattcttcctctcaatctccgtctctctcttactccattgtttcacttctcaagcttttttctcactatctatgtccatctctccatacttgtcaccaatttgccaaattcagaatcatgcttctccttcgacgaaattcttaacccatatccaaaaccagatgagtcatcttcttcctcttctccaccaaaaaaaaccctaaaaacacaccttcagtaaatacagtagaaaaacaagggcaattagattcttaaatcatgttgttgctctccctttcactgtctattgcaaaatcaagccctagccaccgttgaagcaagtgagacatgggctcactcaaggtatggaagaagatctgtcttagattcaaatgaaccattatattgttttgctgaatcgatttacagatctattgttgcaaactatttacagatctgtgttatagatctgttgttgcgaactagttacagatcttgcgaactaattacagatctagatctgtgttatatatctgtaactgccaacttgttagcctaatgattttgattgatttt

SEQ ID NO: 42128 - DNA, 547 bp, Arabidopsis thaliana landsberg
tggtccaaggcaatgctcgaatacatggttactgcaattttaacagaacaggaccttctctgtcggatttgtgaggtcatgtcgatgttcttcaaaattcaagcactctcctaacttgtaatcgctcttcgttcacttcttctcaaaatagttaggttatctggagaaactggggtctattgaattattatatgtcagctaacctaaactatttggagaagaggagatcgaggcgtttacagattttgtgtttagtaaagacactagcgagactctggtgaaatagacaaaacaaaacaaaaataatcctaattttataggtttttggttaatatcatgtgtaatttattattatttttaaaatgtttaaaagtaaaaaaaaagagttataaagctgagtttttaacaagtgtcaaaaaaatgaaatttgaattttaattttagattttcaatattgcatataataaaattctggaaataatcatataagtatttgtccgtataaaatagacaatgttaccttccccattaaaatgttaatacatat

SEQ ID NO: 42129 - DNA, 543 bp, Arabidopsis thaliana landsberg
ttcttccgaggtaggttctctttgtgccgaacaaggttccaagtgctgataactgggaattttgtatagctgaacacacatgaagcatttttgtacctgaatttggtacctctgaagttgtcggcgcattctggtatatctgaacactcaggtggatgatcgatgtacagaatagtaataattacaatatctgaacactgaaggatccatccgatgtgctagacgttgctatcgttggtggaggcatggtgggcttgtcctctcgcttgtgcattgttaggtattgctattcgtgtgctctcccctgttttaaggtgccgatgtgatgagccgtgatggttcgacttagaccgacgtctggctattgctggtggctcgtgcaggaacaccgccgaaggggacgacgacatgggcgccaccgccgaagccgagcgatgacggcagcggggcgaacgagcgagagatgggaggcgacgacgacggtgctccgtgcccgggccctggcggtcagtcaggcggggtctacaagcccaaagatgatgg

SEQ ID NO: 42130 - DNA, 620 bp, Arabidopsis thaliana landsberg
tttgtggagtgcacgactgtttgatttttcacggccgaagaaattgaccacattgcaaaatataatctctgtaggaacgatacgagtatcggtcttgagctggagaagtacctgatctagctcgtcaaacatcttggagccaccaagtttcgtgatgatgatatcgtagcaaagaagcgagtatctgaagggcctttttgggttcgttgattctggatcagggtttcggaaaagcttcatggcggcggaaggatcattctcacggcggaggagagaggcgagcctgaaggaagagacagatttcacggcggacatgagtttcgcttcgaaatgggtctaaagttgacttttcttcatttcagaatatatatactttctgacttttcttctaaaaacactgttgataaaaatttattatatctcctaccaaaacaaaatatattatattttattataacaatatctttaatattcaaataccactttaagtataagaaaaaagttatatatgaggatttattcagtgttatcaaggttactgatcataccagttttgacgaagggttttgtaatggacgaatcgtctgctaattctagggtttccatgaatggaaatttgt

SEQ ID NO: 42131 - DNA, 568 bp, Arabidopsis thaliana landsberg
tgtatgattcagttattacaaagacagaattttatgcaaaagaatcatataaaggagtttagttttgttaccccatctatacgatttggacgtttcaacaaaatagtctattaatactatatttcaaaatgatctacaaactaaacccacaataacttgtcaatttttataaccttataatatctcatgtttggtacaacaatttattaaaacgtttggttcatacaatgaaaaccaaactaaaattgttcttattcccaacaaaatgaaatagatacaatttgaattatattttggatataactttcttcagctcgtctggagcatctttaacatggtccggtataggtaaaccgcagaagagagtaacccgtgatgttgataccattattttgttgtccggtgtctcggttttcttagctttccataaccggacctcccacaccgtagttagatacaaaatactccacacaacgtgtcactttcacattcattttactctttaggatttcaggctacgataaataaaataaatatttgcgttggtttaatccaatgcatgctaaca

SEQ ID NO: 42132 - DNA, 555 bp, Arabidopsis thaliana landsberg
tgattgtgttaatatattatgtgttttggaaaacaattattttgaaatatcatgatcttttaaagtggttcttaataagatattcataaacaagtacatggtaacagtaaaaaaaattggttacgttatgtaatagtacaatgttatattgatcgtcctaattttgttcttgaccaagtattaatttggtttatattatttacttagatccataaatttttgtgtggggattctaaatattataaaccaacactcaaattaaatatgattttatttgaggttgtacttttaattataaatttattttcatgttttatttaaataaatatattgttgtttttctaaaaatcaaatcataaattaacactacaacatgtattaaattaaaataatccgttaccatactttatattttaaattaaacttttgcgttaaatgttttgtgtgagtcagccattagaagaaaaatctgctacaaatagaaaacatacatgtcgaaatcgagaaaacactagtaagatattttcatggatttcccacttttaattcggtaga

SEQ ID NO: 42133 - DNA, 656 bp, Arabidopsis thaliana landsberg
cacttcaataaaaatttgtctttccatcaaccagtaatgtaatttttcaatttattatagtcagatattctaaccataatgtaatcctctcataatttttctttacaaactcgaagtttttggtgttatatcgttcgttaaatgtcgacaacatttataagcattgagcagtgttgacatatcatggcccacaaaataaaaggctattgtccaaatacgaaatagcccattaaatacggctacaaatttgtttttacacaaaagccacagtactgtagatctatctctaagaatattatccattaacgaccaaatttgtctcagaaaataaatggctcaacaacaaactaaatatcaacattttctcaagagacatattataactaaaaagaaatgaacaaaacacttgacattagtgtgttgaaaactaaaaaaaaaagaagaagaagaagacttatgaggattgttagacgaagatgtagcctctagaggatctttattttgtactcaacttggcaccttggtgtgtcaatttcgacacaacagttctatcctccaataaattgaaacacaccgaacattacacacacaaacatcacacactttatctcaatttatacgatggttaaatgttctagaggcagaaaatatttaaa

SEQ ID NO: 42134 - DNA, 467 bp, Arabidopsis thaliana landsberg
taatttctttgtcaaatgccgaaaaaacattcaacaaattatttggtactcgacaaagagccacattccggtagtgagaataacttcgatcggtactgtaccctgacgctgcttatataattaggcaagacgacaattttattattagacgttgggtccctcttatttctggccccccggtggcatggcactagggccggccttgaggacacggcacgacgggtggaggcctcagcgcggcctggccaggccacggcatggcggggggaggacacggcaaggccagtgcagtgttggcgagacgccgacgggggacgggggggaggccacagcgcacgcgtggatggccccgacgcggtgggtttctctgctatgacgttacggagaaactgttagaaaatcgctttccttctttcttggctcgggccctgatgaacaaagagagctctccacgttcatgtataaag

SEQ ID NO: 42135 - DNA, 1649 bp, Arabidopsis thaliana landsberg
aaaaatacaacctaaactagaaccacacacttataaccatacagaaaacaaaaaaaggaaacgagctctcacatgtttcttgtcccttttatttaatctcccttttttttgttgatttggatcttttgaactcttgtacaatatctttttcgttttaagtactttgaaggaatcagtttgatgtcttgcctaaaattttcttcttttatcccacattattacgcatggaactgagatttgattgacagtatatagagggacagtcattgtcataaaatgttcggtactagatgtttacaaaaggaaaacttgataacaacgggtcaatatgttggctgctttggattgctaaaacctgcttgcacaatttctttgtagactgccttttttccagcttttgtcaccttctttagctatgaaaatcaaatggtagaaaatttataggaattttactctataagttccagaatcaaagttgtttgacaaaaaaaaaagaaaaaaaaaaaaaaaaaaaaaaggttccagaatcaaagccagaaaattgttaccgtcaacagagtttcactgatggttttgtaaaacccttcattttatagctttcacaatctcagaacatttgttctttctgtagcaaaactacactacaaactttatcagagattctatacacatttgatataccatactcgctatcagtaatcaaatcaatagtaatgcaaaattaagattcatgcgtaaaaatagtgcaaaagcgaaaaaaactatgaaatttgagtctatagaagagggtcttgcgaggttgaataatattcgtatatatttgtacattacgtttgtttgttatcatccaaagatgaagaagatcttccttggagttaacttcctcagaatcagatgtggagcttttgtactataaacatcaaacccccagccattcattccactttttttttacaaattacaagtatgtaaaagatatttttcttataattttttgttgactaattttttatatatataatttcgctagtgtaaaggtactttgaaatatgaatttcctcgatgtcgaaagttatgtttgatcgttgaatttgatgcgaaaaagacgaggaagaatgatttgagggataagtaacaaaagtcagatattttgggcttttctagaattttatgtttgggcccaaattaaataacggatgatttaatggataagtaagtagcaaaagtcagattgtttgggtatctagaatcttaggtttgggccaaaattaaaacaacggatgattgatggaggtcagatatttttgggtctttctagaatcttaggtttgggtcaaaaattaaataacggaatatttgctagttgtaaaattatcgacttacaaaccacttaaaaacagacacgtctacatatacgcgtggcttgacctcgactccagttttttagttttccttataaataaccgcctccacaaaacgtggtcgcttaatagctttttttgtattctctccatttgcttaatctcattttcgtttcaccgtcgtctctctctatatcaaaatgggtcgccgtagctcaagaggtaaagtttctttctctttccgattatagatctatctgtccgattctattgactctggatgatgac

SEQ ID NO: 42136 - DNA, 289 bp, Arabidopsis thaliana landsberg
cccggtcaattatcaacctctaagcaccttttgaccgataaaacaaaaacctattgttatacctttgccttgagcattcaattccatctccttaaatgatgaacaatgggcatccataagtgtagccaaccatgataccttttaccatttggccatagcatgaagttcctccaccatcatcatcaagccacttgatcaaaaagcccagatcaacatatgtcttgataattctataatgatatgatccacgtccatgttatcacatggccttcttggttcatcaatctca

SEQ ID NO: 42137 - DNA, 207 bp, Arabidopsis thaliana landsberg
cttcgtcttggaaaacggtgtaccgagtagtttattgaaagtgtgaattgtgtggatggaaaaggctgtgaagagggtattgaggatatcttggtgctatacacaggtattacggagaaactaagtttggaatctgaactccaagggaagttcaaatctatggttgaaatccttcgtcaatgttgttgactagaacctcaggcacgt

SEQ ID NO: 42138 - DNA, 553 bp, Arabidopsis thaliana landsberg
  unsure (1)..(553): unsure at all n locations
gcattacatgaccgaaacgaacttttatataaaatgaccaatttatataaaatgaccatgacaattgaatcttaagtgaaagaacgaagctattttaacccaaacgatcacgtgaaaattttatttaatccaagacttatctacatcttaatagttgtcatttgctgatgtttcacatttagttatcaaattgttactctttgatcttttatttattggatcaaatccagttacgtataatttgtaaactccgacatgatcttcttcgaatacagttcacattccacagagaaaagatcaaacatgtttggtatctacattataataatacgtgacgtctatttataatttggtttttattatatagacgtcatatatagttgtcaaggatatattaattatgaacctggttgaataaacgaaaagaaccctaatcccaagagtttacttgtatgactnttattatgatgaaattaaacaataaatcataaacctataaatttagaattatcaaccaaaacttaagtcgtacgttcgagtatatagacgtcat

SEQ ID NO: 42139 - DNA, 1641 bp, Arabidopsis thaliana landsberg
ctcaaacatgcatacactaaaaaaagtaaagccacacacctaatttgtgggttccccatcaccttgtacatatatgttcataaattcatgtcgacatgtatgtagatgttgacatttgattcggtgtgttgtattggagatagttatattatttatacaaaagtatttaaatacatctatccaatttctttccttaaactggagaattgatctgtgcacgtatatttatctatgtttaattaagtgttgttactaacttactaaaagatatctatatcaatttgtatctgggagagttcttaattagaattagaaattgctgtaaaaaaaattagaattagaaacatatattcgatgtagaaatttctgatggaacaataataggcgggagatccaatggtcatgactcatgaatcatgatcacatgatgggagcctaattcctatatgatgggttattctcgatatatgcatgggaattagacgtataaataagaggacttttttttttttttttttttatttggggttttaaaataaaaaatagtcgtgaattttataaactttcatataacttgcatgtattttaaaggtttacaactttcctaagaagtctttttcgtcaaaagaagaattgtttttttttcttaacatccaagaagtatttatattttttatgggtactagttattgttataaaaatgatttaatgataaatgagttattgttatataaatgaaaaatgtataaaaattgtctctgacccgtttctccatagttaggtttttcattcttttgtattctacggctagttactataatttccttaaaataaaagatttcatgttgtaaaaagtaagaaaaacgcatcttttgaaataaacagatttataagggggagttttagccaaaaaaagaatgaaaatatgagtgtctttttttggctgatgtaggctcatcggggactgctccaactctctgacacttatcatttttaattattcaactatcaattgaattttatgggcttccctactttcaaatctaaacaattcaaaatcatacataaactaaagtatccatttttatatttaaatctaaacaaccaggaatataactttcttcacataacctagacggcagacagagctggtcagctggatgaacaaacaatcacaaagagttgattttagttctaagttaggtaattaaacagtcccacaacataagctattatttattatttagtgagctaattaagacaaaacgcataaatcgatatgcttacaaaatttttgttttacaaatccttaattagagaataggagtgaatgtttataaactttcatttctttaaatattttatgaaaactaaaaatatactgtattttaaagatgattttgtaaaagaaatcatgtaaacctaaatagaaacgcttaaaatcgcgtttgaaactatagaagaattgaacttctttatttataacgaaaaagagagaacatagtaaacatctaatcataaccaataaaagaaaggaaagacaaagtaaacgttggcactcagatacatcaaattaggaccgaccgttttggacatgagtctttgactttgacaaatcagaatcaattttaaccgggtatc

SEQ ID NO: 42140 - DNA, 643 bp, Arabidopsis thaliana landsberg
ccgtctctttccttctatataatccactacattccatgcatgcatgctttcaaatccaaacataacatctcaacattgaactcgtttgaaatctctaaacaagcgatagagctaaacaaaatggcaatgaggttctcatcacttactaaaatcgtgcttctctctgcagctatgttgcttttggtccacgcaagtgctcgcactttacagcaaactcagactctgcctctccaaggaggaggagctgctcctaccaaagatgagcctcatatggttaatgcccctcttgaggaccagaagaacttcatctacggcggtggaattggcggtgttgccggagttggtggattcatggggatgccaggtggtggaagtggtggctctggcatgactttcccactcccgagtgggacgccgcttcttggtggggctggtgggcttggtggtttgggtggtgcaatggggttccccggtggactcggtggtggactagtggtggtggtgttcaagttcaagcggtggttcccttaagacagatcatgatgattaattggtcctatgtagtatgtactcaagatgtttaggaggaagtgacgttttgtttcgttgtgttaagtttggatctttgatgtcgtttctgtgt

SEQ ID NO: 42141 - DNA, 536 bp, Arabidopsis thaliana landsberg
catatgtatctgattaatatttttaagacgaattagcttgtagatgcctttgcgtttatgtgtatgtctacgactacaatataacacttatccttttgtatgtatctcaggatgatgttggtcgtgcagtgttcatatccccaacaggtcaaaatcggttacaggtttgttctgtctctttcttcatcaccaatttatgtatcattcattgacacatacacattttgacctttttcttcatatagtcacatcactcttggctgcaaacaagtattagagcaggaaggaggatacgaattatatcacgtaggagatcatcgaggaatcaacaacattccgatctctatttcaatgcatctgatcaaaatgcagacaatacctcctctcctcgacttaccacagatgtaactaatggaatcatggtgacatagtaatacatatacgcagtataggtataacttttttgcatttgtgtggtggtatcatttcgcaggaggagctttcagattcagactcagaacatgagatggtaaaca

SEQ ID NO: 42142 - DNA, 570 bp, Arabidopsis thaliana landsberg
gaagttatactattattttcctatctcattttttttttggcaaggtatatttaatttattcattgcccgagctttattcattgcaagtttacaaatagagttagatttttttcctacgtgtgatttaatatatcgacaaaagtcatgtttctataaaaatatgtcttcttggcccgtctttgtgacgtgatatgacatttcatccatatgttaaataaagtatctaaaacataaaatagcacaaccttaatttaaacgtaaacttgattaaagatgctattaggtttggtgaactaatggaaaagtaattaaatcttttttctcattcacgagaatagactgattcctttctttctatgcatgtttctttcataatttcaaacattatgacctttttataactttccaacaaaagaaagttcgttggatttaaaattaattatttatgagatttactttctttttttcaaaaactcctttgttacaaaaattgataaattctctcattccacacttttgtacatgttttctaccgtaataatttgttatttcattacacatacattttct

SEQ ID NO: 42143 - DNA, 652 bp, Arabidopsis thaliana landsberg
  unsure (1)..(652): unsure at all n locations
gcattgcccgcatgccgggtttgtccaggcgcagaagaacgacagccgcatcacccgcgtttgtgctatgctgcgcaggacgaacctggacgagattccgcaatttctcaacgtgctgcgcggtgaaatgtcggtgatcggcccgcgtccgcatgttcctgaactggatcacatgtttcaggatctggtgcctcaatacccgcttcgcaatgtcgtcaagccgggtgtttccggtcttgcgcaaatctccggctgccgcggtgaaacannnnnnnnnnnnnnnnnnnnnnnnnnnnnnngtttcgacgtgttctattgccgcaacatcagtttgacgatggatctcaagctcattgccctgaccgtcatccgcgcgttgcggggtgacgagcgagcgtactgaccaaagcttcagaagagccgtcattcccgcgcgggcagggagtccggcgctttgaccgtcattgcgaggagcgtagcgacgaagcaatccagtgtgacgccgttcgatttggtggcgctggattgcggcaattccagcttgcgcgaaatttcccggactgcgggcattgatgaatcgatttgcggtcgggtatggtcccgtacgctgttttggcagaagcacaacataattacgaagggacatcatgct

SEQ ID NO: 42144 - DNA, 2316 bp, Arabidopsis thaliana landsberg
accgtaattacagagtatacatttattttcctatacctacaaggtataaattttcttaaaatgtattgttgtattaaaatttagatttaatacaatgtttccttgactaattaagctaattaagcacatttgaattagttgaactagcgaagtacattaaagagatttaaataatatttgggaccaatagtactattattaatttttggataaggtctttttacttttataatgtactactagagtgtataacggttgcttatgattgagtaaacattgtaattgctacagatcattccccattaactaatttttattattattactcaacaattcaccaccttttctattattattatccataacataatttatgtcatattattaattatcagctcttggttttctttttactactaatatgtagccaccttttttatataaagaattatcaattaacaatggactgaaagagtgtatttgaattttgaagcctatgaaaaggcgttgaggaaagaatcaagtttctcattggttttgcagctagttttgtatgtaaatgtagagaaacagaatttacactaagatgtgttacattgtacctaagtgtatgtttttttaaaaacacctttctggtaatttttaataacaatttgccatggaaaccacattatttgcaagatttatgacccgagatcaaggtgtttgacacggagagaggagcttttgttcttcactagttttttttttttttttttggttcttcatactagttaatccacacttttaaagatatgtgcaaatttttctttgtggaggaaagaaattttgttgaccttttcgtagataaatgagtgccatgttatgaggcgtatggtgcggtattagaagtaggagtgcaacaaaataaaactttggttgttgtgagtttgtaattcatatatgtttatggtacacgtaggaaaattatatgagagaatagatgtgaaaactctctagtttataaatggggtttaagcacttaacaagtggttaggacttacttaacataaactatttgttaacttttggagttttgaagggtatttctgaaaataacacaagagaataggtcatttagtaaaactattgctatataataccttgcatgtagccatttcctttcaccatacaccaacaaaaagaaaccccaaaaagaatcaaaaacataacacaaagttataagaaaatatgaagacagtaaagagtttacctattttagctatgctactcggtgtcataattgtagccgccgccatctccaccgtctccgttgagggccgtaaacatcacgtaaagaagattaaacccaaacaccgtcgtcattccaaaaacactcctaccggctctccggcacccgcaccttacccgtccaccaacgagggcgttttcaacattttctcctatggtgccaagggtgatggagtctctgacgactcaaaggtacgtccatatatttttaacatcaacttgatgcttcaaagaaaaagaaatattaatcttttatcaaaaaatatctaaattagtgtctcaattcttaatttacgtttgcgtttgatttttcgtttatatttagagtcaatgtttttttccaagtaaactcattacataaataatcatattaaccaaaactgttttggtaattgtacacgtaattaatcgccaaacacaagtggaagaaaacattcgtatgcatttgccgaatacattctgtccaaataattgatagtttatgaatttgagcttctcatgaaaataaaaacacaatttgtttatgaggcatttgtaattgagtgcgcaggcattggtcggagcgtggaaggcagcttgtaaagtggtcggagggaaagtggagattccggcagggaaacagtttttggtgaaggcagtgacactgcaagggccgtgtaaggaggagacggtggttcaaatagaaggaatcttagtggctccagagaagatagggtcatggcctaattcaagcttgtttcaatggcttaacttcaaatgggtcagtcatttgaccatccaaggctcagggactcttaacggtcgtggctctaactggtggaacttagacacttatcaaactcaggtacggacttaattcacaatgtaatactaggaatcactacactgatagtttaagatctttgtcatcattataattgcaatcaagatcttttgtgctatgtactttgaaagactaatgttttgtcatatgttcgtttgatatcttttcgaaattgtattatgagactttcaaatatgtattgg

SEQ ID NO: 42145 - DNA, 938 bp, Arabidopsis thaliana landsberg
caaaactagatggtcaattaacgggcaaagatatgtattctattgctacagcctacgcaaagattgatagctgatcactgatccgggacagagctgaaaggctatgactgctttaccaaagggaggggagagcggatccatcccattcattacaaagttctgtaaatgaagtcgaccgagaaatgagatgagacattttgatggaaaggaattgccgatatgacctatggcgagttcttacaggaaacaatggataattgaaaagaagggtgcaacctctaacaaggattacagtggtgtaatctaagggtggatacactcacgttcatggtcagtttattttacattctaaagagcatactgctatagggctatgactattggctctaaaactttcactggatataattacaacactggactattactatgtatacgaactagtttaaaagctaagaacaaaataagtttcatcgacctatgttactataagaaaacagctgtttaccgacttatgtcaatcatgtatacaagaatttaaataagtatatattaaggttcgatattcttatagtttgatgtcaaagtctcaaatcttttacatgacgatgattgatcaacatatacatataatagtgagaaaacggacgtttgattgataataaactagacgaaaaaatattatacattacaatttacacacgtaaaacttccatcagtttttaactacatatataactcacttaatacacatctccgtctgcatgtaaattcaaatctatatatgaacataacatacgtgtacgtgagtatacaaataagctaattaaccaaggtacgatctttaagctccttagctaaagccggcatgcagctagagctcctagcgaggccacctttttcaggcttggtggctccaacatcttcttagactcttt

SEQ ID NO: 42146 - DNA, 593 bp, Arabidopsis thaliana landsberg
gaggaggacaattagatggtatctaagtttttttttttttttctcttgagaatgttaaatgttagtgttatttttgtagttttggaaaattatatatgagctaagattagtttagaagtggtcaaaagaaacatagatttgaaatttcaactgaattttcaagatttcaaatagtcaatgaaacaaggaggtaattaagacaaattagcttatggggactcttttttgttattccttaaaattactctttttaaaatttaaaataactaatctcatttcgaactacattactcaaactagtaatctctaattcgacacgcaatttccaaatacttattagtagagagtcccacgtgattactttcttctccaccaaaacataaaacatgtcaagattaaatggtgtttgaaaattaaaagatcagttttcttaatcgtttacagttgtcaactctcatgtcctgaaatatataattctcatgtccaaaacaagaaaagctaacaacgacttcaaattaaatcagtcaatcaaaattagtcttcatttacctactaatttctttttatatatcccatgggtactctacgaaatc

SEQ ID NO: 42147 - DNA, 103 bp, Arabidopsis thaliana landsberg
ggggggggaaagccacgtagagtggcaggaatctgtgatgtgacattgtttcaagataaacatatatgatcatgaacaatgaacctagttggttacataaaca

SEQ ID NO: 42148 - DNA, 609 bp, Arabidopsis thaliana landsberg
ccttagtttatttcataacaaatactttcattaaatgtatttattttttcttttgagattaaaaaattaacatgggcaaaattttaaaataattttaatctaatattataaaaaaaacatggacaatccggcagatcctaaaatgcatggctgatggctcccttcgacgccacctaccaccatatatgaaatctcttccacctaactctccactcatcatcatttcgccatttttcttgactcctcttaaataaaattatatattacatttgaattacctttaacacactttttgtaaattactacagagtaataaaatagtacatgattactaagaaaaacaaaaaaattaaatcttaaattgcttagctaatgaaagtgacttattgatatacgttaatagatttttaataaattttatctatcaaaagaaatgcaacgagacaaactcaactaccagcctcattttatgtcgttaggctataataatgggaaaacaatatcgtacatgaaattcttaagatcataaacactaccgttcatgatcaaagatgacaacatgatgatgttagatttttgtttttaatatttaatacatcaaatattttc

SEQ ID NO: 42149 - DNA, 557 bp, Arabidopsis thaliana landsberg
tttgcacatctccaaaacatcacgattccactgcttcagctttacccgtaatattcctagcgtctctgggttctcaactcaccctgccaagacgacaccaacaaatctttaaaactggtatgtgttagccaggtcgcctcaaatctgaaaggacgtcaacttggattttctcttgtcactggacataattgcacataaagaggtgcgtgatctgacggggagaaagggagatgattaactactgcttcctgccatcttaatcgcaaatgggctgagcatagaactctatccaacctctgagcaatgtaagtctgttctgctcgacctcttctccatgtgtatttgtttcctttgaatcccatatcgatcaaggccaactcgttaatcgagctcccaaactctagagaatctaacgacaattgaccattaccacatgttcgctcatccaacctaacgatggtgttaaaatctcctccaatcaacacgttgtccatcaattctttggatacactctcgaggttgaccccatagaccacttcgtcgactcgccaaaggag

SEQ ID NO: 42150 - DNA, 170 bp, Arabidopsis thaliana landsberg
actgtttgttagtgtagactgaagatagtacaatgcttgttgcctttattggttattaagctgcaatattgcttatgcccacagagtcaaagttcttctacttattagagtatattgtaatcttagcgttgagatcgttagtgtgtttctatgtttattgttgttgttaa

SEQ ID NO: 42151 - DNA, 575 bp, Arabidopsis thaliana landsberg
aaattacgaacaacataaattaaggaattgcctttccaatgtgcatgcaaaaaatatgcatgcaacaaactgatatacgaactccgtgttcaagcataaaatcgtaaattttttagcataaataatacatgtgataggcataaaacacaataatcgaaaagaaaacacgaatcgaaggaggtagtcgctggagggcgtcgtcgacgacataagcacagatgtatgtcgtcattggagtcgcccgaactgcgccggatcggaggatgtcatgtgcgatcgtcgctgcgcgcaccttgcaccttccgtgacgtcgctcgaacctcatgccttgtgtgtcgttgtcgctactcgcacatcgaggggcaccgcttgctcgccggccgtggaagtgccaccgcctcggggcccctggaacgctgccgcttgcccgcacaagggcaccgtcgtcgctcgccctctagatcggggagccgttaccgccgacctgggaacgtcgcgtctactccggatcgaggaatcgcgccacgcacgtcgaggtcggggagcgcggcactggcgtgggtcaccgggtacga

SEQ ID NO: 42152 - DNA, 603 bp, Arabidopsis thaliana landsberg
gtgagaaatgggcaggaagctttagatttcttcatgttatcttcttctttgtgctaattcttcactgtcattgtggaacatctctctctggttcttctgatgtgaagcttcttttaggaaaaatcaagtcttcactacaaggaaacagtgagagcttactgttgtcttcttggaactcctctgttcctgtttgtcaatggagaggggtaaaatgggtattttcaaatgggtctcctcttcaatgtagtgacctctcttcaccacaatggactaatacctctctgttcaacgactcttctcttcaccttctctctcttcagcttccttctgctaatctcactggttcactccctagagagattggtgagttctctatgcttcaaagtgtgttcctcaacatcaattcattaagtgggtcaatccctcttgagcttggttacacttcttctctctctgatgttgatttgagtggtaatgccttagctggggttttgcctccatcgatttggaacctctgtgataagcttgtctctttcaagattcatggtaataacttgtctggggttttgcctgagcctgctttgccaaattcgacttgtggta

SEQ ID NO: 42153 - DNA, 587 bp, Arabidopsis thaliana landsberg
atttaattttttcttaggaataaccaaataaaaaggcaaattgttactgcgattgattgcagccactgaaagattttagttaatccaaagtgtgattggttaaaatagagttaattttagtacatccttaaaagtcaagtcactaatcaccccttaaaccttttaaatatgctccatgcgtaaaatcatttaaaaaaaaaaataagaagaatattttgaactaatttgtcgtttaaagtttttgtatatagattaagaaatcacaaaattttcatttaattttctcttttacatgaaattttacagaaaagcattattatttacaactaattcaaccatattaaaaacatacaataaaatataattagtcaaaaactgttaaataaatttaaacaaaacttttttcctaaaactacaaataaatttaaacagagagagtactacatataaatattggtttaaaacttattttctattaaatgcaattgtacacaaaggttgtttccacttctacttaatttatggaagattgaggaaaatgattgatttttcagcaaaaatatctggcaaacgtcttaatttttctt

SEQ ID NO: 42154 - DNA, 463 bp, Arabidopsis thaliana landsberg
  unsure (1)..(463): unsure at all n locations
aaaggatatacctgaggtaacaatgctgaagngagacacattagtcttttgagcagaggaagaaacagacccacatggagggtttgcattatcaaagcacttcaacaggggaccttctctctgagtggttggaagtgtaacaacattaccattagaaactaaaatttgagctacaaattctattcgctctgcagctgaatttcttagtttagaaatctccaaactctgtgcaccactactgaatcctgccgtggaagctctcactaccccagctgctgccatgaagacagcgaaaacagcatacttttccttagaagtctctagtaccttcgttcgcaaaaagagacatcttgttgatagaatttgaccgcatattacctgacacaacccactcaatcaaatgaagaatcatcagaccggaagtgacagagccactaggacccttgtcttttaaccaaatgcc

SEQ ID NO: 42155 - DNA, 1127 bp, Arabidopsis thaliana landsberg
ttatgattccaggaagattgaattcatttgacgaccatccgcgagagaaactcttgtcctttttcaaaccgcgtgtataaggacttagataaatcccttgtcaaaacaacaatttggtccatgaacccaaaaaagggaaggcagcaattagcatcctcaagagcaatggcttctccttaactctccaccgccgagtagcctttctttcaaactgttgttttggacgaacattctcgtttaatagattgtcatttctaatctcccttagcgtatctagatcatcccatcctccatatccagtacccatgctgttagaatcatcatctcctactatccatgacttgtatcctcccttatctacaccacccctcatgtttcctccttgcctagctttccttgttcttccactacttacactcgcagatctcgaaaatgtatctcttctacttcttttcatagacctaatgcttggcctgctccaaactttactaaccacaagagacaacacagattgcactaaaggaactgctaatgccattacacccgcgtttgaatctgttccaagaagcaaagatatgccaattggtgcaagcatccaactcaatgttctaaatacctgcaattaaaacaaaacctctaaaattggctaaacagagctaacaactaaacataaaccattgtgaatctaaagtgagcaactttaaagtgagattcaacattacagttcttaaattccaaaaagaagaagtaatacctcaaaaaccatagaccagtcttcttcttcttcattcatccaatcatcgttgtcgtcatcgtcatcatcatcatcaagccaccaaggcctcttctttttacggtttccgaactcaaacggagcaaaaccttcgtcgcggaagagctcctcctcccagctaggaccgcgggaggcgcggcaatcaaaggaaccgcggctcacgatatttgggcagagatcaaaatcgcagtttagagaacagaatctgcctctgacgacgcaagaagaaagctgaagatacagcagattcgccatccacaaactgatgattattagcgtttacattcaacacattccataagaacaaaactggagaacgaacagaaaaatcaat

SEQ ID NO: 42156 - DNA, 175 bp, Arabidopsis thaliana landsberg
gctctataggccagatgaatcgtttgggggcaggaccagcaatttggctagaaggcccgcttcgagaatgatactgaccttcgtattgagaggccgattgcttgggggggcctcatcttcttcgcgcagggacttagcatgagccttatcatgctccttctgattgtggactgca

SEQ ID NO: 42157 - DNA, 741 bp, Arabidopsis thaliana landsberg
gaggatccccaaaatcatttaagattattaatgactaattaaaatccataattgtactatactttcttaactaaatgtgtgtgtgtgtgtgttttcttttgagagtttagctacgaagatgtgttggttccggtaggatttaaagcggtgtccgttgaggagaacccagactccattcccactcgtaaggtactgtgcgagatgacatatatgttatatcaaaatataagtcgatattttattttggtatataaacatgcttgtgagttgtgttttattattagttgcatgttcaaatcgcattataatgataattccttcggatgtattataacagggcaaagagaagcttgcgaggtggaagaagattaactgattcaagggagagtcagagagatcatatcttactgtttagtaagatcagtgttatatatgtgtgtaaaatcctaatctattaagaataaactgagtatcatatactctatgtaagatatatgtgtttaaaggtgaatgcttatcaggccgtgaccagcgtctacgtacgccacgacggtggcgagtctctccccttgttgttatgtcacatgttccttatctgtatctgtgttatattgtgtttcagtttaataaagtttctcctttccaattagagttttttactctattgattggtgtggagttttgtttctaaagaattgtctttgccagctttcgagtttcttttccttatcgacgtgatat

SEQ ID NO: 42158 - DNA, 603 bp, Arabidopsis thaliana landsberg
tttggaccaagttctttgtatgttaaatagtagttaataaatcaggctatatcaattctttaatcatctacagtatatttatgcacgcttttgaattaacatataggttgtgacacaacactggtttggtattataacaaaatactagacttataaatctcggtcagtcatatcacatcaagtttattatataggccctatttttttctcacgcgctgtgatcagattcagcgatcaaaaaagtagttgtttaacacacaattacgttgaaagtttgtaaagagttatatggagaggagtcgctcaattctaaaacagcgacctataagaaatatacacgcgtcgccaaaaataacagcgactcaaaatcttcactagtgacgtcgccggcgttcatactgagcgattatttttgtatctccgttataatttttgcctttgtcggagtcgttgtcgctgtcgtagcgattaataaacgaacaggccatagtattaacttcaggactagtgaaaattttgtgtcatagttctgttaaataatgtaaaatactaagccataagtaaaagtagtttatcccaactctttttattaataatggatat

SEQ ID NO: 42159 - DNA, 519 bp, Arabidopsis thaliana landsberg
  unsure (1)..(519): unsure at all n locations
aagaattttcgaaattcaagggtaatttacttaatctgggttttgtcgttcaatcgtgtattttcgttagttctgcgtagcactaaacatgattctgatccaaactcttttttattttatatnnnnnnnnnnnnnnnnnnnnnnnacataagcccaaaaagcacgaaaacaaaagacaacagtaaaagagagtctgagagattggtcgggagtaagaaagttttaattgtctcctgtctcctgaatcgcggccacttcgccgtcaaaaagatctcagagattctcattgggccgccattgatgcacccaaccactctctctctgagacataacgtaaatgttttgtctggtttttatatcttccttaatcacacggagaagaaacttgaaataacaaatcttgctttggtttgaagaaaaatcaaatcaaacccgagacctaattcctcgtcggctatcagaatttgacttcttggtgtggatcattgcttcttaacntagacaaggtacgaactttta

SEQ ID NO: 42160 - DNA, 844 bp, Arabidopsis thaliana landsberg
tagttataaatatgaatcaaatacattttagttctagaagaaaaaaccagatctataaagtttgttattaaaagatagagagagaggagggatgtagtaggccaataggcaaatcagagaatcacaaatggtatctggtcaagaagattcctggttaaaactttcatctctctgtttcctttttctttctttgttggattcattaatttgacatatctctatcatcacactgattctctttctcccagtttgtctgcagatgcatgtgtgtaatctagggtatatgtttttgtccatttggtttcataaggcaataaagatccagctatttactacttgtggtatagattttgactgttgaattttcagatctgatgtgtttcgtttgatccgattcggaaaatttatgtttcgttgacattttggagtttagttggaagaagagtgagagtcgctggaggcagcggttcatcgatctcttcctgtgaacacattaaaaatgtaaaagcatgaatagatcgataaacctctgcatccagcgtttgcctcttgtatctttcttattgacttgaatctttttgtttattggtttttgaaagaagaaaaaagtgagggaaaacagagtcaagtccgattacttttctgggaaagctgaggattttgtgttcttagagagcagatgaagaggtgactgttgtttctggtgagaattcgacctctttagtttgtttgttttttcagttaatgaagtgctcgttattgaagtgtgtagttgactgataagcgccttagctttatcttaatgtttatcaagtagatttggcgctggataattaaaaagaag

SEQ ID NO: 42161 - DNA, 550 bp, Arabidopsis thaliana landsberg
  unsure (1)..(550): unsure at all n locations
agctgttagcgatgggtctcgcatgcagcgctgtagcacatgcggccttatcgcgctgccatgcactgttgcatgggcgtgttcgctgtgtggtgaagagacacaaccggagcatcaggacgcaggaaaacagcgcctggcgtgtgctgccatgcattgcggcatggaaagttcgtgtgctgccgagtcacaaccaggatgcagggatgcgcgcgaccgacacagctgcaatgttcgaggcacacgcgcgctccctttcacaaacttcctggtgcagtgacgtgtcctggagcagatgcatcaaaaggacacggcgaatccgagctgctacagccacgtggctgcagctcttttccccgacccgtgccccacagtttccagcttccgnnnnnnnnnnnnnnnnnnnnnnnnnnnnnnnnnnnnnnnnnnnnnnnnnnnnnnnnnnnntgcaggccatcgacttactctgattctgacatgagggtgcttccacctgtactgctgccaccaccacccattggcatcatgccacccatcatcatggggttca

SEQ ID NO: 42162 - DNA, 4937 bp, Arabidopsis thaliana landsberg
gtaggttttggtttctcaccacagcttcttcaccaggtttgacaacaggttctgctgcagcttattgccggcagaccaagaactgatctgaattctcggtcggtgaatccacagaccgaactcgcggtggagccgacattgacctaaaagtctccgaatatcgaaaatgccttacttcacttaaaaacacactggatcacgacgactaatgaattgcaattccccaaaagaaaaaatctcaaaccaattccaaaagatttacaccaatttcgataaaccctagaaagaaaggacctgcatttacaaacttaaattaaggtcgtcacctaaacttcttctagcgaaatcccaaagtaggatcacgggaatgagtaaggtttacacattcaaaagaaagtgaagatacatacaaaagactaatctttggaaatttaatgagaaaatccttattcttttttttttacttcggcgaacccaaaaaacaaaaataaagagacgacttttccgatcgagaacgataggaatccggagcgagtaaagagaagagtaccaaggaagagttgttgtagttagccagtcacagtttgacacgtcatcgtttggtttacccgacccggaaaaaccccgggttaaaatctaattagccagtaaggactgtttcaagtttcaaaactatgggtcttcttaactcttaacccgacaaagccaaactaaaaattagttgcttgcttattgcttaatgattactagacagattaggaatgttttgtcttctatcaaaaccatgccaagacaagagatttaattacaccataaagaaaacttcttctttcgtactcgagtccccacattttgtgtatttacgtagatttcacatagttttgaataatgacatatttttcccaaaaaagaataattacatatattcccgatattttgtgtttattacagatatttcctatagatttgtttattgcaatcgctccttaaatttctgtttattacatttgtttccattaatttttatttattacaaatgtgccctatatttccagttggttctttgcagcagatgcatcatcattggctttggcataaagggtaaatataaacttaatagtacttgcttcgacaattctgtagactaccgataacccgagaaaaggtaactgcattatccatgaaagtgtagcatcagtttgagtacaaaagagaatacaaactcataaagaaaacagtcaagacctgacgttcatgggagttgagctcttctaagactagtgggttatgcttaggaatcatgagatggatttggcacgagcatttggatcctcctttgactcgagaaacatcatgaaaacataaccgagagaccagaggagaatgtattgaaatggaacccaagagaggcatgccaatagagacatgatactcccaacatactgtggatctctaatgactccaaatgggaactctgtaacccatggtatgttcttcccgaatcgaacaccgtaataagtcccagcttcacctaacaattggtataccctgcaaagatgtgaccttttaagttaacaaaactttacaacaagagagctcagttacagaacatagaagtgtccaccatatcaaacatcactcaatatccattttgttgggacaaaaacacaacttcacctagcagtcaaagatgtgaccttcaagtatcaaactttcacaaaactaaaccagattcgatgattaaaacttgaaaaaagaaaagacaaaactttcacaacgtctacagatgcaatttcaaactaaaaatggatttgactaaagatctttattatcatcgatctcatgccattcgattcgattacgaattcaacaaattgagagaggaacggaaacaaaaagattggacctgaagttgagaaactggccaaaggccatgagaggccagaagtagagcggagacggccaggagagagaagcaacggagaagagagaaaggagttgagcagccttgagcacgtgagaaacacgtgccattaccgtcgatgggtctctttctcggccgcagagattgacccatgactgaggattcgtccacagccaccagtagaacggaaatggcaacagaactccgatcgcggccaataatcccatttcgctttctttttttcttgctctgtttttgctgattttcccaagaaaaactgtctcactcaaacgacttttattgggtctttaaatgggcctcaatagatttgtttggcccaagggtatctaaatagccatcaacagatttatttggcccaagggtctctaaataggcctcaacatatttcttttgcccaatacaatcatatgctacacatcttcaaatcaaactaaaagtaagttttaattgctttttcttttttcttttttttttgtattcaagggctacaccaacatatctttttttgtattatgtagtgggtttacgatcatcgtctagatagatatattggatatctcaagatcaactatgcctaagtgtctgctaacaatacatcgcacggatcagattttcaagtgatcttctacttctacttccgcttcagctttagctttcgctgcagctttagaattcttttcctttgctaggcgtttggctccaagttcctcaatcctcttcatcccagttttgaacatcatctaaaagctcaggtttggcctctcacaaagtactcatgtatattcacgttgttgacttgactataacgttggtttttattgtataattctagaaaatgacatgatttcattacctattctgttgcacctttgtcaatataggagtatctttctgcattgagttttacattttatgaaatgcttgctgggttcttgataactttttgtaatactgtcatattgattatgttctcctttgttgacatttcaaggacctctctctctctctctctctttttgtttttctacattttggaacgcatgttactctgcagtctgaaaccatccaagagctgacaacggaaaatgctttgcagcgttgggaatataataccacacatacaagcataagctcagagcaagtctgcaaagaccgccagtagccgcaaaaggtaaagaccgccagtttcagaggattctgatgcacggatatagtaatattgacgagtaaacgtttgatgtttttatttcttataacgaatcatattataactcgaagcatttttatgtcatgtactcatcatgttccttgtcactgaaggcagcaccatcgttttgaatcatacttaggatctgaacgctaaatttcgtgaattcatatacgttcctcttgtgttgatgtaaatatctgtctttgagtgattgatgtttgagaataattaaaataatttcatggatatttactatttagtgcttttgaattatttgtagcaaatttcttgttttctttgttgcaaataattgcatgtatacttttgaacaaaatgaaataaaataaaattgcatggctacttctctttacttatttgaaggttggtgataaaaaatcgtcaaaaacagaaaggatgtcacaaagagaggattccgatccatcaaagattatcaatacactaacggcaaatacatgccgagtgatccaaggaaaagtagaacttggtttgacaccaaaaatcccatgaacagagtccacggcattgaagctttgataatccatgaaatagattgtagtataaattctatggaaagcattttagactatgtaagagttttgttgttgttgttgttgttgttgttgttgttgttgttgttgttgttgttgttgttgttgttgttgttgttgttgttgatagactattgatgataataattaatggttcaaatcaaacaccaaaactctgtaagggcaacacaacaaaagacagtggagattcttttactctgactcactctctttattttgatttttgaataacgaaatatttcagaaatctgcgtgcacatgacattgttggtccacatacagtacccacttatgactttatcgatcacaaacataaagaatgggacatcccgtagagtttttgttttcttacgaacttgacattacatttgtcgtaataataccagaatcgttatggatctttctataccataatactcacaagtttttgtcgatcgaatttgaaccaaaatatccatttgcaatcttttgagattcgtgtacgttttgccaaacagctagctatagtgtccttttcaaactcgagtgtgtatgcaaagcaatgctgtttttataatagagtcatttgaacataatttcatatgctaaaatatttgtttaatgtgcaaaagactacaaaagggggtgggtgggatatgtgcatattaaagatatggggcaaaagtacaaaatctataatttatgcataactcccgaagcagtcaaagcggatcttgaacacttcgcctcccaactcgatcgttaactaatttcttacattgaatctcgttaacaaactaacaaatctcttctttgagttatcctaactatccaattattcaatcctaacttaaaaagtaaacgactaggaccaaaaaaaaaaaaaaaaaaaagtctaatcttaacatcagtatgtgatccactaccaaaagcaagtaacatcatcattataaacaacattatcatttcctttctttcttttctaattacaacctttttttgtcgttttatatttttgtcaaatccaagcactgtaaaataataacctttttctttctctatatctaattattacgcagtttgaacatccgattttctatgaaaatcaaatatttttgagaaaaaacgtgaactatataattctttaattctcaaagtaaactataaagaaataaagcaaactaataacagacattttccgtctagacattct

SEQ ID NO: 42163 - DNA, 1586 bp, Arabidopsis thaliana landsberg
gttagtgttattttctcaaaaaaaaagtatagatagtgttcaaagttcttagcgatcttcatagttagtttctcataggccttgaactatttgggcttaccgtttatgttcacaaataatagtgattttttaaaaaatagtaatcatataattggtgcttacataaaaaaaaatgtttgtgaaatattagagtcctagacgataaacacaaacccaataatatctagtagctaaccatcattttcgtcagcgttgaaatgaataaagttttaatagatctaactagtagtaactagagcaaaaaaagtaaaacatttctaaatcttgttcacttaagaaaaaacttcattggttgtgtagaaatttgtttatccaactaaaccaaacacataacatgaactattatggcatcaaattacctccgacggcccatggtccattttagaacacatacatatgcataacttatgcagcataagtaacaaatatgtgaatgatattagattatcatttcattacagtgagaggaatgaaccatacattgcaacttttgcaactataaaacagaggtcccgtgtccaatccaatgaacaaataccaaaagatgtgtaaagtaaaataaagttgagattttgcattaaaaaggattgttctttttgttgaatcagaaaaaatgttggtttaggtctttgaaacaagtcttttggaagatgaagaaaatggaagtaaggacggcgacatattcaaagcaattattttcattactaattttttaattttgctttctttcttgtgttccgcaacaacaacaacaatggacgatgacccaatatctctccttgaatccagccattaatttgaaaatttcttgatttcttctcctttatcgatccatctcctgaaaagagattcaacatttatcaatacccttgttgattctattgtatcttcttcaatatccactttccatttccgatttcgacgactttctatctatctcccatgtcgccgccgacctgacctctcttacttctctccttgaggattttcgcttttgcctcaatttttgaatcatagaggatctacaatgagcaagttcggcgacttgaatcccgccttctctggtgcgggtcgaagcagcagcaataataaccctgacgcgagtttcaattctgcgccttttccacggtcatcttctggtctctctaagcctagattctctaaggtgagaaggcaagtaaagtctcagaatttgaagcctttggggacttctgattccttaccgggtcagagttttaacccgtttcacttccgtggatctttttcctgtgatccaactcctagtgagatcggatttggacggagcagcagcaatgagggttttgtatttggtggatcatctcatgttgataaattgcaatctgatgaagagattgggataagagttatggaagagatggaaaggttgaaaattgagagtgaaggaaaggcttcaaggcttcctgaagatatgcagaatttgaattctagcttcagttttggtgtaaagaagggaagcaataactccgtttttgcaactgtggaac

SEQ ID NO: 42164 - DNA, 464 bp, Arabidopsis thaliana landsberg
ccattaagctttcgatgtggacttatcctcagaaacctagataaggggtccatgtcatgggaccatactatcctcgatggacccaacatatccttttgttatgagttagaattacacttagctaccctcacttcttaactccttcaggggattgggacctagaggtcctagttctttgacgcccttggagtatgaggtcggaaaccctaggagcctcggggcctacaaaggggcccaagtggctaagtgtcatagtgcccagaggatggactacaccatgcaccttttccttgtgtacctgaaacatgagaagctcggggacctatacttaaagtgtccaggacacgagggccccgaggatttatactacaagtgtccaaaatacgaggagctagaacttatctgataggtcattggctattggattccgtgagaattagctcataagtgccggagcacgaggg

SEQ ID NO: 42165 - DNA, 739 bp, Arabidopsis thaliana landsberg
cattagatgagagaagaagacgacaactaagagaaaaggaggatgacttagctgatagattgaaagaagaggaagaggttgctgaggcgaagaggagtgccgaggagcaaaatttgcagcaacagcaattagatgccttaagaatcctatcgggacaggcagctattggaagcgaaacggttcagacatcacctattgaaaatgatcacaaggcaactctccaaactgtcggtgaatctgccaatgagcaccatgcagcaggtaaggagtttatattctctctgtcttattctcattatcgtctttctcattttcctctgtctctctttctaatgctctcattgccaattgcagattttgaagaaaatggttctggtaatgaatcgatggctatcgataataatagtggatcagaggcacatgctccctcaaagaaattaggatttgggcttgtgggatccggaaagcgaacttgctgtgccttctgttttctatgaggaggatgaagatgaagcacgtaaggctaaaaagatgaaacctttggttcctatagattactcaaccgaggatcaagaggctgtggcccatggtggctcagggaatacaccacctcatttggctttagccgctgaatttgcaaaacgaatttcgagtaccaatccccaggaagagacgatagaacccgaggaacagaggaaaagacgttcacatgataaggcaagccaccgggacagggaaa

SEQ ID NO: 42166 - DNA, 414 bp, Arabidopsis thaliana landsberg
ttgcgtccattgtcgagaaccttagtttcgcgtgccgtcgttaactactcgtctgcgccgttcaatgcgacgattccggctgcgaaaccccagttatgttccttcttcggtggatcgatgactcatttgaggttaccatggattccaatggctaaccattttcatagcttaagcttgactgatactcggctcccgaagagacgacccatgactcatcccaagaggaaaagatccaaattgaaacctccaggttcgctattttgtgtttgatggttgattttgagcttcatttttagtctggggttgtaaaaattgatgctttgtttgtgaaattagagatgaatgatgtgtgattcagaatggagttagtgcaatcttcttaggcgggtgttgttaatgctgttttcaaattct

SEQ ID NO: 42167 - DNA, 456 bp, Arabidopsis thaliana landsberg
taaaacgtttttctttaactataccactagtacactacttcgattcattttctatccttaattaaattaattttatttgttgaataaaaataaataaagaagctagtttcgtatttttttttttaattttatattttgggcaacgaagtttcgtaactaaaataatttatacaaagagataaatttttgaccaaaaataaatattttatttttctattttaatcttttgggttcattatttcctccgatacaacattctgaggagtgagaaatctccggcaccgaggaacaaagatggcttcttttacaaccaacagtgtcgctcttcgcgcttcagttctcgcaaaccctagactacctactccgatcatccgtccccgtctctctcttccccttaaactctctttcaatctctccctccataacgctagaaccatcgtatcctccgccgttacc

SEQ ID NO: 42168 - DNA, 1897 bp, Arabidopsis thaliana landsberg
tacactctactctttgtattcaactttttctaagaaagtaaactgaaatgcattttttgttgatgctttttagtttcggtagagagggggcgaattaaccggtcgggtcggattcgtaggcctactgagataaaagattgaatgtgttgaggtacatgtacatattaattacatttgcatacacaagacgttttatgaacttccccgcctcaataattaacttggggtataatagcaaattaaatttaagggaaacccatattaatctgaaatggcccttataagaaaacaaaaatctcaatttgataccctaatttgttttgtttttatcggattaaaataaaagaaaacgaaattgttctttgaggaatttgttttgcccttttataagattaaaccccaaatcttcaaagacgctactctctaattcttaagataatctccagaatcacgaatctatctctctcgtttctctctaattcaattttaatggattcgcaagtccagttctttgaaggggtcgaaaaaagaattgaattcgattttgcaggaacgaatctccgcgatgaactcaaccgagccgtcttggagaagatcgtcaaacctgtggagtgtgtgatcgaaggggttctttccggagatcacgtagactcgtatctactttcggcgtcttctctatttgtttatgatgatttggtaatcataaaaacttgcggtgctaccaaaatcttcgagtgcatcaatgggattgttgctgcggtggttggaataagctaagatccatcaaatatacccgtgggtcttttttccgacccgatttgcagccatacccgcatcagcgaccttgtgacgagaaagatgtgttaggctcgtccctaaatcatagttctcttggaggaattcaagagaagactttgggtacgactcaacaatggtttatcatgaatgtccctttgtcttcttcatctaccaccggcaaaaaactaccaacgattgagatgtgcatgagagaattggatagagagaaggctgcacaatactacaaagatagagacgacggcagaaccatgattgataagtcaggtatataatcataccttgattaatgtttcttgactgatttctgcttattgagtctcctgagcttatctttttacgtttcttgtgtttcgctctttgctaaattgtaaattgttgccgtgaaaagtagtatagttctctagtttctttctttctgactttcatattaacttatcagaattgtgtgacttttctcttttaggtgttgggcaaattttcccagaggctactgttcatgcccatgagttcgagccctttgggttttctatgaacactgtagaaggatttgcaatttcgaccattcatgtgtccccacagccagaatcaagttatgctagtttcgaagcagttgggtatgatatcagcacagatgagaagctgaacttggtgattgaaagggtcttgagctgcttcagaccaaagcaatttactgtggctatctacaatggtggagagatttacccccaacttcagggctacaactgtacggaaaaaatcattctcccacttggcccaggtggtccagtctccttttttacattcttggctgtctaagtctctggttctttagttaggattcttaggatttttttggtttattctggagtaattcttagtcttctgttttgtttatgacaatttgttttttgaaaatatataaatggaagattttgacacattgagccgtttacattacagcccacattctgtagattcaaagaattaaaagtaattgcaggctgcagagcatgacataatatgattaagttatgaacaaatcatacgaaactgaacaagtgaccaatgagacaaaacg

SEQ ID NO: 42169 - DNA, 454 bp, Arabidopsis thaliana landsberg
aacgtggggcgtggatctaactcgctgagataaaaaggcacaacggtctgttgtgttggcgcgtgaagaatttgatgagctgtctattttttttttaacagtcacggcaacgcggttccgtgaaggaaacggccaagatgcgcagacttgtatttgttgggagtggggaccatttcttttgcacatggttcgtgtaacggctaatgttaaaatgagctttttcaaatacgtcgacgtttgttgagaaaaaaagcctagtctttgatttctcgaagctatgttgtttttaaaatgaaaaagcaaatttaagaagaatggattatactcatcttttattttattttattggaactatagaagattgaaatgatattgaaaacattaaatataagaaaaactgtggacattaagaaaaaaacattttttcaacaattaatttgagttgattaggaca

SEQ ID NO: 42170 - DNA, 550 bp, Arabidopsis thaliana landsberg
tgtaacgaatgacctcctgcaactatgggtccctgaagtactagcaggagtgtcactccaaccatgcgccgaaccgtgttccagaacttcaacatctttctccatgcagtgtgctgcttgagcagaactagaatgagcatcagctgatttggcattgttttggatgccctgtagcgcgagggcaacaaaaggtccgaatccaggtggaattgagggttcaggatccccgccgagtgtggccatgatgcactctgttcccatcattgctgcatcggaggacaacgctttgatcagcaaaccgagagatccgctgtgaaactaagatgaactttacataaaaaaagagcaaaacgtatacaaatgcctactgttaacctaccaaggcaaccaataaacctcgatttaggtatatgagcaaattacagtagggaacataatcgcatccatattgttccaaaccaaaaatacagaaatgatgcaacgttttgcctgttgtgctagttgcagacagggtacagctcagctgcatttgcacaccgtcgtcctactt

SEQ ID NO: 42171 - DNA, 548 bp, Arabidopsis thaliana landsberg
  unsure (1)..(548): unsure at all n locations
acgcgtcttatttactactttataataatacctttaatggcatcacggggctggttgcccactagctgatccaccatctcgccgttgcggaagaagatcatcgtgggaatacctctaaccttgtattgctggggagcattcgggctctcgtccacgttcactttcaccactttgatcttgttttggtattcggtggccaatccgtccaacacgggaccgagtgctttgcagggtccgcaccattcggcccagaaatccaccagcactgccccgggatgtttcaaaacttcggcttcgaaagtttcatcgctggcttcgaaaatgaattggctcataggattttccctcgcagttatcagtgaaatataagcttacagtaatatcatatcttagttgagtgtaaacctaagggtntgttgcgcgcggcgccatttttctatggaaagcttttgggaggggcgtggacgattcccttccctttcgctaagctattaggcagatgctaaaattattcgccacgaatccctattttctcaatccggtgatcg

SEQ ID NO: 42172 - DNA, 1170 bp, Arabidopsis thaliana landsberg
acaccaatcaacgtcactaacgtccgcaaaaaatcacaaagttagctggccatgtttctaagatatgcataatgcttaacaaagaaacactaaaccaaacgaatgttagaatttatctttcgtgagctaaactatattttcaagtgaaaaaatctgaacaaacaagagtgctaaacccctaggtggaacaaacttaagttggcagatgttccatagaaacgggtggaagacatgtacaattgttttgagtttcaaatggaagtaagtatgctgaactggaccaagtgcgtgttagttataacatatttgaacggtttcaaacttttaccagaacagagtagtgatccgtcatcattgcagttaggccaaccacagatgcagtgccttccggaagagacaagtaagcctaaagtacagatggcataatataagtggaaaatgtttagacaaagatcacaatacaaatcaaggaaggaggagaacatgctgaccttattcatagtgtataaggcctctaccatttctgcagaacggctatgtacaaatccagcaacctacaaccatagatgaaaaaacaccataaatattgctggttctgcaaaccaaagtgattataaaaatgacattcccatacccataacatttggcggaaactatggcagcaatttattacccttcttttggaataatgtaatgttttactacaaatcatataccaaatcgtaaataatgtctattttgctaattgaactaacctttttccattcttttccgaatttgcggtatccttcataaaagcgctctaactcttccttgctccactgaggacctaacatgtccgacaacttcctcttctgcaagtaaggagcactataagatatgcttggagaccagctgataaaattggtcgcagaataacaacaaacaaatttgctcgcacattggagacaagggtaaaacaatgtctcctccttgaaataggaattgaaacagaaacaacaacttaaacgtagaaaatatttgagtaaatgttgaaacaagaacaaagaaaggttattacttggatcaatcaagaaacaaaaagtctagcaaataactaggtatatccttctacagcgaaactatgctaaatttcccaatcaaatctcaggctgagcaatacataaccct

SEQ ID NO: 42173 - DNA, 979 bp, Arabidopsis thaliana landsberg
ttctttgggtccgagatagaattcaataaactatttgtgttataataattattcagcctagtgttggatttagacccaaacaaaaataacatcatccctaccaaaaatcataaacttagaataagaaattcaatgttcccatgtccaatagttttaataaaaacgtataagatgtgagttgatcgatataaaaaagcaatatagatattggaactttgtagacattattacaataattaatccaattttttaagtctgtacatcaaggcattgcgtatgagtggtgccattgcaatccatataagctacattctattgtttctcaattttcaactatttaaatagatacccaatagctattatattaaattgacactgagaagtgcgtgatgattcttgatttgttatgtggatcttttctttggttgacaacaacaacaagaaaaaaaaaatttaaacaataatttttttgtgtaaaattttaaaaatgcaaacatctcataatttgctttaaagggaaactactcgtttaaaataaaaggaaaggtaactttggtaatggaaacattttgttatataatttgagaaatactactagtattcaataattcaccggaaagtggagagagccagcagagcagattcaattataaattatgaaaaaattagaatgattagttatgtgagtatatataatttaaatatattgacaaagagaagacgagatcaattctcgctaacaaacttgtaccaactgttgcattcttatgtcaccaaaacgaagaccttatcttcattcttacatttcttatatattgtaatcagtgttgctcgacaactcacgaggcgtgtaggcgtgtgttatctaaaaaactgtagttatggaagacaaccaaagcagtcattagatacactggttttagattacacctagctaagttatggcctatgggttagttgtgaataaaaattgggtttg

SEQ ID NO: 42174 - DNA, 998 bp, Arabidopsis thaliana landsberg
cttgatgttattacagatgtttagcgagtggagcacagatgtttatgcagaagccactgaaactatctgatgtttagaaactgaaatgccatcttttaaattgcagaagctgaaggtagatctgcttagactcaaatgctcatagaatttttttttttttttttttgggttctctaatataagagaaaattaaagatgtattcctaaacaatgacaaagattgtcttgatctttaaagatttgtggagaagagataaaagcccaataaggatctctctgagtagattagttttatgaattagaaatgttctttttggtcagattgcaagaaatctagaattcattattggcagtttagctttgtgggccctgtttaatcgtttttgggcccattatatttgatcagacaattatttcaacatttaattcccaagtcttcgcatggacttccaagatcgcctttaacgttgaaaagctacaaatattgaaaacaagactatgatgacgtaatcaaggtgcatctgcttcttcttctatcgtgtttatcaaaacacttaccctccaaaaaaagttaaatcaattgtcggacgatagaaaacataaacatgatctaacgctttaaaacatgttctcacttttgttaaccaaaaaaaaaaaaaaacaagcctagtccttatcttcttcttgtcacatcgattaagtattaagaaatcaattactaaagtgtttgttatggggatggagcaattgcaaagtttagtttaattaatctatgttttgccaatatgtcaacgcaaataaaagaattgagacgaaagtcattatatgattggagattgtattacgtatacgtcgcattctgaaatatttcacaatctttgatttttcaaattcgaatcaacataggatccaatctttctttacatgtccctcttgctctataatatatttttatgtgtgtatatagatgcatacacaaacaggtgaagcaaaaaaca

SEQ ID NO: 42175 - DNA, 100 bp, Arabidopsis thaliana landsberg
taatgtttttatcgctacataataattcataagctcaaattgagtcctccataaaaacacattataaccagataatagagagaacttattcttcacagat

SEQ ID NO: 42176 - DNA, 475 bp, Arabidopsis thaliana landsberg
aagataacggttttggatacattaattgaatttaggaagatataagataccttcatcttatttaaaaatgtaccttctaccttcgttttatttaatgttttaagtttaaattcaaaattattattattatttttgtttgtttttgatctttgtaatgtgcgatatgttttcttattagttgaataagtttaattagagaaaaaactatgattaaaatttgagattatgaaaattgaatattgggtttacaaaatttaatttcactgagtgactcagtctgagtccatgtattattattaacaatcttttatttttactaatattacaagtttttttatttactttatttttaacagagggacaaagaaaaagggctatggatttataagttcaaataaataaacttgctaaaccaaaaaaaaaaaaacatttactttgtgacaaaaaaaagttttccttcatcagttaaaccatg

SEQ ID NO: 42177 - DNA, 99 bp, Arabidopsis thaliana landsberg
gcttgataggcatgtttatctagtagatatagttagggagaagattgggagagtttctaagcttgattcgatcaatgatggaaaaaagtgggtagagat

SEQ ID NO: 42178 - DNA, 112 bp, Arabidopsis thaliana landsberg
ttgaccacctcgtgccttaaatgatgggtcttccctgaactgtatagagcatcatctttattactggagaagtttcaatgtatgtccacaacctaagggggtagtgggatat

SEQ ID NO: 42179 - DNA, 350 bp, Arabidopsis thaliana landsberg
atggcttcctctccagtctgagacatcaaggtaaggagttctattactttgattaatatatccaataagaactttatagttggagcggagtgactagtgtgtgtccgatcttgtttaactgatccaaaccaaaacgttgtcgaaaactttaaattaaacagagaaggaaataaattgacaaaactcttgttttatcccaaataatcaattaatcctttcgtatttttggttctgaagagaaattaggataattatatataattatattttcagtttatattgtgtttaataatgtcctttaaaatatacgttattagattttttattagatgaattctattattttgaat

SEQ ID NO: 42180 - DNA, 198 bp, Arabidopsis thaliana landsberg
acggcggtgttcgagaacagctggccatagccgtcggctgtcggttagtatgaaacaaccgtcgaggaacgacggaaggttgacgagatgacggccaacgaagacggtggcagtagccggcctggtggcggtgctggccctggtggtcctgttcctgacgggcaccatcaagacgtacggcatcaccgagcacgccct

SEQ ID NO: 42181 - DNA, 873 bp, Arabidopsis thaliana landsberg
  unsure (1)..(873): unsure at all n locations
agttccatttcattcttctgcataaccaagaaagtcatttacaccaacatatatgttttccttgcaatactcccattgtaaatgcgatgggaaatgagaggctaatgccttttgagaacaactcacgtttatattattgtatctttcataaatagtttcctttcatgatttacatattcctttcatagtcgaaatactctctttgcaggttaattatgtgtacaaagttgtataaaactaaaaacaatcaatatgttttttcctcttttttctaagatacaagaaacttgttaatcaatcattatatatagtgttnttttttctaatcttgttagtatcaatgatatacgaatcatatttaaactgctagttgtaattagtagtttgtatttatgtcaccatgttcaatcttataatgtgtttagtagtagtttccttttgagctaaaaaggtttgcaaagattgtttgttatttggtccttacaattttagcttgatctcttcggagtactcagattggcaataacattagtttctttttaaaacatactcatttaaaccttttttttggataggttgtgccaaatgaatccgaaaaacaaaagagtttataaaacaagtaacaacaaatctagagattggtaataagaattataggatgattatagcacaaaacacgtggtggtacgcatgtgtgtatagatagatacgatcgataataatgctaacgacatttatttcggagaaagagagtaggaaccggcttttaaaggcaaaaggcaatttgtattctctagtctctccactctcaaactctcattttcctcatttattatcttattttcttttactctctttttcttttattctaat

SEQ ID NO: 42182 - DNA, 357 bp, Arabidopsis thaliana landsberg
atagtgatatcatggaagttttgagagttagctacgacggatttgatttgcaagagaaggctatttttctctatatatcatgtttttataacatgaagcaggttgattatgtcagaaaacttctggatctttgtggctatgctgctgaaatcggaataacgatacttaccgagaagtctttgatagttgaatcaaatggatgcgtaaagatacatgattcgcttgaacagatgggtagagagcttgctcgtcaacaagcagttaacaacccagcccaacgggtactattatgggatcctgaagacatatgtgatttgctggcagaaaattctgtaagttagagtgcatgtgcttcta

SEQ ID NO: 42183 - DNA, 827 bp, Arabidopsis thaliana landsberg
tcaaacaccaaaagtatagttcttttcaaaaacatattacaggtgtcaatgcctaaaaattatataatgagcaaaatgttactgatcaatgaagagtataagctaagtataattaatggtttaagtagatcaaccattcgaaaacttgacaacttaatgtaattaagggcataccataaaactgggaagacgaagggcatcacgtgcttgagggtcagaagtctcaaattgtggatgctggttcccaggagctggaggaacaatcccaataatattacttggaacctggtcaaacgagttttgattgctttcggactccaacatattctcctgcttggtgacatcatactctggagctgtatttgttgcagtattaccttcaccagccatattatctggaacttgtgaaggtgactcggagtaaacattaccgtcctcttctttttcaatcgaatggacagttgggtgcctgaatgcataaaaaaagtttcgcttagggactggtcatataaatatagttatatttcaagacataaagttcaataactagaagtgaaaaaatttgggtttcgtgttcggataagtgttcataatgtaaaggttatcatgacttccagaaaatcagtgactgcacaaaatgttttactttctgtttggaacttaagagccaagcaggacaaagagttgtttctatgaacaaaacccacttaactattgacactatcagttcaactgacaccctacacagcatgacaaaaagatatatattttgttgacctagaacctgatatacaccgtagtgctttagaagtttcggctatgctact

SEQ ID NO: 42184 - DNA, 716 bp, Arabidopsis thaliana landsberg
tgatatgtcagatcatttgtgattagagctccaatcatatactagtaaattcttaaatccatctccttgttatcgattttgtgtgtttcccaacaaatatgttaagtgcaaatattaaaacctccaaccaaacaaaatatatcacaatctatgaataatattgacaactactaaatagatcgtaagttttagtttatgcaagactatacatacagtagttttgtaaagttacttatattggcaaacaaaatataattctggtattcagtttgaaaacatacgttaatttacacaatatagttttgtaacaacagatttaaactccatattttgtaaacaattgtaggctatagattaaaatatagaaaactcatacacgactactcatactggacccagtcatattgtaaggtaaactgcgtattaaacgtcgtgtaatcagtcaattatgattcaccatgaacagcaatacagcataatattatagtagtaaaatactttaaaatccttttttttcgtttgacaaagcgctatactaaaaaatatagcaaactcaagtatacactaaaataaaattagtacatttgctagtcttcacctctagaagacaagagtatgtcgttttcttgacaaagacgatttggttttggtgagttattatagtaaataaatataatactaataaaaatgtatttaaatatatactatggattagg

SEQ ID NO: 42185 - DNA, 224 bp, Arabidopsis thaliana landsberg
gcaaaggcaatgcagctcggggggacttttattggtgaagatgtccgaacatctacacaggaaatcccaacagacctgagcgtgtggcacggtgccgatggacatgtttggatagagggctcgaaggttctacataacgccaaggaaacattggaacttgtgtgccgcgacacattgtggagggtagcgacccacatctgaataacaagcggctgagaaagtgc

SEQ ID NO: 42186 - DNA, 555 bp, Arabidopsis thaliana landsberg
agaaaaatttcaaaaataaaataacaagaaacctcagcagaacttgatgcgcaagaaacgacaatagaaaaaacatgtgattcactaaagaccgatgtgggccgcaagaaaaggatgtcggagtattcgctgaccttgatcggttgtaattgtatcgcgaggggtgacgtatccagagatcgtcgccccaaagcttattatcactagtttatggcccaatagcccgtttatatacatgatttattattttgggtttatggcccacgataaatgggttacatattgacacgagtttgaaatggtcatgatatggaaggggtcttaatgtcttattgtcatacattagaagtcacttgaaatatctgtagatttaatattcaagttttctaattcaaattttcattatgtggcattatgtagacagtctaagtaacacaagtatgaaaattatgtgaattctattccaataatatcaccggactcatgaagtttggttatggccgttctatgattctatagtaaattctagttgtaatgagaagcatttactaacac

SEQ ID NO: 42187 - DNA, 434 bp, Arabidopsis thaliana landsberg
cgttgactttgtctaattaaagcgtcatgatccatcactcaaatttgaacgttgaaattagtttccagcatatattttagagcagtagatgagaatacaaaattcgtgagggagtaaacgtgtggcaaatccaatagttagaatttcaatttttctaaacttccatggtttcatattttggtctgtttagcattcatgtagaccaaacatagaaatcaggttcagttaaaaatcatggtacttaactttaaaaggtaaaattagcggaaggttataaacttgagagggtgaacttgtaatgaacataagtagacaaatctaaaataagtatggaagaagaaaataagtgtcacgtcatgtgttgctagttgcggacataaaacaaacaagaagtggaggagcaacacaagatgcaattgcagcccatagaatct

SEQ ID NO: 42188 - DNA, 4011 bp, Arabidopsis thaliana landsberg
atcaaaaagaggaaaaatcgattcaagtgttattgcttttggtgcagcatggtgccaacggtcttaatcttctagaagcacagcatgttattctggtggagccacttctaaatccagctgcggaagcgcaagctgttgggcgtgttcaccgaattggacaagagaagcctactctagttcatcggtttctggttagtgtatctgctttgtttgccaccttggtcttgtacagcttcaagatcctgccttatgtgattcactttgatcttgacctctcttttttggggaaccaggtatcgggcacagtggaagagagcatctacaaactgaacaggaataagaatacaaacttaagttcatttagcagcaggaatacaaagaatcaagatcaacagttcttgacactaaaagatcttgaatctctatttgcttcaccaacagcagaaacagcagagatggaacaaaacccaggagagagacaggagaatctgagagatctaccaccctcagtcgctgcagcattagcagccgagaggagaatgaaggaaagtaatgcatcctcatcaactacaaacgcatcatgactatggaaaaggttgcagacagattggttccagccaaatgtctgttgcagcgtcttgttgtatgcacataagatggtgaagagagaagctgctcgaaataatactttctcttttgtgtcgtccacgttcattatgtaggttaggcaaagaataagctcttttatttattcattgtattgcaacagacattactgcgttaggtcttctatactttgacatggaaataataactcatgataaatgcaaaatgggttctcttttcaagtaacttggagtaagtgcttttcttgtttgttataacatttgagaagacaaatcagtcaactacattgaagaaatgaaaccagaaagccccagaaaagaaccaaaatttattcagctccacgccaaagaggcggtaacaaacttagaaactggaaaactcttcacttagtcttgaatcttggtgatatctcacttctcttcagttgggggtgggtcaatgaatgtcttctttatccaaccaaatggctgtgatgataaagaatgtgtcagatacaatacattatgagtttgaaaagaagcttagtaaaatagggtcactagcagcttaaggcgcctaatctctacataacaccaaaccaagagcaaattgtgtctgtaagtgatgaaactaattcatgaagaaacaagctcatgtatcagtctgaaataagtgcaactctatcctccttaagatgttaatggcgtgaagcaaggatcaatagaagctaggcattttctgtagaagactaaatcagaatgtaagtgaaaccaatagtacaaggaaaacgaaatgaagaagatttgatcaccaattcaagaatagactagcaccaaaacgaatcaagcctttcatgaaacgtaattatatgcaacgatgctcataaaagtaaccacctttatagataatctaatgagatcaaagcaagtaaatttgataaatggtgatcaattatgaaattttcatctttcaaccagataaagccaacaatttcaccagaaacataacattagctagagatagagatcccagatcaggaccataatccgtgaaaaccaatctatggccggaaaacaagagatcgagatagcttacttggacgacccagatggcaccggctgcggcggcgattccccatccagcggcggcctgaatatcaatcgtttggatctttggcttcactgcgttgagcaatccagatgttcctgccattactgcttcaatctctctctcactctctccttcgctatgaaattcgatcaaaccccacagagatccttaacgaaatgacgataatcaattctgcggaatttttgacattaaaagagcttcttgacctagtcaaacgtcaattttacacttcctgccgttctacttattaacacttgaacaacgcgccgtttctagtcgttgtttctagtcgttgtttccgatatgcttaaaaaaattcaagatcattgcctcattgattagcgtttaaactctttaatgtaagtatgtaacaatgcaaatgatttcaagaagaagaacaaaacaacatcattctatattgaagaaccaagctttgcattgatcttcttccttggactatcaggtttagtggcgggtcgacgacctttgtccggaccaccaattacaccccattcctcaaactgtgtctgccttgctcttgccctttctttctcctcttctgatttcttggagtaacagtaagggcaagaaactccatactcgtactctggagcttccatgtcttcatcacttataggttgcttgcatccatagcagagtttatgtgttccttgagctagaccatgttccacagatacacgtttgtcgaacacaaagcattccccttcccataagctctcggttttagggacttcttcaaggtactttaatatcccacctttcagatgatatacctgataacaaaaatgctttgatcttttaagtacctttgaaaccaacagaacaatggttagatgttgtgttaggttacctcttcgaaaccttggctaagaaggaggcttgaagctttctcacacctgattcctccagtgcaatacatagcaattcgtggcagcgtcttcggtttttcagctttgtcttctttatgggtgatttcagaaaaatcctctttctccacctttgcttgcgtttcattgccttcttgcttcaatgcaaattgattctccacccaagatgggaaatttctgaaagctgtggtacatggatccacagctcctttaaacttcccaattctagtctcataggtattacgcacatcaatcactacctgaaacacaatagtacttaaagatctgatatcatcgatctatctaccagaacatttaatcaagagagagcagagaaaatgagtcctaagtgtataaacagttatcaagtctttattcaaatttcactgagttcttgactaaacttgctacaagatggtaaaaagaggactcacagtttctggatcactgatcagttcgttccattcttcgggactcacatatgttccaactctttcaattggcgagacactaggaattccaagcgtaacaatctgcacagacattgcaaaagaaaacaactcttgacaatccacaaaactcctccagtctcaacttcaaagactaaaaagtgtacctctttcttaagtttgaccctaacatgatcccatctaaatggagcatcttcaccagctgcaagaggagagctactactatgtccatggtgaattgcttcttgctcaggactcacaggtgtctccacttgcctcaaaccatttaaccggacatctctctgtataaatgccaacacttcctccactgattcacgaatcccacagatacttccatttatcccttctggtgcaagaatgattccacctgaaacacgctggtgaaacaagacaatccaatctacattagtgattagtgcctcaaaatctaaaccaaattttcatgatcaatacaaacactcgtaagtaaagacttaacctttcgtagacagacactaaaaatctacacttttgaatgagatagaagaaacgccataccaatttttcgcagagatccttgagaggcttcctgaaatcagcatgctcaggaaaatcagcgaatttgtagaatgaaactacaacgagcgagcctaaatccgaatcaatagactctgttctctctgagaatgcctgagaaacagtagccatgcttctccgtatagctccggcgtttgaacaagccaccgtggatttcagagaagaggaaggagaggaagagagtttatggggttgggattgagggaattgtaactcgggtttggagtttccaccgactgagttcgaattcacgccgccgccggagaatggagagtgtgagtgaggagggggtggtgatg

SEQ ID NO: 42189 - DNA, 529 bp, Arabidopsis thaliana landsberg
tttaagcctccgtcttcttcttcttccgtcgtcgtagtcgattggttagttcgattatattcaaatctttactcactacgatccttaaattagtgggtcgttttcaaaattttgatttgattcgattttccttggtagaccataaaacctagaaatatacgattaggttattcaattgctgtcgatttctcgatgtaaataggtttcgtttggtagattctagaaacttatttaatgtctatgatcgttgctaggttttgtatcgtgtagtgattagtttatcaaattcacttttgttttgagttgttacctaatttagttttagctgattttgatgaagtgggaataagaatctggttatagtggtaatgatgtgtttcctctgcttataggtggttttagctatatggatatcttctactgcaaatactcttcaaaacggatgctttgaagccttgatactaatttcatgcgttctatatatgtgcatagtaaggaagtaatgggagagaatcgtcagattagatca

SEQ ID NO: 42190 - DNA, 1204 bp, Arabidopsis thaliana landsberg
aaaatagaaagagcagtagttgggagaaatattcgaggttgtgtaaaaatagatgagataatattcggaggttatggatatgtagagccagcgtggtgtttttagttaggtcaaactataaatataatattaaatttgatatagtatatagactttaacagtagaaaacaaaattgatgtttatgtttactgccaaatgtcaaacgtacaatattaaatagctacatatgggaagataagagttaggatcgtgactcctttatgtgatgaggtattttctccagatgaggtaattggtttaggaccttaagctagaataaattttgaagtttcaaaactaatatttttgtttattctactttgaaaagtatttggctattttgtttcccatcaaacagaaagaagactatgagcagtggccagtggacatacattgttaactaaaaatatttgacctcataacaaatgaaaaatttattcagaaattatttaacaaagaaaatcatataatattttagcatgcattaataaaaataaaaataaaaattattattatctttttcagaaatatagataatatatattaaacattattgtttaggtccatttcttttccctctcatgttccgttactctctcacatcagaatccgaatttaaaaaatcacgatcaccgacatgaaaaaccctcgaatctgatttttgattttacttctcaagtatcaaaactaattatatcatgaataatttgagcttatggtcatacaatttcaactctagttgtacccttatccattcttattctcattgagtaaattgtgaatttattaaggttaaggagtataccaaatcttgattgcagtttctttgcacatttaacattaaagacgactaaactaaattagatcaaagaggaatagatagattcaaaatactctgtatttatccatttctaataattaaaaattcgtatactttatagaatcgttataccaaacccaaaagcttagtctagtacttaataatatctaggatcctagaatatagtgcaggctcattcacttaaacatatgatttgattcgtaggctatttacttcaatataaaattataggactaggtttaatagtataagagagtaaaatatgctggcccatttcaccgaaattacgattatcgagaaatctctaattctgcgatgatacc

SEQ ID NO: 42191 - DNA, 1703 bp, Arabidopsis thaliana landsberg
  unsure (1)..(1703): unsure at all n locations
gcctccaaattccgaaattattgcacttcacaattatagagatccccaataatatatataagtacttgttttgtttcacagttctaaaaatagaatgatgataataatggtgacaatgataacattgatgatgatatgactggattcttaacacacaaacgcaatgatatgaatacagagggaggaatgcataatctgtgaagctcattaaaggacattattcgaaaatacagtggtgnnnnnnnnnnnnnnnnnntaaataattgattgttctacaatctcagaactaagtgaatgccctgcaaaattcaatcatcgaacatgacctaaggtaaatgcacaagaacggttgcagatcctcagtgtcagaatctttcatctttgacacacaaacacaatcatgtgatacatagcagattaacgcataaactatgaagctcattaacggatacatagcagattaaagcataaactacgaagctcattaacgggcaagtagcaaacagcagtatctatgatgcaaataaggaacattcaacaagataaagcataagatgagtacccacataacagatgcaggaagccaagcaaaatcaatcatcatcttcttcagtctttccagcaccgaaagggtcatgatttggccccacctcttctcccatatggcgctgcacaagccgctgcagatcagacataaccttagcctcgcgcttcgccttctcctcgtagttaaacatggccaatgcccgtttgtcttcagcactgtaaacctggttttcttttctaatacgaatagcattcatcctttgatgcctacttccactcatcacataaccaagatcctcaaacttctgaatctcttcagcgttaagacccacttctcctctacgtgggatacgtttaccttgctgaacatactgtgctatggcgtctccttcaccgggtcttaaagcaccaccataactgatgtgaccttcagctttaggtaatggcattggaccaacatcaccttcttcttcctcttcatcaacagctgaagatttcttctttaattcaatcatctctttgaacttcttcaactcttcttcatcaagttcaagctcagtgttcttcaccgtttcgtctacttgcatcttcgaatcttcctcagtaccatcgctgtcactccctgagttcgttttctctcccttgcttcgttttgaactagaatccgaagatttcttccgccttttgctctttgacttggtatcttcttcctccccagacgaagaagcactaatctcagctttactatcttcatcgctgctctcatcagagtcactgtatctcgtctttctcctatgacttcgctttttcctataactacggctgcttctgctcttcttcctcttagaagaactcttcctccttcgtctcctatcttcctcttccgaatcactctcactcccttcggattcactatcgctgtcataagatctctttctcctgcgcttagacctcgagctcttactcttcctcttcctagatctcaaaccatcagattcagattccgattcagatttacctttcctttctttccctttcgaattatcatctctttcgccgccgctcttgtccagaatctcgtcgtcgttctcatcggaatcctcggtctgaggtttaggtggacttggtgcgttctttcaaaagcagaatttggctga

SEQ ID NO: 42192 - DNA, 705 bp, Arabidopsis thaliana landsberg
gctcatagttctcctagatcgctcatagttctttcatcaatttgttcggaagtgattgctttatgtttatcattgttttgtacttgatagattttaagaaattaggggtttatgattggcaaatgatgagtagaatcttatcctacacacagatgtatcagtgttgactaccaatctctgcttattatctgatgccatattctaaaccctgttttcaaaagtttttacagttaatccgttcgttttcaattttgttccagcgtttttttaaaaatgggatcttctgggtaaatgttggtttttaaaataagttcttaattgtaattctctttttattcctgtgaatatgagaagaaaattagaacagcctaatgaagaaacaatgatgagatacttgcagacgggcggtctgaaattgatgtcgtgttgattgtctgccataagctacataagcattctctgagtttctcattcattcgtgaacacatctgttatgtcttaaactgttgagattgtaatgaaccagtgaattagttatctatacaaagagtagacacatacatctctggacaggtgtaacctcttttaatatgaagaacggctacattgaaaaggatgaactgaagtaaccgtaagccaaaacatccaatgataataagacttttgttctggttattaattagtcttataatcaataattctaca

SEQ ID NO: 42193 - DNA, 609 bp, Arabidopsis thaliana landsberg
tttttttttttttactgcggattttacatgtcggctctagatttttaaggttagtactctacgcttctgcttgagattcaagtaaaaaaaaaaaacatgtcggtcagtgaatagtaaatttttaactatagtagtactggagtgtggtaccctcttatatatatatatatatatacacttgtgactgaaatctatgcatatagatatagatatcttctatattggccacggaacatcatatttcctacatagggacatgaacaaatatgcatatatacacataggatctatcaatctatttgtttggttgctgatgagtagtgaaagagagaaagacagtgaaggagaaaggggaaaaattaaagatgccaaatttggtcacatgtgagttggatttgtttccattcattcccacttttggattcttcttatctttgcaggttcctctttccatgtaactcctcttcttgtgggcccattccatttctctctccataatattcatattgatttcagacttatatatgtcatttgtgtataagagtggttggtttcattgtttaatcgatgaacatggtggtcagcgtgatatagtaggagtagttgatg

SEQ ID NO: 42194 - DNA, 803 bp, Arabidopsis thaliana landsberg
gtagttattgtgcttcaatcacgatcagtattttgtgggaattttcaatcagaatcatccttcatatttagatattagaaacagtcttatacactataatactttataataagcacgatcgctatataaaaaaagaaagccaaaagagaaatggggtctcataattttgcatgggaaatcaaacgacgcgcagaatccgagttccgatcacatgttcacacgttgcttcactaatctaaacgatcaaaacgtaaacgatacactgtacatttgcttaattagttgatatttcaataaactacacgaagaatattagttttaaaaaaatttagtatttctatatctcaaacttcaatcgtgataacaattattttctcttttgacctttgcttcttacatgtcagtatgtcacatatgtaagatctcctttgcccaaaaaaaaataaaaatgtaagacctttatctataaaccccaatctgaatttagttccatttcaaattttcactaaaatgctattaaaaaggattctatgtatttcaattatcaaatcatcgtctttatctaaaacctatttttactttcatgcaaattagtagttcaaaaaaaatcaaaaagtagacacagcaattaaatgcctagacgacattgggctggccacttagcttgcacggcacataaacgaaactcaacaagatccgataattatgcttgcacaactttgtatttcaatttaattttaaggaccttactatatacttaagaattaatcctagtcagatatgccacgtggacaaaaacccat

SEQ ID NO: 42195 - DNA, 749 bp, Arabidopsis thaliana landsberg
tatagaagactcaaaattggaaaaagggtcccatgttcctaacaggtaggagatatctctatcatagagaaacaatggatcgtacacgtacacgtacatctcctctcaacctgattcatacccatttttccttctctactcgtccttgatttagtctcttgggacccttctccattatatctcacatgtctctcaaacttcctgccatttcacctccttacatgtcaatttgcttcgatcaccttaattatattatgggcatgttataatgttcttatcttctaatttgtttcacagctcaacaatggagaaatttgcttcggaatcagaggcattagcatatatgttggcagaggttcttgcagaaaaagcaggacaaaaatcaagtttcttcaaagaaaactgtgtgagaaatacatgttatctaaggatgaaccgatatccaccttgtcccaaaccatcggaggtgtacggattaatgccacatacggacagtgatttccttacaatcttgtatcaagatcaagtcggaggactccaactcatcaaagacaatagatggatcgctgttaaacctaatcctaaagctctcattatcaatattggtgacttatttcaggtaattaattaagcttttattatgtcattctaccattaccattatatcattatccggaccttacaaattagtttggtattttatgttttgatatggtttggaaggatttaaacaatttgttcatacgcat

SEQ ID NO: 42196 - DNA, 370 bp, Arabidopsis thaliana landsberg
tggtggcttctctttctctctacgctctgtgctctgcctcggcttcactctcctgtccatacttctcctcgggggcgcatctctcactctctctgattggtcgctgctcatcctcggacatggtaatctctctactgttgctatgaacttcttgaggtgtctaatgtattcagggtagtgttcaagatcacagtggtccctcctttccccagagcggctcgtacttgtctttgcagagtcccatagttgtttccatgagacaatcactactcatcgaagttcctgacatattgaactgttggatcaaaaacttatcaaaatcaacgaaatgtactactgaactgcttcatgaagatgagacgggaacgca

SEQ ID NO: 42197 - DNA, 704 bp, Arabidopsis thaliana landsberg
ttaacttttttgtgtatttaattatacattcacatacgaaaatataaaatgtaatatttattcataatttcgtatacatctttattagaatagagctagtgatgaagttatagggttattaacacttcgagtagtagataatgttaagaaccagaaggtaattagttgggttcatgataaatgatttcacagaatcttaaaagttaaaagcctttttgttaatactgtcaaacaaattaaataatatccgaataaaaacttttagcagagtctcactctcatctcatgtatgcattagaaagaaaaaaagaggagagccagaactaaaaactcagatattgaggagaatccaacatgtacaggtataattcacaactaaattcctttgttattgttctttgagaattgagactttccccaaatgatttcattagtttttatataacatacacgatttcatatagacgacaaaaataaaaataaaattaaaaagacgatttcatttagatccatcagttactaagatcggtaatcaagaaaaaggtcccccctttttggaggagctaaatttacttgtcacattatagtaaaatgtagggactttataaggaattagaagtaagaacttatattatataacaattgaattccaagcattgatgctatatatacgatctaactgagaattgcttaatgtgaatatg

SEQ ID NO: 42198 - DNA, 763 bp, Arabidopsis thaliana landsberg
tagggttcaaaactcaaggtcctttatatataagcctgaccaagttggaatcctagaggaaccatgcacgatacaccccctaccaaccattaaaaaagaacttttctcttctaaacatttgtatattattcacaaagaataaagattaaaaaagcatcgagatattatgtgtcgctagctgcggttattttaatcattacatagacactggtaattccatagcaaacattgaattttaagcttttgaggcaaatgaattgatatgaatttctaaagttcctagtttctttgttcctacacttttattcaaaccgaataattcaatccataaccggaataaatcgattcttttaaccgttagacgccttctttgttctttaagccggtttaattaaacgggaagcattcttcttatgaaaaccaaaaacggcaaggtgtttatcgaacaaatccagagtaagagtgtgtttggtcatctccaggtcagctgggtgtagaaatcgagcgacggcggcggagacgacggagatgaacagaatgagatgggtcggagagggagacatctgggacctcgatatgtcaactccggtgacgctcgagggcaccgcacgagctattcctgacgatcctcttcctctaggtctctctagaggcactcgtctatctcgccctaagcaagttgagttcttccaccgcttcatggcctcacctctcatcccttccttcgtccctatccgcccaacaccggagatggaagcggtgg

SEQ ID NO: 42199 - DNA, 450 bp, Arabidopsis thaliana landsberg
  unsure (1)..(450): unsure at all n locations
cgtgctcggctattacctgccgctgcctgccacgatgatttactactacccgatgatgaacgatcgcacgtgggtcgagcgcgaagttcacgagcgaaagctttccgacaccgtgtaccagctatcgacgaacgacgacggcgagccgatgtattttttcctgttcgggatggcgttcttctacctgccatttttcctcgccggccacggctgggcgctgctcaccggcgcgccggccgacggcttcagcccgccgtaccagtacgcgctcgttatcggcggcgtcatctatacgctcatcgggctgctgctcctgcggaagatcctgacgcgctacttcttcgagggtatttccgccgtggcgatcctcatcgtcgtgttcgcgacgaattacggccatcaccttacctacaagaacctcgaaaccgtnnnnnnnnnnnnnnnnntgat

SEQ ID NO: 42200 - DNA, 373 bp, Arabidopsis thaliana landsberg
cgagaagcggttcaacaattcgtccctccaacattcccactatcagatcctcttcggtccccaagaagacaacaacaacacaaattcaagcttcagcttcggtttcttctccaaaaagaactgtctctcgatctttgactccctcatcacgcaaaacaccatcaccaacctcaactccttcaagaatcagtacaactacttcaaccactccttccttcaaaacagctggagatgctcaaagatcaagatcgttgactccaagagcaaagcctcagattgcagcaaatgcaagtagtaggaccaatgtgcgttcttcgtctgtaacatcacgttctgatagaagcacaacagtttcagcaacacctcggacacc

SEQ ID NO: 42201 - DNA, 651 bp, Arabidopsis thaliana landsberg
cggcctgttttctcttggtactccctaaccggaaagagatttaaagtccggttgtccctcgtttcttcttcttctccgttgacattttcgtcgatattaatctcttccggttgttgagttatcgaccaagtaacaagatttctccatgtggcgtatttaccaacctctgatgccctctgatcagattcttcagtcgtcccatgatcttcattattagcattgttgtctttattgtaactcgcaggatctaattcatgctaagcagaaaaatacgaaataattaattcttttaggatgagcaaattccttcatgagctagatactacaacaaaattataaattattttcgggagacgcctattaactattctaaagtgaaatgataatacatatcaagtcccaacatatgatgaaatggattaaaaatatatatattatggccttttgaaaacatctttgttaatttccttattgttctcaagtcccaacatatgatagaaaaagcttctctataactctattctgcacctatttacttgtctgccaactttccacacatatttagttatttacacttatatatagactatgtattgttttggcacctatttattatgcatgatgatttgtgagtatcttgtacatatacta

SEQ ID NO: 42202 - DNA, 1770 bp, Arabidopsis thaliana landsberg
aagattgttattatattttgggtaaaaaaaggaagcttgtttagcacatttactcagatactcgtccaccaaaatcttttctatgttttattttgggtatagtcttgttttcttttcacacaatcacacatcgatttcgggtaacctaagttgtaatatgtcattgttttgctttctgcacacacttatatatatcagcatatcgctaatcatgcacaaattatatcatcacgatttctacccaacaatggcacactcattggaaaaatcccatacgtatgcaaatgtgcatatcttgataagaataatcacattttattgattaaaaatatttcgttgaatagaatgatataggcagatagtttcttcctaagtgtttttttctttggtgtgcctcgtttttttgtttgttgcgtaatctacgtttatactcaacccattatccgcccctatataataacaaacacatatttatgcatgaattttaattgtgtgatgccccgttgccttttaatcttgaaactgttagaaattaaagagaatatctagcgagagataacaaaaatatatggctatatgctgcatttttaaatatataaaacaagtcaacaccattaaatacgagacttaacgtgtaagaacttaaataacacacattttcacataccatttcgggtagggccatatacattttaatcgtcacaattcacatcgtcgtatcgattatcacacgtttgagaagatcagaaaaatacttatactataaactctatgtgtagattcatgtctaatatagagaaatactcaaatacaaataactaatgagataaggagttgatgactatcacataatcataactatatattgtctaactccagtgcatggaaaactaaaacagtgcgtaacattttttagccattacattatatatagtttagtgagtaaatacatttttatcaattatatatgtaaatgcaacaatattttgaagtttttttttgtagttctttcataaacaaacaaaaaaattgtagttctttaacaacgaaaaaacagtactttgtagtgtcaatccttagaaagattgtgtgtgtttattttccttcaaagagggatattgtgaatacgttacatattggtgacgcacacaaaaacaaaaacaaaaatgtatagaatacgtttaatatcaatttgacacgcacacaaaaacaaaaacagtagattatgaaaaaagatgatttgttttgtaagtattggcgtaggccaaaaggcggcttaagtagagagtaaacgtttgcttcccgcgttatacaaagccctaattctcatcatcatcatgcgtgcaagctattttccatttcctttaacgattctcattcttactctcttcaagcttcttctttctttccccaatatctcttttatattcattatttttctccctttttctctcccaaatcttttttttttctttttcccggaaaattctctctgttgttgttgttgttgttgttgttgttgttgttgttgttgttgttgtctctctcctgataagctcgaccaagtttatctctttctcgctaatcatttctctttaaacttctctcatcgttgaacaattttgttttagtacataaagattcttcttcattctttttgtacgcgtttctatgttacaaacgaatttctatcataaaagttattattacttgagctcaatcttcattggtttatgcgtgtagtcagatcaatcgaatgccgtactacga

SEQ ID NO: 42203 - DNA, 692 bp, Arabidopsis thaliana landsberg
tgcagttaagtcgacaaacccccagtctcacacacattatcgtcaagacttaggttaagaatctctcacgtcggacatgatcagagcatcaggtagacggcttcaatatcgtaccgatcttgctgccttaacttctcccttccaacacaaaattctttacaaagctgacatgtctcccatttcataacgcgaagagaagagattggaaagagagagggctaatcaggtgaaagctcggattaaatccgacaaagtcgtgatgttgggaaccctcaaagagagtaagctccgagatgccgaaaagtcaaagaagccaatcgtcgatgacggggtcgaaccttgtcaaattgtaggaagggcttcttcttcaactgggaaaaaattcgcgactcccacctcggaggcaaggacttgtgtcaagaattttccagcaaagattccgcaaaacgggatactgagaagaagatgaagcaactagaggacgatgttcgtccctctcctcgcacatctcgtcatcgcattgaggaaaaactacaagtgcgagcatacaaaaaggagagaacaagaagggggaccctcaagatctgtgatcctctcctatcgggagtcttgtcctcgtagcttggagcaccatgacacatcacctcctctagatacaaatttcatttttaatgaaaacaagaattgcgact

SEQ ID NO: 42204 - DNA, 899 bp, Arabidopsis thaliana landsberg
  unsure (1)..(899): unsure at all n locations
tgaattctcttttgtctagcgatgaaagctcaatcttttgtcataaattgctcgttgctcattccatcttctggtttcttaactctcaccactactttcttgtcggagtcacaaaccctcatatgcttctccgacacatacctcttcatgtttttctcaccattggtactctccagcggcttaaccgcctcaaacgctttgtgcgattggcttctcccgaaactaaccctcttccctccactcggcttctttagttgttctgttttcgtagcgtaaactacgggtttcttcttctcactcttgtgaagaaattcttggtaaagatcgttgcttgcagcttctgttgctgtctttgaaggctcgtgactcgagctgtatcgtccggatttcgcaagaagagtaattacaattgcgtttccgatgaagaaaacgaatctcgggctaacgagaaacactgctgcttccttgaaaatgtccccagagattttacagaagggaaagagagtttggagatcaagattacaagaagaagaagctcgaacagtctgaacaagctcgtgaacgatcttattgcttggaaattcaagattcctctggatttctccatcttcaagtgttgaaacttaattggatccatcaagatgatttcttgcaaaaagaaaaacacagaaaaaagcaagaaaaggagcttttttaagagatcngggaagtgatttaggtcactcgaaagaagtgatatttacggaaacaaagtgagtagcagagaagttttgtcatcaggagattaaacaaaggaagaagaacaatagtcatggtgaacaaggaccagtttgtatgtttcattaagaaaaacagaggattggggaatatgtatttgctccggtttgntatatcttttt

SEQ ID NO: 42205 - DNA, 589 bp, Arabidopsis thaliana landsberg
gttccgggaagagtgaatttcaaacccccaatgaaatggttttctatctacaatcttggatactataattgttgaaagagcttgtagtaatggtaattatgtctttggtgagtataaaataaagtcaactgcttcagaacattaacatgttcttgacaaataacataaaaatatgcttcccacctcagcaaatatttacccaaaatctcttgcaagtcgttctgtttttgggttttaaaaagattaaagaaaataacacggcgaagcttagaaaatgattgcgaatttcgtattactaaaagctgagttcgaaaatgattgtgaattttaccacgaatctattttttttgttaaagaaattttaccacgaatctaggccactcgaagtgacaaagagcagaccattgacaaatcgcctttcatattgagatccgaataattgatacagcttatttttagtttgcgattcaacataaagccctcgtaaaatattcaacatcaagaaacgctgtgttttcatgactcatcaggtcacaacactgtaatatccaaaccaccggggtaaatgattgcattgcatgcacaaatg

SEQ ID NO: 42206 - DNA, 418 bp, Arabidopsis thaliana landsberg
tactggccgccagcttggccgcctgctccgccttgaatttatcggtgcgcacgcccttctttgctggccacaggtccttggagtcctgcgcgcccagtggcccgactgccaggttcaccacctgcttgactagcagcttgtagtgcttgtgctccgcgtgcggcgccaggtacttgttgaacatgatctccgcatacgtctcgaagtccttcacgctcttgggcagcaggttgtctaaggaccgatcctcgccgccgaacagctcccgcgtggcccggtagtccgcctcctccaccagcctgtgttgtcaggttgtcaggtcggactcaatattgctagtccctgatgtcaggtttacgtagtgcgacatgtacgcatgccatgcaacttgagtgggtgaggccgtgagcaatgaggg

SEQ ID NO: 42207 - DNA, 717 bp, Arabidopsis thaliana landsberg
ttctaagacgccattaattccaaatgtggatgcttctgcaccacaagctagtaccagtttgtcataagctatcttgaacttccatggcttcaatgtgctagacccctcagttacagtctcacaatgcacctgtttaaaccaagagcatgattcacacatatcatatacaacagtccaaagcactctgctttcatcacaaacacaaaagtcgcgtttgcgtttacaatttggaaattttgatatacctaaatgtgaacgcaaaattagcgtttgaaacaatgtctaaacgaaactacttctacatccacaaattgtagaaaaatccaaacagaaaactaaaaaaatagatacatctgcaagacttttcctcaatttcaagaacttcaccaatattaatatccaattagcaattacctcatgtttatcagcatcaagtttggagcaattagcaaggaagtaataagaaccgggttctcgtgaaatcgccggttggatacgagagattggttcagcaacagacctaaactcaagcgtaccaacgcaagtagaagccaagagaggagtgaagaccatgtggttcctaggagagacacaaacgacgtcgtaaatactagtatcgatcccttttaatacccgacaaccccgccaacccgacccgaggaccaaaactctgggttttttttcctctttcgtcggagccaaaccggcgtaacgttg

SEQ ID NO: 42208 - DNA, 1431 bp, Arabidopsis thaliana landsberg
aggaaccaaaactgacaaaccaaaatttttatttgggtcatttgaacaaattatagtctgtattgaattaggcgacaacaaaaaatctatagtgaataataaaaatagataagagataattccattttcttataaagcatttttttctttctagtcaattctgagtggattataatgtactattatgtaagtatgcatacagacaataggtccgaccaaatgaatcaaatgcataaagacaaaagcttttcatggttatcatttttattgcgtgctcatcatttgttcaaatagttggtagtttctaatgtaaatccaattctattttcttcaaaaaaactggatatgtgtacatcatgcaaaacgaaacgtaacaagttctggacttgaagttcatcaatgcatgcatatatatatagatttggacgaaaaataattaaattcatgtttggaggatacctccacgagattgataaaattatcgatctcgatgtcccaagtcccaacaccgttctcagtctcgtgtctcctcttgtccttcaacgctgccttcactttaaataattaatgacaatgagggaaaacatatgataatcacaatggagaatatatatcacgatcgagtgatatgctaatgtttaattatgataaatctaaaatggaatatgtcaaatacgacccaatacatcatcgagtgatataaaaacgaattaaaacaaactgaaaatgatactcaaacgaagaaaaatagtattttggccacccactactactcaatcaaacaatacacattttcatttttggttcgtcaatatcgcagcttttcatcattccactaagctcagtaatttagtgggggaaaaaggttttcaaattctagtttcttagattgctgactctgttgaaattctagtttctcgtaattagacaaagaattagtctttgttattatttctcggaggttgatgaaaaagagattaataaacagagttttgaccaagacaaaaatactcataaagacaaagaagacaaaaacgtaaaaatgagactgaagattatttcataataaatactttggctcatcagccactatacttactaaaacaatttactctctctctctctgcaatgtcacaacctctcaccaccagacccaccgttaccggaatatctataatccctttccgacaaccgccgcctctctgttctttcctcttcgtcatcgttcttttcgtcgccactttctacactctccatcatccagacgccgttactcctcctcttctattttctcgaaatgcctataatgcccttcgtctccgccgcctcttcctctcctctgcttctaacgccaccatcttctcttacctccgtgaattgacccgtcatcctcaccttgccggaactaaaccctctttagacacacttcac

SEQ ID NO: 42209 - DNA, 686 bp, Arabidopsis thaliana landsberg
gacaaaatgacgtaacagtcgaatggcttatgattttttatatttataataatttattttaaaaaacataaaatacgaatggcttattaaaaattaaaaagttaagtgtaagtgctaaattgtgtaagtacgaaaacgtagaacgaagttgtttaattatccacaagttacacgaaaatatggaaatgtactatgaatttgtgtgcttccaagagttcaaggaaaagatcacagcatgctgatttggtccagatatcattgcatataacacgtgctttttaatactagtgtctcgacagaaaatctgatatggatttcccttactaaaataaatacagtatattataattcttttttcgtcagtatattataatttaataaaacaattaaatatactgtattttcatccgaagagtagagagtaccactctgcacatgaaatacttttttatcgccgatgttcaaaatttaaagtctagtcttatcatcatcaaaaagtcctaactaggattaagacggttctagtttttcataaaaccaaaaaaaaaagatataacggatgtgttttgctgaaattcaactaatttcatttaattcttcggtatttatattaggcaaaaatatggcaagagaaagaaaaatgaaaatctctcagtatacattctttttttttttttgacatccca

SEQ ID NO: 42210 - DNA, 514 bp, Arabidopsis thaliana landsberg
tatgcatgtgttgattagtcacctttattaaaagtatttgatttttgacttaggctcactaaccctagggattgctcttcttatttaatttttttgcatgttctcatttgaagagagcaaaaatcgacaaagaagagaatattttttgttaaaactctgaatctgattataatgaaaaattttaacgacaaaaaatggacgtagtttttacactatgcatcactttttcttgtaaaccctccattattttaaactttttaattatatcatttggtatagtaactttgttgggtttctttttcttatttaatataatacatcaaattttgggacaataaaaaatcaaataaagtaaaatagcaatttagaaggtgaagattcaagatcgatccaagaaatgcttttcacacactccttctcatgagataggacccattctataataataatatctactttaccttaacaaaacaattttaaaataaatgattcgttacctcctctttaaaactcg

SEQ ID NO: 42211 - DNA, 644 bp, Arabidopsis thaliana landsberg
attagatgtgatctagaaggtcaaagaaacatgaaccgcggtggcttcgtcaagaccatgtagatctcttaaggtgtctgctcactagtcagcatgattcatctagaagagaatcagctacacagctacagagtcccgtgaggaaaaaacagtgctggtgctacatatggaaatcctctccagtgggggataaccaagacgggaattgaaagtatctgaagaccataacaaaaaaaaaagctgaagcaacaagcagagagtctcacagatactaaccataaaaccatacaaaagtacaaatggaaaatttctacctcaaaaggataatattaccttctctgttcagaggagctcgattagtattcgagtagtagcggatcgttgcagcattctcacggcgtagtaaagtggaaacatccttcaactgtcaattacaaaaaaaattaaaacaagtggcgttacagatctcaatcatctctaagaagcaagctgacacataaatcacaaatgatcatagagctctaaatctagctaattttagcacattgctcgtaagtaaaaacaattctagattattacaattcaactgaatttctaaaagcagaaagaattcgtcataacccaatttcgtaatatcaatactc

SEQ ID NO: 42212 - DNA, 1793 bp, Arabidopsis thaliana landsberg
agtaatatttgcgcgataaataatgtggaatgcaatacatttgaatttcttaatcatattttggttacaaaaatctagtacatatataaacacacgtaatcaaggtatataataaaaaatctatgagtaatcataccatggacaagcttacacagtacttggttccacgttgttggcgaaaacgattgtgtgctttgacctttgctgtcattcaccatcagccgtcctttcatacttcttccggcaagtctcctctcatttgattaatccatagagaagccgtccaacaaatacgtcttccgacgtataaatctctcttcttcctctcaaatcccaaaaatttcgattatttttcaccgaaatgacccgtgatgacaaattcccgatcgtatactctctgttattgatcgtcttgctcttcgtttctcctatctacggcgacggtgatgctgatgctctattgaagttcaagtcatctctcgtgaacgccagctcgctcggtggatgggactctggtgagcctccttgctccggtgataaaggaagtgactcgaaatggaaaggagtgatgtgttcaaacggctccgttttcgctctccgtctagagaacatgagcctctccggtgagcttgatgttcaagcgctcgggtccatccgcggtctcaagagtatcagctttatgcgtaaccattacgagggaaaaatccctcgtggaatcgacgggcttgtttcgttggcgcatcttttccttgcgcaaacccagtttaccggtgagatacacggtgttttgttcttccgggatgaaggctcttctgaaggttcatcttaaaggaacccggttttccggtgagattccggagtcgttagggaaattgccgaagctttgtgagctgaatcttgagaataatatgttcgccgggaaaataccggcgtttaaacagaagaatctcgtcaccgttaacgttgctaacaatcagttagagggtcaaattccgttaactctcggccttatgaacatcactttcttctcaggtatgaatcatcatcatcatcatcaaatctgtttatttttctttgattaattatcatctgaacatctttcatattataatctgatgtatatatatatatatatatatatatatatatatatatatatatattggcaacacacaacaattgtgaaaattttcctaaggactagactttatgtaattatcactattcatgggaaaatttgaacatattggtcttggagcctttggtgagtagtagtgagcacgttattaggcattaaattttgcatgtaataaaaaaaaatgtttgcatgtaaaagttacaatatgaaattttatttcttcttttgacaaaatatttgtggaaaatactctctttgaaatgattattagtgggcctattgataaatgggccatgtatgatgttaattaaataattcgtttgggccttaaaacaggtaacaaggggctgtgtggagcgccattgcttccgtgcagatacactcgtccgccgttcttcaccgtgtttctccttgccctcaccatcctcgccgtcgtagtgctcattaccgtctttctttccgtttgcattctcagccgccgtcaaggcataggacaagaccaaatccaaaaccacggcgtcggccattttcacggacaagtctacggacaacccgagcaacaacaacacagtgcttaagcttacaggactccaaggtctacagaaaactagctaatgaaactgtgcagcgagattcaacagcaacatcaggagct

SEQ ID NO: 42213 - DNA, 2269 bp, Arabidopsis thaliana landsberg
aatatgtaaattttaacgaacctttaaaatattaaataaaatattgcgttagattgttaaatccgtaaacaatgatataaatagtgtttttttaaaagcaacttcggtcaaaaagtcaaaggaaaaccttatcacattttattgttgtacttgttcgtcacgaacgacaaggaagaaatggtactctgttcacactacgaaatatgggtaacggtaaaagcagagtgcttaatcttatactactctttagatgagttctcttcactgcaaaatgtagtttgataaatgaaacccaatgcataaaactttcaacgtcagttccaacagaaacacatttcacacattacccaaatttttaagaaggatcaaaagaggaaatttttaagaaggatcaaaagagggcttataagctttagggtcaaagtcttctagcaataatggccacattcctaggtgagatggtgggatcaaagatgggaagcataaccacttttatggagtctccttgttcttggaggaacataagtctatcaagcaagatcaatgtctcaagcactggtcctaatgcggctcgaatagaccagtaaggccctatcagttcctgcattttttttgagtttgacaataccaaagacaaacatccatcaagttatgagaatctgagaccgaagagaaagcgagagcattgaggaatagcttacagtgaatgcatcagcttcattccatgtggcattcaggtcgagatctcgagggtgttctagattcaagcgggaaaatgctgacaagcagaacttctcaaaagaagaacacatgtcggaattcaagcttgtctgcctcatgggtttcttgtccaccgtgtctacagtgaactatagatattagcaaagtgatcttggtctcacttataatagaatttagtctatcaaactcctgacctttcctagttgtatctactgctgctggagtttcaagggattttcgttgctgttgacgacggaatgccttaccttggcgcccaatggatggacttgtcgccaaaacctctggataatgttttgacagaaccttcaaagggtaattaggtttttacttcttaaagacaatcactataagttaagattctattaacaactagtcacagatcttggaagaaaccacataaccaaaaaccatattaccatttggaaagcagcacgaaaagaatgcaactcgaaattctgcagaccagcatcttctcctaaactgctccatctctcagcactctaagaaaacacatgtaatttctttacacaaatgggtcacagagaagaaacaaaatgactcaaaacaacaatgttgcaacatccaaaacagatacaatagtggactatacctgacaagctaaatcacgggcatttttgccaagggaaaagcccaaggatctgagaccagcgctcatcggatagccacatttggaacaagaatcctcactacttttttcagataataagttgtaacaacagccaatgctcactaatgctttaacttcttcacactccaaaaaagtcctgacgaaatcaagttgcatattggttcagctttcacgggctaacacagcaatcaggaccaatactgtattcagaagataacagatatcgcaaatgaataattgcagcaaacattttaactaaccttagcattgtaactgatagatctccacatgcatgaaggccagcaagaacaagtgaacacgatctgtttgcatcacttgatgattgtgatctgctttgaccttcttcattcaatgcacttccactagaatccgtctcatccttctccagatgacaatcagtcaaggccttcaacatttctgtggataaaacacggcatgtaatcgtcattggaacatctgggcacttgtttcctgaactaacagagaagaggttaagtagcattcacaagtctaaaataccagaactgtgcacaaagaattaggaaaacaatgagcgactcttcaagctaaaaatggaaagagacatctgatacttggtaaaggtttgaaataaacttataatgagctaaccccttacccagatttacgcatctgtgctgcaaaatgcttttttatgcgtgctgcgcgtgcatctgttacctttccatgatgagaggaagaatcgattgcaaccactgagtgcttatattggaaagagagaacctgcgctagataaccctggacaaaacatttaccaatgatgttatttaacacactttaggaaagctatatatctca

SEQ ID NO: 42214 - DNA, 572 bp, Arabidopsis thaliana landsberg
agattattgcatgcatcaaaagttagttactctttttttcttctttctgattctgattctagattcatacatcgtgacttggaacctgattcttgcatctgctttcttcgttgaatagctgagcacattctgtttcaacagtttactggaggtagcttcatgttttgttgaaaaagtgttctccttgaggctgtgacgccttttgctcttcggtttgtctgagtgtttctgctttagcttctttggagatttacatgtctggccttgacgtacgaggagcagtttcttttgctgaaagaactaaatctgttgatgcacttactaagaaagagatcctatcagcgctaaacagtggagaagtttctgaaacttctgaggatgctaggttcagagttagggagctggttcttcctaatggcgaacctacagtggttctttgcttggaaatgtcccgagggaccagggaagtacatatggccagatgggtgtgtttcgatggagaatggaggcgtgggatgagacatggaattggaaagatgagatgggcttctggggcatcttacgatggtgag

SEQ ID NO: 42215 - DNA, 345 bp, Arabidopsis thaliana landsberg
tcgaggtcgatctcgtggtcgatcaggtagctcatcgcatgctcaaacttgcccggcagctgctgccggtcgtaggacacggcgatcatcttgggctgccggtagtcgaagtgccggtatcgcgccatcgtcgcctcgcctcgtttgccgcttctttgcgccctggacggatgataggctgcggggggtttttctacagctacgttagctcttaaaaacatgctatcggcggaaggggaaccatgcgtttaatctcaacaattatgattgtactgttgctgacagcatgcgggtcggcaaggaaagataagctacttgatcgtacgtttctaaaacgctgcgccc

SEQ ID NO: 42216 - DNA, 484 bp, Arabidopsis thaliana landsberg
tgtttaaagtaacctaattgggccgttaagaatataaaccttatttcgggtcgtcaagaacataaaagcctgtataatagttttcttcttttttgggccaaagttttagttttaataatcaaaattaaacaactaatctatttgttaaatcatcatcttaacaaacctcggaacaaggacaagatcaccaggtttacaaacgaagcaacgaatcaacaattggaatcaaaaccttacctagaaagataaaccctaaagtaaattcagtttttcactttacctgcagaattggacaaagtaacttgatcttcatataatccctcgatgatccctcaaatgttcttaagaaatttcgaaacttttcacattcaccactcgattgaaccggacccgtttattcaatggatccagaggataggtacgagattgccttcttcgacgttgagacgactgtaccaaaacgaggtcaacgtttcgcgattct

SEQ ID NO: 42217 - DNA, 641 bp, Arabidopsis thaliana landsberg
ggctggagctaaagtgtgcttactcgaaacagacaattcaggtccaagtaacggtcaaggatctggagagccatcttctcgtctggcttccacatggcgaaacatgaaactaggaatccagagttttaaagagaatgtagctaccaagaagtttcttccattaagacaaagcccagaaacaacagcactaacaagcacaagagtagtgacttcatcagtgccacagtcgctagatgagatattccagagacttaaaaaccggtctgtagaacacagcccctacctcgatgatgatgatgaagtttgattatgaagatggtgttcattaatgatgaaaatttaaaagaactccattttaacaccagatttgttcaccatagtatataacaacaattttacaaaaaacatctaatttgggagttggaagggtccattttttgtgttgtaggtttttatatgttacctgttaatgacatgttatatacttttggattatataatacgatatacataaagtactcggttcattttaaaatccgtgatggattccatgttaatacagatattaatatattatagatgtcttatatgacaagccacttatataacacgtaagttttttttttttttgggacaaaata

SEQ ID NO: 42218 - DNA, 544 bp, Arabidopsis thaliana landsberg
aggaactgctaagcagatctctcttggtgctgctttgttatacacccatttctcaaatctttcttggaggaaaactcttcgaacggggaaaagggtttttctgataacaatacaacagttatgaagctggacaagatgctgaaaaagatcaatgtgagagatggggtgaagatgaaattcttcctcaacctcttagctctgtgtgaatcaacaggagagaagctcttggtgtttagccaatacattgttccaataaagactctcgagagactcatgagctcaatgaaaggttggcgtttagggaaagagatgttcacaatcacaggtgattcaagcaatgaacagagagaatggtcaatggagagattcaacaattcactagaggctaaagtgtttttcggatcgatcaaagcttgtggggaaggaatatcactagtgggtgcatcacggattctgattcttgatgttcatctgaacccatcagtgactcagcaagccgtggctcgagcttatagaccaggacagaagaggaaagtatatgcgt

SEQ ID NO: 42219 - DNA, 1060 bp, Arabidopsis thaliana landsberg
ttctttttccggtgaattttttaattaaaagaataagagcacccctctgtaaatggtgacaaaaaatttaaacataccctgcgatttttgaaacgcctcaaacattcaggacctagaacgtaatatccatgcaattttaattaaattcttataagaaatcatactaaaaaaacatgtaaaatagtcgaaatagtacaacctgaaaataaatattatgatataatcataaatagaactaaggacatgaaggttagatctgagaatgaacttgaagttgaggataagcttgtatccaaagatgatttagagccaagaaattcaacaaagcagtaggaggattggttaatcatatttggaaacaatcaaatcacttggaaaattatggagaaggtcttattaaaagttccatgaacaccacatatttgacaacgaccttgatatcctttaccttaagagccacgattgttggagcgggaatgttgtgtttgattctgctgtcactggttgttgttattaccacgagcagaggagcgattgttacagttgttgttgttattgtaggagactacgttagcggtaaccggagtagaggaacaagggatcatcgcttgaagtttaagctcataattaatgagcttctcgtgtatcatagttaatgaggaacacgtccttcaatttgatcgatgacgcgcttgtagtcatctttgagagaccgcctagtatgtagtcgatttgatcttcatgtgggatggcgccataaattagtgccagttgatcaaaactagtagtgaggcctagaacatattcatcaatggaactagatcatttcttccattgtttgatttgttcacggatctgttgcttgtgccacagctagggttggcataagtgtcaacgattttacgccatatctggacagaggtggtagcttgggacaagagaggttgaaccgcaacagagatagcccgatgaggctagagtaaatgagtttatcctggcgcttcagagtttgtagtccggatgggagaggtacgcgatggacagtgatttgtggtgcagg

SEQ ID NO: 42220 - DNA, 819 bp, Arabidopsis thaliana landsberg
aatcatcaggcattcttttaaacaagtcgatttgtattcgattatgattgtgtgttcccaaagaatgttgcttctttacatattttgcctttatttgtgatcttggagttggtttcatgaaggtaattttttgatcttgagtatagagaaaagccaaatactaaggtgtagaacaaagttttctgacaagtttctgagttgaattacaatcttacacttattattattatcatgagcaaacaacgtcttaattgatgatagtcttctactgaatttgtcacagccattgttaagttgagtctgccacaaaaaacctagtacagttgggctacaaggcccaatataaatgtaagccctttaacaaagagggaaccgcctgctttgactgttgagaacaacttgctggattcttttttcttcccggaaaattgagaaaccaagaaaatcaaacaagtactgcaataagaaagtgttgaatctgattttggaaatattatttgactccattattcccttcataaatatatacagtcaagcatatttatttgaacaagaaaataaagtcatactaataagcatagagataaagtaagatcataaaataagtataaagacatatagcttattaaatcacatgggtctctgaatgggtattggtaggttggtagatggaacaaaatcagtcatacaatcattttcccaaaagattggcctccatcatcagtgattcagtgattcatgcacacataccaaaaccactatatagtttttttttatttattattcagatacaccaataaataaataaacttttttatt

SEQ ID NO: 42221 - DNA, 1025 bp, Arabidopsis thaliana landsberg
ctccgcaccattctctaccgctctctgcacaacgcagtttcttattcgtttatgaacacgtacgaattgaagagtaacaggcaaatatagacataagtatataataattgatttctaccttgaaagcggcatcaacatcagggtaacagaagcagacttcgatgggtgctctttcacgtgctgactgcgtagcctgaaccttcccggttaggtcgtcggtctcatgctggtgaagcggtgtgaacgctatcgtggtttgcccgctctctagctccccccacctgtatgtaccagtttctttcattcatcaaacatatatatttggtgtgtttgcttagcatgttagccagcggatcggacctgattataggacatcgcaccaatagaatctcaaaccctagagttttgtttcatgacctaatacgattctgtcgtttacattcctatgatcgtatccaacaacacctaagacaatccaacgtagagaatagtaacaattcataatacaaacctgtgggattcgtcaagacgacggacgttgtgaccaaaagctctagagtagaattctacagatttagctacgtccttcacgtacacaacagtgtaagcaaacgccggtctcatcatattagctgccattttttcccagtcttatgattctgatttcgatccgatgaaatccttagaaatgctcatcatcaaacctcacataggatctctctttacggtgagctcaacacgtggtcgacaacatgcaccttcgtgtgtagggtacttgctgccacgtgagctttttgctcccttttttgggtcaatttgggcctactactcacatatgggcctttagattagaaaaaagtcttgggttatctgttatgttggaggctttttttagttgtttaatggagtttacacagagaatgacgaaaagtcgaaagccatctactaccgttgatctttaagaaccaacgatccatattcttcttacagatttcacgcggatcgcaatcttggaccgttgaaag

SEQ ID NO: 42222 - DNA, 893 bp, Arabidopsis thaliana landsberg
atatatcatttgtctcgtctgcaggaagcagctattgcctctgcttgacacctgtactgcacaaacactatccaaccacatattcgcatgcatactacggcagcaaattcatacttgcattgatagcaagtctgataaaagcttgagtcccgcgagccgtcttgagttcggaccggcagtgcggttggcggttgctagtacagtaccatggctgacgtgtgacgccgacagactgctaagctaaactatctctagagctaaccacgtgttgtatagtactcacaaccacaacccagccaaagcggattaggcttcgtttggatatatgtggttatcgtccaccggtaaatagggacgaaaacggtcggaaatggtcggtaaacactaaaaccattaccgttttcatattttttatcggaaacaaaatcgaaaacggtaactccggaaacggaaacgatatcggtatttcggaaacatcggaaacgaaagttcggtgcggaaaatacaccggtaacgtcgaaatctaaaatacgatcggtaaacgtatcaaacttcacaataaaacaaaattgacaaaagatcacaaatatcacaagttcacaattcatgatataacaagttcacaaggatcacaaatttataatataaaaagtttacaaagatcacaagttcacaatataacaagttcataaagatcacaagttcacaattcacaatatccactcggatttagttgacatgacatgcttactcataaaatattttttcttcacataaaaaggttttttcatagcctcacaggaaaaccctaaaatctaagtgtgtgaaaaagacagactggtcgctctctatcattatatatactaatacataacatgtgcataaaaaatgat

SEQ ID NO: 42223 - DNA, 764 bp, Arabidopsis thaliana landsberg
atctcagagctataattcagtggcgtgtttattattgtcatttgtttaagaatatgaattggcttaataaagttcgagttttacttgattgttccgatacagaataggagaatctaattgcagaatcatgatttatcatcgcttagttcatctcgcatgataccttcttcacaggatcttgtctagtcatgcaactgactttgaacaaaaaatacttgctaaatgcagcttaagcctctatgggcctaacctatttagcccattaatgatttgtaaagaccagattgtcgacccataaattgtctttaaacttaagtaaatggtgacgactgacgactgacgactgacgactgacgactgccttgaagagttaattgtttatctattagttaatgctattattctccggttttggagatattaattactattatccagcctgtcattttcattggtgcaaattaaaaaagatttctatttttccatattcatcatacacgctgaaagataacatttagccgttggatgtatgacacgtcagcgataaacatacgtaatgaaggtttaaatgagtaaataattacgatattacccttaagtcccgcgcttaatttattttttgagggaaaataaagaaaggaaaaaaagaaacaaaactaacaaattctaattacatctactgatggatgggcgttaaaacacgcaagaaggcgcctgaaagagagagaggtcagtcaaaaaccttctctgtctctttgatttcg

SEQ ID NO: 42224 - DNA, 378 bp, Arabidopsis thaliana landsberg
gcttatacctcttgtaaaccttcaaaacgtcacatggaaatgtttttagattcccccacttacataaataaaatgggtgattataaatttatacattatttcctcactcaaaaagtatgttatatacctcggaataaactaattaaaatctttaagtccctagctttaagatcatataatgcatatattcctttcataaagaagacgttctctttttatcacttaatgtttatacccctaagatttgaagaatctaattcacaaattcagatcaagagctaaggaagctctatataaagttacttcctcaagataatattatccttactttagtataaccttaaaattctattaaaaatcagcctgaagatggcaagc

SEQ ID NO: 42225 - DNA, 476 bp, Arabidopsis thaliana landsberg
  unsure (1)..(476): unsure at all n locations
cgggagagagagagaatcaaaaccctaagaatcgttcaggttaaaagcgtaaaatagagagaaagagagacgggacctatgagaagggcgggaaaagatatctaggaaacaaactcgtctcttctattcttattttcaggtcttatagattttaattatttttattttatgtcaactaatatattagtataatattaaacaaatttaatttcttaccttttcagagatctacatcaagacgctgcgttttataatttttctttgtaaagtaacttatttacttttatgcccctttattttgccttccttactcaaaccctaacccgaatcggctttttgacaatccgaaattaggtaaccatgttcattgaatttatcgtttcaacacattcgaatcactgagtcctacgtttcagtttaattccctgatgcacattttgatttcggtttgcgtattggtcttcgagtnttccgtc

SEQ ID NO: 42226 - DNA, 793 bp, Arabidopsis thaliana landsberg
aaatatggaagagtgtattcaccacctcctcccgaaaaatcatggttgtggttcttaaagctctaagaagttagaagcatgcaagcggctcagaagaagacattaattttctaccatatgtatattattcactgatgaattgttatccgaaataagtttttgtaagagtgcttcagcgtttaactttttttttactgtctctcagcttctaggtatttttttttctcgcggtttgtagtgtgactgaagcttcttctgtttgtttttaaaccagcttctttttattgtattgtaaaatttctgactcaacatcaaatgggcagtctttcgtttattgtttgaggactttgttacagattcttttaaagataatcattacaatatatacaccccttttgacttgcatcaaaacagttcttttgtaaacaaaactagatcaaatgtaaccatcatccaactctagttacgtaagatttatacaatgtttcaggttacatggcatatttatccttaaaaaaatgcacgtagttgattaatttagatctaagtcattacatccatcaaatatcaaagagagaacaccgtttttgatgaagaagatgccatgcacggtcgtttcccttcaaggcttcagaattttttggaccgggaaagggtggttcttcctttgatacctagcttaaagtggttcatcctcaaatatggatgtctacattgtggaaaattcttaaatgctcaagaagaatctagaaatttcggggatactaaaggattttattctctaataatttgc

SEQ ID NO: 42227 - DNA, 822 bp, Arabidopsis thaliana landsberg
taagtttctgttgcaagcaattcctataacaatctttcttttccggttctccctgaacaatgtacgctttaagaatttcaaggttggaataagcctctatgtttactaagatacagaatcctgaaatgtaattgtctgcttacaggtcagctcttactggctaagggtgaaatagataatgctcttcaggcatttaagattgtgttagtcactgcccctgataatggtcctgctcttttgggtcaggtataatcacttgtgatttcattttctgtcacttagctaataatttgtaggtaggtagattctgtatactagaatttattggtggtagtaagaatttgattctgacgctctctttcttaccaacctaggcctgacacagtattagtctattgtttacttgtctgcaaattaataacttgctctatcacgtatacaggcttctgtagaatttaatcgtggacgattttctgagtcattacaactatacaaggtaagcttttccgtataacctactatatttctgtataccacttcttcattttggctgtaaatctcatggctttgattgttcaagtgaatcatctagtctatttatggaacaaattggtagtatcttgatttgtctatgtgttgaattcttttagagggccttgcaagtatttcccggttgtcctgcagctgtgagactgggaactggtctctgtcgttataagttggggcaactagataaagcacggcaagcgtttgatcgcgttttgcaggcaagtgggactgggatgtatacccatcatcttaggacatagccgactgtatgcg

SEQ ID NO: 42228 - DNA, 599 bp, Arabidopsis thaliana landsberg
ctcctgtgctagggtagtctattcttcttacatagcacgtatctctccatccatgttatccttatcctcagaagtcatcaaagatggagggcggctgatagccgggataacagaggcctgttccttccatgtcaaaatattcttggtgcgacgaatattggcgtctaccctttgctcggttgttaaaattcaactctctctcgattgcttttgcggtgcgtatagccatctctggtccttcagcatcgtttggtcggaacatcacccggatttcttctttaagtccattaagaaacatgccttttacaagttggtccttattacctatttgagctgcccgagcacggaattcattagcgtactcatctacggatcctgtttgtcgaagtgatgccaattgttcttcaggagagggccgaatatctcctcctccaaattcttctataagctcagtttttagttgagaccatgttaaagtcgggttctcttgtcgtagacatttgaaccagagtagagcatcaccttccatactcctgaatgcagcgtctaccttgcatacctttggagcgagttgcaaagtaaagtaaacttcaatgatt

SEQ ID NO: 42229 - DNA, 657 bp, Arabidopsis thaliana landsberg
tgactagcttttctcttccttgttcacgaaattagtcgtagaagacgaagaagaagaattcttgaacatagagaagggaggaagttgcgacgatggttgatccaaagaagcacccgtttgattactcgccataatgttagacatcaataagctgctaaaatagcctccacatcctttgttattattcgtcgtgttggtttgttgaatgttattgctaatcgaatgccgtggaccgacaatctgttgttctccatttgatccgaccatagttgagatggcagcagcgatcaccgagtggaaacttgggtcggaagtaagcgcttttgttagggtttcggttaaggactggctattttggactgtttttcctaggttggacgtcccaaattggacgttgttgtaaggatatggagtataagaagaatacccattaccccaaatcgcgggtaggttgagagtagacgggtttgatgatgttgatgaagtagaagagaaatttaggcttgtagatgggaatctttggaaagagttcgagaatttgttgaaatttaaagaaggcaatgaagaagaagacgaggaagagtgttgtggagcagtgaggtctagagtgacggtgggatgtaatggggagtgaagggtgggtgaatagaaggattg

SEQ ID NO: 42230 - DNA, 1630 bp, Arabidopsis thaliana landsberg
atttcgattgtaaggtgaacatattattgactaacctgctttaagaatcccgctccaaacgctctggtcaccttaagccgtcctttcaccctgtcattcactatgcaatggttgtcatcggggtgctcgttttttattcttgttacttcctgagttcatcaatggaaattatcatgcaacaagaacattgcaagaagcagaactgatcaaactaaggaacttcatctgatccatagtatcctacaaatgcggatatgatggggaatgcagaaacaactatatggtcaagagcattccaaaactacttaacaattagactgtacattctagatcaagagaccaagcaactacagtctacaaagaaaaaacactgaagagatttcacaaggtcagacttacatcctcgatgcttgtgctgtgatctgttgttagctgcagggcaaccagtttcgtttgcggcaaaggagcttcgttgttcactgtactatcgctactatccacgaccaaaggctctttgtttccatcgtctctgtctaaatcattgcgtctttcttctactctttctgctgtctccacactctcacccgtttcttctacctgatattgtgcaacaagagccctactatcccctatgttcattatatacacatcatcatctctcatcagtgcaaccagtaagcacgaacccatcaatgcaagctcaggattggtttcgagaaccttatcagtcatctctaggaatgcttgctctgtggcttcaagaccatttgacattgcctttagaaccaactcatgatcaacggtacccgcctttcgtctcttccttctcttatcaaccccttcttccacaccaacattatctacctcctccgtttcattttcctccacaccagacttccatgggaacaacttcctcccagaaattccttgtttagataaaccctgcttcaattttgacaaaagcaaccatctcttacttcccacagacacagcattgcctgcaccgatagcatcatccaccgaaaatgcaaacctatcagaacctgaaagatctaacgcatcttctgcttgagcctctgccagaagctcccatagccgtttcctctccttgacttcaaccacctctaatgaagacgtcaatctctttcccatctcttcttcttccttctctgttgctggacagctcgaacttgccatttcgtttacatggtcctcaaattcaccttgttgctctaactctctagtgctaatatctgttggattatcatcttcttcctccaattcccagaacaaaccctgtaactcactatgaacagcacggtagagattagccatcagaaactccggcgcgtcgggtccattgaaaccgtcgtagattccagcaaagagccatccttgcttctcaaaaacagctaattgcactctatcctctcctgccttccccaatgcccactgcaaatcgttctctccggaagatgctgccatagcttcaacgtcgggtctcacaatgttctccttcttagcaccgacgacgaaattcgacaccggaagaacccatggccgttgcttcttctccccgccgaaaatcggatgccaggaaaggctcttcttcttctttttccgtctcgtc

SEQ ID NO: 42231 - DNA, 784 bp, Arabidopsis thaliana landsberg
tttttttttgggtggtccttttttggttccaatccagtaataaagaggaatcaaacttattcaatcaatgtaagaactgcatacatctgaatatctgattatgtagctctatactttttacacggaattttactactaggaatatgataatagcatatagaggttggttggctttcagtccggtcatgaactactccaccttgggggccctaggaattttagagacaacttgtttgaatacttcaagtaaattgttcttctcttctgatactttccccatgaaactgtcaatgagctcttgaaattgcatgtaaacaaccgggattgtcatcgagcaaaccaagcctgcaaggatgtgcatggttataataatagttattagaaacaaatagaaggacgacataaaaagacaaggagatcgataacaggtcatgagttatatatatgtggtcttacatatatacaaaattgtgaggaggctgatgtagctcccaatgttgtatatgatggccacataaaggatggtctgccacatgaatttttatataaatgaatctttaaacttgtatatggaaactagaaagttatgatgtcgactagtgaagattcacacctttagaaatgttttgttgtctttcccatatgcaatctcatagagcatgaggagatgcccctccatcattgaaaacaaggctttaagtggggaatctggttgatttaactcttctggagttggaggtctcctgtgtaagatcacataattggtgaaacgttaagtaagagc

SEQ ID NO: 42232 - DNA, 405 bp, Arabidopsis thaliana landsberg
aacgaaggcaatttgacaaaaagagttcttaagccctaatatgatatagcggcataaatcttcatgaacctaggggaggttccattagattttgtcatttgaaattctctaattttaatttatgtagtaagaagagttttgtccttacatattgcgataaaatgtagatattaaagttggcttaacataatttgattacaatttattcaatgttgggtccaagtactcaagaagtcgaataacaaaataacatgacaattcgaacaacaattagaaaagtttattagaagtttattccaaatacaaaacaatttttgttacatccccttctagagatatctttaagcaactttttgttcttctaaacaatgatatgtatacaagtaacaagtactcatgttaatt

SEQ ID NO: 42233 - DNA, 772 bp, Arabidopsis thaliana landsberg
  unsure (1)..(772): unsure at all n locations
ttccgtacatttgaattcattcgtgagaaatatggtcacgtcctctatgaggtatgattattttcttctacatttagtcacttaaattacttagttagcaatttttcacaagtgtaaatttattgtagccttgtttatttttattttcttttttaccaaggtgactctccctagctctaggtaatgcttatgtcataccttaactttcattttataatatttacaagtttagcaaaaaaaatatacttaactagttgggaaaaaggaaccacaacaaagtctatatctccaagatatcatgatataattattgaacataagtattagaactttttttttttctttcgaataaagtattataactttataacttttaaatattggatctgtttgtagatttgtgttaatggtatatagttactgaaatctgggatacacaaattataaacaggggacatgagaaaatgctggagtataacaacatcacatgatgtcagatatttcagagagccggccgagcttttgaatgcctttcaagctaagctaactaaacatgtaacatgatatgtttttcttatgtaattacgaggaatacatagtatacttactttcattatgtatatacgtatatagatgcatgcatgtcaatatatcataaagactagcttacatgcattgaaatatatatattttttaaaatcaaatgtatatataacattncacatacaacggaagtagatgctatatatatnggctttggcttttttttttt

SEQ ID NO: 42234 - DNA, 530 bp, Arabidopsis thaliana landsberg
agagaccatgttaagtttcctttcacggaagagcagaaggtcttcgtgaaagagcaaagaaggatactggaatcacatgtgggacgagataaagcaagacttaaggttaaggatcctgccttacaagatacttgtggaaaagcttctaagaattcctttagaagttcgtttccttcttcaaaagatggtttctccacaaagaagcatggattagtttcatccgtaccagatcattcgaggaaacgtaaggatattgatccatccataaagcataaaatggttccacaaaaatcccagaagatgatggaagactcccgtgaagctggcaaaaacaagctgggagtaaaagaagcccgtgatgctggtaaaagcaagatttcactgggtgagaggttgtttagttatacccaggaacctaatccaggaaaacctgggcgcgtgattcctgttgatagcaagcacaataagactgactcaattgcctccaaggagccaggaagtgaaattcctacattagacaacgactctca

SEQ ID NO: 42235 - DNA, 888 bp, Arabidopsis thaliana landsberg
actttttattataatactttttatttttacttaaaaaatcaaataacctttattcgtataacatattttattattttctgaaaggtcttttttggtgattgatgacacttgacaggtccaaagagactagatttttcttgacacacctcacggagcatatgcgtaaatgtgcaatatctcatgtttaaaataaaggttttctcaatgtgtagtcaaaagactttgataccatattacttttcatttttaacaaactctaaaacttcacaatgggtaagcgttgttgttgatatcgtcctctccatacttagaaagaccaaaagagagcttttgatagctattgacggacaaaatgataattatttgataaaaatgttggttatagctgtaaaagggtaagagatcccttggagaaataatatattggaaggaaataaagtgaaagaatgtaacttctaacaacaaaaccatacataactaagatatgagtttgcatatttctacaacgagatagctctataaacatcatattctagttatttcaattgctcgatgtatgaggatgtaaatcattacttacagaagaatgatttattgatttagtacacaaagttatcgttgaagaaagaatgatgtaaataagtaaaagaagatggtcctagagcatcttgtcatgggcaatatgagaacccacatcttcgtcaggtatgttgtgttgtccgaagttacatttttttgcatcctgatatattatgtctatactagcttatggatgtgtattagttacatatttagcaccctcatttctgtgtatttaattttcatatgaactttgacaagcttttaaaaatgcctaattcactcttggtttggtgactgtgacaaatg

SEQ ID NO: 42236 - DNA, 778 bp, Arabidopsis thaliana landsberg
attggcgtccgtaagaaaacttaattcctttattcaaggtacgacgacttaatagcatcatatttattcttccttacctgataacgaaagctcaagctttttgtaccggttctctaattcttcagctgattctacaagtctgaccgcaatcatccaaaacaacgaacgtgaaggtctacattggatatgagtttcacttgagctttaacatagcaagagaaattcacacttgggactctgattttactgatcaattttgaaactctcaaacgatgcagatcattatcttcatagttcataccaagaaaatcaaaatgtagctggaaagtgaaattgaaccacgcactggttgaacaaatttcgaaacttagtgccgattgtctaatttctaatttggatcaatttgtttagaatggttctcaaatataattgttttgaataaatttaaagttcgcttttggattacagttcaattttagttggattcattcgatttagatcggttggaatttattctgattctccaggaactatgaatcgtagcagaaccagatgcttgagaaatgatttagcataaggaaaaaaagagaaatctcaagagaaatccatataaataaatagaataagattcatatcatatcaaaaaccatatcgcataactaagaaatcgtctagaaattcacaaaaccacaaatactctaaaaagaaatagtaatacctcatacagatatgaagattaagatagacacgaagaagaagagggacaaatagaaatgag

SEQ ID NO: 42237 - DNA, 591 bp, Arabidopsis thaliana landsberg
aatttaatacccttcccactatttcttcgtttttttgtcttccacatatttcacttatttgtgttttctcacctgttatagcaaaattaccaccttgcattcatgtggcgtttcacttatatattactgacacgtctactaaaattcaacataatttgaatgtgctatgaagggttgtaaacaattagagtcaattttatcaatatgatgtatctaatttttatacttgactggttttaggtagatatctgttaatgagcgcactgagcatgcatgcattatatatcatacacccaccaacttctaattcaataaatacttccaactttgtccacttttttggttatttaatcaactttgtgtagagtttatatatgaaaccaaaaaaaaaaaaaaaaaaaatctcaaataaaagatatgaaagatcaaatatcttaaatctaatgttcctaataaaaataattgattcaccgaattcgaataacttaaaaagtacactgaaattaacccaattcatatacaaagaattcgtacatatatatctaaaaatttagttttattaaatcctacatgttatgtatataactgaat

SEQ ID NO: 42238 - DNA, 529 bp, Arabidopsis thaliana landsberg
gtccaggattttctgtggatggcctggacagcagcatgggcgctcctgttcccaacgtctttctccgtacaccaagctggctggaccgcgttgtgctttacagctatctcggcgtcctctgatcctctcccatatctcgatttcacttttgtttgttttgttcgctaggaaaacacatgatatcatgcatttcgacctttcttgttttctactgtctcgtgtacggacatttattttattttatattttgttccacacagctatgctcgaaagaatgcgttctttatctggattcctgccttgcattaatcgaatcacatcaaaaaataaaaaacccaacttgacacgttaaaagtgcaactatatatattagtacaagcgtgcaatcaagacacgatcatgaaggtaagatgatattttttaaaaaatattcgtcgaagatggaaggtttgttttgaaacagaatattttttttacaaaaagcatctgaccatcgtacttgtgtctgtggttgcacaagctcgatttg

SEQ ID NO: 42239 - DNA, 630 bp, Arabidopsis thaliana landsberg
atgaacttatgtcatgattttcatctacttttaacatttttcaacatatatacaaaaaaagaagaagttatgttcccatgtgtgagtgtatattttaattgaaatgacatagttcgtgcgcgtatatgaaaacattaatagaccttatatgggccgctaaactaatatacacttgttagaacgaaaggcccaatcaattaatagagcaaacattaaaagaccttatatgggttttaaacttaatatacgtttcttagtactacaagcccaattaattaatagagcaaaaaagaagttgtaagccttatcgttgtttttgtattacccaaaatctctacaaagtgaaaacactgagctgaggatctcgctctctctcgattggtatctctcgctccgtccttcctcagatctgatcgtccgccggttttcacgtatgcgtcttcctcctccgccgccgtcctcgtgttccttcttctcgtttcccttctcactcctacgttcgcatccgattcagatcacaaggtaagactcggatctccagtcgttttttcttttcttttaatgcagctcgaaatcgagcactgtgtccgtagatccgtgatttgcatggtgtttgcggatgaatttttt

SEQ ID NO: 42240 - DNA, 847 bp, Arabidopsis thaliana landsberg
aaatttacgcgcatgtcataacgatggaaacgaataatacattaggcacagtatcaccattttgtatctagagaggtatcttctggggtttggcacaaaaatatctgaaatcttacaaaaatttcaaaacatatctgagaaaattcatggaaaagatacgatttatattcaaaataactgtgtacaatacgaagttctctttctctctctctgtcggtgttttagaaatcagctatcgttcgtggctctaatatttaatggcatattcaaagcacttgaagttatacaaattgggaattggaaggtttctctttactgcaatacaagatgggcaataccaatattaaatttatatcgattttgaagttataaatggaaaaaactattaatcacaagccaatactaaccggccacgttgtcagtagagactcttttaacatgcagtaggattaaattttctgtcagtcgaataaattccattgtcaccggactaacaatagtattttaaatgttacgtacgtaaacaattactactttacttttcgttttttgagattcaaacttgtttatgaatcaaacatattctcaagatctcgcgcttcgtttcttcttttgtctcaatgaacataacatatttaacaaaattttaagcgaaatgactttataacaatctctggtgatttttataaccaaagtttaaaacaaaagagaaggacaaatgtggaacacgacaagtgagaaggccaaagcgactgcgtgataaatccaagtattgcggcgaatgtgaaggtcttagaattttacatatagtcaacgatcaaccttaaaatcgtagtttcttttgacg

SEQ ID NO: 42241 - DNA, 1011 bp, Arabidopsis thaliana landsberg
  unsure (1)..(1011): unsure at all n locations
agttttacaaaatttttgtgtttttattttaaattgttttccggaattacttcctaactattgctgaagttgtcattgatgccaaaatccgtataacaatctattacaagagttttacaagtctaccgactttaacacgtttgcgtcaaagaatagacatttaacttcttgattgtcaagtgtttaaaaaaattggtcaacacctgttttaaaatttcagagataaatgttgtcattattcaataattttttgattggtctaatcgagaaaatattagattaacagaatgatagaacagtaaaagaaaacaatttagtgaaataaagagatcatgtaatatattttatgaaatactgttttatactactttatttttgttaatttatactacagtattatgtgaatttggattcaaataataatgatctatatagcataaacacaaatcacttagattatgtaatgtttggcatgagaattctctagatattcaaaaaatcaaataatcaatagtgacaacaaatgataagggtcaaaagattataaaaaaaaacaggcggtggcatgaagtatcagttaacaccaagtccattggatcctacttacaatggtcccatctctcaacgtcggttcttccgttgctttctcattattatttcatcgtaatcatcgcttcttttcttctttgtttattggtagctaccagaatttgtttctgctgataactggttttagactttgagtaataataaatcaaattgaaataaatctaagtgcgctttttaattggtatagtgtataccattattaaaaataaaataaaaactacaaaattataatttactcttcttggtcatttaagtaatcccaaacgcctgttttttttttgttggtggaaacctaaaacctagacttttacaaatcggttcctatcgaaatttcagttttacaataacatgtgtaagataaacatcccanaaaacatcccaaaaaactctttacagtatgat

SEQ ID NO: 42242 - DNA, 308 bp, Arabidopsis thaliana landsberg
acagtgacggacctgggcgatgacgttctggcctatatgaacccgcccggcacgaccaactctggcgttggcgtgttcgccacgcaatacgccgccgcctggtccgcttccgcttcgggcggcgcgctggagcccggtggactgggctttgaaacatttatccatgagttcggtcatggcctcggcctggcgcatccgttcgataacggcgggtcgtcaactgtgatgctcggcgtcaatgacacctatgattatcaagactacgcctggcataatcagacagtgtacacagtcttgtcggatagcga

SEQ ID NO: 42243 - DNA, 901 bp, Arabidopsis thaliana landsberg
tgcagagattcatagaaatggaagaaaaatagaaaaagaaaacgaaagagaagaaaatttaaagtagagacaaaagcatggaacaacgatgcttttgactttattagcctattaacctaaacccctagagattcagacacgaaccttattcatctcgaatatctcaaaccctaaagaccattaaacatcatcgctctcttatcactttcgcattcatcatcaactcgtcatcatatgtatgttttcattcacatggagttagtccagaataatagactgcatgccggttaacggtctaaacaaagacaacttggagtaacgtgttttcttacaaaatgacatagcaaaattagcatgcatggctcaggagttatcacatatcgtgaaaacattttgggtttgcttttagcgattgccatttgtttagtgtctcaaaagattcttgtggcccgtataatgggctttagaatatcgttctataagcccatcaaattaatgaactgagtattatttccgggaaagaaataacgttttatgcaattacgacccaattaactttatagttttttaaaactgatggggaatgacccaattcaatgttttcaccctctcaattgcagccattagttaatactgtagtaatgtttagaaactagtttcaaaattttcgtagaaaaattcatgtaatatttttaaaaatcattcgatgtgctgcatgcgtatttcccaaaaattaaagttaatatgatttaagattttgttcacaattactgccactagaaaaaggacggtgagattaatattttacaggtgaaaagatttttccaagacaaggtttaatttgaccatgcggacccatttacttacaaggtgtcatggtttacaaaagccccgttaaatg

SEQ ID NO: 42244 - DNA, 598 bp, Arabidopsis thaliana landsberg
tgcgcacctattgaccgttctgttgctgaacgactcctttgtacttgacattgccagaagccacaaccgttttttttgaagacgaaaccactagggcgttttctggttcgtcatcaagtctcatgcgtttcttgagaggcaagaaagagtcgcttgaacctgaagacactgaagtctccgtctttgcgtcgtcgatgttgttcattagaattcaagaaacagagtagtagaaagatacgagagacagagaaagagaagcgaaacaaaacgatgaagaaatataatgtgaggaacagagagagaactatataaagagagcaaatcgtgggagcaaattatgtttcttaatcttgttgttagttgcggtgcttgagtatttatcaagttatcattttccattttctatttgttgtagtttctataatttagctatgagagaaaattatggaaagtattgaaattagagaatttccatgtttcgtcggttcattaattacttgatatatctgattggataaaaaatggaaatacgtgagagagccgctggaaaatatcatcaagtaacttagggttttatgtttaccctaattttatcatt

SEQ ID NO: 42245 - DNA, 974 bp, Arabidopsis thaliana landsberg
ttttggaccactatattttttttctccatcttccaattttattggatgcatcaaacgcgtctttggaccacagtcgcttttgattttcactgcaagcttcatttgttcatgcttgaaacagaatggaatgtctcagaaattttactattgatccaagatacttgatttgtcataaatttctaggtcggcaactactgcaagtgaaaaaggtcatcctcatacatacagttgttctatgacgagaatatccggatattttgtcttgattcataggaaacaattttgaagatcatagtatcaaaaagaacttgaaacccgaatgaaatagtattcaactttccgttcttattagtttcactataaaaaaataacgaaaactttatttgtatttcgtacaaatccaattcaatagtgcatttattttttccatgtgctccttagatatactgcacgtgtagtattaaaatggttggatgtatttctggtgatgaggcttaagtagctcatagaattaggagacctaattaagtaactcggaaaatgtagactctaactcgcagtaatgtgaaatcttactgtattacactttattctgaaaatctagtagaaaacaccatgagttttttaatatgacgaaagacgaaactatatatacttgtaaacgtagagaactaaaatttatatacaatttagacattttttgttggaaatatttatgatatttttttatacaacttttatacgcctcttcctatgagtatttttagtattgtcggtcaatttcatacgaatacgcttaccatcattaacagaaaaaaacaaaacaaaaaaacgcttatttcatcaagcatagtacggcataaagtaatacaaaagaatatgataaattcaaaacggcttattaagtttttgttgttgttgttgagaggatggcataggtttattgagtgattcttatcattggaaacaaaact

SEQ ID NO: 42246 - DNA, 502 bp, Arabidopsis thaliana landsberg
  unsure (1)..(502): unsure at all n locations
cccccccccccccctccatttcccccccccccccccccctcccccccccccccccccctccccccggttaccttcccaccacccccccccccccccctccccccacttccccccccccccccccccccccccccccccccccccctcccccctcccctccccccccccccccccccccctttcctttatactccccccccccccccccaaaaaaaaaccccncccccctcccccccccctccccccctcccctccccccccccccccccccccccccccccccccccccctccccccccccccctccccccccccccccccccccccctcccctccccctcctctccccccccccccccccccccctcctcccccccccccccccccccccccccctacccccccccccccccccccctccccccccccccccctcccccctctcccctcccctccccccccccccccccccctcccctctnccccttctcccccccccccc

SEQ ID NO: 42247 - DNA, 1219 bp, Arabidopsis thaliana landsberg
  unsure (1)..(1219): unsure at all n locations
caaaactctcgtttcctcttttattcagagcccaagcaaagtcaacaccaatcagatttcccgtcataagagcttcatcatcttcgtcggcgtcaaatcataaaccttcactgcttaaaaccaccttcatcagcctcaccgcagccgcagctctgttctcagcatcgttttacttcgtcaacaaacgcgccgcgatgactccagttgctgtggtagagacgacactcgagaagcacctcgagacacaatcaaacgatgtgaatgctttatcattgctgacggaaatcaaatttaagtccgataaacatgagcaggcgattgtatttctggaccgtctgatcgagatcgagccatatgaacgaaaatggccggctatgaaggctcggattctctcataccacgggaaaagtgaatcagcaatcgaagctttcgaggagattctcgaaaaggatccgatacgcgtcgatgcttatcattacttggtgatggagtattacaactctaaacctaaattaacagagatagagaagaggatcaacaaagtgattcgaagatgcaagaaggagaagaagacgaaagagattctcggtttcagaatgttgatcgcacagattaggtttattgaaggaaaatcagttgaagcaattcggatttgtgaagagctagtgaaggaagatccaaatgatttcactatatatttgtttcaaggagtcgtgtatacattgatgaataagggagaggaagctgcgaagcaatttgagcatgttgctagggttataccaaggaatcacccgtctagagagactgccgcgaggaccacgaactcaaatgaatggagagtcatcgtagcttacgataatgtctactgctatttatctacatttgctaggctttccatggcttctttgtttaataagtttggctaagtatggtggaaattgaaaaagttcaaaactctctattgatttttgtttgtgattttaacactttgtacaaagattgggtgannnnnnnnnnnnnnnnnnnnnnnnnnnnnnnnntgataataaagacaagatgaaattagatgatgcaatgtgactgaaaccataaaggtcacgtgcgtttatttgctttaggcttctcccaatgaaagtgataatacatgggctaaggcccataaagtatttctcttaagttaagctattgggtatgaataatgagctttgtacctccccat

SEQ ID NO: 42248 - DNA, 671 bp, Arabidopsis thaliana landsberg
atgatcttgtttactctagaattagttgacgattcgacgaatttgatacgcaatgttaaattcaaaaacgtgtgtagttgagatttgagtaaactttgttttgttaaattattaggaaaagatgtatcttccgatattttattattatgaagttggtagtttaaaattgcaaaatttatatagaaatattgttagaagttttatatcatattcgaagaaaactccgatgtaactctattaaataaagtataaattatccaaaagattataaattaattttgagatttaattctataaaccttcacaattcgtagatcttattagtttatttaaatttactttaaaaacttttgtctatatttttttttaaatagaagtggacttcacgtgaggatgcagaaaattattgagacattttatgaccaagggtaaaactttataaatataaaacataagatatcaagtagtaatatactgattttttgggttctttgaaaaaaaaaggagagaaaaaaaagaaaagaaaaaaaggtaaagaagaaactcacgtggacccaatatgatattatgagccagtgagagacgtcgaaccacgtgactcacacacacgcgcgtgtcgatttgtcgggtcacgcgccgacagaagaagtcttgacaatcatacgatactt

SEQ ID NO: 42249 - DNA, 544 bp, Arabidopsis thaliana landsberg
gattagtgctaagtacttggaaggtttcgaagccgagactctgcgttggatcaatgctgcaaatgacatgaaggcgttgacctaggcctgtgttatgtaaataaaagacagaaccagccggaatccagtagatgtctcctgctttcagtttcctctctccgaattcgtctttgcatatcactccaagggttgcttcacctgcaagtaaacacatgtatagagagtgagagtgacacatgttgaaagaaagagatacacacatgttgagagagagcgagagataccttgacgaataaagatgagaaggcttgagtcaagatactgagggacaaagagggtcttaggttccattgttagaaacccaatgtgcattggcttctcaatgatccttcctcttggtgataacacaactctcatctctccaccttctgatttgatcacttgcctcgactctctcatcatgaaccatcctcttcttcctccaccacctccttctcctcctcctccccacgtatctcctcctttgccttctcctcccatgctc

SEQ ID NO: 42250 - DNA, 681 bp, Arabidopsis thaliana landsberg
tacgttagaaaatttagttttctatcattttacggaaatgctatctagaagcttggagtgaaaaaaaaagcgtattttatgttgagaaaaaaccacacatattgaatggtgttttttcataatcaatattaaatacgcgtttaagaagaaaatccaaaaaattatcatatccaccacactattaaatatgtcaaacgaaacacaaatcaaaagctaagatcttttaaaaagacatctaaatatacaattaacattggatttggactatgttatccatcatcatcccctacatcattaaaaatacatgttactatatacgcaacacttgctcttaatcctcaaataaactattgcccatgttgctactagtggatcatcctttttaaaaatcgacatctctcaaatgtttttgtcaacaatgcatgtattctcttccttcaatgtattcagtctttttcgtcaaaccacatttcaaaactttacgaatttatttttataagaatgtttttgatatgtttcattataaattaaaaatatgatgacaattgggttcggtgtgggaacaaagaaggtggagaagaaatccgactttttcgcgtgtatacattgaacttaagagtttttatcctctacatcaacttccaccgtacacctctctcaccattaaagacgtttctcatt

SEQ ID NO: 42251 - DNA, 872 bp, Arabidopsis thaliana landsberg
aaacttgctaacaacaattctctaattctttgtttatatctgatctcttcctccatgacacggggttaatctaaacttctaaacgcatattgatccaatagcttatttaatatatcttgactgtcaaccattaggttacttttgttacgatgaatttttcaaaagaaaaatacatgaattatgggatgaggaaaatctagtgggtcaattgaccataaaggctagaaatgattatttaattttgaggcttgagaaagaaaaaaaaatgaagaataaaaatcggattgtgactcgtaactcgtaagcgtgacgaaatattaacgcaacatttatatgtattgggacaaattattaacgaataactaccaaatgcaaaaaatacgagacagttgagtacttgagcttggtcacaaaatcatcatcaaggaaaaacaataaccatacagtaaaaatatagttctacaactttacaaatttgaaagcgtgtttagaatgatgcacacaaataatcaatctgtcaaaaaaaaacatattgtttgattttactctaagattaaggcgattgtttttacttaagatattcttaactgatgcaagttacccctgtaattgtttgagattgctatttttaaactctagaatacgaagaaaaaaaaagtatgaattatatagttagctgctttaaatctagagtttatcatccgaaaaagggatatctaagctttattatttttaatgtaatcacgaattgtgtccttttcaccaaaagagtcattcgtgttcgtattttattccactaaataattctataagttctagtatattcaataattattaagaaatctcatcttaataattttaattagagaaaa

SEQ ID NO: 42252 - DNA, 634 bp, Arabidopsis thaliana landsberg
tgcacaacaaccgtcatgagatatatcactaacacattgatgtaaagacaatgggtactcaaatttttttatgaccgccatgaagccacacatcttgacttctcaatagttcaaatattttagtttttgaagtttttcaaaatgtaagttattttccaaatatatacttcagaattaatctttttccataaatctcctcttaaaattaatacgtagggataatatttatctggatatcagaggacaagtaatcaacccaaataacacaaaagtatttgctcatttcttaattcaccttttcttttctcagatggtgtttccatgcatgtgggtaggtcctgctcacagtataagaaaaagcgaggaagctgtagatacctctggctccacctcacatgcagtacacacattaaattttggagactcaactctcataattctatttggctcaactggtcaatatttattgtatctaacctcttcttttagtcttgactcctagtgattttctaccaatttctaaataggctaatatgtttcgtacgtttattgattaaatatcggctttcagatttttttaataatcactcttcactcatcttgctaattttgactattttccattattagagaa

SEQ ID NO: 42253 - DNA, 487 bp, Arabidopsis thaliana landsberg
atattctgggaaacatatatagtgtataaatatatggattaaaaaaatatactccttcaagaaaatatatttatttagtgtataattatatagcttaaatatagagtttgattagtattatttagagaaaatagtagaaaagagtgagagtaaacaagtagaaatagaatatacagtatcaagagaaaatagcaaaatagagtataatttttttactcttatggaaagtagaagaaaatctattctattttttaacataaatggaagaaaatagaaaataaaaatgattttatttatcatgaatgctacaaattaaacaaaaattgagaatagaaaaatttcaacatttttatttcactctaaaaccttgattagagatctttataattgcgtatttcaagaacaaaaaaacatgtttgcatattttaggtaggatgatatctcataaaccgcacttatttatcttttttttttctgaaaaaaacac

SEQ ID NO: 42254 - DNA, 566 bp, Arabidopsis thaliana landsberg
ttttgtttcaataatatatattacctgtttcgacgaaaaaaaattaaaatatttattacctttgatatatgtatgttttagaaaatatattaatttcttttggattcatttcctttaaagaatttgtatattcattcatcactatccattaaagagtaaaagttaaatattatagtaactggatttttcttctatcaaagtattacttataaaattccttttttttaattaaatataatccaatttctttctcattttgtctatttaatacctagtataaatcaatttgattgctaattagtgctaatattaaaggaaaatgaagtttcactttatttcaagggatccacttgacattttgctttatgtaaatttttatttaaattatacataattttaacattataattaattgaattttagagatctagtttattgtgcgataaagaataaagtttagtgctaatttataaaataataatttataaagtcatgacatgtataaaaagaaaaaaaatctttcactattgtggctccatttggaattttgtcttagttagatttta

SEQ ID NO: 42255 - DNA, 815 bp, Arabidopsis thaliana landsberg
aaccgcgattttattttttcttaactatcaaattatttaaccaattcgtaatatttgattattttacaaacaaatggaaaactatagaaatgaatgtagaaatatttcatgttatcgtgatccaaaacttggtgcaaaaaatttcatctgttattttccttcttcctaactttgaacttcggtcgtgaagcattttttgttaacattttttttttgtcgaagctttttgttatcatcttcgggtaactaaaagttaatgccaatgatataagtgataatatgtaagagcccccgctaaaagatttcaaaagtttgacagataattttttttttttttttttgaactaagataattaaaactatgttttattattaattaagtgtttcatatttgtttataatattgcacttttcggtaaatgtaatttatctattttaaaaaatcctaagaaatttgtttttgttatatttactgaagattaatactatatacttttatgcaacaaaaaagccaaaataaaatgatgattcaccatttgttgtgtgcaagtaattgcctttctttcgagggacatgagcgagagacaataattggagttcaatcaccacgtggatttacgaaagaccacaatcacagcaggcgtcattgtcaattgtattatttcattggaaacatataaacatgcaaaactgaaatgtttcccaacaaggcaagaacacaagtttttgggcagattacggttcaatgaaagttgcccaagctatatagatacctaaaaaatgattatagttttcgaattagtaattagatgtat

SEQ ID NO: 42256 - DNA, 246 bp, Arabidopsis thaliana landsberg
tataatatactgtttcaagttttcttttcctgtaatcaaaagagtacagtcacaactcacaagcattgcaattgttctgaatttgacctaaatggagtagatttattaaggcacacacagatgataatcagctaacaacaatggctcggtgaagaagaggaaaatttctgctaacctcttcgtttctccacggaatcaaaatcagcaatcgatcattctttcagctgttctagctcatcatttcag

SEQ ID NO: 42257 - DNA, 733 bp, Arabidopsis thaliana landsberg
ccttgggatttgtttcttcgaaggtccttacgaaagtcaatacgaaattgagttagcttttcagtggcggtcattgtggattaatccgagctgcggtaagagttatggcctgttaactgaaaatgtatcaatttgatgcgtaaaagaagttcatccggaaacttcccttgaaaacctggaaaggttgtagccagtgccggtcctgtcattttcggggagtctttttaaactgttaaattttctatattttgctaattgtgcgttataaagaagaaaaaaaattcacaatgaaacaaaatgcttttttttttttttttttaaatgggcttaaattctttcatttatttctaagatactcttaagacactattaattttttacacaaaatgggccacgaaattagaggcccaatacctatatgttatatgtatgtgtcaagggcaggacctgggtgtagagggacattctcacgatccaaagtccatgatcagacccagatctgttatgtgtcgatccggaaacttctctactctaaaagttgatttagatccaacctcttcttttgatatgagctttcatatctggaaggcgtttgtgaaaatagacttgttattaatgctcattgatcatatagacaaacataattagagtatttgtgaagttgttagtgtcacggaagtggaattagtcatatttgtgagtttcatgttctggttaaacgtcttacttcatt

SEQ ID NO: 42258 - DNA, 1449 bp, Arabidopsis thaliana landsberg
aagaagatccctaacatacctgaaaggattttggcattttaagaagtgaaggagaaaaacagggagaacgtggataagatctttcacccaaacattacttacaaagaaggcagaccactgcacgtagatggaagtaacaccttcaacaaacaaggtattccttcagtaggtaaggcacctgcagaaccacataatatatattagcatgctttgtcattcataaactcctaaacctcctagtgaagcactattcagcatgaagaactatgccaaccaatttgtgtagccgttccaagatgcaacggacgtggccgattttttgaaggtacattgacatttctaaaggaaacttcatcatcaagaccataaacatctttgacctgagggggaacaatagaaagtagttgtttttcacaaaactgaaatgtcacaattgcatatttagtcagcagccaaagtccgtcgttctgacccttgataagagctcggaaagagtatctccttcaaaccattcaaaattcctgctactgcattctccccagagtagacccccttccccaaactctccccagcggcacgtccctgcataataaaaaattaacaagaattgtatcagaaaagaccacaaagctcaaaagtcaattaagttgacacaaaacatgaatcgtatttctcttgtaactgtctcagactctctaaagtatttgctagatcatatgctaccacctgagaatacttatgttcatgtgaggataaaatggcacccgtctacattctattattggcactattttaaacagttcagagatgctaagacaatgtagaatgaaagatagtattcaaaacctgatgcattgtgcctcaacgatgcatgtaagaaaagatgatgacagcgacgagtgcggagcttggtaactaaggcttcttctgttagaccatcatctagcgaatatgctttcatagtctcgaaaatagatatcatacaatacccccttgctgaacgagatatccctgtacttacagaaaaaatcaagtcatgtaatacttatatataaatttttaataggttgtagcgcaaaataatatatcactgactaacaaaataccataagaaatacttaccaacaacaggcataggatcaggaaagtcaagatcatggtcaacaccgacaagcccatatacataaggacttcctggatgtgcatgcctatatacagtacatgtcagacagacgaatgcaagaaaaaaaaagtttcagtgtattttcctagctaataagataatgaatattgcagcttgtttaatcagaaaattccaggttctatcaaattacataccctgaaataaatcgacctttacgggagcgtgctggtgttggcccctgaacttcctccacaatacactacagtgaagaaaaaaacatgcagtaattttttatttaacatgct

SEQ ID NO: 42259 - DNA, 554 bp, Arabidopsis thaliana landsberg
aagaatgaatgagcaatagaatgttgtgggtcagcggaatgcttctgaacagtggaaggaagtaacaaatgatgtttagtagtcgaagttctggtaggtgttgaaagtttggctgaactgccaccacgccggaatgacgtcctggaagacgatgttctgtccgccggtggagacgagcgcgaacgtgaggccctggccgatgagcccgcctgcgaggcagtgccagttggcgccccagttcctgtacatggggatccagtccgtgttggcgcccttcacagccatgctatggatggagccactgccggcgacgttggtgatgagcaccatgtagaagtggtcgaagccggcgatggtgaagcgcacgccgccgctccgccagcacttgacccgctggtagaggacggggatgatgcctgcgctgtagatgccgatggtctcccaggcgggctgggacatgtcgaagtgggggcggggcgggcgcaccaccgccgttaggagctccagttgggcgggcagaagttggtggcggagcaacggcgaagttctgctgc

SEQ ID NO: 42260 - DNA, 840 bp, Arabidopsis thaliana landsberg
  unsure (1)..(840): unsure at all n locations
gaattggaaggcatcaaagttaatcactacgagagattgccaatagaagttattgaggaagatgaagaagaagaatcaaacggtgtcgttttggctgaggcttattttgctcactgtggatttggtgagagattgtgggagaagaaaggtaaatgtgggatgtgtgaattcggtgaaaacgacggcgttttgtatgttagtcctaaagataggccaatgtttagctctgttcttgatgaaattgaaacttttgtgtcttctagtaatgttgattactaatttaattcaatgggtatgttcaaaattcgatctttgatgattatggtctataatcttattggtcatgctcaagtttagtagtcatttagtgaacattttgaattcagttgcagagttataagttttcaataatcctcaaagttataatcattgattgaattcaaataagattcatatatcatgtttcttagattgtaatgatgaaaggtgtaccaatttgtaagttttcaggtgttaaaaatgttatttccactacgttttcatatttacacgttttaatacaacgagtttaaactttttacgtgattatattacgaagactttattcaggtggtaagtgtttggactatttacatgacatatctgtgtttacaaagagtcacgggctgttataatttgatgattgatgctgagtggtgcagtaacatattactgtatatgaagtggtggtaggagaagtaggcaaaggagattcttttgcggctctataatgcctaaccctactacgcacttcgtttttttcttttttttgacggngtcatgtgtgagagaaacccaatt

SEQ ID NO: 42261 - DNA, 590 bp, Arabidopsis thaliana landsberg
tagcatgaaaaaaaatagggtttctacaatactcaatttgattttaatatgaccttaattaagtgattgggctagaatttattgacatttttagactagagaatcagtttttttttttgttttttaaaatatttttttctttaataaattctagaaaatctgatttctaagacgggaaacagtttgtgtaaatgtgaaagatgacaaacgaaattgaggcgaaagcaatatgaatgaaatatggaacgcggtttctcttaaatatgagacaatgatctattccatattttgtatttttatataagctttacctttaaatttataataatgtgtttttaacactttttattatttctaaatttgggtggttataactttctgtgatgtcttattataattgaatagtttatcggaaagaatgatccacttaaattgagaaccgagcaaaggtgccactagctttgctttgaagaactgaaaccaataacgcgttgacgtgagctattgtttgtaattacacaaaacgatatatttgatccaattatatgtctattgaatcttgtgaaaatatttatttcttgtgtcaaatt

SEQ ID NO: 42262 - DNA, 471 bp, Arabidopsis thaliana landsberg
atgggaggacctcttgtgcaatgcatcctcctgctttgtatgtatccttttgttcattcgctgaaataataggtggtcaattgtttcctgagattgtccttggcccggtgcatcagtgcttccacagcttttacagtggtgcgcatgattgccgccgtttcttcataactcaatccttctgtcctgatcagtataaaagccgcacgctgcgcatccggcagtttcttcaatgccttgaacaggatggccgctttttctttattatcatactgcacacccggatggtaaaaatgtgcaggctcctcttccctgctcccctgccctgcccatggccttagccaggccattcttttctgcgccttctttatccgttcagcatccagtgcgcgggtaagcgcgatgcggtataaccaggtagacagcttcgattcgccccggatgaacctatcgaccggtatacctgtatgaata

SEQ ID NO: 42263 - DNA, 586 bp, Arabidopsis thaliana landsberg
ctgttcgtcgatcgaacctccgaatctccgtcaattgacgaattcgtcctcgtctccggcgagagtcttcttccccggtgagcttctccattcttgttccccgttttccttcatttctcatggtgtggtcgcgccctggtcccgaccgccccggcgtgcatcccccttccccctggtgtgccctatgcatgcacccccccagcgcggcatggctggcccctagcgacagtggccagccctccccagccgagcccttcttgtaacacccaaaatcttattcttgaatctgggggaaagatctccaaaggttttgaattaaaatacctcatacaaaaaaattcttattcttgaagttacatcttccaaaacaaatgtggtttttaatgaatgtttaataaaagtatacctatattctagatatgcgtttgttaaatatatatatttataagaggcctctaaagaaaatgatacactaggaattattttctttaatacctattttctattttagtatggatgtaatacatatttaaaaagtggttgtttaaagaggataatcaattaattaattagtaaataaagtata

SEQ ID NO: 42264 - DNA, 760 bp, Arabidopsis thaliana landsberg
  unsure (1)..(760): unsure at all n locations
tcagtttccccaaaaaaaaaaagtgttgtagagtttttgtttccccctctcagaaaacggttatgttcatctttttagtgtggcttttcaaaccaaatgaataatttatctcttagactctgtacccaaaactaataaacttgaaacttaagtcaccacncatgtaaaaattagtggtatatatatatatgtacatatattttaaaatatatatatatttgaatctatttgaatgtgtcatagtagtatttgctagcaaacccggaccaccaaaagtcaatcacgattcacacattctattttgttactccccagtcattctttagctgtcagcatttactttacatttctctgaaaaaattacaacgtttcacaatacaagaaaaaaaaaaactaaagaagcaattaagtttcatagtcaaaatatgcaaatatatgcacatgcagttgagttttagaatgccccaaaatgggaacttcacatgcatgctaaaataaaaaaaattgtgattcagaaagttaaatttgcagtttagaaacaaccaagttgaccacgtgataagttgaagtacagatgcagaaacaaaagaagtacctttcaccgttacttcgttagtcagagactcaggaataataactaaatcttgtactatttaacatttttaattaaattaagcgattaatacaacaacccaaatgtaattcttcactgttagaaatgcaaaggaggtaatgttatcattattattttttggtacgc

SEQ ID NO: 42265 - DNA, 534 bp, Arabidopsis thaliana landsberg
tgtataaaaacctgttacaaactccgacattccagcggtgccggtgctttaattaaaaacatagcattaactattgcatggtaaaatatagtgtttatacatcaagaaacttaagtctcgttctactacttagtctatgttcaaaagctctaaaactgatagtaagtcgctaaagttacttgagagttttagaacgggatacctctcagatagttgttagttgtcttaacacaattgataacttattagctaaaaactagctctagagatttgaaacagggccttacactatttttctgtacattagtcaaacctaccgtgcatgcaatgcaagtacacatctagggtagcatggaaggtcgaaggttgcaagccgctatagagtcgatgatccatgcgctgctcacagctttgccaccagaggcacaggccagagcctgagcatcagcttggctacgaccagtatccatgccatcgcttgatcctggttttgccttgtcctgattctcgatgctgtatacgatgaggatgagg

SEQ ID NO: 42266 - DNA, 815 bp, Arabidopsis thaliana landsberg
gttttgatttaatttttggctttttttaaaagatttttaggctaagagccccattagaaacaccattggaggtggtcttagatgtaaaattaggtttggagacctctgtaaaactttttcaacctatttggacaacctgtccaagtaattaaattagcggtgtggtttacattgagttttttcaagacaaaaagcgaattacaaatatatattgacaatagtaatatcaaaaaaaataaaaattggcgttttatgtaggacttaacatagtaatctaatattgtttctttaaataagaaatctacatgtacacctttttgattaatgaaaaaagattgagataagcattttaatattcttgaaatcataacgatttaaaccaaattttcatgtttactattaaaagatgtaatgaaataattaatgtaccttttccccatgtcttactatataaatttggattattgagtagcaaaatcgacaagcttcaaaaataaaaacataatgagaaatgaatcatttagaattgaaggaatcatgtttgttatttatcacttctttatcttcttcatctgggctgctttttgtccactagagccaccacaaacaatagaacactcaatgccacaaatgttaccaaaacatgaaaacaatccgttatctccacttttcttgttcctcccacttggcttttggatgggagctccaatcatttgaggatttcttgggacgatttcgttaggcttgtaacttgatttagggttaaagttagagtttgttttgtagtcagaacttggttgataacttgaccccac

SEQ ID NO: 42267 - DNA, 700 bp, Arabidopsis thaliana landsberg
tcccatgacctacaaaaattaataaaacaagtaactaggtacaatcacgttcacattaaaaaattaacaaaacagaaataagccccaccattctccatgcggccggatgagcctcctctcggcaggtctcggaccaagcgcattgctcttcttatacctaagtatacaagtaaattcaatatgatgaaatgattaaaagctaatatcaattaaactaatatgcataataatacctgaaggacgtagaaccatctaacgtgtcgcccgcgctgcctgccccaatagggtcaacctcctcatcctgctcaccctccttatcctgctcaccctcctcaccctgaacatgagcatcctgctgaggagcctcctgctcaccctcctcaccctgcacttcgtctagacagtcgagaagttgttgctgcctctgtcggctctgtgaggtgccctgaaaaagcccactgcccgagctgtcctcgctggccgcgctgcccccactcctcctcgatctcctatgcttgaacatgttcaactgtagataaattaacgtcaaaccacagtatatgaaacaaataatatgaaaattaataatgtgaaaattggaatacatagcttaattgattaactaaaagaaacatactaatcaaaagtcattcgcatccgatgatgcttcttcggctcgttgtttattcaacactcttga

SEQ ID NO: 42268 - DNA, 580 bp, Arabidopsis thaliana landsberg
  unsure (1)..(580): unsure at all n locations
gattgattactccacgctcttaacctcttacgcgagatctgacgatgtgaacccgacaatgtcactgcaaacactgttttgaaggccgatgtaaaggcgataaagatgtttatgagaatgtgggttgatgaagaaggaatcaaactggagagagacaggatagttgaaatggcaaaggtttacgttagagtttgtttagagatgtatggtaacgtggtatggaatgcaagagagttgctgcaaactctttgggatgactttaagaagtgcgaagaggtgtatcgaacagcggttatctctttgtcgaaactggatgatgttgaaggtgcagaggatatatatggagaggggaaaaaaaaagaacagaacgtaagggaacaggttaccaaaaaggcaatgatgctgttacatgttttgaatctgctcttgatcttggtcactttgagccttcctttttttgtttgccctccgaatttgagcattcctctggttgttttgagtgttattttgacgcacattagtattactaggcttatagaaatgtattcntttagaaaaagaataatgcactagttgttcg

SEQ ID NO: 42269 - DNA, 549 bp, Arabidopsis thaliana landsberg
  unsure (1)..(549): unsure at all n locations
tgctgctgaaagctggttatcttccagatatcttttcgggtcgctgaccaggatggcattttcattcagcaagccgctgctgtcctgattgcttggcggcggtggcgcgcttttgaattcaatggtcacatcccgcatttcgccaatgttctcgctcatgcgcatacgtaacataggcccgcgtatggtagcctggccagtggtgatgacggcgtgaccttctacctgcaattcatcattctgcacatcatagcggatatcgtcaccagtaacctgctggccatccttgcgcattaccgcgttgccggtcgcgcgtaattcgcggtccatacgcaactgcatggtatcgccttcaatttcgatagcgccnnnnnnnnnnnnnnnnnnnnnnnnnnnnnnnnnnnnnnnnnnnnnnnnnnnnnnngcgcgtgccggagcagtcgccagcgtgccggtggtgaccagtgcccagataaggcacatgccgcgttcctgaatagtggatgagtgaacttgcaattagtcaaaaaatgatgatttcagtgggct

SEQ ID NO: 42270 - DNA, 474 bp, Arabidopsis thaliana landsberg
gtgtacaaacccatctctatttccatattatgtggattcataaattcataatctttcatggatttgtcctacaatgaatattcttttgtagtgaacgtcataacaaactcaaaatgtatgaaccatgatttttcaccggaatgaacctgaatttttggaagattttcctgaaagcttacgtgtttaatctgtaattactagttttatcaagagtggattacttagaaatgattatatataccgagagaaaatgcaaaaacgcagttataaacgtacatgaccaaagttttagagtagttgaataaacaaacctttaacaaaaacggaacccaccacacgaatctggaaaggtgccgagaaaagtgtggttcaagttcgatggaaggagacggtcaatgtcatacaagggatgttagagttaaatccatgcgagagtgtggtcacaccgttaaagtagatttttttttttcactc

SEQ ID NO: 42271 - DNA, 561 bp, Arabidopsis thaliana landsberg
acatttatttcgtaccaccctgcggcccatgttcttcggtccacagcctgccgctccatttattgttcgcggcaccctgcacattgcgatgcccgtaggaccacaactccggccgcgcatccggacggtcgatgaacggattgccggaaggcacctcgccttcgcggtcgagacggatgatcttgcccagatcgttgtccagcgtctgcgcttgctgcatgccgtagtagcgttcgccagtggtgatgaacaacgtgccatccggagcaaacgccaggcgtgagccaaaatgcttgtcgcttttcatcgccggctgctggcggaagatcaccttcagattccgcagccggtcgccagcaagctccgcataggccaccgtggtgccattgccatcttcgccgcgcggttcgctgtaactgaaatagacgcgacggcttgtcgcgaactgcgggtccagtaccacgttcagcaagccaccctggccctggctgaacaccggcggcactccactcagcggcgccgagagatcgccatcggccgagacgatgcgcatgcgacccg

SEQ ID NO: 42272 - DNA, 580 bp, Arabidopsis thaliana landsberg
tttcaatgcaacactcttatgtgttgcagccttgcagcttcttttgataatagagattatggatctttcaggtgacttgaatcatatgataaactctaaagtactttaaaagaaaaacattcgttatctgtctcgaaatatttctatgttcaggtactaatttttcacagcatctggttttacgtgtccggtttcttaaggtacgcgcatggcgtaaactgttgataacatttgctttttattgcttgttggtctactaaagtcaatcactttagtcgctacctagacataaaaagtttagtacttttagtcttttacattgattatcatctccaacaaaaccggatacacatcacatattttatcctttggattaaaccgggatacaaaaaaaaatctaaccggtaaattccattttctcgtgaacaagtatgggagaagagtacataaccaattaaaatatacacttttgttcctttacacagatttttgctttggattctaaagttgcatatattaaatatctggttgctacattctattccaactccagtgggtctttatctatgtgatataatag

SEQ ID NO: 42273 - DNA, 726 bp, Arabidopsis thaliana landsberg
  unsure (1)..(726): unsure at all n locations
aaaactactacacttacggttttaccagggcattgttttcccattttataggatgagcatatttagaaagctcacaaagaagatcatgtatataagtatattatactatactgtttgattatttatgaaatattttaaaatagtactgtacaattggcccaaaaaagaggatgtttattatctccaatgatcacctctaattaattaagagaacatttgatctaataacaaaaccaaagccattgccaaaccggtgtcaaaaccgggattaacaaccagatcaaaaacatctgaaccgaaccggactcctttggttctgacctctttccttttgatctccaccactgtcttgttcaatgggacgtgcactattttacacgatttacatctatacgatcctttgatgatgtatgaattcttcttatcgaacgatcctgaatatacgtatgccaaaatgtcggatttggtgctcagaatattcatctttaagttcttcctcatgtaccaggttgggcactttggtatttttgtttctccttttgtatcatttgcttcatagattccccaactatctactagcgtaattttctggacaatacaaaggaaaatcgtttttaatatacgcaacattttaaactcaaactagtacttgtatacaaaaatgcattgagtannaatatctagatcctattgtacgtagtcacgtcaaaattgatcaatttaaaa

SEQ ID NO: 42274 - DNA, 1512 bp, Arabidopsis thaliana landsberg
tctttaagaaactaccatgctatataatgtcaagtgaaatggtcaggaggcaggtcactcactgcacaatttgtctgcaggtttgtctgcttcttggtttttatatgaattgattgaactatcatggccctttcttcatcttataccttggcatttacaggacatcaaaacaggggaaatcacacgaagcttaccgaaatgtgatcatacgtttcatctggtatgtgttgataaatggctcatcagacacgggtcatgccccatttgcagacaggcagttaaagattaaaacacgactgttgccgagctgtgtacatagcaaaaacacattatccttatatgttgttgtaacttgtaagtctaaaacccctttcttctgtatttttcctcatttcatttagagcaatctcagcttgagccataggtttcgacttttgaatgtatattgttgtagacatgaataagaatacctacagatgtattgaaaaaaatatagaactcgatcaagtcatgaactgatacatagttaattctaatattccttacgtgtctattgggcaactctgaaattcttgaccgtacaacatctattaaaggcaaaaaaagccctcgagactctattcatgtttcaatctttacagccatggaacaatgtcgcttgggaacagggctctattgatcttgctttcacacagtaaggctcatgggcagtcccattctcagctttgttcaacacccatggcttcaaccctccaaggccatgagcaacctccacgagtgaggaccataaacctgtgaccaccagcgcatcagaacaactcagaaggtatatctcagcccatgctctcttactttccatgttcctcggggttttttggtagtccttgtagctcggcttgtgaacgctgattatctctcccatcactgttgggttttcccaatatacgtccctgatactcttaaaataccctggagaagaagatgagataaacactgcctttgattttcggttcagaacttggcttgaagggagatttctttgtttgtcaacttcaggaagcagcttatgtctagttccacaagctaaaatctgatctatcaaatgctggaactgatcatttccagactcagagaccccaatatagattcctattctttgatcagccttagcaagatatgcgttatagtatcgtgtaatgagaccccagacaacattagttgggtgaaagagatactgacttaagaagtgaaaagcagtatctttttccgggaagagcatttgaagctcctgcttgaatgacgagactgagaagagagatgggagaaagaaactatccgcttttaagatcaaccagggggtgtgctccaacaaaacttgactatcctcacaaaagaaaagcttttgttggtcactggaattacgaactacatgtcgatatgcaaccatcgggttgccagaattgcgtaaaacagactgcttcgtgaagtggctgttgagcggaaactctgggg

SEQ ID NO: 42275 - DNA, 376 bp, Arabidopsis thaliana landsberg
agtaagctgttgttccaaccggacgcattgcataggaacgggggttatcaaagattggagccgaaaccaatatcattgtgcatggaggatactgtcgcacggactctatgaatctgccaccataagcatgagcggtatgatgacccttaatcctgcttactactgtagaagcgctggaatgtgttgacaggggctccggctacatatgatctaccactctagaccgtcgctttacgggctgaccctcatgaagcaccattcacatatgatggacgagagtcttgctattgatccggacccatactaggcgagcacctgtaatacaagactcatggcttgcgctgcggcactccatggccttgatactggggggacc

SEQ ID NO: 42276 - DNA, 570 bp, Arabidopsis thaliana landsberg
aaaattacggatacaaataccgaatttggacacgaacccatgaaattgctatcgaaacccaaagagaaagtcgtgaaaacggaagaatcgaattcgaattaagttataacggaagtggtgtgaaattgagaacttacggaatcaaaacgccatttgtaaatcggaattgacaaggaagaagaagttgaggacggaaagtggagcagagttgaagcatttttttgtttttcttcttcttcttatcttcaaaaatccctaaaaacttgctttgtgaagaaacgaccacagctttgagcctttggcccaaactttggaataaaatcgggatgatttcctgtgtttaggaacacggtgtaccgttttataagaaccaatgagagaatgacacctaatttcatctctaaacctatttttaagatcgatgccagtgacttaaacatgtaacattcacttgttagttactaattttcatggttgattccgaatatcgaaaaaacaaacagttatgactgaaatgagatggtttttttagtctaaaactttgaatgcctagaatgtattaatccgaac

SEQ ID NO: 42277 - DNA, 591 bp, Arabidopsis thaliana landsberg
ttattttgcacattcttttcattcaaaaaacacttagtaaaatatgtgatgaaatggaaattgtttaagggggtgttatagagtgttgggcatatagggggaaactaataattgggaaagttttgtaaacacactatatctgtataaataagctgagtttttataatataagaaattatatactttctttagatttagggattagaatttaagataacagcttgtatgatttagtttttggatctttaaaaccaagctgttactaaattttttaacaaatctttgtttcaattttttttgttgctccaccttctttctaaaatattttacacatattttaaaaggactctattttaaatgacttttcacataaaacagatattaagcattttaaaagctacattggtacgttttatgtggattatggaaggttaggcattttagatattttttatatgataaactacaacatatctttttttatcatcatactacaacatatcggaaacatagatactgacaaaaaaaataaactaattggtgtcggtatttactaaacctaaataaagttttaatgtggtacaatactac

SEQ ID NO: 42278 - DNA, 889 bp, Arabidopsis thaliana landsberg
taattgtttattaactaatgaaaaaaaaatcaattttatgagttttttgtccaacttcgtgtgattttttttcctcttcttgttttgtttaaactaatgattgttttggactttaaagtcagaaggcatctcagattacttgatctgcaatataaagttataacaataagatgcaaaaatttacaatctagtccttatggcactaagtttacgaaaacaattcatgtctaataagcccattacctgaattaattattgggccttaagctcctaatattctgaccttttgtatttcaaaatcatgtattccttgcataacaagaaatctgatggtggtgattcgataaaaagagttcgataggatctgaaatcttcctacaagaagtaaactgtttaacagaatttgttaaatgtaataaataaaaacttttccatatttatcggaaaaataaatggaacctttccagctttcctataccaactccaattccaatagataaacattcctaaaccctagaaggggctcgattaaaaaaaataaaaaccaaacacgaaagctgcaaacatcgattaacatcaaccttctctttgttgctttcgctctcgctctatagcaaagatgaaacctccccaaagaggttagaaccctaaaagccgttttattttactacttgtttaatttctctgttcgatctatagtatagggttgagggttgttaactccaaattcgttttgtcacaatatatctacctgaattgcttgttacgtaaactgttttgagtcttcacttcttcaatccaagtttaataggagatttaataatactctcttctgattagttaatttcggctttatctgtatgattatgctcaagacctggtggtggtg

SEQ ID NO: 42279 - DNA, 1135 bp, Arabidopsis thaliana landsberg
aactaaattgtgtgattgattaagaaaacaaaattgctgcataatttctatctacagtttcactggtcatcaaaacttttgtttttctaagttaaaacctttgtatactacttttatacattatatatatgtccaccttggatttaaagataaatgacaataaaactgtaaaatgattttaattaaagatcaaagggtcaaaaagaaccttggaagagcattgatgaaagaagctgttgtcatgattatcaccatcatcatcatcatcatcatcttcactaacatcattatgtgattttatggttttacggcatggcaacattcgattggcatactttataggaatgcatatcttcgaaacttctccttcagttacatttagcattagtgacatgaatcctagcaccattagaactgcccttacagaacattaaaaattcagagattaataaaattggaagagatatttcaattgattttcatatccaaaaatttaggatttttttttactataagatgttggagcttttaatgaattaaacaaagattgatgaccaatgaacttttctacgaatgggacagttttttacctgatttgagcttctctacagcttcaagtagcgacgtttttctatttttcttaagtctctgcaagaaaagagacactatatataatacagttttgtcttgaactttcgactcgctttttttttctttgttgaaatttcaattcatattatctacctgatattttacgaaaatagttaaaaattaaaatacattttttttaacttacatatttactacttcacctatatatctaatttaataaaatataaatatatccaattaagtaaattcttgcaagtgtaaaccaaactctacttttccaagaacaaaaaatttataaaaaaaaacttaaagagattagtcaaaatttaaacagtgtatagaagaaagtatatatgatcctataatatacatgtacatacgtatttgtacttacagtggagagaagattgatgagacgctcgaggcaaatggaaacagcgatgaagaagaaacaaacggtggccagagcccaagtgggagtttcttggagggatcggacggcgccaacctccgaggagtggtt

SEQ ID NO: 42280 - DNA, 524 bp, Arabidopsis thaliana landsberg
gaggactacttcgatgaaaaaagtggtttagagattagagagatgccattttttttttgaatgggcaaactaaggttagagagataccataagaatataattgtgcattttagtataatggtgatgaagtcgaaagattgtgcagtaaaatgatagagaaattaagcaaattaattgatctcaaccaaaaaaatttaacattcaaaattggggaaattctctaaataccacatttttgagtttttcttccaaaactctacttaaatggaagaaatacaaactttaaattgaaaataggaaacttaatataatattttaattttatttgtaatttcttttgatcgaataaaaaatattttacataaaaatgtgtggtattattagaaaaataaactaattatcgtatttttgaaataaaaatttagtaagtgtcatattatagggtaatttctattattattcttttaattgttggtttgaatcgatttatttttctcctgttggtttggatcgaccatatttac

SEQ ID NO: 42281 - DNA, 522 bp, Arabidopsis thaliana landsberg
aggatcccccagaaattcaagtgatggaactttgctccatctatgaacattagtggtaagctcgccgctgtaaattaaagaataataatcaatatcaactctcaaaatatgtaaattaattgacgagaagcaaataataataatcaataatcgcatttgactttctttcttaattaaagagactgagaaaattgtgaagagtatataaaggggacgtttctgctccaaccaaaagtttcaggttatttatgaaggtatacctaaagtcgcgggggccagattatttattacatttttcagatcatgggtgaataaatggtttctttttgggctttttggtttgattcaaatctttccttaaaataatatgggctaaaaatcactaagtcagatgtttttaaaaaaaaaaatattcatttgcatcatttttcctttttataataacaatgtcaaaaatcgaacatgtgaaattatatcattttatgaaaaagagttcaaaaactttgaatcaagaaaacaatt

SEQ ID NO: 42282 - DNA, 405 bp, Arabidopsis thaliana landsberg
tcagggatgatcgggagggccttggtgatggttatgattcagaatcacctgatccactcacatgggagacgaatgtagagagttcaagcgtaatcgacgacggtttgattctttctgagcattactctgctactgatcgggggatcgaatcgggttattatgattcttttggggtggagtacgggtcggagtgtctgattccgggtgaggacagtgttgactctgttttggatcatgtcagtgttagtcaaacgggtgatgattgtgtgcagaaatgaatttcggggtttatgattcacaaactggaattttgggtgatggtgaggttaggcttagagattttgaagctgccaacgagaagtttgtccaagagcgacactgcttctgacttccctgggggaaccg

SEQ ID NO: 42283 - DNA, 689 bp, Arabidopsis thaliana landsberg
actgtgggaacggttttgcttcccgcataagcttcggcagtcacgtttaaatcttcaaatcggacttctatcgtcggcagatgcagagagactctgaagttttttgtgaccgaagataagtttaaagtctaacagatttacacttaagtactttaaatatttaacgcttttttacctatcaaaacgactctttagcctccttagatactctccatgccaatcttcatcatccatcgtcataactctatcgaataactctcttctctccgcgacgccaaggtctttcatgtcaatctccttgaaacctcctgtgatcccttttaacacggcctttctcgcccggtcatacgttggaagacgctgcaacttctccatagccgctaatttcaaagcttcctcttcgtcttcttcttcgttttttcggtgactcctgtctctgttcattatgttctctacctctgagcttactctgtaatgtgccatcgcttcttctctctcaatctttgtttattttccctctcttaactattgttttagatgttatagaagccaacaataacactgaatctcatagacacatgattatattatgatacattgaatacaacaatttttttttgtgaagaaattgaacaggtgtggattctgatgacaagtgtaatatagttctattgaccatatctatagat

SEQ ID NO: 42284 - DNA, 605 bp, Arabidopsis thaliana landsberg
gtatacacacatatactgacactaacacatgcttagtgtgcgcaataattttgtctttactcagtaatttatgtataaataatttggtttagcgcattatatacaactggtccatttgcgcctagcgagtaatggttaatggttggtatgttaacaatttatcccaccagaaaaccatatcttttatcaaatcgcgacttcaaatatttaatatcagtcccacgacatcgacgccgtttaatattgttttatttgttcctttttctcaaattaacatattctagtaccggcaaaacattttttaatatattatgcgtctttctacaaatatatatatatatatatactcttctaagtatatgatgcaatggagtctctctgcatgaaagaataaaaaaaaaacatcacaatctctttccatttctgagagctaaaaaacctctctctctttctctttgattcaagtttccaaaaatggaaggtttgtgtttaaactctttcactcgtgttttacttttattgttcgttttcttggttttttctcataaatggcaacgagtcaacgcggtcgaacaggttttggagctggtaaaaggctttgaagc

SEQ ID NO: 42285 - DNA, 650 bp, Arabidopsis thaliana landsberg
tatatagtgatataccaaacgcattggcttctcttttttttgataaggtacgtgtatctaaatacacaagtatacagcttaaggcacatcaaaaattgaaaggagaaagaagatgggtttgttgccattggtgaagaaattaggtttcatcatctttcttcttgtttcagcttcagcgtttgctctctgttctgcaggtttgtttcttacttttttttctctctctctctatctacatatttatattcctttgtttgcagcttttctctgcaacttcatgtgcctcctactgagatcagtcttttagaaagtaagataataacattaagagcttgtgctctccacatgtgtgttaatgacgactaaaggagaaaattaacgacatagtatgttacgttagtgttatttggattgattaatcttggatataaagaatagacaagcttaagtccctcttttttttttttttttgtaggccgatcatccattttaatctatagccaagaagatgatcatcccgaggtattcgttttaactccaaaaaaagttgccaactaccgtgcgttgtatatctttacttagtaaaaaaccgaacaaattgataatcaagaacgtagttatatgatttcaagaacaatttttgtacgttg

SEQ ID NO: 42286 - DNA, 585 bp, Arabidopsis thaliana landsberg
  unsure (1)..(585): unsure at all n locations
agaggaagccgtggtaaatttctccagggaaacctgttgctcctgaagtctacttgtacatgaaagtgagggagactctgacttcttactctatgtttaacacactagctcaaaggatagatgaatagagatggtccggagatccatgattgacacttggctttttttgttaggctctttaccattctcttccgatgaaatatgtgacaattacaaagcttcacaacatgctggatggtgaagccaatcagactgcagttcgtaaattaatggacaggatgacccaagagggctacgtggaagcttcgagcaaccgcaggctaggtttgctacctcaattcagacccttctctgttaagttatgttggttgttgtgtcattttttcctcactgatgcaatgtttataaacagggaagncgtgtgattcattctagtctaactgagaagaagctaaatgaagtcagaaaggttcttgccaccgatgatatggtaataatacttgaaaaccagaatacctctttggaacagctatctaatgtgaatnnnnnnnnnnnnnnnnnnnnnnnngaaactattaacaagac

SEQ ID NO: 42287 - DNA, 703 bp, Arabidopsis thaliana landsberg
tgattttgaataaaaagaaaaattcaaaaaaagaaaaataggcagcaaaaagctgtcagttattacatacagctaagacttgagtaatgattttgtagttgactatttcatttcccctgtggacacgctcggcttacggttatgaaatcatgcgttggagtttttcttgcttttcccttttctcatgcgtagagttttttttctttctttacaatttgtttaaccatagttttataggtttgtagctatatgagtggttaatttatggtctagctaattggtctttttcttattcagtttttgcattaaatgtagatatcaatactgaaagttgacttttatcaaaaatacataacaaagtataagaaaaataacgcttagacaagttattacacatatgcaatgttcaccaaagcaagcaagtacgaaatatacatgcatatgataatacatgtaaacgagataaatcagcatcgtaaagatgaactggtaacacggacacgagccatccacatgggtggtacctccttatgcgcgtcttccctcaaaatattgatcattataaaatgatgacaccatagtctaaccttgcaaattgacgccgtattgattggagtgacatttgtacacgattacacgaagcaataaattaagtgatgcaactctataagatatcgtaagatgatgaaatggttaataaact

SEQ ID NO: 42288 - DNA, 529 bp, Arabidopsis thaliana landsberg
tggccattccgctcagatgatgcacgatatcattgacaacgagatgtgaagtttttactgaggaaacactttcgtgctctatgatttgaaaagaatcgtcgtaatttaggactggtaccgagttgtttgcatttgagatgtggtaagaatgtcatctaggtttcatagttgaagaatgtagtcttaagacatttgtttgtatgcactgttagtttccatacctaagtgaaaaggttagagctgttgatctggtcagatccaagttatgaggcacaactaaatctcggtccggtccatgtaatactgtagcttaaacttgaatgagagagatatgacgtctttaaagactttttttccatttcatgattgacattaaaccggaactaaagtattattaaacaccattattagaaaaagcacgacgccaatcgaaatggcgcccaaattatgcgaaaattttcctacagggttatgtgcgatatttggcgggtggctctagcctgatattagaggacgtaaacaggggtta

SEQ ID NO: 42289 - DNA, 620 bp, Arabidopsis thaliana landsberg
cgactcttcaccattcaatcatccaaggacataaaaaaaaactaaacgagagatcagacgcgaaatcaaaacgaaatcacaagaagagaaacaggtaccttgaaagagagaatcgttcgaagagatgtgaagagcgatctaggtttttttttacttctgtgagagagacgaagaatcagagcaaaattgccttcatatatagttgtgaccaaaatcgacttttaattaattggcccaaaaggcccaaaggcccaaaacattacctcattatcattaatatttattttaattttagttgcttattagtgcaaatgtcgagatatatatagttgagaagctacttagaaatctgcaatgtaatgcttattagttattacaattcaagccaaagagactataaaagtgaaaacttcgagaacaataacaactcataaagaaaaacaaactcaaaatgctagaggaactcgaaataacaaaacgcacaaccacatttttgaaaaaaaatgaacaatgaaactaagtgaagcttaattagttcctccaagcacacccttaagcttcttaacttctgcatcgctaaggaacgttgtggcttcaacaagttctgaaggcaaatcgtt

SEQ ID NO: 42290 - DNA, 544 bp, Arabidopsis thaliana landsberg
tataaaaaatatgcaacttgaggtgcattcttggttaaagtaaatgcgatttgatcaaatatataaatacaagtattaatgtttataatgataaatacatatattattaaagtatattttatgataaatctaatgacattttttagtacgacaaattcataatttttatataaatttgatggcatactttaccacagttctaaagatggcaattttttttgacagaaacagtatctgaatacttcagaccaaagccaaaaggccagtattatattttggaatgcacgttgtagattaattggatagaacaaaggaagaaccacaccctgaacatttatcgttcaagtcgcgtcagaccgtcagtgcattttgttgacgtcaactagctaagcaaagaggcgtcgaacgcacctggtcacgagctctgtcccggacgccagtgcacaccggccggccgctctcgtcgtagagtaccatcccgctgaaccgcggcactggcacttgacgccatcagcacctcctctgcatatcggccgacaggagt

SEQ ID NO: 42291 - DNA, 146 bp, Arabidopsis thaliana landsberg
gctgcctgttcctgtgaccctgttattcgtaccgtcgtttatcagtcactcagaccattcttctagcgactgattgtcatatacatattgctcgccaagcagggggctcacctcaggaacggaaagaggcatcaatagctcaacat

SEQ ID NO: 42292 - DNA, 798 bp, Arabidopsis thaliana landsberg
tgccgacttgcgatagttagaactacaattagatacaatgtaaattcacaggagttaggtgattccaaaaccgcaatctagatatagggagatgttctctgaattaccgtttcgatacgagtttagcagataaactgtctcgttcttgaagaataagctccaaactctacaacaaaggatacatgtttactaagtgtaagcacaagatatacaactgtgtgacaaatcacagtactaacttctgcttctacaagacatactcatggctttcataagagtttattaaatacctgtgcaatattaactgaatcagattccatcgacgaaattttcctctgcttctcaagtatatgtgagcatatctcacctcttgtcctcgtcttctgatccgtctcctctttcagtctcttcgtctcagacaatgcttcgaatagtgataccaaaataagaaaactcagaataacatctcatcaaaaagagtatgtatgaagctgtgtacataatgatccaaaacagccaaatccaaatctgagcgaagacatcaatgatagctaacagaaaaaatctctcaatctatggagttcctaaaccaaattacttccaattagcaataatatcaacgaagatcacgacctagaatcttccgtacgatttcgtccatatcaacgaaaagtttctaaaattcgaaaacgctgagagagatagagagaagctaaccatgttcgagaacattaaccaaggtactgattgttgtaacctgcatctgttcctcaacggagaccttcgccgcatgatcct

SEQ ID NO: 42293 - DNA, 479 bp, Arabidopsis thaliana landsberg
ttaaaaaaaaaggagattaagcttgacgttttttaatttttattatatatagttttaaatgatattatggggaggtcctccacggattgtgtaataatgaactcgttatcattggttaggatgggcatgcatgacccaaattacccaaatgtcatatatttacgggtcatttcctccaatatatccatgccttacggcttttgtatcctaagtggagtgcttctgggccctcattacctgcttttgttttatctagccgaccttggcccggttaactatatgttgtcttttctccggttctgatgaataagtttgttcttacgaattgaaccaaattcctcacaagtttgtatacgcgcgcacaactttgttgattctgataacacaatttcgacatgatgtgaagccgtgaaggttattatccgattatgcttagatatttaggttagtatgcagattaacacaaacaatttcatgag

SEQ ID NO: 42294 - DNA, 592 bp, Arabidopsis thaliana landsberg
tatcctgtttccataaaatatttgttgatgtttttcgtttttgttttttattttctatttgtggataaccaagaacctatggactattggtcgataattccattgggccggggaccgaagaatttgttggtgtttagtattttatttattttaatttttatatactatgatattggacatttatctatatcttttggtatcatatatgtaaatatgtgatttgcaaatttttaaaagataattcattacccgaaatggtgaaatcaatagtttttaacttgcttttcaccttgctacccaaaggagaagagttgggaaggtattaatgtgagaaattggaagctaaacttaagatttgaccaattgtttcgatcatcatttagaaatatttagctaatcgtcccatgtcagagtcaaaatactatgtgttacaacagtgttctcgcttatggcttccaacttatgttataatgtcactaatagtgtctgtctgatttctctttctgattattctggttcaaaatatgagtcttggtgcctacccaaagttggctatgcttttactctttctattcttgaaaattaagttttt

SEQ ID NO: 42295 - DNA, 517 bp, Arabidopsis thaliana landsberg
cttttatacttatcattcacccaccatttttgctatggctgatacttatctcgttttagtaaaataaaaactaaaataaggattctcattattcgatactctgtaaaattgaattttaacgtatcagtaatttaatatacaacttgcaatttttcatgtgtttctattagttaaaaattgcataattttgatcgtttcgcattggcgacttacggtatctaataaataagtcgttacctaagacttaatacatatatcgtataagcctgagaaggttaattagtttaaaactttaaatatgaatatattgagaattaatgaacgggttttatacaaaataatagtgatatacattacttcttggcaaaggagattaatgaagtaatgtatattaaattcatggctcaataaagtgctttttgaaagagaaattaaaatgatatccttttaagaatagtatagaaagatatgggtattagtgggtgtatatgccacatgtgttttcgtatagcttata

SEQ ID NO: 42296 - DNA, 488 bp, Arabidopsis thaliana landsberg
aaagagtttctagttcatgatggtttcagaattgaaccatttttaaccgaggagacttaaattgagaaacagagagcttaatagcggtctctactgaattatcacttacctgtcattgactcctgcgagcattacatattcaaacaacactttgtacttatgccttgaactgagtccttctctgagcgtctcaaggagcaaagataacttgtatttcctgtttataggcataatccagtttctgacctgcacggttcaatgaggtcagatcatacctcatgaatgatgactggcttaaagagagcatgaaaaaacctcatcagttgttgcattcagactgactgccaaagcgcaatttgactcacggagaaaacgcttcagctgaggaacaaggccactagtcgagactgtgacttgcggggactgaagtgaagtccatctcgtctaccattatgtttgcacctttgatgacattgccaatgtgtgaa

SEQ ID NO: 42297 - DNA, 572 bp, Arabidopsis thaliana landsberg
  unsure (1)..(572): unsure at all n locations
aaaactgacttgtggcgcaaattttagaaggatctatcggaaataaaaaaaatactattgtagaaaatgtaaaacctacagcaaacgatacgtcaataaaaatgataaatttgtaattgaaaataaattcttatatatttaataaatttaaaacatctacaataaaacctgtataaatcaataatattagggtcaatgtattttactaaatttattaatttatcatgttttttaatttatagaggtgatatttgggccaaaatatcaatttaggactggagaaaattattaatttaaggaagtattaattatagatgtcatattgtaactattttgagtgaaatgagctaaatttttgggtaagaaaatgattaaatgcatttgactattttcaaaataatattggtaatggtttctttacagttattgtttaatagaaaagtttaaccaatatatagcttacttaaacactaattgcctttttaagtctcaccaatttacttaacaagttttaattcatgtatggtcaacatgtgtagntatatatacattgagctactatatacatgtcg

SEQ ID NO: 42298 - DNA, 893 bp, Arabidopsis thaliana landsberg
ttggctatagacaacaaaaaataaaagataaaaaaggaccaacgaaaaggaaagataccgacgcataatcacctaaacccactaacaaattcttttccacttacaaaaataagtttacgaattttttaaaaatcgaatttatactgatataataaaatagtacatacaatagcgaaaaatgtaagagaaataatacacactaattaaagatatggcacatggcaaaattgggtcttaaaatatttattttgttctttctcacaccttcatgagttgccaatgtgaagctttcatggaaattttagccataaatcgaagttctattataagctgtaataaaaaaaacctaagttctatataatttaagttatgataaaattcttttctaatataaatggaaaccgcattttcctagttatttgtctaaaattgttggatcatctagtgcatacatatatttacaatgcatatgatatgtatggaagaagtattgacaaattcagcaaaagttagatttgcatatctaccttgtcttctacggccaaagaagaaatagcgtcaaggaatgacaaactaaccttagtaaaaattagataaatcctcgaaagaccatgtttataagaaaatttgtatttgtaatataatatttctgaatttccaagttagcaatttgaaagaaaaaatttacaatcttatcgttgatgtgaaaagagaaataattattcatgaaaaatcatataatttgcccgtgcattaacaacaatcttttccaccttgtctgctttattgccaaagccttgatgtcctatttcttatatacattgtcatcttctgtcattcgtcatttcttagaaatcttaaattttaaaaaatttgaagacatgaaaatatta

SEQ ID NO: 42299 - DNA, 544 bp, Arabidopsis thaliana landsberg
gcgcaacctgatacgcggtatggcgcacgaaattaaaaatcccctgggtggaattctctttgcggcccagctgctggcgcgcgagctggggaactccaatttaaccgaatacaccagcattatcattgatgaggcggatcgcctgcgcaatctggtggatcgcatgctggggcccaatcagctgccgcagtggcaatcgctaaatatccacgaagccatagagcgggtcgccaatatcatcaaggcggaaagcagtgacgcgatcaaaattatccgcgattacgaccccagtatccccaaccttcagggcgataaggaaatgctgatacaggcgctgctcaacatagtgcgcaacgccatgcaggcactgctggaggcgggtgttaagaacggtgctattcaactgcgcacccgcattcaacgccagtacaccattggccgcaaacatcaccgctggtgtgtcggattgacattgtcgacaacggcccgggtattccggccgacattattgagaacattttttaccccatgatcaccggtcgcg

SEQ ID NO: 42300 - DNA, 1750 bp, Arabidopsis thaliana landsberg
aagtagagaatcgtatatgtaggtaagactaaccaacaactcccttattttgtaagttggtttcgtggttgagagatatcaaattaaggtgcagagaggttggtcacttttaggtataggatggaaatgtcttaccacatgttaaatatgaaaagaattgctaaataattataacgagttgcttctaaatattagtatttgtttatttatgatggctccactcttttcctacgctccctttgagtccacacgcatctaaagatattcgaaccttggaagagccaaaatgaaccttggagtaatatgtatttttatctacgttgtaaatatataaatgaataataagaataaattttgaatacatcatatactttacagtgtacgcatcatataaaaatttcttatttatgaacaatttgaattgtataacggaaagaacaagtaattaatcaacaattctaatggtgtattatgacttttatgagtctgacatttgaatttgattgcacttgttacttgtgtgttaatgtgtgttgtgcagcaaaagggtccacacgtaattagtccaaagataagggtattaaagtaatttatatatgtagctaattacaaggtttaaatacctaacccaattccttgttcatcatcttctaacaaacaccaaaaaaacagagaaaacaaactttaaacaatggctggagaggagttgttgaaactgttcgagcaaaactggtcagagaggccaatcttcaagaaagacaaagagaatctgaatggaaaaagtagagagaagcgtggagaaaaagagattctagaggaacgacgagaagaagaagcactgaagaattttccggtgagctttcttgtagagagggctatgagtgacgagacgatgatgacgacgagttccaagacaagtttgtttagttcttcatcagatgatttgttcttgtctcctagatcggtcttacccgttaaaccaacgccgatgaagcttcagacgatcctctccggaaaagaagtcaacgcgttcacgattgcggaaagagagagactactttcagagaaggaagagcagaggaagaagaagaagaagaagagtaatgtgagaacaagaaagggaaagagtatgtcggatttggagtacgaggagcttaaagggtttatggatctaggttttgtcttttccgaggatgaccataaagactccgatctagtttcgattcttcctgggttacagagattggtgaagaaagatgatggagtaacaaaagaagaagaagaagaagaagaagaagacaaaatcggtggaaacagagcagcgagaccgtatttgtcggaagcgtgggatcattgtggaggaagaaaaggaaaaaaacaaatcacgccggagattaagtggagagttccggcgccggcggggcatagcgaagttgacttaaaagataatctaaggctttgggctcatgctgtggcctcgactattcgaagttaatacaaaagcttggattctaaaaatgcatgccaaactttttctgtatctatactttttggtcattatggttttcaaattcatgtgaattaaaagaaaaaatctgttcacaagaattcgatttttgtttggtgagagagatctctgatacgaccattgacccagaacaaaagtgtccttgtcggagaagagaatctataatgaggtttttgagtggtgggcaatcatatcaataatgctcacacttgtcatatggtt

SEQ ID NO: 42301 - DNA, 481 bp, Arabidopsis thaliana landsberg
ctgagtatgtctccagcccataaaactatgtagttgagaacctcacaagtagattcatagtagttaacaactcaccatctcctttcaataggcttaggatctccttatttgtgagccatatttattacatattagtttgagaacctcataggtagatttatagtagttaacaactcactatgtagttgagaacctcacacgtagattcatagtagttacatatttctccacaatataaaagataagagggccatatttgtgagctaaaataatttttatagttacaactcaccatctccttttgataggcttaggatctcctttttacaattttttaccatacaatacaaatttgttctatggaagtcatggtatatcaccatatcatgtattctacttaggatttgcctacttacgagtaatcaaatttgaccgattttgacatttgttatgattgttgagactttgatagcatcactat

SEQ ID NO: 42302 - DNA, 560 bp, Arabidopsis thaliana landsberg
tcaattgtgtattttggaaaataatattcattgtaaatttgtaatctacaattaatacattaagacacttgttattctacctccatttaattttgttactttaaaaaaaaacatatttgattttcttttgctaagtaaggttttgataataataataacatatttgatatttttttactaaattaagtttatattttttaataatattttaccaaaatttggtcaaattaacatttatttacatgataaaacaaaggcttcattatcaatttcccacaagccaacaattcctaagctgagattcactagtctctctaaaactcgacaccttagctaaacagaaatgcgtacaccgcatacccaaacccgacccggatcctgaccctgacactgaccctacacgggtcgtcttaagcagataacaaaccggcccacactcaactcctctcccttgcaccaccaacccccacgcacgtgtgccgtctccaccgtcaacaccacagccacaactctcctccgccgctcctaactgctcaacgaacactatccctttcggcatc

SEQ ID NO: 42303 - DNA, 678 bp, Arabidopsis thaliana landsberg
acattgaaccaatcaaaactaatgtcttcttgtgtgtaagcacaaggtgttcgacgaaatgcctaactgagagatatcaatttatacacgttcttctgcaactcttccgatcaacagataaatcggatacctaacaactttcttctctttcccatcttctttccacgaaccagcaaactctccttccatctcagccgtcaaaagctctaaacctttctccttagccgtctgatacgccgaagatgacctcagatacgtcatatactcttcaaacaccatttctttctccgttacaaacctcaccggaaaactttgactttccgttgactcatcattatccactttctcgaacggaaactcaattcctctgtacccatcctccacaagccgtcgcgctagatcccaatgaggaccaagtttctcatcgtaaaaccgttgaaagaccttgtccacggcgtcgttaacttccggattggtgtagcaccaggcggcgattactccgttgggtttcttgagcacgtgtttcacgttgctgtaaaaggtggtgaagttgaatcagtgaagggcttgtgcgacggtgactaaatcgactgatgattcaggtgctactagcagatcgatgacatcgttggtggagtgagcttataatggacgttggatgactttgtattacacctc

SEQ ID NO: 42304 - DNA, 688 bp, Arabidopsis thaliana landsberg
tgaaatgcatcatctagataaaacacaataattgaaaagaaaaaatccgactaaaagctcagataggataacaccgctttattattgaaactggaatgccgaagaaaaactcaatgtctcagcacagcggatccaataatctctatgcatcacggaggttatgttttccttaatgcctgaaaaaagaacttgttactctttacaactataataatcaagtatatatgtgattccaaatatatatgtagttgtaaatacatgtggaaacaaacgtatgaagatatctaagaacatccatcatcgtaaatcaaaagtagtattgatacaaatttatgttggtataatgcatgtacacatgaataatgtctatataacagacttacactacatctacatatatatagaaatagatacagaaaaacacacatatgtattatatagttcagtaacatatcttagttacgtgttcttcatcattcagatatcattattgacaaacaaacaaaaattgacttcgaaatgacaaaaccctaactcttcgtatcacatatacagatagacatatcaccttggagaaacttcggtctcgctaatttcatccatgggagctcttctctctctttcatttgagagagagagaaatagaacacagaaagagagagagtcttaagaaacggtgggatgatga

SEQ ID NO: 42305 - DNA, 1002 bp, Arabidopsis thaliana landsberg
catgtttggagatcctcaaggcacaggggaaaagacacttcaacttatggtattgtttcctgaactataaatccgaattctcaattagttacaaacaaatttcatcctttttaagagataattcaaacatttttatcttttatttcatctcaggtaaggtggaagggatacaattctagttatgacacatgggaaccttactctggcttagggtaacttttctatattaacctagttttgtattgataatttctttgctttatatttgataatttctttgataattactttatatttctccagcaactgcaaggagaagctgaaggagtacgtgatagatgggtttaagtctcatctcttaccacttccggtaagataatatctttgctttatatgatctttttaatataaagctatttacaatcttaactaaatgtttgatgatttttcagggtactgtctacacagtgtgcggtgggcccccttgccaagggatcagtgggtataaccggtatagaaacaatgaagcaccgcttgaagatcagaagaaccagcaacttttggtgtttttagacatcattgacttcctcaagccaaactatgtgctgatggaaaatgttgtagaccttcttaggttttcaaagggtttcctggcacgtcatgctgtagctagctttgttgcgatgaattaccagacgcggttgggaatgatggctgctggatcttacgggctccctcagcttagaaacagggtttttttatgggctgcacaaccatcagaggtaaatatatgttacagaatatttaccactaatatattgtcttttgaggaacatgatctttattgctctctcttgatttgtttgacagaaacttcccccttatcccctcccaacacatgaagttgctaaaaagttcaacacacctaaagaattcaaagcaagtgtggacagttgtacatttaaatttaatagactcttataagttataactgcattgctt

SEQ ID NO: 42306 - DNA, 901 bp, Arabidopsis thaliana landsberg
agatgtgcggcatgcgatcgatggtatgcacgttcagaagaacgtgtttgaaagcataatgggcaccttactagacataaagggcaaaacaaaagaagggctcaattcacgcatggacttggtagatttaggcataaaaaaggaactacatcccgttcttcaagaaaatgggaagtaccatctcccagcagcaagctacaatctcaatgtagatgagaaacatgcgatgtgtgtttggctcaagaatttgaaagtcccatccggattctgctctagcatacggagtattgtgtcaatgaaagacctgacaatcaccaactacaactcacatgattgccatgtcatgctgactacattcctacctattgccatcagggctataaatctttgtttttaaagatggcaatcacacggttgtgctactttttcaacaggatttcacaaaaggtaattggccgtgatgagttggcatctcttcaggaattcgtagtggagacaatatcacagtttgagatgtgtttccctccatcgttctttgatattatggtgcaccttgtggtgacttggtgccacaaatagaggcattgggtcctatgtacttgcatgaaatgtggacgtatgagcgtttcatgtcaatactgaatggctatgtatcaacccgtgctcgtcctgaggcatccatgatagaggggtagtgtaccgaagaggccattgagtccggagtccattctgcaatagtatcctaaaagaccaggttgcaataggtctgcctccgtcacgacacgagggtagactgtatggaagcgggaggatgggacggaaatctttcatcccaccggattacgatatagtacttgaggcacatcagagcatcgtacatcagcgtacgataatggagcat

SEQ ID NO: 42307 - DNA, 641 bp, Arabidopsis thaliana landsberg
tctttaaattaattttgcctataaaaacagagcatcggaggtttatagttttaaacacataactcaccagaatttacacagagcaaacaaaaagactaagaaaatttacgaaagatatttaccaaacaaaatgtcttcctcttcctcgcagacgtcgcgtcgcccatatatatcagcggctcttaattcgcgttccaatgcagccaagactctcaacgaattgatcaagatccatggattagaatttgctttcaaaaaagacggagtgaaaagggacatggaaaggggatgcaaatcggcgttagctgacgagtacgtatccaacaacctacataatctgaggacacagtactgtgacaaaggtgataaatctattccgccaaaagcaccacgtggcagagattatcaagacgtcatggacgtccgatgacggcaaagcgcagacatatgacatcatcgaagtcatacattacccaacaaacgaacggttgatcgccgacatagatatgtacgacgggcttcaccaagtcatggaaattcctgaaaacctcgagaaggatgtgcctggtcgcgttcgtcggaaccggcgatgatatacgccgtctcgtagcaactatttccgacgaaggagttgaggaagc

SEQ ID NO: 42308 - DNA, 521 bp, Arabidopsis thaliana landsberg
cctactgctcggcgcctgccaggctaagctggaagcggacatcggcgtctcgacacccccgtcgacgatcgaatcgctgaatatttcggtgccgtacgtcgacttcagagacaccgacggcgatgtacacagctttgacgctgacgacgacgatacgggtgacaccttcgacatcctcgaatacctgaatgacgacgatgacgataacgacgacgacgtcttcaaggtttttgaagataaaagcgccaagggcgattacgcatcggtgcgtccgcgcttcgacgtcagcgccggctcgctggtcaccagtaccggtgccgaatatccgttgacgctggtctcgcagccggactacgtcagctatccgctcagcgtcggcaaggacgattccgaaaccttgctgctgacactggagctgacgttctcgctgatcgacgatacctcggacagcggcgactatgagctcaagccggtcatccgcgtcgcgcgttcggacaccgtcggcgacatcaaaggcacaa

SEQ ID NO: 42309 - DNA, 280 bp, Arabidopsis thaliana landsberg
ggactctattcgtcggcctcgcaggatttcaggtcgacggtttacaacgatcgcgtcgggcgcacgctcgaacctatcgataggcggccgtaccagaagaacaactatccggctgtgaccggtgagctcaactggaataccggcatcggaacgatgactgtgattccggcatggcgcaattacgactttgattcggtagtcggaaacagcacgacgtcgggcgtgcaggaacatgggaaccaatattctctggaagctcgtctgtcgaatacgaatctcg

SEQ ID NO: 42310 - DNA, 125 bp, Arabidopsis thaliana landsberg
actcgttgatctgaatcgatccatcatgtccattcgtatttttggggttctctatttaggcatatgtgagggtgcaatgagggattccattcctcaatgaatgttttgatcataacattgggttt

SEQ ID NO: 42311 - DNA, 542 bp, Arabidopsis thaliana landsberg
tacctacaaaccctaattggcattttctacaatgaatctagagccctatggattttatggatatgttaatgattcattacagaacaaatttcttaagctactctcttattagtgtacattaaacaagaaagctagaaacctattgaagtgttgttaatggagaaattcaattgtatttttttactcaccttcccatctaagcttttcaatgcctttcgtgcatcatcttcagaatcgaaggtgataaagccgaatcctttaggtctctgtgtttctgaatctctaataagccgagctaaacaaccccacaaacacaaatttagttcataaccgagccttaaacaaattcaatttcaggtttttaccttctttgatttgaccaaaaggagagaacaattgcctcagagattgatctgtggtataagcagacaaccctgcaagagaacaatttcagaaaccagagcaagtaaaaagagcaagagactaaaatcagaaagaagaaaccattctcgtactgcttacgaagagttgagctgagattc

SEQ ID NO: 42312 - DNA, 1697 bp, Arabidopsis thaliana landsberg
agttgaacagaatgatgagtgacagtactgtactcgtgggtgctactactatctatacacatattcacacgtccttgaaaaaactgctctttgatcacaaccatataaacccactagttcgctcaaaatcctgcaaatacaaaaattcacatcgttacttaacaggataggatggtttagattagtttgagtggaaatacgtatgggatagagttagattactggtttttttttttttttttgagttttcgacaaggttagaaccactcagccatgcatttagggtaaagctcactctcagtagcaatggaggagaggccacgaagctctttctgaactttccgtctctcgtaaaagactgagcacgcaagggaattgcatttcactccgctttgcaccacccagtctcccccaccacagtgtctgcatatctgcaaataagataatataaagaaaaatcaattaatggaccaacaaagttggaactgaatgcatctacagagattcaccaaggtcacaacttaagcacacatggaaagaggtctacactcgttcttgttataaaatagcaaacatttctgaaagataatctgaaactaataagtctccactttttagcataaattgttttgcgactaccatgagatgaaactgtctctttgaattcaaagtgtgtgcaagattaaatgcaaatgctcacatcagaaagtgtacaagtttctatgaagcacacgatctcttggaaagtaaagacagtaagatgatggttgtaaacgttaccaagttctgtaacagttcataaacgttagattttggagtacttaccgtggctaggtgttgcatctctctctccaactttgaagtcttccaaacaatggttgcagcagcagcacttttattttgaaggcaccggttgcatagttgagcagattcttgaacaacttccccacacaagatgcaatgtttcgatagataaaaataatcaatccttgttttgtgtgagtttttagagtttaagggacgttgaccaagggagcttctggtgagacggggcatctccaaaaaccactggtttaagtctgcacccacgagtccaaataccctttgcaaagctggtataatttgtttgttgatgtagtataagtcattcagtcggtagggtgtatcgacgtccaaaagaaccagtggatcaacaaccatatcaacaagtcgagctcctggctccccatgaatcacaacataaggcactcgttcagcatagcgtggctctgtccgagggtctgctttcattgatttggttgccacaatagctgctggaggaaggagtgaagagtctcttgtgctgtaagtacccaaccgaacttcttttgcaaagataaaatcttgaagagacactctccctgatagtatccgcttccactgtctatacaagtacgacttaacctgcacaatgaatagagaaaagcagatgtaagacactgcagtttcagctgataattcgaaagagtgcaagaaatcaaatttgtaccttagagatgttcttctgttcaaaaaagagtctcaacgattgctccatagttttcgcaacagcttcacaagtgtctcttcgaacagtttcaataccttttgcatcaaatataggctctctctgattgggactttcataactgtacccaacataacgcttcttcgtaaga

SEQ ID NO: 42313 - DNA, 597 bp, Arabidopsis thaliana landsberg
acatcctcttctgcttcaaaaataaaccatttctctcttcctggaagacaagagagtgatgaatgatcaaagacaaagtctcgggttctgttccgttgcttgttcctttggaccacaacacaaaactcaaaaaattcaaaagaaaaacaaattaccagtctgtagtatttatctatctatctacctatcaatcatgttctgtatttacagttttggcttgtggagttaagttgtttcacttggggggaataatcaataaatattgttcttgtgtagtgtatataaccctatggttatgttatttattaatgaacaaatgtggtcacgagataacaatggattcaattttcaggaataagattttgtcttatgagacttcgttatccgacttatatggatccagttgccagaatctctgttgcaggcaggcaatatgatactctttggaccactttacacagtctttaaatcattcaattgcttttgttcttactgtaaatgaatcccttgcactaacccatattaggcccactagcatcataacggcccaagattgtgatatacaagatccatttcagcccattactaaatgaaaac

SEQ ID NO: 42314 - DNA, 760 bp, Arabidopsis thaliana landsberg
tgacatatctaaccgttattaattagttcacatatcacatatttgtatagtgttttcattttcagtaatcaaaccatccatctaccacaaaagaacttggtcatgtgtccatttttagaaatcaataaaatattataccatatatttatagtatctaactttaagagaataaatatttttatttgccgattcatatacacacatgcgtgtggtatctatgtctatccattaaactaattatatataaacttattttctggccacaatttttgtttcgtgtatagagagagctcaaagatggaaccaacagaaaaaccatcgaccaaaccatcttctcggactctacctagagacactcgtggctctctcgaagtattcaacccgtcaactcagctgacccgacccgataacccggtgttccgtcctgaaccaccagcgtggcaaaacttgagtgatccacgtggcaccagtcctcaaccccgaccacaacaagaaccagctccatccaaccctggttcggtctgatcaagaaatcgctgtcacgacctcatggatggctctgaaagacccatcaccggagacaatctccaagaagacgatcaccgccgagaaaccacagaagtcggcggtggcggctgagcagagagcggcagagtgtgattgggtttgaagaccgatacaaagacgggaaagccacatggagtgggcgtgaggaactctggtggaactgagaatgatcctaacggggaaagactacatc

SEQ ID NO: 42315 - DNA, 704 bp, Arabidopsis thaliana landsberg
acacctaagccgtcccattgatgtgtgtgtgtcctttttataatagtttttattaattgcaaattatctagacacccgtgtgaaacgtaaatgatggagaaatttagaggccaacatgcacatatcattatgctcccatttttgtagtctctgtcccatttctttctttcaccttaaattttatttttcccccaactacttcttcccatctcttaattacttaagaaaatgaaataagcttaaatcagtaagattgtccccacaagaaaaagttcatattagttgataacaacacatcaacgtgttctaattcaatgttttccactcttttcgttattttgttgaaagtacagaaatgtaatttaattagtttttcaaagaaaagaaacaaaaccatttttgttttgataccctaaaccccaaataaagcaagagcagggtaaaacatgcgccggtggtccttcaaaaaaacggtttgcatgcagatgcaatgtagtgaacactgaatagatcgaatcttaattttttaatatcttttccaaaacactaaatcttgttgattcgcaatcaaaccaactacataacacctaaaatttcattcatacgtgtcgtgtttttcattcgctgtgtatactcttttaaaaataattcaatcaaaattcgatactaaaatcgaatatttttctcaaagttattctttatta

SEQ ID NO: 42316 - DNA, 713 bp, Arabidopsis thaliana landsberg
  unsure (1)..(713): unsure at all n locations
taaatctgtttcctcaaagatggaagaaatcaaatgatttttattaaagattcgaatgtgagcatataatagtaggcgaaaggttggtgaatcattcatttccgcatgaagtagctcataaggacaccactagtgattggggaaaaaatcctagagcgatagataaacaagcctttgtactttatttcgactttctactcgttgtatgagaggtcctattgagtcttacataacaccaaaagtttcatatcgttgaaaagaaaaacaacgtagctaggagttgaggggtaagaggttaatttatttttataaatgtagcatcgggatcggaatatgatcttcatcgttagtaaagagttttccgtaaatccaccacaaataaagcgtttgggcagaaacctaagtaaccacgtcgtccatgcacaatattcacggtggtatcaaaaccgggtatgtagtgagttctatccttggtcttaagaaccaatatcaccaccacgggcaggtttacaaagagaagttctcgtcaaattttcctctttctagatttttgtttcgtgaagtgaattcaacaaaacaagaatgctagaaattcagatacattagaatttaccaactattgtatccttgacgaaagcttaaatacattcangaaataccattcaaactattttggtctttagcatcatgactaattccaaaatagattatga

SEQ ID NO: 42317 - DNA, 516 bp, Arabidopsis thaliana landsberg
tgaataataaaccaaacaacaagaaagcagaaaaggctaaacgtctgtctattgttaaataaaaaagacgagaaactggatttagcgggaacaatagctggtggacaaagaattaagaaccattcattcagtggcaatggaacaagcagcaaagattctgcagcttagtatcaaacaacacttgatggtatgataaagtatgaaattgcacataccctggcttagagcgcatacatcggtagaagagtttgaaaggtcctggaactgtcttgaatgggtttccctcgaataacgcctgaaaaagttactaaaatactatgatatgaatagatcaagaggatacttttcaaacaatcatggcccaaaccaagcaattttagttcttccattgaaacaaagtcaataagctgatacacgcttcaacaaacaaaattgaagaatagattcataaaagccaatgaatttaggtattaatcgttcatgatcaaatgccattaaccatcatccttcccacat

SEQ ID NO: 42318 - DNA, 588 bp, Arabidopsis thaliana landsberg
atgctaatatagcacagtaaagtctgttattctattttgtattaatactgtactggtttctgtaaaagtatatatcaaccttgagaaagagtagagcttaacgaaaataagtaaaaataaagcctggtgaaaaagaaaagaaaagaaagaagtaaaaataaagcccatgaggttaatgacgggaaacgacgtagaaagtggaggtcaggcaataaaagcatttccatcgtgatcagatgagaggaaaagtatgagagaaatagaaacggcacactacaaaaataagtacttcaaatctctatatacaaaactcctttgacatatgttttttaatgactggttcatcatttttcattgatttaaaattttaaataaattataataaaatattatacttaaaagactcaatgagtttctcattgataaagatgctttaaggggtgtttttaaaaaatgtaaatctttattaattaaagaaacatacaaagtaaaccatcattaatgaagtttgtagtttttcaaaaaattatactatattgaatagttacatgtgattaggagattgaaaaaaatacaaatgaactaaat

SEQ ID NO: 42319 - DNA, 183 bp, Arabidopsis thaliana landsberg
gacttaattccgccccccctttacttatagagataatgtgtttgttactggactaaagcgaccttgtgagccggggttaatatacatatctgtgggaagaagaataacacgctatgatctggtaatcataaccaaatgggataatggtgtgaaatcgtgaaatcaagcctctaggggaataat

SEQ ID NO: 42320 - DNA, 1769 bp, Arabidopsis thaliana landsberg
  unsure (1)..(1769): unsure at all n locations
atctcaacatggatgaatcggatgagattgaatctagtgaagaatctgaagagacagaatcaatggttgaagcaagagagggcgtgggtaatcagaacagtcaggcgtctgaagctatggaagaagacgaccaaggtctacactttctcaactttgtttctttcatctctatttactttgttacgatgtgattgtgcttttgtggatactgaaagggtctgatgcattccttttgttgtagagagcctcttagatactgaactggaaagacctacttctggagggtcaaaagctgtatatgtacccagtcaattcaatcccattccatctgcagttgttgacagagcgctcagaaagctgagagctagtaaaatcgagctaatgaaagctttagaaaaaggaagaccttcaaatttaaacaatgagacgattacagaacaagaaaacgatgttgctaatccttctgcaacaaacgctgcaccaaggcctagcttgatggagccacgtagcacagcacacacttatgaagtaaatttgcttctttttctaattgtttcatcatatcatttatgtttttttcttcagacttcctgtgtttaaatagctaggtcgatggaatacccacccaatacacacagattaactaagttttctcagcactatcccgattcattctttgatcttttcctattatttcatattgtctgaccagcccgctgcactcggtgggaattagtattgtgtaggactcgctgaattgatttctttgcatgttcggtttcggagttatagctgagttaatataatgtgcttttcatgcaactgtataacataggacttgtttgttcagatgagtttgtttttcacattatttttgtttgtttgattagtggaatgactccattgatgattcagatggagaaannnnnnnnnnnnnnnnnnggattaataaatcaaaacgtaaaagaattgtcgtgtctcctttgaaaagaaaccgatgttcagaaggtgctagaaggccaaaacttccttggagtactgcagaaacgctggccgtactcaaaggctatgaaaagtactgaaacctgaagattctcctagatgttagatgaatatctttcatgcatttctattgatttgatgcattcttttgtgattcaggtatggtgcaaactggaaacggatcaaagatgagaatccagttctagtgcgcagaactaatgtacacagcttcacttatctttctgttctttattcatttctcggagttaattttatcttgtttctaataatagacacattctctcacagggtgatattaaagataaatttcgagttgagatgagacgtgaagagcgccgtcattgagtaggtgagttaaacatagtcatagtctataaggtacaatcgtcaccctggtgacctttagaagagaataacaataaagtactgctgcattagcatctcagttccccgaaactaaagtgtgtagagtagaagaggggtaatgatatgaaccctcacaaatagtgagccaagttctaagaagccaatagttgcttacacaagttagctttgaaggtaaactctacctgtagaactatgagcgtatgtataatgcttcttaatacagcatataaaatactatcaatgttggttttttactatgtcaacgagtcatattctgtagaagggagaaattgaatatgcaggaaaaatgaattttatgatttctatatatttgaccactgatgtgataaattgatggg

SEQ ID NO: 42321 - DNA, 1214 bp, Arabidopsis thaliana landsberg
aacaataatgctactattcctttacctttcttttatttttgttttgttatacacaatagatgatgcttgcaaatagtaataattccattagccgacggagtattgttgtgaaagaaatgttgaacctaccaaaataatgaatctcatcgagataacgtgccgaaaaaaaattctccctaccggctaaactgtgtgatatgattaacaaattactacatttagaaccatattctgataaaggtttagtttatgtcattaaaaacttcgactggttttcatttcaattagaacaatcaacattcaaaacaaattatatatgaatattgggttgcctcgtgtggatgtgatcgtgtcaggtctcagctatcttagaaaaggaaatagaaaggtgctctctcgtacgtatcttttgagtgatgggaatgatagactgttccatacgtttattccattgtgcagattgcatttgtattagcgtatatgtcatcatcatttcaactatataattgatattctagtattttgaaatgatcatcgttcgtttggataaatcaaaggatatgatcattgttctatgattacgttcattggtgggaaatggtatcatcccctaatgcactacgaatttgaccatattttaggtaaagttacttttttttttagaaagattttagatataaagttttgaatattgtttgctgacatgctttttgtgttgattttacatactaaaatattagcaataacatttttgcatactaaaatattagctacatgctttttgtgttgattttagatataaatgttattgcaatcgctataacatgtacaactacatcttaacgactagtctacttcttctaccatcaaacaacaatgctatataactaactcatgttttcgtttttgttacaaataactaactaaatgttaccaatagaagcttggaaataaaaacacaaaatttaagaattctgaaatggattggagacagcgagaccatacattagcatgtcgactagatgttccaaaggaggcaacaaatgttagtttggccacgtgtaaagttaaagttgctcgtgttatctatcttgagtcttgaccatacatcatttcatttacacgacaatccatcaacataatttacatatcgtacagtgaacaggaatcatgtgcaatatgactaactataatcaagtctgatttaattaagg

SEQ ID NO: 42322 - DNA, 417 bp, Arabidopsis thaliana landsberg
agtattatgtttccacatttatcaaatacaaaacgaaaacctaaataggttataaaagtttgattttcacttatagaaacattcccatcggagttattttttggttcttccgttttcttttttgtgttttcaagattgactacattttgactccgtaagttatagaacttaatgccaacagactcgattttcgatttgtcttcgcttccatgtttttaattaaattttttcggcatgaaaccaatcaatacatttaaacaatttgcaaatcatattgtaaaacataaaaaaaataaaaatcaaataagtagtgaggataagttctttatgcttattcttactgaggggtttcagagttatgggtggaccagacatgaaacatgatgcataacatggttcatttagttgagtaagatt

SEQ ID NO: 42323 - DNA, 320 bp, Arabidopsis thaliana landsberg
aggtgttgggcttatgaaagatgtgacctataaatgcttgattggattgagaatgtaggcaatggataccttggatccatttgctcaatgtgaatgatttgcttgtgcagagaatctaaatggtagataattttagcagaatggattcgattcagcaacgaagaggtgggattgtatctgtctctccagctcagacaccacgatcaagtgacaaatcagcaagagaatcgagatcttctgaatcaaattcaaccaatagaaatgataaagaaaagggtgtgaatgtgcaggtcatattgcgttgcaagtgcgcttttagt

SEQ ID NO: 42324 - DNA, 810 bp, Arabidopsis thaliana landsberg
  unsure (1)..(810): unsure at all n locations
aatgcacttgatttactaaatgatgccttcttttaagcaaattatttctagctcatctattatgatatggatcaaacatgtgacagcttaagcgggccccatttcgtctgtgtataaagtgtgaccgtaaaccctaactagatgaatctagtgtcactgtatatagaacatatacacgtgagtgggtgaaataactatgcaacattttccgatgaagattgaatcataaaatctgacaatctccattattttcatccaaattatcgcgtacataaaaaagcattaaataactatatatatatataggccatacatatataactatttttttcagcaattgtgcttcttcctcctttttattaatagcgatacaatcttccgtctttgtgcgttacgattcccaaagaaccacaccctcatttcctcagagtctggtctcttacagcgacttctctttttctttcttttttggatttcctctttctgcttccaccatggagaagaacaaacaaagaaaaactcagtgttgtttctttccaaatttgaacactttgtaatctagtgatatcactttatcttactccaatttcaccggttaggtttggtcattaaaaatgatcaaaccaaaaaagaaaatgtataagtaatcaccagttcaccacttggcttaattcatccanaaataagatttcaaattggctatatatcaagttaagaaaaataaagctagacgaaaaaggtacgatatatatgcnngtatgtactgantcctatactacgagggtagattatgtgctatatattagtaat

SEQ ID NO: 42325 - DNA, 834 bp, Arabidopsis thaliana landsberg
gtcccgtaccaacctcatcttctctcatccacgtaagtgaaaataatttcaccaaatcaaaattttctcatatgaccaatgaaatcacagcttttaaattgtgaagaaaccaaaggagaaatcgaaaccggggtgggttaaacacagagccagcagctacgaaactccggtttatccaccgccacgtcatcatgtacgtaacgtacgaaagagacacaactcgtttgacgtggaagggaacaacaatttcttcacgagatctcatgatgatgacgaaaccacctctcgaagatccaacgtcacgttctaccgagttcttcaacaagttcaggagttcgagtcgtaacaaaatatcaaatctctttgagatgtttatgttggggtaatgtagtagttctatgtagtaccaaagtttcggtatacttgttatttatattgttattcggtgataaccggtccggtcagattcggttaacagcttaaaaaatgttataatttctacttttctagtttcttatgagtgcatgggcattttcagtataatcctatgttagaatgggccgtattttatgaaagtcaatatatgggcttaactgggctatactttctaagttcaaataatttgttatatatatatttttttcccatcaattttatgatcttgctgacttgcaccatatttttacgctcgctactgtctttggtaaacatgtgaaaaggaatacgtatttataggtctaggcgttcggatattcagatcgggcttgggtttgattttttggttaaggtttttttggatttagaatctagaatctgttcagatattttaaaact

SEQ ID NO: 42326 - DNA, 494 bp, Arabidopsis thaliana landsberg
tgttttagggttttagtttctgcggtggggcttcctgtttaattatgctccggggatattgtgctccttatttaagtgcttacgaatgctacaattttttttgaaatggttataaatctttattaatctatacatgtataaatgtataaaaaagatcaatgctagctaaaaagtgtcactgactaacttttgtttcatattataactgcattattccaattatttgtttgcataattagtctactagtttgcaaactaggcctattgcttaacacagcgttgtaagtcgtaacgttttaaatcgtgttaaaaaaaaattgcatgtgcactagactatgatatatcatcgatgcatgatttacgctttggttccacaaatgttgattagtgcgactatatttatcttacacataagtgtcataagacacatacacagactatggactgtccatactaagggtagaaattaaaaaagtttaactcgaaggagagac

SEQ ID NO: 42327 - DNA, 625 bp, Arabidopsis thaliana landsberg
agccgttaggagttttttattaaaacaacaaatagtgatattgaagatttcattgagtagaaaagagagaggagaataacaaaaatatatctattaattttttgagagtgaagaacaaaaaacaaaagaaaagaaagatggttctcgatcgatgaaactattatttatgtaatttttcatgtttaacgattttctttacttaaaatcccacttctagtggtcgatcagtttcatctatattttgaactcaaaagtaagtctttttcagtaacataaaatttctaacgacattaaaattcttatttgaataagaaaaaattcattcaaactccttcaatttagtccgttacacccctcctaaagatatgttcttatttctctttacttaaatgaaattaaagtcatcgtcattgtggatgaagacttgaccgtatctatttttatgggcagttttaaatttgtatccttatgaagcttgactaacttgactcctttatatatatacacacatatgcatctgcagttttaaaaacaacttcacaccaacaacaaagaaaaaaaaatcaaactaaatggctttgtcaaagtttcaactagtagctcttctaatcacatatactctcct

SEQ ID NO: 42328 - DNA, 558 bp, Arabidopsis thaliana landsberg
aaaatgtactactagtcaataatttatgttgagtcatatttatttattttgacacagttggttttcgcagtttcttgtttattagtttcaaattgcacttattagttttaaaaacaatttaatttgatatttggtataatatctcttttaaattatttacaaactttattacagcctggttttgaaaaaaaaaaaatactttgcataattgctactttgctaggattactttataaactttttcagctttgattcatttaacattaaacccaattaaaatattttattcattgtagcataaaagggggaaaaaaagaaatctatatatatatatatatatatatttcctcctttcaattaaatcagctgttaaaagtggaaaaaatcaaagagatatcaaaatattgattagaagaatatgtccatattcaattattttatattatctttattaaatgctttaccttacaacaataacttaaataaatttttgggattcccgttacattacttaagtaggacgacgtgcgtctgcttcgtctcattacaaagcagaag

SEQ ID NO: 42329 - DNA, 547 bp, Arabidopsis thaliana landsberg
taaagctgtttttggatgttagacatggtaacttcgtgttctctgatggcttttcacaaatgtctcgtagtgctgtgctagacagaaaaaatgtgtattgcacaggataaatgtgtattgcacaagaaaaatttcaaaatcgattgtgtcaaaaacaaaattttaaatttttttccgtctactaatcaatttttagactgtttttgactaagcatttcagggttggcccagaataaagcatatccggttttggaagctgaaacgttcccgcttatattcatagtgtttcatcgtattgctctcacaaaccctagatcgattttgtttttctctcatgtccaaagacaaagtctcttctcccaccgccgatctcattctgcagcttgctgctacactcgtcgctgctcttggcgctcaatgctaccgcctcacactaccgccgtctcctccgcccagaatcctgacgccgcaagtgctaccttcgtcttgctaccatggcttcctcctttcaatcctacccgaattctttaccatcgcgcgagctctc

SEQ ID NO: 42330 - DNA, 572 bp, Arabidopsis thaliana landsberg
actatgtatgagtatttcttatactttaaagccggttagaaacggcttctgtccggcgtccacgtcatccaatacaatgtcagccctaggatctgcatccggtggtcaatacagcgcctgggctatgtctcgacaacacggttattgccaggcctagaagcgtcgaggcccatcgtgagactcctccaacgcgccctgctcctcctccaagtctggccccgccttcccctcctccctctcgcttcttcggcaccacccacctctccaccacgccttactcctccttcaactccgccgccccctatgtcgtgcttcttcagcgccacgcaccaacaaaacaagcaacaggtgaaccctccatcaccaacttacttttctcacccacgacgtcgacgatgtcggcgacctgcccgtcctcgtccgaggcggattgcctcaaatcgatgctccagcgtagtctcggatgcagatgcaccctgtgacaatctcgggttgcgccgcacgcgccgcgccatggtcgaggcagtggtcggcatggatgtcgcgcgtgccacaactgtgtaggacatggt

SEQ ID NO: 42331 - DNA, 442 bp, Arabidopsis thaliana landsberg
acgctcatgcctgatgacaaaggtgctgccacgttggcgctgtttcttggcgccctggtctggctcgttctcgaggctccctggtggataatggacccggcggcaggcgggctggtctatgaacgacattccctggggctcggggcgggggcagcacatgacgaggagcgcgcgcgacgcgaggaaccgtaccgaatgtggccgccgcgctcgtgagctctcccgacggcagacgacggcccgatactcgagcgggagccgggtgaatcgagcccggagagtacgaggcggctcggacggcggcgcgctggcctcgccgcgcgccgggctggcggacgccacctcccgacagcgccgaagcgcgtcggggcgccagcgctcgcggcgctcgagacacaagtcgatggccctacacccgatccactacggacggaggacgtac

SEQ ID NO: 42332 - DNA, 557 bp, Arabidopsis thaliana landsberg
gtgctaaatgcacaaaaccaataacccaaggtaaaaaaggaagcaaaactaagaaaggggagctcgagaagctaaggggaagctaggacagctcatgggaagctcgacatgcttggagggtagctggatcagctaatggaagtgtcagctagctgcgctagctcaaccgagttgaatgggtagtgacgcggttacctcatcagttacccctacagttaccccgatagttaccccggcggttacccgagtggttatcccaccggttaccccgacagttacccgaccacaaatgggcgacacatgtatggacagaagcaatgggaattcacagccattcgttcataagggcggttgtcagcggttttcttaccccaacgcctatatatgcgacaccttgggttacaatttcggaaaacacacacaacaaacacaaaattccagcgacatttaaaagagaaattgagaggataatacgattatgtctaaaggggcgagtgaactggatcaacggatccggggcagccctaggaaactactggtcgtacgaccaaggtgat

SEQ ID NO: 42333 - DNA, 667 bp, Arabidopsis thaliana landsberg
gcctccttactcacatacaaaccctatctgtccgtacaaaatactaaaaaccctaacttttctctctccaccaatctagtttattgtttcatttccacttcaacgatgaaaagcttgcatgtggcggccaacgccggagatctggctgaggattgtggaatactcggtggagacgctgatgatactgttttgatggatggaattgatgaagttggtagagagatctggttagatgaccatggaggagatcataatcatgttcatggtcatcaagatgatgatttgattgttcatcatgacccttcaatcttctatggagatctcccaacgcttcctgatttcccatgcatgtcgtcttcatcatcgacttcaacatctccagctcctgtcaacgcaatcgtctcctcagcctcttcttcttcggcagcttcttcctccacttcctcagctgcttcttgggctatattgagatcagatggagaagatccgactccaaaccaaaaccaatacgcatcaagaaactgtgacgactcttctggtgcattgcaatccacagcttccatggagattccattagacagcagtcaaggttttggttgcggcgaaggcggtggtgattgcattgatatgatggagactttcgggtacatggatctacttgatagca

SEQ ID NO: 42334 - DNA, 151 bp, Arabidopsis thaliana landsberg
cactcttcctgatttcttccatgttcagtccatttcctttactttgctctgaattcgatttaagatgtatacctaacaaatcgtcactcggtgcttctccagcgtctctcgccttttctctatggctaatgatccctcttagtatgacttg

SEQ ID NO: 42335 - DNA, 569 bp, Arabidopsis thaliana landsberg
tataagattgataaaaaaataaaaaaaatataaagatttaggtaaccattgtcactatcaaattatggaattgcaatcatctttacggataaataatgaaaattttattacgtcggaaatatattgcagaaaaatctttagtataacgacttaactaaactccaacgctaatctaaatatgttcaaatccgacgatttcaacaatgtagtgatctggtccatgaacatgaccgtagattagaacatgaccatgatctgtttataaaaactaataataacatacagttttgaatttgtgttacatacttcaaatagatagttggaagaattctccaaaccatacggtttctcctgagttttttttttttttttgttttagagaaaaaataaaatcaaacaagtagagttaattagaatatgtgttatacaaaaccacaaagagtagacattttttattccccattgactttatttaacacttcgcaatatatgagagagtgagagggggagagaaatggagctcagactaaatagaaagaaaaaagtcatttaccttctaagaaaagggt

SEQ ID NO: 42336 - DNA, 490 bp, Arabidopsis thaliana landsberg
atcgacgacaagcttaccgtcctttgtcatgaacttgcctcggctcatttccgaatttacgatccccggtgctacaatggtaaccccaatatctgatccaaactcagttcttagtgtttcataaaaggcgatcacagcagctttactcgcctgaattcatcgacatgaaatgaaggtacaaaaatgaatgcttgagatcagatggttagtaaattaggagagggaaatggatacaaaatataatgttacacagtaaaagcttagtctaggtgaagcaatgtatccacatccagaagcaatcaccacaatccttcctctaaacttctttaggtatggagaagcaaaaaatgtgcaatacacagatccccaaaagttgatgtcctatgcaaagaaaaacaaaacttatcacaaacggttagtacaaaactatttttttagagagatctttggtcggagtaacttgaccatagcgggcgaagccttatagaca

SEQ ID NO: 42337 - DNA, 600 bp, Arabidopsis thaliana landsberg
tgatgtataagtaatcaaatttggcttagcatccactcgcaccatctcatccaagaaacccgttactttctccacactaccttctctgcagagtccatcaataacagtagtatagttaatcacatcagctgtgattcccttccctagcatggatcgatgctcccgaagaccttccatcaagaacccacgactcatgtatccatgaaccatgctgccgtaaaacacagcatcagcattcatgcctttacactccatctcccgcataagctctgccatctcaccagttctcccctccaacccaagagcatggacgactgatgtcaacgtcacaaggcctggatcaaatccactaaactgacgcttcaccttctcgtagaaatgcagccctgctccggcctttccggttctggagaaccagaaacgatcgagctgcaaatgcgatcgtctacctgacaccccctattagtcattatgtcgaacaccctgagcgcgcaatccaccagtcccgtgagcgcacagcaacaccaccatcccgcaatacgtggacggtgcagaccatgccgtggtcttcaatggcagcggagagtagcccagagcgtg

SEQ ID NO: 42338 - DNA, 771 bp, Arabidopsis thaliana landsberg
tagtgtttacaaaatattgatatcaataattcatatcacctttcctttatagtgtttaatcgattcatacaccaacattctctttctttttccaacagcctcgcatgttcccacaactatgcttttgttccaatgcatcatcccaattttttcatcagaattaaaataagaccaagtcatagaacaatccatatatgatatatcgatataatgagaagcggtttcaccaattttttgttccaatgagttgaatcctcctcaacacaacattctacgtacatattatttcattgaaagaaaaatattgaaaaaataaactaaggtacaaaaagaatatataagaaatgtagattgtgcgtccaactacaaaaatacaacacttttcctacggaataattgttgtatccaccaatggacccaaaagcaagagcaacaacaactactaataataatactctttttctcattttatcaaatcattttcacatacgcgtatttattaatttttattttggcaacacgcgtatttatatatttatgattctttctttttttctttctaagcatttccctctattaacgtgtccactccaaattccacaaacccaaaaaacattataatcaatgaacgatgcttccattcgccaactactacatttcaacaccaattatgtccgagaagaagaacatcaccagaagcagtaacaatagtagaaagaagagatggtcaccgacgctctttgccggaggaggaggaggaagaggaggagg

SEQ ID NO: 42339 - DNA, 1154 bp, Arabidopsis thaliana landsberg
gggggccacttccccctattgctgttatttcatggagtccatcccactggatctatcaaaacatccattttagattccataatcaccaccgttgataaatcaccccacggtcttactagaaacatcttcaccattctgtgaatgtcgacgtgtcggtcgagagactgtaaaaagcctacgtattcatagaatttttatttttatttgtgatgtttatgatagttttttgttcactttaatttttttgttcaatttattttaattttcttaacactgatataaaaaatttcatagtttatgttgtgtatttattttttaattttttataatatttaatttaattttgtcaattattgttttatttaatgtgtgaattaattttagctgtaatgttttgatttcaataaataaaatttatggaggccacaatatgatgacttggatgttgatgtagacatcgtagatcaaaagtgaacttttctattatatagacaaattattttctctttattattcgaattatttcaataatcataacatattggtagatatgtagtcgctataaaaaatttggatgtaaatgctaactgatgaaataaactaggcctaatttgtgtgaaagtagaaacctattaattgtgaaagtttggaattccataaactcggtcgcatattgaatactcaacatataattttggtagtgtttgaagaatcatatttgagacataatcaggtataatgaataaaagcagatgacacagcaaacgaggaagatgtcatcacttgtcacaaatccagtgcatagatggatcaagtgcaattctgatgaagtataaaaacattagagaaatactctgaagttggatggatactctatgacgaccaggtggtgtttgtaacatcttgcatagcgttaatcttgagctaaaaacagctttagaagctgaaagatagatttttggggtcagactgaaaactttaattaagttagggtaaatatgtaaggaaaaggaagtaatgtgtaattttataaatttcagaaagacagaaatgaaaacttaaaactccgttttaattacacaaggctcaagcccaagcccaatacagctaacgaaatcagacgaaatcacatacattataatatacatagagat

SEQ ID NO: 42340 - DNA, 552 bp, Arabidopsis thaliana landsberg
tgcaagcatcgccagttgatatattacaatatatggaacaaaaactagacgtgtaacataagaaacactcttttatatcacaacaaaaaaaacaaaaaaaaacataaggatcacttctctttaaagttttttatttttggggtcaaattctcttcaatatatattcaagaaaatctaagatcattttgacgtttggaaaaatttacagtattgcttatatttatacaaaaaaaaaccggtaagaatctatctaatcaatatttccattcgttaaaatatttatttatatttttattcttatttgattctcttctaaatataaggtgtctagatttaaaatatataatttcatttttgaagaaatcttaaaatcgcactacaaataatattaaagttttaattaaaattaaaatccttaaataatacttattttgaaataataataaagctaaagcgacagttgttttgaaaaggatagagtaataattcagttcgtatgaacttatcataaaatttaatagctatacgggtggatttgaacattatatatag

SEQ ID NO: 42341 - DNA, 598 bp, Arabidopsis thaliana landsberg
ctgcaactcaaactaaaatctgttttgtcccgtacgcggccatttttattttgtattaatgttctaaattacattttaaaaattagactcaaactccaactaaaatctccagccagcatatatatatagaatgttgcttagtcaatagtaacaaaataattgcaaatgtaaaggctgcttccaagaaaaaaaaggcagtcctatatcttttaacttgatatcttacaaagttataaaatggattactcacatcatagtcattgaaaaactaaaattattatgaaaaggtacatattaacacacccaaaaaaaaataaaaataaacgttcttgagttggcaacccctaaaagtggatggcaattcagaaatgggcttttaatgtttagattccataaaaagtgaatagatggttcttattctgtgtatgtgagatatcaatatcatcgtgacaaagactatgtgacaattaccatacaatttatcatggaggcaaagcattacaattataatgctaccaaaaatattttgaagttaaaacaaaaaaaacttattaaagttaattaaaagcaagattttcgacagagactaaacagagtc

SEQ ID NO: 42342 - DNA, 787 bp, Arabidopsis thaliana landsberg
tcgctattgttacgtaaatggatactactgttttgaaagaaagctatagttgtcatgggtcaccttttgtctcatgactctcatcatacatttatagattacatatttacattatcataacattttacacatattgatataactatctctaataaaaaaaaacacaatctaactttatagcacataagtattaaacataatgaatttatccccaaccgttttaagttccggtcgaataaaaaactatgggttgttgtgacatcggctcctttatctacaaacaaaaagagaaaaattattcttcttttttttttgggcaaagatggaataaaaggaccaataaaaatagtaaaaaatacaactaatactactttcgtataagtgatgactctataaaggaaactgtttttttcattcaattattacatcaatactactttcgtttgaattataacattttcgtacaaagatggatgcatatacacattttgtttggcttatccttcccagacaaaaaaaagtggcttattgtttttaacctaaataatccgactcgtatcaatacactcgcttaagaatttttattttctttgataacaggactttcgcaaaatactaatatttcgcatttttggagtgccgaatattgatgttttaaacatcgataaggagttaaggattaaggaccaactttaaacaaaatcatagttgaataactcgaatcataattcctcatctccaagatgatgtcacgaatcactcgatcacaataaaatgagatatttcg

SEQ ID NO: 42343 - DNA, 613 bp, Arabidopsis thaliana landsberg
tattttaaaagcgagaatgttttgaaaattttagggcaccacaaaacagtaaactccaacaataaagccccaaatcaaaccattaaccgaaatctggtaacttctgccccattgtcatattcctgtgcgccactatcttctttccaccgcgcgcactttctccttgtggccgcagaaatctgtctccatggccggatgctgccgccatgtctcattctacgcgtgatgctgccatccgtcaggtgtcctggtcgaatgttgctaaacgtgctttcttgatttcagggtttgcatgtacaacactagtacagcggcagagattgctttatcgctttattgtatgtattagaacatggagatatgacagttatgtgcattgacagtgtaagataatctgaagtaattttataacatttagttagctttgtttgaaatgacatattgtcatagaaatttcttaccgaacttgcactttctagactatgttgatgcctctgttcgaatttgagaggtccaaatagctcatcgtaatcatcgatgcaggtagcacatatcaatagaatccatgataccgatgtatcttgtagatatgatgatgatacagtctgaatct

SEQ ID NO: 42344 - DNA, 508 bp, Arabidopsis thaliana landsberg
aatatggaatatatattcttataacgtgttttattatgttctagcatttatatataggaatttaataaaatcaaagacgttaattcgttttactttctgaaacattggttgtcaacgtaggcaagaccttagttaggtcaagcctttactatatgctgaaaatgtttgttttattttaattcctagagtacacattttagggttttttcttcttttaattggttttaatacatattttagggttaaggaacattatatgaattataaaatgattactatcttttgaactgatgaaaaaaataattatctcgggacgtttaatttgatttttcacatatcactattgttatatagtttctttttctttcttaattataaatctatagaaattaatgaaacgagctctattttggaagatgaaggtaaaagagcattgttaacgatccattcaaatcctcaaaatataagtattaaataaaaagcaattagagtttagaacattcattga

SEQ ID NO: 42345 - DNA, 654 bp, Arabidopsis thaliana landsberg
  unsure (1)..(654): unsure at all n locations
attttcaatatttacatgatcatctctctattactttaatttcttgtagagagagaaagaataacacaataaatatcaagaaattacgaggaaactgtagcgtcgtccttttcaaagctatgccctattagcaaaggggacctctctatttctatacatcttgctcttcaattctatcaaagtgtttcatatttttaaaatttgaattgaactacaaaagatgataattattttcttacttgtcattgtttttaaaattataaaatataacaaaaaaacttattttattttattttaaatgaagaaactagacaaatatctctctaaattaataaaatatattaatttatatagagtttactgtatttttaaagctaaacattgcgttaacattcaaactttttacaaccaaatattcataaaatggtctcgtaatcacaaccgcaacaaatcaacctttctgaggtcttagactctcgatcctgacctgccaattttgtaccctaatctatgtcacactatcgattgaattgacccacagaaataacgatcgaagtagtttgttagtcgttgtttgtgggattaactatgatttgggcaatcacnttatggtagtagtttaatgtaccaattagcntatgagagtgatggaga

SEQ ID NO: 42346 - DNA, 731 bp, Arabidopsis thaliana landsberg
cgaaaactcgaatctaaccaaaaccaaaaccgtaccatactagaaacttaactgaaatgtcgacccctaattcataccacgtcatctgctaaagttagctgcataatggtgctttgtagagcttgtaaattaggatagtttttacgttggaatgaaattgagctagatccgattgaccagccgccagtcttcacatgtaacaacaagtcaacaaccgacacataaataaaatacaaaatttggacaaaatagttgaaaatattgaaagtgttgttgttattttctttccttttaaaatgtttaaggtaaacgtataaaatcagcacgcatgcaataaaataagtcaaattcaacctattactactactactatattgaagtttttttttttttttttttatagtaaattactattgaagtatgattaatggataataaggttttgaatatcgacaagtggagtgatgcgatagtacactgttttcgcggctgcgtatagattcattccgtcactaacttcggaatttaatttgtccctttgagaatcattgattgaatgagacttcaacactggtggcgacttggtcaagattggcgttgtaaaaaaaaaggaaaaaaaaaaaaaggattggcgtggaattataaaattaaaaaattatcctaaaaaggccctacaaccattggaaccttaattttttggggattggaacctaaggtaaacacaatttttt

SEQ ID NO: 42347 - DNA, 598 bp, Arabidopsis thaliana landsberg
aaatcattcttccatacgttggaatcccatgagatataacagtactatatatacaagaaagaaataatacatgtgtatattgataagtagtgttaagggcctttggagagcatgttttcaatggattcaagacgctggagaagaagctgatttctgaactttgtgatgaaagcttctgcgctcttgtccacgtccatcgatgccttcctttccaccttcttattcatcgtctctttaataacaatattagtggtaccattaccactttcttttgcggaactcatcatcatcttcatgttcttgttgctgttcatggtagagatgtgtgtgtaacagtgcttgtgtttccttaattgattttggagagagggtgaattgttatattttggagatgctcgagacctatgtatttataggggattttcaaatctttttttatttttttttaattaaaaactgtagttagacatgtaagaaaggagaagacttatttctctttacgtaaaccatagttgaatgttgaaggaataaaaagaaatgggaatcttgaatctcaagttatacacgctacttatttacaattacataaaacgttttt

SEQ ID NO: 42348 - DNA, 447 bp, Arabidopsis thaliana landsberg
agagacaaatggtttttacttggtttttcactgagctctcgaaaatcagtgatgcaccttcccttgtgaagttgatcaccaatgggactttgttggctgacacaaactctgctatagccgttttagtgaagtttccatctgccaaagagaagcttgatgagagaggcatagaggaaatctaagtagcacaaaaaaagaaggtaatgtattcgaggagtcttaccaaaacgggcaagtttctcttcctccttgttcagtaaaactaaggcaggacgcttgacttgggtttcaatttcaaatagctttgcgatatcagggcttgcagtttggtaaaaactgagatcgtcttccagtctggacgcagccgccagctcctcactctctgacccctgagcaagagaaaatggtagcaataataagatattagaagctaaatctttcacactt

SEQ ID NO: 42349 - DNA, 570 bp, Arabidopsis thaliana landsberg
aatatccttttcattggtagttagaatcacttccttaaattaagaaaggtgccacaaggtctatcaaattatatgcagaagaggcaattgcggcttaaatctcctagtcttgcattggttaccaggtagacataagaaagaataatatcaaggccaacatatccaaccaaaaaaaaaaaacatgtagctctataaaattaagcaagagggataatacaatactaaaacatataaagataatgggactcatgtaagattcattagtcaatgctgattagaatactaaacaaagaagatcgaacaaaagtaaaaaaaaaaaaaaaaacctcttttacttcattctctgtgattctaccatctccatttttaaccctgcaagtttcaaaaagtgaaaaaacaaatcaagaactttagctacatgttgatcaatatgtttaacaagatttgatgataattgataacaatacatgttgaagaagatttgaagacgagaatcgaagctttcgtctgtaatttggtaccaaaactcgtataattcttgaagattgatcttatccaccattattgttc

SEQ ID NO: 42350 - DNA, 536 bp, Arabidopsis thaliana landsberg
  unsure (1)..(536): unsure at all n locations
gcaccataacaaagtaaaccacagcgtacatgaactactctttcgttataaatccattttcccgcccattgtcacataacgcctagctgtcactttgttaattccgaaaatacccatgggggaacatgatggctcctagataaggacatggatataaatgtaaattcggtaaaaaatcacgtagtaacaaaaacgtaaccccaccggcgattttatattaaattcttaggtcttttaaactttaaaggcgttcacggggaaggcatgtttttggctatttttattaatatcttgttttagtggaaacatttaaaatataattttacgtgaaaagatgaaattatttttattaccatagcccggcactttgtattttaattaccacattgtagatcacagtgatcatgttactcctatttttggtatgaacgcgaatgaataaacataaaatgtgtatatacaaccgactntcatgatctaatgatcacatggagacagttgtagtgtgcaaaaataatagacacatgcaatcattt

SEQ ID NO: 42351 - DNA, 333 bp, Arabidopsis thaliana landsberg
caagggacaatgcgataaaaactggagcatcaaaaaggaaagacatgtgagctaatctgaaacttatggaatcatgaatttatactgttgactgaatataattctaggttgccttttgagagataacaatgtattgaagagtaaattaattgaatggtgttcctatgtatatggttcgaatggcaactaatccacctttgtgagcacagattagagtgctcgaaacgaaattgagtgtctgtctaaatgattgtagctccttctggttttggaatgttccagaaacaattaatatatcttttggacagttaaatgttagatggttatattcaa

SEQ ID NO: 42352 - DNA, 514 bp, Arabidopsis thaliana landsberg
tctcctcgattcttccagttttcaaagcagtcaattagggtttgtagactaattcggatttggagacggtagcggttatggacgcttgtggaatcgggagtagtttaaatcaagctcccgtaactcaggatcttaagaaatttggagataattctacaggtttgttcttcttttttctcggatttattttgtttctgctctttttaattcggcgtcttgttctctgttagattgaatttggatctagttggttcttgttcttcaactgtttaggagtatataaaacttaaattgcctcttagttgattcgttagaccttggtcttcgttagattttatttactttcattgtcttgtactcccacgaagaagattagggaagacttaattgctaatttaaatcgtgaaatgagaaaccatattatgcctgttgagattctctccgattgagcaatttccgggagaatgtttcaggtttagatcaaacttgcatcagagtcttatagtttcatctc

SEQ ID NO: 42353 - DNA, 429 bp, Arabidopsis thaliana landsberg
agaagataaagtgaattggtgtttgggtaacaaaggttttactgttaattctttgtataagaaaaatttgattgatcaggtgaaagttccctacagattcttgtggaaatctaagttaccacagaaaattaaagtcttcatttggctggtgataacaaataaaattcttacaaaagataatctgaaaaaaagaaattggaagggttctagtgagtgctgtttttgtggtggtctggaatcgattgatcatttgttttttaaatgttctattgctagatttgtttggagagtggtccaaattgccatagatctggattccattccaaaaaacattggtgaaatttgtgacagatggatgaataactctagtgacagaatctcaaattaactgatgatttgtagcgacgtatgttttgggctatatggaga

SEQ ID NO: 42354 - DNA, 555 bp, Arabidopsis thaliana landsberg
tgccacagttagccactaaccaaatagaacctaaatcgttcaataaaccatttttcttgttacgcaactatcacagtccagcaacagcaacacggtcttcgaaaaaaattgaaaggacagagtacacgaaaagggtggtaggattaaacgttcaaataagataactgtattgtttcatcggcaggttctagtagctgctggagactatttcaagtcggctgattactagacattttaaaatttggatcacgtacgtactatgtgattactagaaatcttcaacacgtatgcatggtaggtttaaacgctgaaataagataactgtattgtgtcatcagcaggtgatagctgctagagactatttcttcaggtcggctgatatgttcaaccaaagatttattcagccactgatacgtacacgtcgccacatgcgctgtggcaggctatataacctcacatctccatgcccaaagcatcaacagcatttgtagacacaagctaagaagctccgtagctaaattcacatattacaaactcaaaagtggagtgcagaac

SEQ ID NO: 42355 - DNA, 623 bp, Arabidopsis thaliana landsberg
gtatggaacctcaatatgtgtttagtaagagtgtgaaagtaacaaatgctctgtgaatttagactctgaaaattctctgctttatttcaatgaaaacgatggcttatataatgccattacaaactggaatccctacaaagctgcgaactacttgaaccaacttaaactccataagactcaacaaacatttgaaagcaagactgaaacaagacttaatcaaacaagatagagttttttattagagcttggtatttttttctttattcacatgttttagtttctgttttaacatcttgtcaatgaggttgaattaattaggtccatgtcttttgcaggagatccatgatggcttagacttctcttctgatgaagatggagggtactcttttggaatattctctgtgaaattttcaacagatggacgagaagttgttgctgggagcagtgatgattccatttatgtttatgacctcgaagcaaatcgagtttcactccggactgttgcacacacggtaaattcctttatcggttgaggcaatttctcctaagatttgtacctgtgtgtagatctacctgttgttagtggtaacgttatcgttttagcactgatagcattttctcca

SEQ ID NO: 42356 - DNA, 1549 bp, Arabidopsis thaliana landsberg
  unsure (1)..(1549): unsure at all n locations
atgattaaaaatatcattcacttacttaaaactatccgttgtgcaattatgaagttcgttgtcgaaatgcttagaataactgatcgtgaatgataagattattatcttttgataagataaagatagaaaatgatcatgcaacaacaaaaaaggaaacttcctgaaagaagataagcttagttcggaagactacttgggccgtcccctgaaacagaagtttatcgcgcaagaataattgggccttatatcagatcctttggccttagcccccggggntttagtattagacaagaccagttgcgtgcgtcattgttgaatatttcgaagtttgatgatcgatcgtcgctcaaaatttagggcttttcacttcacaatcccgatttggggttttctggtaaactcctttaatctcagctcgtgagacaaaatcgatcccgcatgaatttggatctaattgagcaaaaaattgtgttttttcaatctattgaatttcacatccttaaacccttgcatattcaatctattgaatttcgcatatttttcctcaaaattttttttttaattcccccccaaaatcatcccaaatctattgtgacgggttgaaagtaagtttctttatcgaaaatcagtttgaatgaatgttagggtttatattttgatggtgactgattccgatttgtataaatgttagggtttatactggtttctgactctctggtaagtatagagatgattatatattaaatggtgttttaaggcgtgttcagatatagctgtgcttgtgttgttctgttttggcctttttcatttgttctgtctttacttcttcttagtcagtctgtggatttcctttgtaatggttattggttagttaggaactactctcaggccttcttcacatgacaccaaagttttttgtggattatgtggaggaaattgctattttagtatatggtcattgaagcaagataagaaccttagaaagcagagtgttataatttttctgtcaaactcatgctgtagttgcagactttttcctacttcagattaaggagaatggtttttttttttgtaagcaagaagttaaaagagtgagaatctatgaaggcccagggaccatgtaaagtttgggaatggttttaaaatttgatggctttgagaatcgatctgaactatccttagatttttggaaaagtgcaaaaaagtgcaaagtgcagcatccttatatcactttatgaacttttcacgtgaggtctcgaatccatcacttgacattaacacatagtataagctatacacttggttgttattacttatttcttcttacagnnnnnnnnnnnnnnnnnnnnnnnnnnnnnnnnnnnnnnnnnnnnnnaacgtgatatgactcattttagtaagaagttgtgatttacagctgaggagtctgtgttatcaacttgaattgtagaatctttttgttgtcagggaggcgtgaaagtgtcacaaaatcaggttatcgggaagttattggctttgaaccttggcttccctgttagtagttagaaag

SEQ ID NO: 42357 - DNA, 603 bp, Arabidopsis thaliana landsberg
agatgagagcctttggtcagaagtggtattgatggactgtgtcatttcaggaaatgtgaagaatgagaaaaagatggagaattgggagggctcactagatagaaacgataagggatataaccatgacatggagttttggtttgaccatctcactagtagtagttgtataattggagaaatgtccgacatttctgagttttgatttgttttagttaaagacttatatatcttcctttgtgacccacatgaataaaagtcgtttacgtttcctatattagtcctctttctatttatcgttatattacttttggttagttaaaatacagatcaggacatatgctaaatgttcgtatcatgttatacatacatatattatgattttttttttctctcccttttaatgtaattttaaatctatggtgatgtcttgtactgtaacttgtttagtggatggctagattaaagaaagtctatgttgttgttctaatggtggtcgcatattcccttttttttctatgcataatgaatttactatataaatcacatttaaaactcttataattcactaacagaacagtaatggctaaccgacaaaaaatatag

SEQ ID NO: 42358 - DNA, 680 bp, Arabidopsis thaliana landsberg
taatttttatatactattattatttgtgattatgcaaaaaaatagagggcagaaatattttatttaaatataggatattcctacatggcgtttcgtttgtcctacatcttatacatttcatcgtcgtgtttcacatcacggaagaatatgatatagcaggtggttttactcaggcgtcatttgttttactctatgaaataaccccttcaaattggctgatggcgcttctgatactaggtgatgattataacgtgttacaaggttcttctaattgaaggtgtgtcgcccgttcgtgaacttctgccgacagggtcgggacaactgacgggagaagtggggaagggttaatgaaagaaaatgaattaactagaatgttgtaatagaaaatacactgatataggatatatataccatacctggatacgactttattgtatataaaacttgaaatacactagaatgttataatagaaaatacactgatatttactgtggcataccttgatacgactttcttgtatatatataaccagaaatacactacaatgttgtaatagaaaacttatccattttgtcttgttcttcgtcctccttaactctttctcacaagttagtattcaagatatatttaaaaacaaatacaaatcatttttatgttggactaagatagttcgactttt

SEQ ID NO: 42359 - DNA, 818 bp, Arabidopsis thaliana landsberg
cacaaacttattcattacgacgacatataaatccatgtctgttctacatttcatatatttagacagtggatgtcgttgattcattttgataaataggtgagtccttgaaagctatatgtcgccctgtctaattatgctcctttgttccctcaatcagatattggatctctcaggatgtccacagttaaatgaagccagcctgctactgtcaacactgcctaactcgtatttcgcaaacctcaggtggaggaagagtttggaaagtttcctaaagaaccctgatgacgatgaaagacatcaagaacaaatatctcacagaactttaccaattttgtcttttgaatcggtgaaagagattgatatttccaagtgtcagaggcttgattataaagttgtgatcaagtgcttctctaagtcattcccatcattaagaaaactaagagctgcttatctcttaaacatcaaggtgtctaccctgcttgaacttctcctgaattttcgcgagctcactgaagttgatttaacagttgatgtctctcctataataccggttcaagcatctgtgttttactctggccaaggtcattgtttactatcgagtatcacaagattaacgctggagggtagaagtgacatatgtggttagtctttttgtttgttttttggctactttcttatactcccaattatttgatataccgtatcaatcagcaaagtccaaatatgttctactttgacaatccaaatcccagctatttttcttgttgccgcttataaactaaaaggtagctaaactgtatattttcgtagctgatacc

SEQ ID NO: 42360 - DNA, 538 bp, Arabidopsis thaliana landsberg
agagaaaaggtatatagcgattttatttttctggtgattatttaggctcgctagctctatcatcgaacggaatggaaacagaaactgatgtttaaaaatcaaaaaaaaaaaaagaagtgtctctgcacgtcctatactatatcaaaagtcacgtttaggagcataagaatgcaatgattaggatcacgagctaaaacgtgcgctcaagttagatcccttattctcatataactttggatttatatattaacctatcgctaaaaccctatataactctcatggtacaactttcattcatcaacgaaacacatttagacatatattcaaatattgaattaaacttttaaaaaatggcccaaacttgttcgattctctacatgctgcttctctcgtctctgtttgccgccggaatagccacaatcaccgagggggaactgctttcctcgatgatcggagtccaaggtctcatctactgcaaacgaggatctaagcttacacctatccaaggtaaatctcatcatgtttatattgtaaacta

SEQ ID NO: 42361 - DNA, 596 bp, Arabidopsis thaliana landsberg
ggcactggtaaacaaaattgcaacatagtagtaggtgaaaaaaggaaaatatcaagatcccaagtcatttgtagaactaagacaaacaccatgatcatcgagacaaaatgtgacaatacaaaaaatatagatttcgggtccattctatcattctatgacactagttgaatccattcatcaaatttatgtattgctacaacaaagtggtgagaattctattccatgacattagcttcaacggaatcaatggttgaagttatgcaataggcttccagcatatattaccacctgaaaattcaaccaatcaacaacagtttcattatgaaaggtacgagttatttttcaagactataagaaaatagttagaccaagaacacaaaacttcaatttacacataacaaataagcatgataattgaaatatgtaagaagcacaattaattataagcatgaacatgctgagttttggtcaagtcaaattcatatgcaggacaaagacctaaagtagaccgttattttaattaaatagagaaaggaggtaacaaagttgttatcgtaggcacacaagtattaaagaacaagtttagatcagagtag

SEQ ID NO: 42362 - DNA, 234 bp, Arabidopsis thaliana landsberg
gaaaggcttgaggtggaatgaagtaagaggctggtgaaataggaatttagtagcacatatatgaggacacgtggagcttagtgattggttgaaataagaaaagatacgtggattcgattggtatgagctgaagttgctcaagcttaagatcaagttgttcatcgtcttcttcattatgcaaaaatctgagaattgtaaacttttcttcttcttcctttcttgtgtgtttggggt

SEQ ID NO: 42363 - DNA, 1785 bp, Arabidopsis thaliana landsberg
  unsure (1)..(1785): unsure at all n locations
taggttcacgcgactacaagccactagactggctaactcggctacaaattgcacaaattgctgtcaaaggtttgtagcacaatctcaagattaaatctttagtgtggctataatatgaatccattggacagacaaaacttcagattattacaggtcttgaatacttgcatactggctgcaatcctagtattattcatagggatgtgaaatcaagtaatattctcctggacattaacatgagagccaaagtatctgactttggactctcgagacagacagaggaagacttaactcatgtatccagtgtcgcaaaaggaactgttggataccttgatccagagtaagtctaacaacacaacctcacaaaagtatccctttttatgaactttgactgatagatgcattcttttgacaggtattatgctagtcagcagctgactgagaagagcgatgtctacagttttggcgttgttctttttgaattactctctggaaagaagccagtctcagcagaagattttggtcctgaactgaatatagttcactgggtaaacacctctaatcttctgtccattttcacctttgaccgtttaaagtactacatgaacaacatcaagattcacaaaccacatatcctctctatgcttttcttgttcaccaacaggcaagatcgctgatccgtaaaggagacgtgtgcgggatcatagatccatgtatagcaagcaacgtgaagatcgagtcagtctggagagttgcagaggtcgcaaaccaatgtgttgagcagcgtggacataacaggccaaggatgcaggaagtaatagtggcaatacaagacgcgatcaggatcgagagaggaaacgaaaatggactgaagtcatcgagttcaagcagctcaaaggcacaatcatctcgtaaaaccttgcttactagcttcctcgagctagagagccctgacatctcaagaaacagcctagctccagctgctaggtgagtcctcttaaagctcgagctctcatgtttaccctttggacttaccatcgtcacatagatgaatacattatatacgtattaaaatgtgtgtatgtgatgtagtgtcaaatttaatctgtatctctttacacacttctgacatgacattgtgtagatgttttagttgatgatagcacaaaaccataatttattatagaaggtaacaacataatatgctatctatctcctatgctgatgaagacgacaaatttccaaaaacaattcttgcatgtcttgtgtcagggagtagccaattgtcaaaagactcgaaacaaaatgatacaaatgcaccactcataatttcacgatcaaccatttgtcacaaaacctcaagaaatctaaaattgtgtctaaaacaatgtcacactgtttcctatgttttgtttaccacttggtttcctcctctattccgcttttaccatatgaaaccttgttttgtattgcacaattcaccatgaaagcctaaatttaccatttttggcaagtaaaataatctgtcaacatcagaaggtgccaacttcaatactcaaacatcacatgaaaccaaattttaaggaagaagccaacacaaagacaataaaattaatcaaaaataaacaaaggagagagacagaagaaacagagagagtagttaattccgggtggttttctgctcatctacttctatccacccttcgtccctttccgccccaaaattcaattctctcttcctttctctctctttctccttaaaaactctaactntactcatctcat

SEQ ID NO: 42364 - DNA, 509 bp, Arabidopsis thaliana landsberg
cgatcaaaccatatatcataatataactggttttttcttgtttagcacaaactcaggtaagatgcagagtacgcgcatgaaaagactactccattattttgccaatatatacaccaatcttcttgtggattttggcgtattacatgtctcccaaatatgtaagggcctgaccatttctcaatgaaatttaatgtatgatcttcatagtgttagttctagactgcgtgataatccagttttagaacgttatttctgtacaggtcacattaacaaaatacattgcatggtaaagaatctttgtaatttaaatgaccaaaacgagaaaagtttttcgttgactcccttatataattattttttcttgtttttctgttaacaggtaataaaaaaaacattatatggacaaaatctactgatttcaaatctctttttttcattttccctctttcctccttatatttcttataaagcgtttatttaaaagtgggaaaatatgaactaaactcttt

SEQ ID NO: 42365 - DNA, 153 bp, Arabidopsis thaliana landsberg
tgtctgtgggattcagcttcaaacgaaggaagttgagaatgaatcacttgagactcggttgaatgtgttgttaagtaacaagtaaacttttatttgtgatcttatttagtcctggttggctgcagtttgtttagttttttgtactaattggtt

SEQ ID NO: 42366 - DNA, 523 bp, Arabidopsis thaliana landsberg
cagtttaagatgccaagatgtgtgaagccaagtaatgctaaggttctccaaattctgtgtgagaatgtggtgagtagctacttcagcacagcgttttgactcactaaaattgtgtgaaatcaaagaaagtggtttttagttgtttatttccgtcgttgttgtctttatttgtcaatatagttttctttacgttatttaattgagcataaactttttttatctttatagaatttgtatcacagtggttttactttgctttttgtgcaattagtgtttgggaaataaatagatttctgatgtgacgttacctttattatacttggaacaaaaaaatcaagattcgaataattgattgtctgtatggagaataaaattcggataatctaatctatctcgatctgacctgaaccatattgtgaaaatattgttttatattacgatattcgaaacaataatgtacgtgttcgacaattgaattttggtgcttctctcaaaaacaagaagagatcataaacaattaaaa

SEQ ID NO: 42367 - DNA, 573 bp, Arabidopsis thaliana landsberg
tgggcctttcattaaaccaatcaaaagacactttcagttggagccttcaccaaaacgggaagttctcctctcactcgatgtatgcagccttgattgagaggggaatacaccgtcaagagtctctcatctggaaacttaaagtaccactaaaaattaaggatattctgctggttcctaacacggggggtgatcttgacaaaagacaacctaatcaaaagaaactgggtaggatcaaaaaagtgtatgttttgttctcatgacgagaccatccaacatcttttcttcgattgtcactatgctagatttctttggcgaacgattttctttacgtttggtattagagaaccaactagcatacaggatatgggatctcctggttgcaggagttcgataaagaaacaaaggcaaagatttatgttggtgccatagcaatctgctgggcgttgtggctaagtcgaaatgatgtggtttttgataagaagcctattataacttacttgcaggtactctttcgagggacttattggtgtcggttctgggggcttatcaaaggcgtgaagaggacatcgtaag

SEQ ID NO: 42368 - DNA, 856 bp, Arabidopsis thaliana landsberg
taatttttaatgaactagaaatgtctaattaagttttagtgatttttcatatatatgtgtagtttatatttaatttcatttgacatcttatatttctaggttttgtgcgtatatacatgtgtatatcaagtctaataacatttcttaaaaattatgtgttaaccaataagtaataactaccttaccgtttttttttttttttgtcaaacaccttaccgtttttaacaaacatatttatatatagaccgaagaggagacgcacaattatgtatataataccttgatgagtgcatgttaaaagcaaataagtaataattaacgtcttttctaaaaaaataatttaataagtgtgtatatatatttcatactgtcatagcccttctttatgatatataaaatacattattaatgcactgttcacatgtgatattaattatttaaaacctgatatttctataaactttctccttttgctttctctcctatagaaataaactctacatatctttagttctttacttcatttagatgacctcaaattattatgtttaataaagataatcatggagctaataaagggagggtataagctataaactataaacaaagctttttttgttcggctttttttggcttctcattttatgaaataaatctttaccatcaacaaattaactaaaaatcacaaaactgacacaaataaaaacacaacattttattcggctttttttttcacttcctatattgttttattaaaaaaaaaaaatagtttggtttttacataagttttatatttactttcaccataatgaacaatcctcttataaatagacccctccattatttgctctatatc

SEQ ID NO: 42369 - DNA, 199 bp, Arabidopsis thaliana landsberg
tgctttttgtaagattttttttgctgtttttggaaagtatcgaaaccgcgtgcccagaatagttgtatgaatacactttcgagtttcctatcaaaagtctatattgcatgtcacgttgaaaggcagagtcactacattatttctttttattcgttatcttatgacacattgtgacgcgctatctacttactccatgtct

SEQ ID NO: 42370 - DNA, 572 bp, Arabidopsis thaliana landsberg
aaaatctttttataaaataataggtcaacctcgaattattataataaaataaataatttgtgttactatgaaaaattaatttatactgtatacagtatatagagagagatagaaatagaggaaagcagtggataatacatatgattagttgatactcatgtgcagcgagtctatatatgcatgtgacgatttgttctacgaatcaatctctagttttcgtcttaaaatcatttggttttatagaatataagaaacaaagaaaacaggaactttcgcgggagacagaagggtacgtgaagagaagaacacataaaagtgataagagcttaacgtaataatactacaacaaaacctctctacgtacaacgagtaataacacatgaaaatagaaagtcgatgagacgtcgttttaaggttagatcgatgaagaaatatctcaggccccacccctgggacccgacccgacccgacctttgtctcctctccttttaaaaactctccattgcttctttgtcttctctcttctataacataactcaagaaattagggatcctctagagtcgacctgcac

SEQ ID NO: 42371 - DNA, 509 bp, Arabidopsis thaliana landsberg
  unsure (1)..(509): unsure at all n locations
accgttgcttccacttttgtttcttgggcttggtttgttctgaggtttcatcagtttcattttcctctttactccattagccgaaacgacaacgtatttcgttgtctaaatattttgttgtaattgcaatgacataaaacaaatattcgttaatttccctatgttaattcttttaattaaaggggtcaaaaaagtattactaaagtgagctatttaaggttgcaaatatattttatctatattttaacctgaattattnnnnnnnnnnnnnnnnntaaaaatgcaaagattactaatgaagaaaagtctcataattttgtttttttttttgtttttacaattcgtttctagaaactcaaaatatgaaaagttgaatcgtttcaaaaagaaattgctggttcgttaatttgctacgtctaatagttattataattattttcttatatcgggcttatgaacttataatcaaagtatctacctgcatttcccctctgttcgaataaaaaaaa

SEQ ID NO: 42372 - DNA, 612 bp, Arabidopsis thaliana landsberg
tcttgttgaagcccacctcatactctgtgacagacttcttctcctgcttgtaggactgcaagtcaatcttcattttctttagaaaggtgaccaggtagaatctcctttcaaactgcctgatgaaaacatcccaagataggactcctggtgaggaggagtgcgctgcctgcacgcctctccaccaaatttgagcctctcccttcagcagctgagtgccaaagcgaacccgatctccatatgcaatctcgaagacattcatcttatcctccacataagtcaaccaatctgccgcctcgaccggagtaccactgccatcaaaagaatccaacttcatgcccatccactgcatcagagaaagaccactgactggaagaggcacctcggccccaccacccggaacagcacccgcaggagcagcgccccgggcacttctccacctccagcaccctgagaggcacccgcaggggcgacaggaatggcttacctcagaagggccaactcctgctgcatggcctgcatcacggctaacattgccgccggactcatcgagtcccactaggagcttgcagactacccgagccctacgaggcagcatactgagccacagggatg

SEQ ID NO: 42373 - DNA, 510 bp, Arabidopsis thaliana landsberg
  unsure (1)..(510): unsure at all n locations
atgcgttttacctacttacgagtaaaagaagttcaaattagttgaattttttcttctccaagtttttttcatatatatttttatgaccgtgtattcgtgatgcgtgcatatttatacaatgtatgcaaatcataggtctgtgtgttttatatgccttgctttatattatttttttattttattttttccttagtgattctaccatcgatattaattgcagtgagagagacgcgtaataaactgtacgtagatgaaaattgcatggtaatatattgatttattgatggacgtagaaatttgatgaaaatggtaatatattgatctatctatctcctgcatcatcataatgtcatctagctataacaagaattataataaggatcataatcatcataatcatcaaggcaacacgatgatatccatcttccatcatccatgcaaagctctaattgcaacatttcttctccatcttcagaagggatgnatatatatatatatatatatgtatgc

SEQ ID NO: 42374 - DNA, 799 bp, Arabidopsis thaliana landsberg
caaagagtgacactgttgtttctgagtggaatctcatatgtcaacataaatttcttgtggctgttccttccacactattcttcatcggatctcttttcggtatggatcataaaaactatggatatatagcttcttaagtttgttaaatacgatttggtttggtaagggctcttttacatgattcttttgttttattttacaggttctggtgtgtatggatatcttgctgattcatggtttggtcgaaagaagactttattactctcttgtgtattaactttcgtcacggcctttgcgatctctttttcaccaaacgtttgggtttatgcattcttgcgttttgccaacggtttctttagatcaggaattgggtcttgttgtatcgtactcgcaactgagattgttggcaaaaagtggcgaggccaagtagggcaatacggtttcttcttcttcacgttaggttttctatctctaccactcatggcttacttggagagaaagtcctggagaaatctttaccggatcatatcctttcttcctcttggatacgcggtttgtctcctgccctttgcttatgattcttctcgatggcttcttgtcaagggacgtaataaagaagccatggtggtcttgaagaaactcgcgaggctcaacgggaaacaacttccggcggatctaagcctagtcgatccaattccagagagagatgatcaaacttcatcatcggagaagttttggaaaacaaaatgggcagtgaaaagaatcataatggttatgatggctggatttggcagtggct

SEQ ID NO: 42375 - DNA, 533 bp, Arabidopsis thaliana landsberg
gtcggcgcgttccttgtcctggtcgtgttcgaagtcgaaggaccccgaccgggacgaggcgttggagccgtacaacctgatgctgctcctccgctgctgatccatggccccggcagtgggaaacccaaacgaaccagctgctcaggaacaggccgtctcgctggatgttagcggggaaactctgctcggaacgcggggcggcagagagacattgcgcggacgctcatgcatgcgctcgcccgcgccgggggtgcgcggtgcgctgctgctttggagttagctgcaggcgaggcctcaggggcaggaagcgagattgcacacgcacgcatgcacctacggcgagcgcgctgtaccggccgtgatcggggtgcgagcaaaatgcagtggctcttggctcgccagagagcacggcgcgcgcgtcgtgggtgtttgcttggcgacgggcgcgacgcgaacactgcgtttatgggagtgctcgggcgccttgcgggagtcctatataccagggacggcgggcatgcactggaaccatg

SEQ ID NO: 42376 - DNA, 1197 bp, Arabidopsis thaliana landsberg
cgtgatttcgctacttgaagaagaagagacccatctgattttatttatattacaacagtttttttcaggattaatttcttcttctttttttgcctccttgtgggtctagtgtttgacaataaaagttatcattactctataaagccttagcttctgtgtacataaaaaaaaaaaacttttgtttaccttatgcttgcataaatctcttctgcttcaatggttcaaacatgagttgcttgacctactctttgtagtcttatgagttcataggaatagtttgcagaaaatgaccatttgtagagacaaattaaagtaataccgtagtttgatttaacagacaaaacttacaaggagagagttagaaaatttggtgcagcacatatattcaaatttgaacaggatttagtcagtcaaggaaatgataactgcgtccctgttacagtgagtgactacatgaaactgctttcttgcgatttcagcgcagattccacgatcttgactttcttggagttatcgctattcatcagggatagtttggcgagtgtggactgaagctgtgacatttgtgtatcttgaattaagtttttctttgaatactgctttttctgactagctgcgactactgtgcccttgtgagatttttgagttgacttcttcactcttgctctcagtgtttcgatggatgattgaagcgcatccacctcaactcccgcatattgatctgcaatttttcatttataagcgaaaagaaaagatgatgaaatgggttccggtatatccttttgcggacaaaatttatgggggatatttgatttaccgagctccgatttaaaatccagttctgctctcgtcagaggtttcttgtgtgtaccaggcaagctacggacacgttgcaagcattgttcaagagaatcatgtctttcaattgctttgtcaatccttttctccagaaaagattggtttttctcaacttttgatattttctcatttgcctcagcaagccgctggtgttggtcatcgattattctcttcaggttaggagcatgatgctgcagctcaaagtggacctgcaaaaaacacaaagagatctcattagtaaaatcggttagaaaacacattgacgtttttgtgttgggtttacatgacatctttcgcaccttgtgtgcatattcgatgtagttttcataaaaaagattg

SEQ ID NO: 42377 - DNA, 132 bp, Arabidopsis thaliana landsberg
ttttctctctttggtttatcaaaatgtagatttgtgcacgaaagcaacgagcgaggacatggacaacgacaacagaagatcaagaaacctatgagcttagacctaagtgaggccgagaagaagtacataagg

SEQ ID NO: 42378 - DNA, 623 bp, Arabidopsis thaliana landsberg
catatgcgtaagaagtatttgcttatagcctatagggagacgatcagatagtgcttctagggaaaattttcattggacccgtcactgtttcatttgaagatgaaaattttgttataggttatgaagaatatttttctataaggatatatattgataggtttttgaaactgattgtgatgaagtagccacaactcaccattgttacgtctccttggaattaatccaaaaaatttcaacctaccatgacactagtttacaatgtgttaacttttctaatttctcgggttttattaatttctatacttgtaattctcatacagagactattaagcttagattcttagaattgtttttaaaaaattaaacttgtaaacttttgtctttcagatttggttagcaactaaggactcaaaatgtagttggagaaaagaagaaaagttttggtttaatgtatcaatgcatgttttcatccatgattaaaactcaaaagaaatataccaacaagaggggtaatttagtaatttgtgtatgatgatgcctttggagatccagagttgaatggacagaggaaatgatacatacgaaagacttatggatacgacgagtgataaggggtactgaga

SEQ ID NO: 42379 - DNA, 657 bp, Arabidopsis thaliana landsberg
ctatataaaacacgctgcagtaaatctttaatttcttatcttattttattatgacattcgtatttacccgaagatatacttaagtttttaggggaaagcttacatctcttccttgaacttaaccattgcaactcttggcaatggaaccactatttgaacccctccgaccatatccgattccagcctagatggtcgcatgaacatattaaccgtcctagctgtctccaatggaaccacgggtacgatattcaccggctcatcccacccgaaatccatcgatccgaaaatcccaatattcctccaatcagtcaaacaaaacaacccatctttttttcctttgatcgttaagttcatcttaatgattttttcagtgtttgcaagctcttcttggagataatctttatcgtgagcattcctcttcgcttcttttatgagctttacgatatctgagatcgtaaactcttccacttctcttgcggttaatggcacatacatatcaatatatgcattactgtagtatccatcaggcaaaggtggatccacaacgttgcggattcctactgataaacccaaaacagtgactccatctcgatccaaattaagagctttaactcttgacttccacaaataagctcctataacttcgaaagtagtgat

SEQ ID NO: 42380 - DNA, 209 bp, Arabidopsis thaliana landsberg
tggaagaaactctattagtattttttcacattttacattttaaaatatttagtagcatgttctattactgattatttttcctaggacctttaactcaaagcctctttttgggagatcccacaaagatgggcaagttcataaattctcctgaaaatcaaattaagaaaatgttatgacatgttttctggtttaatcatctatagataaaa

SEQ ID NO: 42381 - DNA, 145 bp, Arabidopsis thaliana landsberg
ggccctcgggaccaaagctttctttgactacactccttctgaggaaacagtcaagagaatgactggaaaaatgataaagaagaacccgaagaagttatctaaggaggagtataatcaaaacaaaagcaaggctgaggaagaatta

SEQ ID NO: 42382 - DNA, 685 bp, Arabidopsis thaliana landsberg
ctcggctttgttgggtttgcggtttcagaatactgtgagaagtatgcaaaccaggggaaggttcagaagataagtctagcgatgaagaactaagtgaagaggaatacggctcagataatgaggatgatgatgatgatgatgttgcaattgctggcaaaccagatccttgaaccagctttggtaggggacttgttttatgtatatgatcatgaattatctctgcttataactcaactgtgaaatctatttctccctttgtgctttgttcacctgtttaatttatcggaccggacgtttgtgtacattattagaccgaaccgaattgttagtcttttcaatttcaaataagtctctcttaccggtttataccggttattgattcggtaatttcttttcttgaaggctatatgcatcgtttagattataaacgcattgtacatatccgtctcaatagccaaaatttactaaacgcattgttcgttttgatttgatgatctcatccacttcagtggccgtgttagccttgtacaagtaaaaactgttcctcttctctgaagtttaactgtttatccgtcttatcatcctctgccaaaaaaaaaaaaaaaaaagcgaagaacgtattctgatttgctcgtatgaattttccgacgatcccacatgaatcgaacgttgtctccatcaacgt

SEQ ID NO: 42383 - DNA, 393 bp, Arabidopsis thaliana landsberg
ttggagagaagacgagacggaagattttttgttgacggaggaagaaacatagcaggggactactagtttcttgtttctaagtgttgaggaaaaagatagagattgaagtttaggtctcgaagaggaagatgaagttgagaaagttcggtcgaggaattgggttgaagtagaaggaagtaaggtagtagaagccatagtcgattcttgattaaacgctgcggtttggggttttggtattggtttcttcaagaccaagtttgtgttttgtccatattgcgagtgatgagcatcttgggacagaaggctatatatatacataccagaaataatggttattattgtcatcacgctactatttcgcatcttctacacgtgtctaataatatctgacga

SEQ ID NO: 42384 - DNA, 532 bp, Arabidopsis thaliana landsberg
tgttggattgagatggctcataatggtgttttgcctactaacaatacttatggtatgcttgttgatgtttatggtaaagctggtcttgttaaggaagctcttctttggattaagcatatgggacagagaatgcatttccctgatgaagtcactatggctactgttgttagagttttcaagaactccggtgagtttgatcgtgctgataggttctttaaaggttggtgcgctggaaaagttgatcttgatttggattctattgatgattttcctaagaatggttcagctcaatctcctgtgaacttgaagcagttcttgtcgatggagctttttaaggttggtgcaaggaatcctattgagaaaagtctgcattttgcatctggttcagactcttctccgaggaagccaaggttaacttccaccttcaacactctgattgatttgtatggaaaggcaggtcgtttaaacgatgctgctaatctcttctcggagatgttgaaatctggagtacctatagatactgtaacgttta

SEQ ID NO: 42385 - DNA, 865 bp, Arabidopsis thaliana landsberg
  unsure (1)..(865): unsure at all n locations
tttcgtctttatctatggtggagaaatatctctgattttgaaaacaaattagaaccgaagagacttttcacaagttttaaacagttttggacactaacgattatatgctaacaaaatatataattagtaaattttaagttttgaatataatttacgaatattttttaatccatgaaaaactttaaagaaaatatcttatgttgacttgacactttatgagtctaattaaaaatgtacatacaagtaacatcatgannnnnnnnnnnnnnnnnnnnnnnnnnnnnnnnttcaggtttcacactttcgcccatcatgaaaagtggacaaaaatcaaatattttatttggcatgttttgctttgattctttttgaatgaatgttattcatcctaaaacatattttgtataataaatgtaaccttatacttttttccgccaatgtaaccttatgctaaaagttcagaacgtttataaataaaaagacaccaaagacaaacagtagggccttcaagcaccaaagacaaacactagggccttcaccaaaccaaattcttaagacatcctcgaatttggttgtggtttccttttgacttgaaagtctgttctagagttcggacgatacgctcaatgaaagaagacatgagtgaaggagacaagttttgttccccatgtctacgtctaggtttatttctttcggaccatatggaatgcacacaaacttggaacacataccgtacgaggtagtaaactgacttttatgttaaagatggtttatgtaattatgttactttaattgttaaatagtttttacgtttccatgaattggatcaaacgtaatcaagtaaaaaaaaaaacctatacttata

SEQ ID NO: 42386 - DNA, 684 bp, Arabidopsis thaliana landsberg
tttttcttttgtgatagatagtacataaatcttgaactcactctgattattctcgtgtagtacacaaaaaaatagtaaaaaaaaaaaaaaaaacaattatccgatcgacaatcatgtttcagtgcattaaaccagtcagaccatttggtcattggatatttggatttatataattagttgaatgcttttataaataaaattataggatgtactttcttttgtttgtcaaataggatgtagtccagtttcagaaaatactagtagtcaagaaaaccaagcgacaaattaatgtcgagagacaacttctaaattttcgaagaatttttggatttgattatcgatttgaccacaatgtacatttgatatatacaaggaaggaggcaggggaaacaacaaattcccacctgatatttcctactttgtgttttggaaataaatgggccttctcctttgattaagcccaagttcgatcccatctataaataatgcaacttaaaactcacaaaagtattcggcttacgcaaaatatagggtttctgtttattccaatcatagcttccggatcaagcaaaacagagaccgagacggagcaaatcgcttctacggagggccccattgatacgacgaacactgatgaatctacagtctcttcctctctgaacaatgacaaaagtccgactacaa

SEQ ID NO: 42387 - DNA, 569 bp, Arabidopsis thaliana landsberg
tgaagttcctgctcctgcgccttctgcaaactcgtaccttgtttatgcggcggacaatgcagagaatccacgatctctttcagcttctggttcatttcgtaatgacagtactccaaaagcagcacagagaaattctgaagattctggtgttacggttgatggatccccatctgcaaaggtagtactttgtttagttgcgtggtagatgcatgttctccattaattaactttcggctttctcgtttaatcatccgcatacatctcacccataggaaatgacgatcgttgttcctgattcctcgaatatctattcggcttttggagaggctgagtcaaagtctgtggagacactctcaccgtttcagcagaaagatggtcaaaagggactctttgttgatcgtggtgttggctcccctaggctagtgaagtctcttagtgcaagctcttttttgattgataccaagcaaatcaaggtttggcctgagctagtttctatctttcagtagagtcatctgaaatttgagaattttttatatttttctcacccttgtattcgttttaattttaga

SEQ ID NO: 42388 - DNA, 645 bp, Arabidopsis thaliana landsberg
tattattcaattagacgagtatcaatacatcacacacaaacaacaagaaaaaaaacaaaaagaactactgtttcttgagaagaagagggccaacgttatctccattagctttgttgtgcttcacatgactcccatcacacaatggaaacgtccccgacctccaacacctaaagtcaaatcaaatccatgcatgaccatgattttatatacatgcacaaaaatacttattcgtacatttgttcgtttgtaaaaagactactaattaagaaaaatcttacgagcagaagctttggcaaaacatatggattagtatgaagatacattaatgtataaatcactactatgcatgattttaattaaaacatgattcaaatagtagctaactatgttcttttctttcctaattaataagagaatgtgaacctgcaatagggagttatgttcttggaaagctcggtgacaacgacggagtcaacaaccttatcttcgttctttctgatctccggattgatacgtccacgccttctgctctcacgacaccattctctgctgctttcgtcccacctctcccccggtgactgcttgaatggaagctcccggcgtaacttagccccgtgcgaacgtgcttgcgatgatagcattgga

SEQ ID NO: 42389 - DNA, 721 bp, Arabidopsis thaliana landsberg
atactttgaaatgacttctgtatcaaattcgcaatctctaaatcttagttccaatttcgaatactaataaatcgattttcaatgaaccagaaattacgattgaacaatcaaaatccatatatacaagaatcaaaaagcagcaactaaaggtacaacaaagacgaaccctagctgaggtaaaagtaagctctatattgagtatctagcaatctgaatacaatcagcaaaccatagacaaatacgaagtcgtcgagatctacaacatgagacgaaatcggagctcgagtttgagctgaagatatccgatttggttatcggaaaacacacaaatcgtaaatttgaatcggaaaaacgttagctaaaaatatcaagctcaacaactgattagagagaatgaaaacagagattgaagatcagagatccgtggaaatggattcaagagctagtaacggaagaacaatctagaagaagaagaagaagaaaatattaccaggagtgggagagagataacgcgggaaaaagctcgagagaagatatctcagagaatcgacagagacaaggatggggaaagagatcaaagtaacagaggaagaagattcatcagagctgaacagaagtggaaaaaagagatgaatttaaaaataaacattcaaatattaaaactctcctaacttaattaattattttgctttttatttcccgggtataaataaattataga

SEQ ID NO: 42390 - DNA, 295 bp, Arabidopsis thaliana landsberg
  unsure (1)..(295): unsure at all n locations
agccgggggaattcattttttaaatgacatagataccctnnnnnnnnnnnnnnnnnnnnnnnnnnnnnnnnnnnnnnngagaatgaccaaacccagcctatccatacacgcaagggtttatatacctcgaacatttaatcttcgctttacagttcattagtcttccattgatctatcggattcgattcacatagtattacacatgtttcattttgaaactggcaatactcaattagaaggaatcactatggaatgtgactatgagtatgatgttgatcatgactttgaaagtgta

SEQ ID NO: 42391 - DNA, 432 bp, Arabidopsis thaliana landsberg
ttcgataatgcacgtgttaatgaaaataacaactcgcgggatgtgcggattggaaaagttaggattaggttgtctacgctagagacaggacgggtttacacgcattcgtatccattgattgtgttgcatccctctggagtaaagaaaacaggtgagcgttcatttaaccggtgagattactcggcgttaacgctgttaacatgggtgatgtgtagacgatacccagtgattctaaagatgcattatactcagccgatacgtgccatatgcttgtgcgtttgctgtatcaagcgctaaatgcgtttgggccaggctgagtagaactgggtcaccattgggacgtgaggttgtggaatatatgctagatcatgaattccatagtctggagtatgagatggatcagagcgaatttgctgcgactggttaacgtga

SEQ ID NO: 42392 - DNA, 342 bp, Arabidopsis thaliana landsberg
agaactcggtgtaattagcgcatggtattaagcatttcttatagatattgatagcctgcaattaaaaaaagaaacaagttatatatataaacaagaatggaacaagagccaaaacttaatcagtaacaaaggaatacctcttacccagtcaaagtccccatatgtttcaccgaagctcaaatatgcatgccaattgtcgagctgattagtatccaatggctttacatgaaaataaggcctgcggatttgtgtctcaaagcagcttattttctccatcaactgccgtgagtcttgatagaactgttctccaattgacaaatatgtatgcagtgcttttgacac

SEQ ID NO: 42393 - DNA, 566 bp, Arabidopsis thaliana landsberg
tttgggctactcctcttctctccttctctcaatttaattaggtaaatcaaactattttaaacaaaaagaaaataaaaagaacaaaaacggaagaaatagaaagaaaacagacaataatacggtccaagtccatggatcttatcactgctcccgaatttatatgattttgatataattgtcttagaatatttgtcttcattcgatgatttatttatctaaaataattctgtaaaattcttgtactttcccgacattacatttgtaaattctgcatcatatttaaactccaacaaagttacagtctggattctttttcttttcgtttaaattatttaccatgcacattgtaccaaccaatcataattgttcccatgagacatatatctatctttataatccatgcaagtctttgattagcttcttattaattagttgttattaggctattggttattttaccatgatgcaatggcaagttttatttcaatcgagaaaaagatgttatgtgatgtcaatatagtcaaagtcgagacaaagttaactttgaagatttgttgataattagc

SEQ ID NO: 42394 - DNA, 127 bp, Arabidopsis thaliana landsberg
tctcgatccccttccattcccaaagtagtaccaaacggtgtaggatatgattattcctctccaagttgttgtaagcccaaacaaccgttttcttgttgttctaagtgctcaaactgttgccccgggt

SEQ ID NO: 42395 - DNA, 121 bp, Arabidopsis thaliana landsberg
cgggtttatctttccagcgaatcaaatttgccaaaggtgtgcgttcatgagcccacgctaaagtttcaatcaattcctgccaataaccacgccaggaaattaagaacataaatcctgtagc

SEQ ID NO: 42396 - DNA, 674 bp, Arabidopsis thaliana landsberg
ataaatcatcatctcaaaagagtaaagttgccaattgccagagagatctacgcttaaacccctttggacagatacacttgtaaattctaactaatcaaaacactgcaatccaatttccaagaagaaagaagtgagtaaagaacagaagaaaggggaaaaagcatgatctggtttcaaaattaaaacccggaaaaaacaacccatgaatgttgaattagagataatgcagacatgatgctgaagaagaagaagaagtaattcaccagaggaaacatcagtggaggtcattttcacgagcagaatgtagctgaagagacgaagaataggttagttgggcacggcgatgagaaatgagaagagcaagaaagaaacgtgatgctgctgcgaagaagcagagagagagatgattcttcttcaccaaaaaccctctcccctcgacttcctcctctttactgatttttatttttggtttttttctaaagggcaaacgaaaggtggttcttaattgttatgttacaaatgttaatattgaatttaatttcaaacctatataaattatattatattccataaatttacctttttggtcaaattttccataaatataatttacttgtgaatattatatgaaagcaaaatggttttatctttgaaatatttaatttaattttaaa

SEQ ID NO: 42397 - DNA, 924 bp, Arabidopsis thaliana landsberg
taaaaagtacttcgttgcaacattccagaatggtactctggattttacaaacgaccatcaatggtctatgaatagacaatcacaaacttttaatgctaacgctattaatacggataatttgaacaaatacccttggatcttggagaaccaatccgggatcaaataccaatgaactcgggaggaggatggttcgtttgtcgttattccttgttcaaattggtatgggcgacgacaatgctttcttttttttggtgattaggcagtgaaagtgactttaccttttcttgttttataggtttgggtatgctcatggttccagacggtcctcagcctacgactgaacaagttgaagaaactatggagaaatattgtgaacaaggtgacaagaaaattgaggaaatcaacaaccgcttgaggacgggtcagagaaaaccaatatccactagtgagaatattgagaaaggtaaaagcagttcaagaaatttgatttgttcatcgtgaaactctctttagtggaatggaaattcgttttcttcatctttaatggaatgtaactttgtaggagagcactgggatcatgacactagttgctcggatgatgaggatgttggtgatactgaaagctatcatgttccaagtgcaatgagggtaagtctttttcaaatatacaacttgctaaaatgatatcttacgaaagttaaaagcatgctatatatgtgaatataggattttctagatatagatagcgaggcattccttagcaattcaggtagagacatgaagaacattcttaacaaggtcaaggaatctgagaagaaagtccaggtaacttatctctgctctggtttgtttgatgagacaagttcagagtctttcttattcgagaaaaggtttatctaagagctatgtgtgggagttgaagaa

SEQ ID NO: 42398 - DNA, 453 bp, Arabidopsis thaliana landsberg
attttccagttaaaaccacagcctggtactaccgctagtgggaaaccagacaaatccggttgaatcatcataatcatcatcatcttattcaatctagaagattcaaaccaaagttaacaatacggtaatgattctttttcacaagagttgaggagtttctgattctctcctctatatacatgtaccatccatcatcaagaacaatctgcttttttaataatcaaattaggtgacaaataaaaaacgttttgatgttgaggttttgtcttttcaacatttgttgcttagatttggtcttttgagaccaatggctcgattttaggtaatgttggataatgacgaattcattatgaaagagacattgagatgtaccaatttatttctttctccagattacaaaatgtacatcatatttatccatgatctaataaggtcaaaactatagcgacagct

SEQ ID NO: 42399 - DNA, 1174 bp, Arabidopsis thaliana landsberg
tcaacaaaaaatttgtatttccaaagtattaaaaattccaaagaaaaaattgattacgtattcctttacattttaccaaaaaaattatcgacgttgtatcatgcatgacttcacgaatcatactcaatattgatcaactaattttgactgatgagtaaatgctctttaggatgtgtaattactcatagttttattattttaaaaaacgtgtgggttagtcaaaatagatgtgagagtttcttttacgaaattgcaaacctatcaatatcataaattgatagaatttcgacaacatatcaactatgagtataaatgtagataatatagaacatatgaattgtagctttcaaacatgaatgtgtgcaaatcaagcaaaagtaacttgatttgttgggcttctttgttatacgttctccaaggtggttcaactaatattccaacattttttatattacatctttggtgaaccaatgttatcagaagggagcatgaaagctctttgtacttgttttgatcagtactcagtaggtattaatcaaatttgcatgatttgtggaagacaagtggtcagtggtggatatgttcttgttgagtcacaattaggttgaaaattaagggtgtaaagttagatttcggtttgagacctcgtctcaaccggtttgaacccaaattgggcctagagagaggcccaagatagaggtaggctacaccgaaccggcccactcgctctgctaatcctttcgaaacaatttcatgtccagtgtaaaccattaagtgtgattgatcattcacaatttcacataaatacagtcacctaatccatggataagacattaatcgttgcagttatctataaatggagagtgtatctttaagcaaagtacaaataagtgaaaagctaaggaatatttaaaaagaagaaaaagcagagattccacacaacgtcagaaaaaaccagagtttggtttccctggacaatgtctttttcttttagtctactttattagatgccattttcattgagtaaacaaacattattgtgagattattagaaagagacactgtataaaggataaaacaaaaaggcatacaaagacaagaacactcatgagcttttccctgcagccagagcttcttttttcatcacagctttgacatagatttcatagcaaca

SEQ ID NO: 42400 - DNA, 728 bp, Arabidopsis thaliana landsberg
ttttcctaactttgtgaggaacaaatgaggtaaaattttagtttacgtaaaatttagctatgttacactacatcagaatacacttagagagacaaacaaaacgtgtaaggccttgaaccaagataactacgtctagttccaaaaccgcttttggctttattcaatttccttgtttatcatagtagtggtagcggctttgttattcagtttgaatgataatagtattgtggttaagagtatagtaaaacatctacaacaatactccgtaattagtattttgatagattaatatattttggtcttaaattaatatttttgaatcaattagtaactttataaattaataaaatcttatatattttcgacattactaacatagtatattgttttgattgttatatatgtcatcaatcacaaaaagaagaactatttgtattgaaggccaccacttatctcttattgtgtttatatctcaactagttattatgttaaaggtaaaactcttatcatatagagcccaaactgttctaataacaacaattaaagataaatctaaattttgataatttgactaacatctatgttgtatctcatacgcaaaaatatatgtttgtgatttcactatgcaaaattaacatctatgttaaaactttctatatgaaaatattatagtgtttttaataatacgtacacatccaacattcaaacaatgtgatttcactccatag

SEQ ID NO: 42401 - DNA, 464 bp, Arabidopsis thaliana landsberg
atgttcgatatatggggagatttcaatatttttaatcttgtttgaagaccactccatttttctcatgtttaacaaaaaatatgttataatatagtgaagtttcacaaaatctctttctcattagatgcgtcccccaaattgctatattcctattagcgtcacattttctatgaattttcatatacttaatcgtataacgagatatttcaaattatttttcaaaagttttaagttcactaattacacatttgagaagacattattgatgatttggaagtccttcaaggctttaacaaaaaaagatgattagtgatttaatttgggctactgtcacggatgtgttactatccgatttcgaactcgtgtattttacatgacatagaaaaacacatttaaaaatcaacgatttattatcatgaaaacatatatacactcttcaattttttttcttaattcagattttg

SEQ ID NO: 42402 - DNA, 456 bp, Arabidopsis thaliana landsberg
  unsure (1)..(456): unsure at all n locations
cgacgtgttgggcacgtcccggtacgtgatgcactcaccgcccatgcccgggatcgtgctcggcggtcgttgggtgcggccctggtcgccgacggtggtgctggccgccgtgaacctgacacttctttcactcgtgcgcgcccttcgacgctcgagcgggtcgccaaccgtgacggtgcaggactggttgaaccgcgtccgcggacgccgggttcggcgcttgctcgaagtggtcgcactggtgtcgtggaccgctgacctcgaccgggtctcggtcgcaacnnnnnnnnnnnnnnnnnnnnaccaaggcgggctggtcaccatgttgtcgtcgaagggcggtgcccaggactcgctcatcgtcgagggagccggaaccttggtnnnnnnnnnnnnnnnnnnnnnnnnnnnnnnnnnnnnnnnnnnncggccggcgaccgggatcatccgcgacga

SEQ ID NO: 42403 - DNA, 964 bp, Arabidopsis thaliana landsberg
ttttcaaggcgactccccagaaccacagggagaggatgacgagttgagaagagcgaagatgcacgaagaagctttgttggaagataaacagctgctcgttttttgagtggtaatcaaaccttcgcgttgcattttttcttttctttattttgacttctaatatttttatgtttcttactttttatttgatatctatatatatttatatttctcctaagtttgatctaatatgaacaaaataaatagccaccaaaaaagaaagaaaagacgtactaattccgaccaaaaagaaaagacgtacgaatttatttaattatttttagtaaatgatttttcaaggaaaatatttgtacattagtaccgtaaaagtataatcttatgcattaaaaagcagtaattttggaaaatcaaattttcatgtttaatctcacatttacaatactatgtgatctttaatgaattttttttgttattatccttgccataaggaaatttttaatgcatagaaaacgtaaaaaaataaaatgataagacacgtctaaactgggcctaagcccaaaaaatataaagaccggtattaagaaagcccacactagcgatatttgtattgtaaatatccatttgaaaataaaataaccacgcgcactataagcgatttatcaggacgcacctcaaatctgtaggttaacccctttcgaaattagctatttttgtatagttcgaaaaagtaagcgcgtgatgctttttttttttttttgtcaactagcgcgtgatgctattaagttttttttttttttttttttttggcgcttctaagttttaacccttcctcgacttatttctctagattaaggaattccaaaagtaaatttgcccctaacatctggcaatagtaaactctttttaagccccagttacgaccattttttaattcttaatccccctaaaggggttttaataaaac

SEQ ID NO: 42404 - DNA, 767 bp, Arabidopsis thaliana landsberg
ttatttaatttgaaaattggattgtttgaatacacttactgcaccgataaattatcccggcgccaagatcacaattgattaaaagctaaaaacaaaggaagattcggaaaatactaaattaattcttatagaattatataatcaaccgaccaatgttctttgttttaggtgaacgaatttcacaaaagaaccaacggcactaagaataaaatattcgaaaatcgaattattaaaaaaacatgataaatattaaataaatacttttgataagccaatgagcgtaataataaccaaaaataaaaaacctcagctcgtcttcgttcttcttcttcttccttgcgactgtacgatctcctttaccgcctactctcttaaatcttaacccttcgttcgtaactgcttctcttgtctgtttctatagcaacattatctcaaacagttctctagagaaattctataataataacctaaaaaagtctcataggtttacaaattttaccttttttcgtttgtgtgttgcgtgtgttactaaatcactgattagggttgagaaaaaaaagctcttcgctttggatgaatctggaagtgatccaaaacactggcttattccacttctcttctctagggtttctctctaattctgaacttgctctctctgaatctcattattacggtggagctaattcggggttagctcacaaaaaaagccaactttatatgatgctctgagttgcttcatggtcctttttgtatgtttgtgtaaaaga

SEQ ID NO: 42405 - DNA, 702 bp, Arabidopsis thaliana landsberg
agtatagtggacgatggatattcaacaaacgatcaaccagagtggaaagtggataacttcgatgatttatatagcgatttctgttcacctgatgaagactgttataccgacgaagaagatgagcgtaaaagacgtctttatcgtcgaaatctccactttagtcgtgttcgtatatacatgattcgaaatttagtttttgtcttttcctaattcaaatgttatttagtgtataatgtaatttgttgggtttttgttttgaggtttagggttttctggtggaaaaagggattcatccacgttccgtatggattggtgcaatcttacttgaaccattggacagtgaacattctccggttaaaggaaggacacaacttcaatacgcacaagacatggtcaaattgtgtcttcgcaaatacaatgccttaaaggtaatttctgattttaacattgttttgtttgtttaagatgtgtgaattggccttgttattacttgtttttatttttcctttggttgtgttttcaggaaaccaatgtgacattggatcatgttgtaagagtgacagggtctttcactggtaggtgggtttcgtatattacttttatggcgaaagagtctgaggacgatgatacgcttgtggagtatcaagccaaggttgtgaagaaattacaatgtaagacttatcctatgttttgcaggcctag

SEQ ID NO: 42406 - DNA, 332 bp, Arabidopsis thaliana landsberg
tattctctttgacaatacatgtcgtatagtttatatgtttattaaataataatatgatttttataattgagtgtggccaggtggcaaacgcagcaaatgatagttacgatcagccatcgaacccaaactatcgaatgctagctaaagtatattgaaatgtccaaagatacaaaaaaataatttaatacaagtatattaaaggggacccttatgctttcaactgtttgaaattaaatgattaaagtttgtacagcattctagtgggctaatatttattgaaatttacaagtgttactatattgggaactcgacacaaatggatggttcattga

SEQ ID NO: 42407 - DNA, 734 bp, Arabidopsis thaliana landsberg
  unsure (1)..(734): unsure at all n locations
aaaaaacctatatcattgtaactcctttaactaattacaaaagctaatctttaaaaataattttgtgataattaatgagaaacttttgacatgttattattcttaagactatatggtaacagttcactattcaaacaaaaagtatccaattcaataagaactcatccttttttatttttatatttaaattgaaaatcatatatgtacaataatgttttcaatggctctaaatataaatataaatacaatatacaaataattgacatgacgtaatcctattgtaaaacaactatctgagatagactttaatcctattttttgatcatccaaagtaaaaataataataattaaactactttactctaaaataagatagagacaattttaatgttaactaaaacttttgaaaatgtcattttctttaaaatgtagcttttaaatagagtacatgctgaagtaatttatttatatcaaatagatatattagatgtggtagtaatttaaattgttaattgcttacatttgatggcttacaataaattgttaatttctagctccatcaatataatttacagaaattattaaactaatatgatatcatcccatatttgtaactttagacatgtgtcttcctctatatattctttaaagaaaaaaancaaataaaaaatatagaaccnacgtttaatatataattacacaattagttttctaatcaaatcaattaatgaagt

SEQ ID NO: 42408 - DNA, 912 bp, Arabidopsis thaliana landsberg
aacatgagccttcttctgtagattagaatttgagtggcattgaagggtgaatatatatttttcgggcattaaaaagtactattatctttaattgtggtctctttcaggtacatattcaatcttgttggacaatttatcggctatccctcactacaagaccagtgttgtagtatagcgtcctgtttgctggatttgttcaaaagcaatcctgccaaaaaaattgttagtgtactaggtgaccaactccaagtaagtgttacttaatgttatcatttgggtcctcttctgaaataccaagggttttattactctagaaaatatggcttactttttctctatctgctggttttttagtttttggtttcaaagctggttacatgctgcattgatgctgaagcagataccaaaatttctggtgcgaagtcatctcaactggttaatttgctacacaagctagttgttagttcagactcttctcttaatgaagatatcagagtaggcgtcctacgtttaaagttgccttccttttgtcctaccagtgccaggaataatagagaaatatatatgttctgatttgttcatcgatttcaggacttggaaccactcccggatttaaaatatttccaagtcattcgtgaatcacacattaggatctgcgaagcatattctccgaggaatcatctgttgaaggttgaacactctacatttttaatttacatttttcttgaaattttatcactatccaactttttgtttctttcctgttccactatccaacagtgttctagaagatctaattatcttgcaccgagattcctttccaggaggtatcgattctatcttcctgagttaaatcatcctacaatgtgcattaaggttatcctttgtggcatgatttgcgtaggatattag

SEQ ID NO: 42409 - DNA, 514 bp, Arabidopsis thaliana landsberg
aagaaaatttatctaaaaactagctagtaatcttacaattttatcacaaaaaatacattcaccggtgaactgcctataaagaatgattgtggattaatttttgacatatattaggtctaagaaaaaagagagaaaatattgttttttttctctctcagcttttgtttcccatgcatacagctttatgttagcgaagaactagtatgatccggtactccggtacagacgaaagaaagaaaaaaaaacttgttttagttgcctcaatgtcaactactatgctttaattatgatgccaattaacaaaaaaaaaccgaaatattcagaagtagtgttcagaccagatccatctggattgcaatacaatttgatattatttatatgattggcattatcttattatataatgctgagtcgtctcgttgagattattcaagaatagagacgaagctggttacatgggggtggtgattaccaatataaacaatattttagtccgtatatcttcttataaaat

SEQ ID NO: 42410 - DNA, 651 bp, Arabidopsis thaliana landsberg
ttttcaaatttttatcattttctcaatagtcagtacttagtttttagagtcacaaatctcgtcgaagaagttttgttggaggaagcgttatttttgctaaaggtactaattcaacttatttttcgtttttaagtttttgttgtgttgttactgtttatctttgaagtgaacttggaatgtttctggttttgagtcaaatcttggtttgacgttctcttctattttctcgatgaaatgtttttatccgatggaattcttcaaaatcgtgatatatatgcgtcttcatcgtcacccgagggttcttatatattcttagcatttttttctagattcgaatcttaagttgatcctgttctgttttataatctgtatttaatataaatttgaatatttcaaaggatgagtttgattttcttgcatgatttcaacaaatattatcaagatgaacttggatcaggtcatgagtaaactgtttaaggatttgatgaattttcaagctctgttattttttttgtttaaagaatattccttaaatataccaacttagtggtcataactcataactcatataaaggtaaagaatatctagagtcaaaataaataaaattaggtaataaaatctgagttatttaactaatcaaaacatttcaa

SEQ ID NO: 42411 - DNA, 667 bp, Arabidopsis thaliana landsberg
agtcgactctagaggatcccctcctctgtttcagaaactggtttgagatttgcaacagaaaactctgagaatcagacaccaagagagtgtcagaccaatagcaaagactttcccacacagcaatccaacaagaacaatcactatcaaaccaatcactttcgttagatcctcttttggtccagtctcttcttcttcttcaacctctgtacaactctctaaaaatggcggattcgaacttaaatcatccctctcagagatttcactcccgattctctcatctgaatacaagctagaaacttctgtcatagacccttcttcttcagtttcaagttcaacttcttcttcttctttttctttgttcttcatcttcttctttttcttataactccttagcttctttggcacaatcttcttcacaatctttgatttcagcttcgcgcttttgcttttctcagtcttaaacataacatctcttatcgtctgcatttctttcttctcatccaccacaagtttcgccttctccaatgacgacgaatccgattgaggagtgactctaatctcctctctaggttcttcgatgatttcaaagtagacattgtttcttctgtcatgcgtcgatgttgattcttcttcttattcttcttctagcttctctttatgtcgcttc

SEQ ID NO: 42412 - DNA, 904 bp, Arabidopsis thaliana landsberg
  unsure (1)..(904): unsure at all n locations
ttagatttggagttagctcaaagtaaaacccaagattttgttaataatatcgaagattgtgtatgtgtccgaaagatcatcaaatattatagtaagtggttatggtcagtaatatattcaattacaccgatatgtaatttgtcaaaatatatataatattctcttatcataaattataagatacgaaatataaaggtttaagaagttattagattagtctaatttcaaccgtttgtatctaaattagtaattagagatatatataaatgtttttgagtgttaaaatatttcaggaatttctaaaacaaaaacatgcgtataaacaattttttcttcatagaatacaatggaaatattattacgaaattaaaacttcttggatagaagattatacagctaaagatcactaggtagacttgtgaataaagtaaacattatagatattggcagttgctttgttttgatttgtatatattctaattgattttgtatatttagattatttcttaaaaagtctctatttttgccaattgttgccttacatggattaattttaataaccataacatatggattaccaaaatctacataaatattaggaaataattctatttaaattatatagttactaactttnnnnnnnnnnnnnnnnnnnnnnnnnntgtatcatgttaaacgactcagactatgttgttaatgagtggatcttgcaaacactaaagaaggttagatacctaataaatcctatatcctatattgtataagcaaagaccctgcaaatataagataagctataacctaaaggtttcaaaaccacatacatttaatcttttaaacataatctataagcccaaccattttaaagtttacatgcttaaatatgtgacccacaattttttaaaca

SEQ ID NO: 42413 - DNA, 401 bp, Arabidopsis thaliana landsberg
ctgatgccggggcgagcatcgtccactcacttgcccccctcggtggtccggctctgttttccatcacggggatcgcgcatgcggtcgggtgaatgaatccagctgtgcttggcttgatcgcatcctcgatcggcggaatcgtcatcggcctcaaggccatggggatcatcacagcgctaatccctgccgtgaagtctttcactgcctccctggggttgatggatgccgcggccgacgccaatcccgtaggcgcgattgttgttgggctgaccgcgctcacggcagccttcgtctacgcatggaccaagtcggagaacttccgcaagatagtggtggctggcattgaggccctcgccaacacctttctgaccgtcgcctcggtgatcctcaagggcgccgac

SEQ ID NO: 42414 - DNA, 722 bp, Arabidopsis thaliana landsberg
tatcttttttacaatcaatatgcttcatactttatgtttgtgtgtaaacttgctccttcgagggggacctattgaaaattgtctaaacatctctagattgcgcttcgctaattcttatatatatttatatagaagtggtgacatgtcgaatctatattttatacaataccatcagttagctttttgcacagtctttttattttaccggttgggtgtacaaatctatgcaaatgtgcgtgatcgtgggacattaatgtacatatgtataaacatatagtctttgacaaagaatttaaaaaatataggcatttcaatcaaagctttacatcatgaagaaatgtaaatctcacattttcaaacattattaatttgtgttcgaataattctatctctatcattcttgaccatgcttttgaataactaaattttctaagctgaaaaatcggaaagattcatgaataaatgatcaatgctatatatgaagactagagttacttgtcttatctttcttgtcgttaaaactatatatgaaaactagagttacttaatattaatagacactttgtgtggttaaataataaataataagtaagatttgctatctttcttgtcattaaaattgtattattgttattaccaacataatatgtcatatatcgacctgaaataattaaatcatgagaaatttggcaaacggaaacttcggatggtcaacaatctac

SEQ ID NO: 42415 - DNA, 570 bp, Arabidopsis thaliana landsberg
tattccggagaaaactttggtgacactttggtgaccaacggttttgattcctcttttccttcccagtattcacggttggtgcgtgaagcactgtgtgagctggagcttccctatgtattacacaacattggagaagggtccacacggatgaaatcacttctaaatgcttcaggatccaataaggtccattttctcgtccgctctttgtctatatcagaatctacaatcttacaaatcacttatcaaaaggctgcaactgctgatgctcaatacaatttacaggttccattcttggttgatccaaacaccggtgtccaattaggtgattacgagaagattctggcttacctcttcaagacatattcttcagcagcatctgcatagtccatagaacctatacatcattattcccaaggtacaagcttttgagtccacatgttttaacaatactgagaaactggttgacatggaagttacatacatggtcaaaatctgaacttttgaatatatgatgagtcggtaggtatcgcaagttgataaaaattactggcatggtcccagatctttaga

SEQ ID NO: 42416 - DNA, 769 bp, Arabidopsis thaliana landsberg
  unsure (1)..(769): unsure at all n locations
ggcaggaccatgggtggagatagctcttgttcttttatctaataattaattttttcatgatatgtaggtatccagctgggtgggggatttttattcgattttctaatctaaaaggcgttcgaaataacttgttacagtattgggttctataccatttaatgtaaaacaaccatgtacacgacatatacatttctcgagatgttttttttttcgcaactaccaatccactacaatcttcaagagcaacgtctgataataacaaaaaaaaatctaaaattttgaatgaatttggagtagtaagtaactttttcttgtgacccaaacatgtaggaaaccaagtagtggttcaatatattatatacaccatttgatcttattagtatgattaacaatatcttttcattaggttgtttcgttgttgttatgagactatctatttattcttcatatagtagatgaggtctagtcctaaaactcgtctcgtctaaaacctatataaaaaataggtttaacaaacgcaataaatactattcaacaaattcattttttgtccaattcttctatctattccattgcatgggcacaacactattactacacattaattgatgagtttaaaaagtatatgtaaacgcgaaacatgtcattgtcacacgtttttgttattctgtaaagaatcatatcataaaaacagagcataaccactataaatactggtttcatacaaaatcatcatgtacacataanaaaatcacccaacacaaaaatg

SEQ ID NO: 42417 - DNA, 768 bp, Arabidopsis thaliana landsberg
tgcgttgtgtttgggctatcaactaattggattgtattttgcagagagcttatttaccatttgagattaagattgtagtatgaaactgaaggccagcaatgcaatcttctacatgaatttcaaggcatatggaggtccacaatgcagaggaatagtaaggaaacaagtgattgaagactaggacatatgtgatcgatcggtagatagagagctgatggtttttgtgtctggataatactttttgcatgtaaaaaaccattgagacaagtcaatcttttacattgtaattgatttaacacaatatacttactacatcttaattagtattaatgagagttttagtactagatataagtcgaccaaattaaaggaagccaaatgttggcgttagaagcatattgtggtttaaaagaaacaataaaaaagaaacttgtgagtcaagtaaagaaaaacaaaaccccaatttcagatttatgtttggttccgatttaaaagggtctttttttttttctcttactttgaatttttaacaacattgacaaggttactctctctcccgtacgccactactttgaattgtgtttgttttggtactttgaatttgtccgtccgtatgaagaatattattctctcctttttatgcagggaaactgtggatccggtcgacaaggaaatgaggaaattggtctattctatttacggagaggtaaaaccgaaaagtagaaaaaaacagaaagggaaaaaaatgtagagttgcgattacaaaac

SEQ ID NO: 42418 - DNA, 426 bp, Arabidopsis thaliana landsberg
  unsure (1)..(426): unsure at all n locations
ttttgnnnnnnnnnnnnnnnnnnnnnnnnnnaaacttttcattggtgtttctggcggtgggggacaggtagccttctttcttgttgacccgaataaaaaagagggtgggcgaggtctctggatcgtccccacatgttgcattgtgtttttcccgaacacgaaccaagtatttggtcttctcgtcttcggtgtcgaaatacaggcattcaactgcaagtgttgttagctggtatttttgaactgcttttgcagcaagatcgaccgcctgattgtccgatttcactgtggcagcacaagcacccaaactgcacgttgcgattgaaagactgaccagaaatttcttcattgattttgtgcaatgcttggatgtcgacttgtaatcaacgaagattctcggaacatatcattggttgtaagcatcgacat

SEQ ID NO: 42419 - DNA, 466 bp, Arabidopsis thaliana landsberg
aaggccacaaattggcaaactaccatttgttttgccattactgtcagccagacagacactgaaggcaatttcaggggaggggagattccactgagtaattaggtggtacgtgcatccagaactactaaggtgatcggtcatcagtggcagtgcagaagctttgttgtactagaaataggtaaattggtacttgcgccaaaaaggtggagggatgcctgcgctaaatgagctgaccactaattggtcaattgatcgacattccggtcttgacgaggggcaacttttcctctgttttggaagttttagccaactgattacattaggtgaaaggaaattggtaaatcgacagttggcaattgcaagtggaaataatttataaagtcacaaaaacaatggattaagaaatcaaagtaaacgaaaaaacaacgcaacagataaaatgagtttatagaaaaatttaattttc

SEQ ID NO: 42420 - DNA, 450 bp, Arabidopsis thaliana landsberg
tgaagcggccgaccgcgaccggcgaggaaggcaatggcggccgccgctacgacatccacccggccgacgtcgccgactcgatcatggaattccgcatcgggccgactgagaccacgccggccgcacgcatgccgccgctggcgcgcagcgtcgtcgacgaggaaggccacgcgctgatccagcagtggatccagaacgtcgtgaaggccgacgagacggcgtatccgggttcgacgagctgcgcgcggtaagccgtacacgacgaaagcggtgattcgaccggcggcgtcctcaagggcgccgccggttttttgttgggttggtgcttggcggggtgatgcttgatcgggctttttgtttcgcgctgaggtgcgggttccaactgacttcgtcattcccgcgaaagcgggaatccagagccatcggagaggcaggcatcgcttgctgatc

SEQ ID NO: 42421 - DNA, 556 bp, Arabidopsis thaliana landsberg
atgtaaggtaacgagacagctcgaagatatgagagagaggttcctacgccggcgagcttcagctctaccggcgtcggagaagaaatgagagatagcttcttcgataatagtgtcagagagttgaatgggtactaatatccaatttttcttcaaaaagatgaaaaaaatatctttacttttaaaaatgcatatattgaataaacttatattgaaagtgcgaacaaaccctaaattaatctttgttatttcttttattaggttggaattacgtggttgattatggttagagtatatgtatatcggttgtaatgtatgtgtgacgttaacgggctttgagcccatctcacatgactcgtagagtgtctgtaatatatagggctatctacgagtcccttactttaatccgttctgaatggagtatttctttgttaattgcgaatatactgagttttactttatttagttataaatcttgtgatttggttgacaaattggtttacacatattatactctctttcgtgttagatgatctgattgagaaatgagaatactttg

SEQ ID NO: 42422 - DNA, 659 bp, Arabidopsis thaliana landsberg
actcaatgtatcatacacaagctagctaccataacgatatacagggatactcactacacagcaagtttgtgaaaaagtaatctttcattgatgtgcattaaatttgtactcaaaaaaataagaaaatataacgtttctgaatatagcccataacaaaaatgctgaaacagaaaaatgaagaactacataaacatcttcgtagtcaccaaaatccattaggaattcgatcttaaaatgtaaaataaattgatgtagtccggtggtttctccaaccttagatgtctcctaatgccgagtggatcaaccttaaaccgaaaagtatagagaaaaataacaatttggatttagcttcgtaaacaatggagatatgaaaattagtagtgatatatataagagaaagaaatgtaccaataggttgtgataaaaatggagagagctatatgaccaatcttgtacactcgtttcttttgctcccatttatatgtgttgtataactctgttacgtctgccaaatgttccctcttcatgtatctttaaccggaaataacgaagagacattatcaaattaaaccgaactcggtgaaccaaaatacccggttggtttcgagcaatgaacaaagaatgagtaaattgtctaatttgagtatttgacttacagt

SEQ ID NO: 42423 - DNA, 519 bp, Arabidopsis thaliana landsberg
taaggatctaagaaaacagatacgagcttacttgcattctcttttcttcatatctttgcagaaagacaagaattatagaatgccagacaaaaaacagttagagggcaggcagcattaaatcagcttctctgcaaataaataattttcattaggcaatacccaaaaagatatataagcattagacatgcctcatccctgaaacatatgtgatgcacgaaacatagtgattcagacccatgtatcactttcaaatggcgaatatatcatgaaaatttcaactggattgtagagaagactgtaataaataatcttctgacaagagcataccttacaacttaaccaagctaagactttcgagttatcaagccgatagaacttcatcgatccaacctctgcaagaagagaacaagagaatgaggaaattgaacaactagagatcaccaagctcttaagagtggtgagaaacatacagataatatgcatataagaaggattaaaaaattctacaagaagaaagac

SEQ ID NO: 42424 - DNA, 649 bp, Arabidopsis thaliana landsberg
  unsure (1)..(649): unsure at all n locations
tttgtgtctataaaataagacagcttctttctcttgactttccaaattcactcaactttctctcactccttttttctctctctctctctatcctctacagagctcgcagcaactagcgcaggtactctctctttctcactccttaatctagatactaaagctgatcattttcatatctctcagtaatccgtttcgtctgatcgggtaaaacacacttccaattactccggttccgacctcgttgactttttcttcagatagattccaaaaaagttctcatctttacttgttcaatctcatagattccgatttgggtctgattgttacctctccacaactattgggttcctctcaaaacccttcgatttcttgatccatccttccttaattttcgattctcgaaaaccgttttcacaacttttttttataaaaaaaaaaatctgcaaaaagatctctctgataagaatttttaaaaactttccctttatggatgctctgaaacataaaagagcttttaagtttatacctcccttatatctctgttttcaaatctgcagaatctgatactcttttctttttactacttcaggatgttggagaaggtgaacnttcgacatgacagagtcatgatgaatcgatgaatgctaga

SEQ ID NO: 42425 - DNA, 564 bp, Arabidopsis thaliana landsberg
  unsure (1)..(564): unsure at all n locations
agaaacacaacgcacaaaaaatgttttgaggctttgagctattgattctgactatctcttaccatttgaatcatactaataatgttttttttttcaatttcagccatcctcttttgcgttaaaaagtcaattaccaaaatgaattgtataattttcttcggtgaaaataccaatgatcaatgaaagtaggagctggaccatgagtaccattaggggttgaacatttgcattttaactgtttaatttcgccgtgtagatatgagccttctgatgtacgatttgatgattaactaatcatgttattttcataattaatttatattaaagctcaaatcagaggctcaaatagttaatcaaatcattacataagaacacatgtaagtgtagagaatggtacgtaacatctgttctctctttacggatattgcgactatatatatgaaagtagatttcttaatgtttttatttatttcctactactaatcagtatatttatcttctgtcagctntgtgttatagtactatagtagattgatatatgtaagccacaaatagtcccatgat

SEQ ID NO: 42426 - DNA, 738 bp, Arabidopsis thaliana landsberg
cttttcgatcacaagtttcacaaaaatcaaaagattataagaatgtttatcaaaaaaaaaaaaaaagtttattagaagcgacggcatagcgtttgactaaagaatttcggagagtttttgggcctatcggcccaattatcccacctgatgggaagcgttgccctcaaagtaattgtttgcaggtaattaattgttcaaacaaagtgacaatttccttccgttgtcatataggaaaaaagttgcatcaaaatgatttattttctggcaaacttgtgtcattgttaatttatatgggatttagaataattaatgacgaatgaaaagagtatatgaaccaagtaacagatcgtgacaaagcgccattatgaagtttctactgattttaagataaaagtctaagatcccaaagttaacaaggatttcaaaacatcaaaaagcatcttctaactcaaaacacaacatagataaatttaccctttcgaaaaactcattcttcgaagcttctgttttctgcattgatcaaggtcttcctcttgggactggagaacgactgttcaatcaaaaacattacataagaacatcaatgggacttgagtgaacagtaagaagccaaagccatttttttttttttttaccttctgtatcggtcataaccagggctcctttgtctaccataatcagaactccttcgtccataatctggactcctccgtctttcataagctgctggacctttgt

SEQ ID NO: 42427 - DNA, 473 bp, Arabidopsis thaliana landsberg
  unsure (1)..(473): unsure at all n locations
agnnnnnnnnnnnnnnnnnnnnnnnnnnnnnnnnnnnnnnnnnnnnnnnnnnnnnnnnnnnnnnnnnnnnnnnnnnnnnnnnntgagcatatcgttagcgataaaaatttatctatttccttgatattcaaatttccaaaattgcgaaaatcattaataattcatttaaattcatagccatataagtctctctcgcggttggcatcggcattgctccatagccccgtggcgacgatctgcggaatccgggcgtcgtccagcggcccccggcggggagcgaacccgccggggtggtggcggccttcaacggcaccatcacccgatcgtcgaggccgagatcaaaagggtccgggcacgaagcccgccctgaggcaacacaatgagcaacatgaactacgaggtcattcacgaagccggcggcgtgccgacagngatgtggacgcgcggcgtgccgctcgaagacgaggcgcgca

SEQ ID NO: 42428 - DNA, 516 bp, Arabidopsis thaliana landsberg
ggttggacctggtactgacgctcggcgtgccgcgggtaggtcccgttctgcggtggcgcttgttgttcaccgaacggagccggaactgcctgctgcagcgcagcggtgccgttgtcgatcgccgggaccggaatcggcttcaagccattgttcggcagcccggtgatcgtcggcgccgaggtcgtcgacatgtacagcgcactacgcaggatgccgccgttggcgtcctccatgctcagcagcgaccgggtctgaatggcgaacgccgcagtgtccggcaggtagggcagcagcgcgttggtgatcgggtccaggtgcttcgtggcccggtgcaacggcggcagcgcgtcctccagatcgtgggtgaacggcttcaggtcccgaatgaccggccgggcctcgtggaggaacggcttggccgcgtcgacgacgtcgtcgagcttgtccgccgtgtcctcgaaccggcgcagcgccttcgggaagctgtctgacgcgtcctgcaagttgcgcagcgtc

SEQ ID NO: 42429 - DNA, 491 bp, Arabidopsis thaliana landsberg
tattgaggtaaagaccaaccaacattctttgtacagataagcgttacagagatgcctgttgagtacaagtttgaggtaaatgtctaaaaatccaacgttgtgccacctcttggtttgttttccttgtgctcatggttttacatccgccaagaaaatgtctgcaggtttcaattctctgcaatgactgcaacaaggggagtaaagctatgttccacattttgggacacaagtgcagtgattgcggttcatacaacactcggagaatctcaacgccacaagatccagtgagtgaaacagagtgatcattttctgaagccaactcttcttcattgaattttcccgtcattggtccaaccatagagcgatagggctgtgttctgcttatttatttttgttcttggcctaaaaacacttgaaacggaaaatatcgtactgttatataaatggtattactgtgtttagtcatcatgtaaactgaaaatttgaaaaag

SEQ ID NO: 42430 - DNA, 1071 bp, Arabidopsis thaliana landsberg
  unsure (1)..(1071): unsure at all n locations
agcatctacactttaatatcgcaaaaggtgaatttgtttgacgccaaaaaaggataattaatttttttccttcaaaaacacagacttctaaataaaattttatttggggcaagaaataaaaatgaggaatatgattccgaatcgttttgtgggaacacgcgttctcggtagcggattggaacattttcttagctgacgccaaactcatctttaccaatctcatacatccacgtaattatagagatatgtagacaaacacacgaatatatgtaaagataaagagaattttattttccaaataacttttttctgcatctctcttataatttgaaattttatttagtttttaagtcatgaatcggtgtatgtatgcgatttgagttgcaaccatacgacgtacgggtgacaatacatgcatggtaatatgtgacgctgcgacccgtcctcgctttctattcctattttcttatcatcgtcgacataggttattattaacttaattaatttagtaggtttatatatacaatttttaaaaccataaagtgtggcatacatgtacatcacatgattattataaaaatataatagcgcattttattctatatataggctgttcacgacatattcaaattgcatgacaggaaaatatcacctttaaattctaagaatacattatcttgtatttaagtattgaaagttgacattcttttcctatttttattttgtataacatatcccatacgaagacatatatattgatcaccatatatcttatcctataacgtacatattttctttgtttccgtagaatctatatacttcccactatacaagaacccttttaacaatatttgtgtgcaactaatgagttttggtccctctaaacttaattcatcaatggccagtataaaccaaaattttaggacttcattggagcaatagttttcttaaaataattntatgtaaatagtactacaacgcgatatataaattaaatcacatatttttttgttatatctaatggggtgatatactgatatatatttttggtaaaaggtttgaacgaaaata

SEQ ID NO: 42431 - DNA, 480 bp, Arabidopsis thaliana landsberg
ttgccatggattttttttaaatagtttgtatttaggactaaatttgttttttaagcatataaataaaaataataatatgttttagtgttattgttgtgtcactacttcatattggaaaaataaatagtactaacatagaactaagtaaatattaatcttaatgtgatttaatacagattaaatttacaaattataatttaagggcattaacattaagattcaattataattaacaggtattaataacaatttttttacattaaaaattaatttgatggttattgaatttgaaatagtataatttacttatcattaatttaaattataaaaatgtagttagtactaaagtgtaaagtttagtgatttaaatctgagattataattaaatagccaaatattctatatacatattataataaatctggacagattatatatgatatggtgatgtatttgcataaccccaaaagattttttcta

SEQ ID NO: 42432 - DNA, 602 bp, Arabidopsis thaliana landsberg
ccgaaatgtccgcctctataataaacaatgttgagacgtggtgcttaaacagttaaaagtcaaaacgtacgtcgccaaacatttgaaaaaagtgaccaactagtggaccaattctcttcttttgctttctttagagtcaagaaacaaaacaaaacaaaaaaagtaacccataccgccataagaatatctatctatatatacaagactaatacaagagtttagtttgttagttgcaagaacatgaaagcagtggtgagcaagttgtattgttcctcgatggaggaagtgatggtggtgagacgacggccacacgtggttaacggcggtggctttgtggtgacagattacaaagaaaagatagttttcaagatcgacggttgtggagttcttggaaccaaaggagagttagttctcagagatagtgatggcaacgatttgcttcttatccacaaaaaggtctccttttaatttcatcccaaacatctcattattattccaaacttgtatgattatatatataagtttattctttataaatatttgaggattaatttcgaatgctaataagcttttttaaaaaggtgaaatagtgatggagtaat

SEQ ID NO: 42433 - DNA, 536 bp, Arabidopsis thaliana landsberg
cattagataaaatcttatttaagtttactgttttcttttaaccaaaggtgaataaataactcatcacaattctactatatattgaaaacgaatcaactataataggatcacaaaacgagtattattgaaaaattatgagggtactactgaataattggaagtcataggtgatacaagaagaaatggtacagcaagaaaacataatggtcatattagtcatgacaaaaaacacttgggtttaagctttttgttatgacttgcaaggacactcaacaatagccacgcgaaagaaaaataatccaaaagaaaaaaaaaagagttgaagagagaatctgagacaagaagagctaatacacatccacttcaataattcattcaccattgtcaaacggttacagctttctacaacttcagctcgatcacgacttacacatcatgcttcactgcaaattcggataaacaaacagagtgaagaagaatcagttatctcgcaaaaaaacagaaaacatagatacttttcattcgaagatattcag

SEQ ID NO: 42434 - DNA, 545 bp, Arabidopsis thaliana landsberg
ctctcgtgtcgggagggcaaagtgcaaatgtcctcttcttcttttttcttttaatttattgggtgtttgaacaaacgcgtgccctatcaagctgacacaacaatttaccaaaaaacacaaagacacttcacattcaccaaagcctacacttagtgaaaatattctctctctctctcatctttatattctttctcttctttctttttgatggctcgccttttgaagcacccaacatggattctctttgctagtctaaaacccatcactttgtatcacacctaaaaaatattcaaccaaaaagaagatagtagattctgttttcacatttttcatctttctctgtttctccaactagttcgactgctactgtgatgatatattgtttgatacaataattattggcatgttatgttatccacgtacgcttataacaaaaaaaaattattttcataattcgggtggtcatgactaggctaatcatgagctaaggatatattatatctatgccgctagattattaatggtatacatgtatacaagcatgt

SEQ ID NO: 42435 - DNA, 710 bp, Arabidopsis thaliana landsberg
cattttactctctactttcaagaaactttaagagaaagatatggaatgcaacgagttacacaaatctgttacaagatttctaattaagaacttacaaatctgctacttatcatcttttgaatacgtcttttggtggttaggttctaatttgtctaacagtatatgttttccaacaaaatttgatccttttgaaagcattactcttttttttttttttttttgtcaattttgaaaggattactcatattctttaaatcatgttattaaactcacataaatacgtattaagccaaagatgactcttgacgtgctctaaaatccaattcattctttatagattttaattcttggctctttatcctatttaatatttcgccgaaaaatctttgaaatgattatctgattgtatttttttataaaaaatttgtcataaccaaatttagaattatgttttaaaatttaggaatgagtttagttaagaagttggtttgaaggtatagtttttttctggaatttaaagtttaactttaaaatttattaacgatttagtattagattagtttattaatttgttgaaaaatctggtctattttgttacttttttcaaaaatatggtctattttcataaaaatccctaaaatatccgaatttatcggataaacccaaaccccctatcgggaaaaccaacacaccgtctctctctcactctc

SEQ ID NO: 42436 - DNA, 230 bp, Arabidopsis thaliana landsberg
tgtgctttgttttacgtaacagctgctctgagtgaattgctattgcgaaagattaatgcttataattactgttactttacctgtgtaactactgctcattgtttataagtaacaattctggttgatgcttcttaggtgcgattaaacactcgtcttctgtaccagcagacaaagttgaacttacttcgtgaagaaagcgagggatatgccaaattggttcgttatagaag

SEQ ID NO: 42437 - DNA, 801 bp, Arabidopsis thaliana landsberg
gtgtgaattattagacatgcacattagttcatttcattaattaatgcttgttctaattggctctacattcatattagttactttgagaagatggaaaatacaagaatatatatcacaacgtcaaatgcaataatccatgcgtttgaataaatgttaaagatggtcgcaaaacaaaacaatcttcagattaattttagttttgataagaacaaaaaaaaagtaatcgtcatagcctctgcagaatttcccatggacaacctgtcacacgataattacttctctaccataacatgttttgtccccttttgcattatgacctcattctctttctaaccaaatttatttatttcgctttaatttaaattcgaatccaacccaaaccaatgatttactagctaaatttcgaactgtctaacaattagtgtattagtatttgtttttttggcaccgtctaataactatttattgatggtgctatcaagtttatagagattaggtttctgctcaattgtgaatcattttcacaagaaatccataagaaatggttaagaaaataactgcagccatttctcaaatcatatttatcttctaaaaatcattagatttcaaaatatctataactctggattatctattgcagaaccttaactatatagactggtataatctgtgtttatgtacttcaaaacatagaaacagtatatgacaagattatgaacattgctttacaaattaactcgtacagattttactaagttaattatcttggaagttggaaacatcatacgttatctaacaagc

SEQ ID NO: 42438 - DNA, 990 bp, Arabidopsis thaliana landsberg
tgtatcaaaatattcaaagccattgactgaattaatggcaacaaaaattatcaaagattttctgtaattcctacattgactacatgcaattttcaagacattgactattttcaatagttttcactctttttaatcttgatatctggtcaacttttaccacctacctatttgtctatcctactacatatcattaatcacaccattaaaccacacaaatctatacttaccattaatatttttcttttcaataccaaaaaaacaatcaaaaagtaaagtgtcattaccaaaaaaataaaaaagcaacatccacctactgacctacatattttttttaataaaattataatgaatcattttgttagtaaaaaataaaaatgataaaacaatgggcgcgtaaacgattccagcttttcccaccatccattatttcccaaaaaatcaaaataaattaaaaagacacaagtggatgcttgagatttggtttctatataatccataacacacccttcatcaaaaacctctttcccattcactcatcttctcttccttatctccttaaaaatcttcccctgttttcttttttatatttagagctcctctgtttcttctccaataaccaaaaaaaaaaaaaaactcttcctctgtttgttttcaagttctgacatcataaattcagaccgagaaaacataaaaatttgagtcttttgatgatcggaaactgatgactcccgttctctgcgaaatcctgctctctgggctcacggtcaaatctgctctctgccgtagaacccatctcgttcaatctttctcagtcgtcttcctcaactggttttacaacgtttcatgaattgctacaaactctaattaattttttcagacagatcataaaaaaaaaaccaaacataaaacataaaactctgtcctttttttgtcttcttgtaacttttcttgttaaaaatcaatggcgtacatctagcagcgcattttaga

SEQ ID NO: 42439 - DNA, 652 bp, Arabidopsis thaliana landsberg
acgaaatatattaattacattcttatactaaataactataagattatgcggttaagttctgacacaaaatttaacccaaaaagttttttttttcttttttgtttttttttcgaaaaagcccaaaagaaaagttttagaacacaaaatgaccaaatctatttcaattaattttacaatttaacttgtaaattttattttatcccatgttaacctggtaataataataactcaaataatatggtatcaaatatcattattatgttaataatttgcctaaacaaatcggtgtcaacgatttggtaaaacccttgaagagtccaattccagataggcatggaaaaacagaggaaaaaaagaaagaatatttactggtatatatatatatatatattaaaatcacacacacaatctcttccgcttctttggtctttaaaacctttccctaaatctatcacgctccgttacgtttttctcctttacgaaaatctcagcaaagaattttcgataattctctcctccgattcaagcgatttttaatggtatgtgttcttcaatctctttatgtgtgtgtgtgtatgtgttatgttctagttggagtttttttttttcttcttacgtttatttaggggtcttatatacatgttaccgatct

SEQ ID NO: 42440 - DNA, 717 bp, Arabidopsis thaliana landsberg
tttaattttaaaaaacaaaataagagtaagatacttcactaatcacttaattttatctcttaacgatactacgctatgtataaggtaattaagttttgtttttcatttttccataattatatttctaagctgacatgatacttcctagaaaacaatttatttcagttcacacaaattaaaaaacaattaatgattatttatacctacaccatttactcatactaaattctttctcataacaatgaagcaatagtgattctataaattcaaatattctcaataaatatttgttgatgtctacaatttattagtatagtacttagtaaaaatgcatagaaaaccaattttttatgtgataagaaaataatatttttttttctttttgaggaacttagagaaatttctttatgtttaaacaatgaaacatgattccataaaattttcaaattttctttaacaaaaaacaaatcttccaaatcttttgcaatggttagaatgttttacttgggttaagggatcagctatatgttaagcttatataacacaaatgtattgagacgctttgacggacataaaaggattcacccacttcccttcctctgtcttttcttaaattcacatgtgtttttatctaaataaaagaaagagccaacaaaaatctgaaaagcaagaaaactaataaccactctgttttaatgttgataagtttctctataa

SEQ ID NO: 42441 - DNA, 416 bp, Arabidopsis thaliana landsberg
agatgtaaagatatcgtcgtcgaatgtcgggtttcgtcttttttagaaaatgggttggaaaggaaaaggggttggaaagcaagagcaaggtgtgtatgtgtgtagtcagaattcataaactggttaaatttagagttatgtttcatcttttgatattgtgtttatggtaaggtataacggagcctataaagtccggtataagagatcgaagactcggtttagggaaacaagaagaagatgattatttcactgcagaggaaaacatccagcggaagaaacttgatatcgagattgaggagactgaggaaatcgcaaagaaacgggaggtatgcgctcaaaacatatttggatatatccttgtcttttgacgggaatatcgtagaggggaaagaattaaaaactgcagtcttttatta

SEQ ID NO: 42442 - DNA, 1050 bp, Arabidopsis thaliana landsberg
acctaatcttcagggcactacaccactggtcatatatatagcatgatgatttttgtttttgtgttttttttgtcgttagcaaatgtactcgaataaaaatgtaacagtatttccaaccaataactgaactaactaaacctagaatgggtttctatatattgttcacaacgaccactatcgatttctctttatttgtatgtattaactactagatagttatattatgtttggtacatatgcatgtaaaaggctgtgaatatatatagtttactagtaattgttattttatagagtggcactcttattcgcatcaaaattataaattcccacagtaaagttggtggtaagtactaagtagggatccatatatggtccctttcaactgaaacctacattaaattggatacctatattatttagggtatatatattgcaatattttagttacagttatgatattttaattactatatgttttccatatacgctaaactgaatgggggttttggattattatttttctactcaaactgaagttttgttagtagttatgcaaatacactaaatattttctaatctatttctaaatattatgaatattttagggtatagaagatatttcttactagcaagtagcaactgtgaaccatcacaatttttacatcattttttatcaataatatgtattatgtcgaatttgaatatagatggcgacacatatttaagctataatagcgactgcaaaatttgaatattagaagaagacagtatataaagacatgaaaacaaaattatagaatatatatactaatataatgtggaattcgaaagaaaaatacaatatcggctataaaatttttaaaaaaaatgtaattgatgggtcataaaatagggaatgttgctctaccctacaattatgttataactaccgacataattgtcacacccgtggacaaggaaacaactaaattttcatttgtttcttttttgtgttctcgcttgtcaaagagatttattatttaaaacacaaagtaaaagttttatgaaaaa

SEQ ID NO: 42443 - DNA, 372 bp, Arabidopsis thaliana landsberg
taccgcgtgtcgatttggccggctgtatctgggcccttggttcaggattagacggatccagaaggacctctgttgtttaaaatcgtcaccgtcgattcgtgattctgaggctgatatcgtgtaccgctttataagccctcggaatttgatatggacaatccgtttccaatcagacgactcaaactatcccataccccatcgtcatggcctaattgtccataccctttcgtcatggcctaattgtaaaagagtctttggattttaattactaacccgccgtcctataccattcacaaagtaatacgaataggtcctatttttaacagataagaccctgactctttaggaactgtggccgccgaccaaagagtc

SEQ ID NO: 42444 - DNA, 822 bp, Arabidopsis thaliana landsberg
  unsure (1)..(822): unsure at all n locations
atgagaaagatattgatttttttttaattttaagtttgattaaagatattgtaaacatttatataattaaaaaaaaaagagaaggaaagaggaaggaggttgggttggtcgactttgctaagataagagaagagagactgactctctctctctctaactcttcattcttctctcttttaccttctctccaagaaatcttcactttctctctagaaaaaagttggaagctgactcgataaagactctctttttcttcttcttcctgcaaatggcgatcgaggatcaagagaacacaatccgtgaaatcaaacctaagaacagaagaatcatggtacttttttaaaacaatactctgtttctatgttacttcttctctgctctgttcttcaaatgtgcaatggtttctatgtgttttagcttctgggtttggggtttttgattgaatttgaaagttaaaaccttgaaaatggtgaaaagttgttgtttttttttcttttcaatttaaaatgggttcttcattgaagtgctctgttttctttttttgtatacctaacaaaaagatttgatttttttttttgattttgaagaatcagaacaatgctcgattccgttagttaaattttactttatttggtgtcacgaattggtacaatatgcttttttcattagataccaaattatatacttttaaactcttagaaatccagtgaaatagtgagcacgaatctgaaaaagagaaatggaccagaatcaactcccaancttctatcncnagagtaattcttagtttgatgaaagattagagttatgtctcaatgttct

SEQ ID NO: 42445 - DNA, 520 bp, Arabidopsis thaliana landsberg
aggaaatacgagagggcatccggtagcatctgcccaagtgtcagctcgccggacgccagaaaacaaggcgggggaaatgatcaaacggcggagaaaggaggagagaaaggcgggagcatgtggaagagcaaaacataagaatgtttccaaaggataaataatatcatacactgttttgaaaagaaaaagtctctctaataaaataagtttagcaaaacaaaattaagggagaggggttcactaagagcacgtgctgcctgattctccatttgctcttaagagagacctcaaatctttttaatttttcttccgaaacagctgtttcatagctgtccgatctctctcgccccccaatgtgacccgcactcagagatataaaccctttgagatcgaatccatttatataattttatttcgctttattctattataaaaattatcttatctcatgcatccctctctctttctatctcttacttctgttttgtatactactctttgttatacatagccattttag

SEQ ID NO: 42446 - DNA, 586 bp, Arabidopsis thaliana landsberg
gtgaagtttactttgggacactatcttcttcgatttcgttatgctaaaacatcatatatctcttctcggattaattagtctaatcataaaggtagatgactagaatgttgttaaatgactaaaccattaaacttcatgaaatatattatgttgaagcagatgggaagagtgacaatatgggatcatcagacgaagaacaagagaataacagcggaggggaaacagaattaccggaaatagacccgagggccgaagatcgggaactcaagaaccatttgctgaagaagtatagtggatacttaagcagtttgaagcaagaactatccaagaagaaaaagaaaggtaaacttcctaaagaagcacggcagaagcttctcacgtggtgggagttgcattacaagtggccatatccttctgtacgtataaattttctctcatctctctttgccctcatattttttaaaatatatactacaaattaagtgttttaaaaacctatctttaagctagcaattccctctgaagccgatatgttaggccaagtaggtacttgcatgaccgattttgtgtttaaatccatgtacgg

SEQ ID NO: 42447 - DNA, 501 bp, Arabidopsis thaliana landsberg
tcaggtcactctagaggatccccggcttcaataccacatctaaaaaggacaatacatttgagaaatcgagtttctatttagctaagctcatataacgaatgaagagctcgggtaaaagagatcatacgatgaggaagttctttaggactacgaatggtatgtttctgcatgattagtaccccgtcgtaaagtatcaaatcctcaactagcttctgctgcaaccatgataagtctatgcatccgaaactattaacctgtattgcatatagttaaatgtaatgaaaccctagattaacttccattgacatggcatgttgacatgttgtaaccatacctctacttgaatagtgtgcatgagcctatcattaactcttgtagtgatagagctcatgacttcaagccctttctcctgaattgtctcgagcacttttgatagtggcaaagcttcggggcctgaggagttgctgctcactaccacttctaaaccacgcacgtgtggtt

SEQ ID NO: 42448 - DNA, 949 bp, Arabidopsis thaliana landsberg
ttcacgaatacaatttatcgacaaaaagactgaaactctagctaaacttcatcctcctaattgaaatcaaatatctcctaattccaaatccttaatcttcaccctcctaactccactaactaaacattcctaagtcaaaccaactatccaatatgtccagaagaaacagtataatagactcgaattgctacataatctatcaagagctagatttggacaagcaatagatcaaagcaagcttctttgactccttaagacaatgaaagctaaaaatatatatgtatcaccaaatgctcaacatcttctctgattctataagcaaggatttaaaacaacagactctgattatattcaacactcccaaggaattaaacccaaaatcaaaacatgatctttctctgcacaaaaacgggaaaaataaaaactttacaacaacaaatcagaaaaaccggaactttggtcactccaaatgaagatgatagtaattatgatgatgagtaacattcgaagacgacgaagatgatccataaccatcatcgtcatcatcacgacgaccatcaaaatacaaaatctccggaggtggaacacagatatagttccagaaccataaaacgaatcgacccagttgctgaagcggaaaacaacaaacgagttgtaacatctctccgctgctgattcgatccgacggcggaatccaccgtaatcgctgaaaaatctcagccgatatatgagctacggacaccaccgtgtcgccacggaacaccatgtcttatctcaacaaattttgattctttcacaatcgatctctttgatttgtctctgtgtgttgtaaactagcgagttaagaaaacaaaaaggtgggattttttccatttcacattattcggttcggtccttaaaccgatacgatttaattccagttgaataatacgagtcaacttggtttaaa

SEQ ID NO: 42449 - DNA, 584 bp, Arabidopsis thaliana landsberg
cgactctagaggatcccctaagcatttgcgttagtttcctattacatcattatattcctcagttaatcttacaaatttttttgtgaatgtaattaatcttacaatttaaaatgtctgaacaaatgtatttgttctagacttctagttcaacaagtatttattcttgttaagaatgactttttaaacgatcaatctttttttttttttggtaacataaaaatgatcgatcttattgaaactttcctacacatggatcaagttgtattaatctgatacaattattgtaacaaaataaagtatatatatagcgaagaatttagctgagtttgagtagccgatgcaaaaatgctgcatatgtctttattcctttaatcacctaaaatacaagaatttactttctcttatctcatgcatgagacatcttatccaagttgttataaatctttaactttgtatctgtaaagatttttgtagtaaaaagccttgagagatgagaaacgtggaattgagttggaaagaatgaatcaaaacctttacaatattccccaaaaaaaaagagaactttatgatcgtaaagaaaagaa

SEQ ID NO: 42450 - DNA, 783 bp, Arabidopsis thaliana landsberg
aagactcatttctatcttccccaaaaaaaatgatttgggagctcttaccttatgtttctccaataagaaataatgattggcataggaaaaaaaagagatgtttgcaaataatagtctaaactttcgtgttgtaagtatgtaactaaaattgttacccatcaaaaactaaatgcagtttttttctatatgcattatccacgacaaagttcaaccctaaaacctatcgctacatcttgcgaagaagaacctactggctacatttatagaaaaactaatcgggagctagtttaaatgtatatgggcccaaattaagagaaaatgaataactatattttgatacgatcttgaaaataataatttatctatattataaacaaactaaaaaaaagtctctctaccacacttttaatattttattggatagtggactcataataccatatgtgcgcagtcgtaaactcgtgtataaagacgtatactaggatgtattactaattacatcatattacaaaaaaaaatcacgaactcaatacaataagtcaataattctaatcgcttgtatataaaacatccgatgtttttcgggatacatccgatgtttgaattttgtggaggattatttatcggaaaacaatatgtgtacaacgaacctaactcggtttatttggtgctttggttttggtttgcgatatgccttactgattttagagatttagccgccacatcagctcattaccacttttactcttgtaaaccaaactgtctgctaggtttaggcccatt

SEQ ID NO: 42451 - DNA, 982 bp, Arabidopsis thaliana landsberg
cgcactggccagtgtgttaccaacttaatatataactcttaattttttataaactcagtagatacagagggggaagcatcttctaagcctcattgattactaatgtaagagaaaacacactaggctatttgtaagactatcatgcattactgaaccaaggctattcaactcgaaatctatacaagtctagagataactagcagcttcacaaacaacatcgtcttagtaaactagcatacacacttgccatgtctttgatttgttctcactatctcctatacaaaagatgtcacacaaaaacaaagcttgctttgatgcatccaaagatgaaattaaaagggcaatacttaccggcttcttcacggcaacatgaactttgctagcagacccattttgtggcaaataacgcttaaaaaccagctgaattggcttccacggtgtggataccccaatagagccaatctcaccagctcgtgcagccgcagcaccatcgcttgaatcaatgtcatccatgatcagaatcaaaacagtaaaacaacacctaaacccctcaattgaccaaacccaactctctcatcaaccaacacaacacaaaactcgaaatcaacgaatcctaattccttccaaagagctgagaaatcaggaatttgcgatgattagggagacaaacccaattgactcaagtcccataaccccttattctcatccaatcaaaccctcaagtcagcgccaaactcgaaaccctaaaaaatcgatctcacaaaactatcgataaaatcaacatcaaatgtataaaaaaggatcgaattttacggcgtcaaacaccaacagcaccgtaaaagctcgatgatttcaaactatgattgagaggatgaaattgaaatcggaggattggaagaatcgcagccccaagtataggaagaggctaacgacggcaaagcgagagactttcagaaggagagagagaagggtggagagaaag

SEQ ID NO: 42452 - DNA, 587 bp, Arabidopsis thaliana landsberg
ttcgcagctttgtgaaaataatatccacaaagaaaaaaaaaatgaactttaaatttcaaaccctcgtggaattttccttcacacatcatcatatattcatattcattcaattcaccaagaaaatttaggtggagtaaggaacaacaaattgtcctgtatgaaatcaatacaataagtaatggaagacttgacgtagaccaaagacttttccttttacttacagtctttgagtccaattatatataaatactcgcttccctttgcttcgttatttcacaaacaagttaaagaaaatgataaaaatggcagtaaaatttgtggtagtgatgatagtgtttgcacaaatcttagctccaatcgctgaagctgctcaaggaaaagctgtctattacgaccctccctacactagtacgtctatataattatacatatgtttgtttcatatatataaatatatatattataaaaataagatatgatcagttataaattaatgatgtgatttagggtctgcgtgttacggaacacaacgtgagacgctggtagtcggagtcaagaacaatttgtggcaaaatggtcgagcttgt

SEQ ID NO: 42453 - DNA, 763 bp, Arabidopsis thaliana landsberg
  unsure (1)..(763): unsure at all n locations
tgattagtacggaccaaatcttcagtcggtctttgggagatctttctctgtctatctctccaaagtttaaatctttcctcagaatcttactgtactttgttcaagtttagtactttattctgtacattaggttgttgaaagatcggagaaaacccattgtgaaattaaaccgaagctattcagtgactcatcactaggaagaaaaggagacgcctttggagggttttcatgagaaatccaacggacgagtcgggtcgggccgtccaattggtttacgttgatgaaaatgggaagctgaaaacggacccggaagccatcgggcntcttcagaagcttaagggtcctgtcgctgttgtctctctctttggtaaagctctccaaggcaagagcttcatctggaatcaggtttttttctggctttaggactttgattgagggtttagggttttagtattactttcgtttgtggtatctatgattcgttctcttcatgggtaaaagacaatgcttttgggtgtgatgataatgctgatgttctaagggagtttggttcttaattgtggaaatcgtttggcttatttctgcaaaaattctgttttctggaatttttgcatgtgcttctctctgatgcattgtcttatagtgattgaaatttgaagctgagagtgtctgatgttgaatgtagaactgaatcttcttaccaggaacatagggttttaagttcaaactcttcacaggccatgcaacggagatatatggatgt

SEQ ID NO: 42454 - DNA, 691 bp, Arabidopsis thaliana landsberg
acatagacatgcatcatttcgtttaaacacacaatggttatgtgattttgtttctttgaatgcatgtgaggaacataattgaaaaactacgaaaacggcatcgttcgaggtcaataaggttgactttaagcaaatacttttgacaacttaacccaattaacggtttcacaacattaaccgtttgttatatgattatgatcacctgaaattacgataatgtaggtcccatagtaaatttaataaaaactatataatatctcacaatactaatttaaaataaatcacgccttcactcccggaactctcctcttcctctttaaatactttccgacaatagcaagcttcaacaaaaaaaacacgaaccaaaaacttcctctctcttttataatatctttctctcaatctatgtttagaataatggtttcgtattctaataatcattttgcatacgcatttctacttcttctcacaatcggtaacacgcttgcattttcttcgagtttgccggatcatgttcaagatccaaatctagttgttgacgacgttaataggtacgtaaaagagaaaaatttgaatatgatagtttcaagtttgatatatataacaatgttgcttttgtaaatataaaaaaaacatcatacatacgaagtaaaaacaaaatgcagcattttattccataaaaattacaata

SEQ ID NO: 42455 - DNA, 528 bp, Arabidopsis thaliana landsberg
tgcatacatttcatagtgacttgaaaacgcaataacttgcaaaaaaacagattatctgagtttataattgttcacaatcccactttgttgctttgcttattctactttcaggaacctgccttgtcacagaagagtgtctcttgaacaaaaaccgaaaccctcatatgagtaaagagcaaatagaggaagaacttaagaagtacctcggagtacaatcatttatctggcttcctcgtggtctttacggtactccacttgctacatcggttacaattgccatcgcttatttcgaaagaaataattgtcaatcttatagaaattttaatggttgtcaggggatgaggacacaaatggtcacattgataacatgtgctgcttcgctagaccgggagttgtgttattgtcttggacagacgatgaaacctatcctcaatacgaaaggtctgtggaagctctttcggttttgtcgaattcgattgatgctcgtggaaggatgattctagtcattaaactttatatcccgggaac

SEQ ID NO: 42456 - DNA, 428 bp, Arabidopsis thaliana landsberg
acactttgcctagttctcattaggatatatgttacattggttggcggcttcctttcctctctgtttataaacacttcaagcatttatttcctgtttaaaatcttgtctgttcatatctgccagcttacagttactgtttgttatgtaacagattctgaagaaaatatgtgaccacccgcttctcttaactaagagggctgctgaggatgtccttgaaggaatggattcaacattaacacaagaagaagcaggcgtggctgagagattggctatgcatatagcggacaatgtggatacagatgattttcagaccaagaatgacagtatctcttgcaaattgtcatttatcatgtcgctactggttagatcgcatttatggttcaattagtgacattaattttgatggttgtctgtttgactgacatcct

SEQ ID NO: 42457 - DNA, 405 bp, Arabidopsis thaliana landsberg
gatctatgggaaggaagtcatctgttttgaattcttatgatgtgtattagagcttgatgtaccattgcgtctgattcttctccttgctggaatagtgattgatcggatatgaattgaccagctttgagataatcctttttttatgagataatcgattttgacatgtagtttattctttattatggaaatggatgttttatcgtctttgggcacatcatataagatacttgcatcagtaaacgaatctggaattccatatctttaaccaaaagggctatgtttgcaatcttatcttaggagttttcttatgttttaagcatttatgatcattgaagttccttccttggatcttgcgttagatagattagttaagttttcactgaatttgatatcatggagaaaaaa

SEQ ID NO: 42458 - DNA, 393 bp, Arabidopsis thaliana landsberg
gcttttgaatgcatttggacttctattttggattacgattgatttatttgttagccatgtacttcaaattgcattgagagtctaggaccaaacatttttcatttttgtttttgtgttgagaataatgtgtttgttgagatgtaaaagagagtagaaggaacggagtagtatttggttatttagatacgacggaaaagtaagggatagaggagcaacatttctttctgcaaagaaaataaaatgaattttgcattagtatacatgtcgacgttaacatttcctttacgattcaacttcgtcactcgccaagctttgtggcctccctccaggacatgacaaaactaagcaaaaacgtttcactgatggcatgcatgaagattccatgtttgatca

SEQ ID NO: 42459 - DNA, 576 bp, Arabidopsis thaliana landsberg
aaaaaagacaaaaaaaaaaaaaaaaaaaacaaaaaaaacaacaaaaaaacaaaaaaaaaaacaataaaacaaaaaaaaaaaagaaaataaaaaaaaaaaaaaaaaaaaaaaaaaaaagagaaaaaaaaaaaaaaaacaaaaaaaaaaaaaaaaaaaaaaaacacaaaaacaaaaaaaaaaaaaaaaaaaataataaaacaattaaaaaaaataaaacaaaaaaaaaaaataaaaaaaaaaaagaacaaaataattaaaaaaacaaaattaaataatatataaaaaaaaactaaacaataaaattaaaactaaaaaaaataaaaacatacataaataaaattaaaaacaaaaaactataaaattaaacaaaaaaaaaaaaataaaaaaaacaaaactaaataaaacaaaaaaaaaaaaaaaaaataatacaaaaaaaaacaaaaaaaaaaaaaaaattaaaaaaaaataaaacaaataacaataataataaaaaaataaaaaaaaaatacaaaaaattaataaaaaaataataaaaaaacaataataaaaaaaaaaaaaaaaaacaaaaaaaaacaa

SEQ ID NO: 42460 - DNA, 383 bp, Arabidopsis thaliana landsberg
catggggaaggggttcctgactctacgcattcttgaatcttctatggatattcacagtgaactcatccaatatcggcgggctcagatgatcaagccgaggtttattctagaagaacttatggtcgactcgcgcttgcgcagggataatggcttatgtcctctcatgccataagaggaacggagcttctctcatgtactgctatatggatgtattattatatctcggtaccctatgcttgaattcttggagtttacgacgacgctaactttttaacctgtttataatcgccaaggaacgtgactaaagccaaatggtctatggttgcatgtaattcccatgtgatacactgaactcaagctccaatcacattgcttacttactt

SEQ ID NO: 42461 - DNA, 682 bp, Arabidopsis thaliana landsberg
  unsure (1)..(682): unsure at all n locations
gtcataggactagatcggattggagaaccacgcgacttgacgtcaccttccttaggaacgatgtgtcaaacttgtcaacacttccctcgtctaactccactcgggtgcctccattttgagggcactgagccagaatcagcggcacaaaactcgggtcgattgatgggtcaggttgtcctgtgccgttgaagttaacgaaccttccccttactagaccgcagccagcagttcctattgtgtgtccgcctggtcaaaaccaaaactcacttagaaattagctactaggaaattattttctgaataacttacaaagtgttacatttaaaccatatgcaatgacaacgtaccaacaagagtcacgaggtctaatgtgttgagagttttannnnnnnnnnnnnnnnnnnnnntagcaacggagtcgcttggtccgggcaagttcacgtctgaggcttgcgagattcggccgtcgagacgtcccaagggcacttcccagcgttgtccaccggtctgcataaaccaatattaaattaccgctaaacacgaccatatatatatgttatatattttaatcatgtgaaatacacacataaataagaaagtaagaaatcgaatgacatatgtaatgcatgtaataatttcagtatattccaaaacgacggcgctcgggctgcaagggtgagaa

SEQ ID NO: 42462 - DNA, 844 bp, Arabidopsis thaliana landsberg
caaatagtttatattaaatctatagaaaaacgacatttattatatcataaatgttgaccctcatagctcctttttaagattttaattaacacaaaaagatcttttaacttttctattatatcactaaaaaacgcttctgattttcgaccaccgaaaagattagtgtatcaatttataattcttgtacatgtttaattgcattaatacgtgtttttgcttttaactatttatcatgattgttgtattattgcaaaagagttcaaaaagtgaaaaaagtagtatagtaaaaactaaaaaggaagagtgagattaggaaaaactcaccaaatgacgccgtgtggaaagtagtgatgttgtcaaatatacttttgcctcccgaaataacagttttacccttgccatctccaacgaacatcaaattaatttttttcctaccgaccttgaggttgttctcttcatatctttccaagaaaaaaaaaaaaacagagatcacagacacagtcagagatacgcaattattaaacctccgtacaggtttttagttttcactttcgtcattcacggacataacagttaaaaacatcgattaatacgaagggtaaaacagtcattttaccttccggccttgacgtagataattatccggcgagtactgttctgaggagctttcttgatagcttccgatatagttttgcacgtgccgttaccgtctttcgatacgataatatcagcttgtatctgagataccggcatttccagtatttcgcgttcttttggtctcatccatctcgggaatttcttttttcgtttctccactcccagcagcctcctgttttgtattgga

SEQ ID NO: 42463 - DNA, 599 bp, Arabidopsis thaliana landsberg
cttcgcgacacactttgaagagttctttcgttttataggaggaaagtttagttttatttcccgtatcttttctttcacccgtttaaaattgtaacgccgatagcttgggttacagagctaagaatggttccagtattgttttgtttataaattttacatttctagtttgggcaaccatacctttagtctagtttacaattttaatcgttgacccaaaaaaaaaaggtagtcaagtagtcatgggttttaaaaagtacataaaacccaccggctttgtctcgtcaacgttctacgtgcatgaaaaatcaaaacaactaattcgtcaaaacattttcttatgctattttagatctaactaattaagtatcgtttcaccaattaaacaattcacaatgatttccagctatttataaacaaaatttaaaagtatgttttgacaccaaaagttttttcttaaagttttgtatgtaggagtagaaagacattgttcctcatattttgagagattacctttttaagattgtgaaagtatagcttatttttttttcttatttttgattttttaatatatgtgtgtgttatatatttttttgttttct

SEQ ID NO: 42464 - DNA, 431 bp, Arabidopsis thaliana landsberg
ggccttccatgcgtcttctagaacccgctgcctagaagtatcttccttaagcgtcttggtgggagcccccgttcctgggcgccgatgacggcaataggtctgacatcctcggcgggtacaacacgcgcaagctcacccgccgaagcgacaagctgccggccattgagtgactggcgcgtagaatccaggcgcggacgacgcagttgtacctctgcgggctcttcttcgaccgaaaagagatgattccccgccaccttctctgggtaccgagccaacgggaccaatggtacaagggcgaggcaccatcgtggagctgggccgcatacgacgggacgatcgagatgtgggatggcaatccggtcctctttgacgactcgagctggtttcctactctccgtgggggctacgtgacctctgtcaaagagctctga

SEQ ID NO: 42465 - DNA, 283 bp, Arabidopsis thaliana landsberg
ctagaggatatcgattcgataagtgagcggatggggctgcagagataagaacatgtgagattacattccaaattgaagacagttacttaattcacatcaccatcactaaacatttttgattgaccaggcctagaacaatagatgattgaaagaaacacctttacttggcataaacaacagatctgatcgatcaccaaagtcataaaaacattgacctttcatacatgaaactctatttcagtattacaacatcatcacagtaaaaaaatagccacaaaattgg

SEQ ID NO: 42466 - DNA, 944 bp, Arabidopsis thaliana landsberg
tcacaaagtaatacattcattcagttcataaacacttttcattattaagacaaaaataatcataaaaggctggtgttttacataaacttatgtcgaaattaattagtagtctacatataattactcaagtgttatttgcatgtaaacagtacaaatttttggaacgtttgattttgatactactataaactgcagtatactgtaaagcatgcatatgacgtcactttaatttgaaacgtaatttcaactttttcaaaaggttctttagcttagcgataaaaaaaaaaaaaaaagttagtgtatagtaaacgaacaaatgaaatgaaaagaagagaaaagtataagtcctcaaagtgtattgaatcacttaacggtaaattagtttttatttttatttttatccagagttcttaagttaattatgcatcaattatgtggttctgacgtaatatattacttgcgtttttcatctaaaccaatctaaaactgtaacaaaatgttaagtggagaacaataaaaaatacaaatagtaaaaaaaaattgaaaatcaaactaaatctaattttattcgttatttttaggggacaaataaactcatgaaaataatgacgtacgtggtctaaaatatatgaatgacctatatagctgaaacggcaagaagccggagcgagaaacaatagacggcggcgaagacaaagtagatgaaaactccgggagcttgagaagacagagaagcaagagatgaagccgaaggagaagccgatggagcgaaggcgggatcaggatctgcggaaacgtcgtcgttttctggttcaggaagtgttgaagaagaagggatggtttgagtggaggagacggcgggtgaagggaggagaggagcgatctccggtgagatcttttcttcagagggagagattgtttgcgaagatgggattgtatttgtc

SEQ ID NO: 42467 - DNA, 837 bp, Arabidopsis thaliana landsberg
tatggcatcttttctctgatggatatgttggccatgatctccacattatctctcctttggtggctcggtctgctacaaactcatcacgatctctctctcttctacttcacgattgagattcatggtggtgacatcccacaacgtcggcaacaatacacgacatcagtggcttcttggactcatgtgttgtgcttcagattatttgcggctttcagcggagatgaaccatcgtgatctcgtttcatcaactcatcaactcccttacttttaagttacttataactctagtgaaccatcgactgcttagaggaacataaccaacacacgaccttgtagttgagcttacgccttctcataacgaaaactaccactttcttcttaacacaagctttgctataacggcttagaagaacttttcagcacaacttctactgaactcttacattacaatattgcctctacttttttttttcttcttcgatccttggtaacgttaacattgctactcgtctcttagggttttatgatccttggtaaacgttaacattgctatttgtctcttaagtataatgtcagagatcgtcgatgtgatctacaggataaactaatgttaatcgataagaatttctggagagctttgagccacaagctatgaattagtatatgatgttgcctattacctaaactaatgttctaaatggtcggtatctgattaaattgatgttccactaggtgatgtttcgtgttgtggcaaaactattataaggttatttgatgtatatgcgatttacattagtgatatacaatctcaagcccttatctttaggttagatgaga

SEQ ID NO: 42468 - DNA, 773 bp, Arabidopsis thaliana landsberg
attatcaaagatatatatattagtttaagaacaaataagctaaggctgctaagctatggaccacattattggttcccataattaaatacgtacttgattagatattaataacatgtttataaaaactactaatagtttgctatcaccttaaataaaggcagctactctctatcttgttcccttatactaggccataaagccaacttcaagattcaaccaaacacatgcacgtaacaccatgattttaaattaactaagttcgataaactgtgatttagaaaatattaactcgagtaacagcattagttatttgttttcattatttttcatctatgcaaaatatttatgtgtaaaactaattatatgcatggtttcatttttttcattggatgtgaggaaacagaatgatgtcgaggaaagaatttactaatgggataccaattaataaaacaaaaaggattttacttatatttttcatcacggtgctcgtatttttcatgtagttctgaagaaaagagcatgaccatctcttatgatcaagattcaagattgctcaagatgagtgactaattagatttaatataagatttgaggaagaaaaactaattttgaaaacgttaggaaaaaaaaagaaagaagaagctaaaaaccaccggagatgatattaaaagttaatggtcaaaggacttaaatgactgtcggtgtctcccgcagacgccacaggcttccgtctattattattagctcaacacatcctgtgacagagtgtgaga

SEQ ID NO: 42469 - DNA, 486 bp, Arabidopsis thaliana landsberg
acattgtataaagagcggagtatgaacctgagtaaatagggttgtgcataagctgttggccgttagctattcgcttttgctgtataacatcgttacattcggttatgaatagagggttaaccgcgctcgttttgctgatgctgctcagcctgtcctcctgttatgtgggaagggcctaccgtttccggaacttttacttaaaggatattgataagctggcgtctgttgatcttaacgcatcagcggagcctttttattttaagcagggtagtctttcatcctcactgaccagttttctcgataccaacctggccaattcctatacctatgctttcctggtgatcaggaatgacagcatcctgtatgaaaaatatcttgatgcgctgacagacaagaccctgatgccgtcattctctgtgtcaaaatcattcgtagccacgctggcagaaatggcacatgaggagggaaaagatcggcagtttctgg

SEQ ID NO: 42470 - DNA, 461 bp, Arabidopsis thaliana landsberg
  unsure (1)..(461): unsure at all n locations
gcggcagcgngaactacggtctgaatacatccggccttgcgtttattgtttacaaccccaagcgcatcagctggatgattgattattcaaccagtgaatttgcgcgcatccgcctgcaactggctcgggacgaatcaagccagaccaaagctgacaaccaggtgctgcttcagtaccaaatgagtttgggtgcccacggcgcccacgcctactaaggagtccatgatgaaaacgatttatcaagcattggctggtttggccctggtggtcagcgtgaattgcgcccatgccgctttgaatgtgtttgcctgcgagcccgaatgggccgccttgtcgcaggaattggcgggcgacaaagccagcgggttttttgccaccaatgccttgcaggacgtgcatcacatcgaggccaagcccagcctggtggcgcatttgcgtcgcgctgatttgctggtttgcac

SEQ ID NO: 42471 - DNA, 110 bp, Arabidopsis thaliana landsberg
ggcatccaccaccatctttaccctgcttaatccaaaccaaataattctctgaaaagtatgaaacttaatgaaaacaagtatagttgtgggcctggaggaacttacgcgac

SEQ ID NO: 42472 - DNA, 874 bp, Arabidopsis thaliana landsberg
  unsure (1)..(874): unsure at all n locations
tatattttaagtgtagacctcctcatcatgcttaattgatgtcaatgaattcatactattaaagcattaatgttcagtcagatgtaacgcaataaattacaaattaaaacaaagttaaaaggaagaaaaaaaaacgaatcgatgttggacttgataaattgatcgaatctcatatggatcccaaaatgaaaattttcttgaagtatgaaaagtgccaatgtcaaaatataatatgcataatataaatgaatgcataggcagtcttctttatcctaatagcaaccaagagcattatttgagtcttttgaaaactgaaaactgtatctttacatatcatcaatagagtagtctggactaggtatcttacaataagttgtactagtacttttttagagagggcactaatatttaattaagcctattaaaaaaataaaaggttttgatcggacaaataagtcatggacacttaaaattatagaaaaggcatctttaatattccctttaatagacacttacacacgcgtacagaagtagaaaaaaggggcataactaactagaatttatatatttagaatctagtcataataatagtactaataattaaaaatggatagtgatgttttatgctcgtgtgtgacattaggaaagatactgtctttgtttagttcacatgtccttttcacaacaacattgccatttgtctgagcaaaggccaaacatagtgccggctaatgatgattaattataactttcgcacgtaattaacatttcaaattaactgaacatatataaattatattaaatgcatgaatctgcatagctattatntgatcattacatagctntagtagtaaataaaaagaatagagcttta

SEQ ID NO: 42473 - DNA, 439 bp, Arabidopsis thaliana landsberg
attctggtggtcgacgatgatcgagcggtgcgggagtccctgtgctgatcgctggccttcaacggctaccaggtcgacctggcgaccgacggacaggcggtactcaccgccgtcaccatggcccggcccgacgcgatggtccttgacgtgatgatgccccggctcgacggcctcgaggtgtgccgacggctgcggggctccggtgacgacctgccgatcctcgtcctcaccgaccgtgacgccgtgtccgaccgggtcgccggcctggacgccggtgccgacgactacctgccgaagccgttcgcactcgaagaactgctggcccggttgcgcgcgctgctgcggaggcggggcagtgacggaggtgcggaacccgacgcggagccgatgacctttgccgatctgtcgttgaaccccgacacccgcgaggttcgccggg

SEQ ID NO: 42474 - DNA, 144 bp, Arabidopsis thaliana landsberg
gccttaccacagatggtgttttagttataaaaatcgccttacaaattttaaattacgattaaataatttaacttttgtcgctttttatttattttcagcttctctttattaggttgggaaagtgcggaagagatccgctgctcc

SEQ ID NO: 42475 - DNA, 480 bp, Arabidopsis thaliana landsberg
ataacacttttaagtaagtatatgtactcttctatccttattttattttagataaattttaaatttcaaaaattgtttgaggatacatacatcatttaatggtttacttttggttcattttgagtttcaaattatatgaggagacttaattttgagtttcacactttttgagtttctttttgattcaaaataatacagttccaaattaaccttaatatatatcttacttttttatttcttagagaaacataatttttctcaatcttattgtagttttcttcaatgtattcaaagttatagtctaaaagatgaaaaagtcttgatattactgtaagaaaatgaatcttgatattaaaaactttttctttcgtcggggtcttagtcgtctagtgatatgagttgcactggtgaaggtaacatatacatattctttttctaataagtaatttggggtcttacaattttgccgtttaagttttt

SEQ ID NO: 42476 - DNA, 592 bp, Arabidopsis thaliana landsberg
gtctctcagatgtcatctagagagaaagatagagagagaaccttttttttttttaactccaaaccattgatttcattttcatttatttctcttttggagtcaacgaaaagatcagaagaagaagcaaacacaaagagtgaaagagtacgtctgtcttcttcttctggatttagggttttctttttcactttttgtttttttggttatagctttttttcttcttcttgttcttcacttcatcttccatttacttttaattatttgattgaagtattactttttttccttagtattggggtgatgatttttatttgatttctaataaaattatttcatgtatgttgaaggattttgtattggatcttgtcaagaatcactcattcagatccataaaaataaagttgaatactttttgaaagatcttgaattggtccatcttcttttcaagaacctataagttggatacttttgaaagatcttgaaattgggtcatcaatcttctcaagaccccatatataaacagcttgatacttttgatgaatatctcaacaatgaatcttgaccaagaactcgccgagatcagagctagcag

SEQ ID NO: 42477 - DNA, 715 bp, Arabidopsis thaliana landsberg
acaaatatattcacatggttatatatgttcccatttaatcaaattttccaacctttcgctaaacaaatatattcaaccgttttcatttgtattgtataattgttgattgcaaacataatttctgattagtaaatttgtcttctgtataaaattttggaatgttcagggttaggatctttaggtttttaatgatatcgattatactttttaatttaaaatttcaacatagctttcagagtgtgtatacacacatcttatttatttaagtatgcgtggaaaagctacagttactagcttttttttgtttattattttagtgaaatctcatttcttaattattgattgtagaaaacatcgacaaaaggcataggtgttggtattatcaatttattagttgacgaacgtgttttatgattcctgaattacccccaccaaataaggcatactactaatcttgcctttaataagaaagggcaaattagagaaaaccaaagagatcctcaaaacggtattcgcggttatggaaacaatattttatatagatgcaaatgataatactaataaaatgtaaataaacggtcgattacctaaagctacaattttggattaatgcattaaacacgcgttacaggtgtcgctacttataatgcctgagagtgataggctctgtaaaaaggtctgaatactcagtctctaaataagaccaaatcaaggg

SEQ ID NO: 42478 - DNA, 474 bp, Arabidopsis thaliana landsberg
gcccgacacgtcagccgtctacatcgacatcggcctgggcttctacctggagtgtccgctggccgatgcgccgcgggtcattgccattcgcaaagatgcgcttcaggccaaaattgaccgcgctgttgacgccatagccagcatcaaagcaaacatcaaagtggttcaagaaggcgtgcatgagttgctgcacatgacctgatagtgtggatgtgggccgctgcgtcacatcattgagctttgtgcgacaaatgaagacccgtgtaggcgggattattgctgctggtgtatctgattattgctactgtcaatgacgctgtggcgggggtacatgcagcgcactgcagatgcaccgactggttactaccggtgagcatcatcaccgggccaggctgtctggccgcattattcgcggcatggtcaaagacctgcacatatggttgcgtactatacctatgcggaaaacccaatcat

SEQ ID NO: 42479 - DNA, 629 bp, Arabidopsis thaliana landsberg
  unsure (1)..(629): unsure at all n locations
gtaatactttttgtttgactagaagtaattaaggcatttctcttgctttattctttagtacttggtttgtcatcagactgttgcacttgccaattttacaaagttttatttattattaatatttgagaaaggacctagaatgactctgaaaaagttattggtttactctaatagcaactccaacaaaaaaaaaaagttgactagaatagctcttaaaagttgaaaatgacctttaagtattttgttgatgccattgtgaattaaaatgaggaagaataattgaaactaaaaaaggaaaataaagataaaccatgagtcttagttcttgttgtctcttctggttagactctgtttttcttncgtggtggtgtccgcctggttctcggttagcctctctaccttgctggttttgagcagaggcaaacccttatcaaagtttcgttatgagttcaaatgttctgttggttcaatgagtttatcttctcggatttagttcgtgtgtatgctcactcctcggtcatggtgttgggtgcgtttggtttgtccgggatattccttgattcttagttaaagtgctcataaatttgagtttatagataaaaatgatatcatattctctaatgagagct

SEQ ID NO: 42480 - DNA, 513 bp, Arabidopsis thaliana landsberg
agatgacacacgacaactgtgagataacaccattattagcgctcatgcttatggcggcaactctatgggtctgagtaagcaggacttcaatacatgcaaaaactaatgcaacctcgcaaatacctcatccgtttcacgtttgccgtttcacgtttaatatgccggtggcgctgtttttttcattctgcttcctgtatcccgtgcacgaatttcttccggtaatgcaacgggctgagctgcattttggccttgaaggttttattgaaatgcgatacgtctccaaagccgctgtcaaagcagatggaggatacgggttcgtctgtttgtaccagttgctgggcggcataattcaggcggtacccgatgaccgtttcatgaaagtttccgcgtgatctttttgaaatatttacaaaaagcattcgggctcatcttggctactccggccgcttcctgcaggctgatcttttgcctgaaatggtccaccacataaacccagttcatcgttgatccttt

SEQ ID NO: 42481 - DNA, 132 bp, Arabidopsis thaliana landsberg
attctttttgcatagtgctatgaacgggatacaaaagatactaagcctcaacgcagcaaatattgggccctaaacgtaagatatcgaacctgaattcataaccggaggcatcacgactaacaacgaatgaat

SEQ ID NO: 42482 - DNA, 474 bp, Arabidopsis thaliana landsberg
  unsure (1)..(474): unsure at all n locations
ctatttggcatgaaaccttcctggtgaggtgagtttactctccttgtttccgtaatagaaaatgttgactaatatctttgtgttgatgcttgcaatattgctcttttgttacaaagatccatttctttatttgtttctgaccctcccctgcgtgagggaagtgtacctccacagaacaagatgcggcagattgaaagagaggttaaggcaaccatcgtggccaatgagggcttggcaacgagttgaaagtgactcacatgctgatcataaaacttgctggaactctgagattgaggctatgtgggatgtgttggcgtgagagtcagaagctgaggatgtcggcgctgtgaatgaagccctagagcaatcaggcattgttgggggacaagatagagttcaaagtgacctttaagtgccgacatgtcagtatacttctatgagattgaagcccanangnnaagacaagagagaggg

SEQ ID NO: 42483 - DNA, 405 bp, Arabidopsis thaliana landsberg
ctctgtgcggctgtggcccgtgctgcacccgccgtccatcatggccgggctatgcacgctgcatttttggtgctgcctgcgctgtggcgcgcgctgctgctggcagggccgcaggctgagccggcctggcactgcacagccgatggcagcctagtcacgtcgcaactggggtttgcggctgcccgggtgtatgcggtgcttgcggatggccggctgcggcaggtgtccggctggactgcggttcagcatgcgcagcggcagtggctgccttgccacgtggtcgatgatgcgtgccctcagccggtgtgtgcagcacagcctggggcgggaggggatggggtgaacggttctggccaagctggactgggtgggcttggggttggggtggggccggatgggctgggg

SEQ ID NO: 42484 - DNA, 1380 bp, Arabidopsis thaliana landsberg
acatccagtgttgaaatctaaggtagtatgtggattttttttttggcattaaaacgtaaagttaatttatcgttatatgtattaaaatgtaatttatctttttatacatatatatttatacacatcatatcataagacatacatacataaatctctaaatatgtaaggggtgtcatcagttttgccttctgtttatggttcactcgatttcacattaattattcactcaaattcacaaaggttatttcgttttcattagcgccctttctctcgactttcttgatgaatctttatttcttctatgtgaaatctaattaagactattttcgtgttatattgatgtttaaaaatgaaaatcttttggtttttatgtttaatcattttcatgagtattaaatgtaatagatttaagttaaaactaatatccgaatgcctgagatattgtttcctaaaatgagatgattgtttttatttattaccatgatttgtttgtactaagcttcctttcccctttgcaatacataggatataaattcatacatgttcctaattttatttttgcacttgagtttatggttttctttggtggaagatctatatgtatctatatctatattattttactcttttcttcgtcgtcatttatagtatattatatatatgcacacacacacacacctatatgtatagctcaattctagataaaatatatagaaatggatcttgagaatcattttttttgtattcttttgttatcaaagggtttcgactttgctccgaggaagaagataatatgaaaagagctttttagggtttatcattctccttgactttgcaaaacgtgaaatgtaaggcactttgatcgttgtactttgttgctttttatacgtatcgcttcctacaataagttaacaatgcttcctcgtagaattgcaaaacatttgtggaccgtgatttacatgactgagctcttttcagtggcttctttgcagcagcttcttccttggaggactaatcaagacagaaatctgttcctctaaaaacgatcgccgttctaggtaatcttgccattcttgacgagtcttgatctttagaatcaaatttataagggatcacgagatacacgtattaattattattttttttttttttgctttttgtggttatacaagttcactcaaatgatggtgaaagttacaaagcttgtggcttcacgtccaattgtggtcttttgcgtcctggtaattctgctttctttcttctaaattatacgatgattctacatttctactcatctcgttcttgtttttcaaatgatataattattggtgtgtatatcacccattcatgtatatttattgaaaaatataggcattcctg

SEQ ID NO: 42485 - DNA, 634 bp, Arabidopsis thaliana landsberg
atttttttttccaaagaaaacatttgttttttcttttgtcaagatttcttaccatttccccattttaaataaataagaatcagtttgagttcgattgagtttccaattgccgaaattcagttgattttgccaacacgtcttaatgaaatctcgacatgatttaccaaaaaaaaaaaaaaaaaaattgacatgacataaatagataactttcatcatttttggacctttttatttgcaacggttttctagaaatctttactttgttcatgtttgaaagatatcaaaacataaaaacttcgttcttggatttcagaaacaaattacatttggtttcttcaaagtgttttaattttttaaaaaaaaattttgatagttattataccataacggtcccaaactgaagattcatttgactagatttcactatttcagtattaaaatatcaattatgattgtccgggtatacacaaatgttatacgcataggcatagcataaaattttaaaatataagttgccattaattaagttgttgttgatgcattggacagagtcatcaaattgtaagaataagaaaaaacataagaagagaaagtgcatcatggccaattttggagatcaagcatcatcgtcaac

SEQ ID NO: 42486 - DNA, 475 bp, Arabidopsis thaliana landsberg
gctaaaaggcccacaaacacaattatgattcaaagaaaagtgcgacacaaacactgagacgataatgacccaaaaagaaaagaacaaaaagtaatgtaagaattattcatgagaacattctccatctcacgctttttgttttacttcaaagacaattcttgattcttgatctcccttttatttaggaccaaaactctgtattcgtcaaacctgttcgaattgttccatttccatcgaactataagagttgtctttttgtctctttttcttgaattgttctctttgattcttttgcacatctcttttttttttcctttaaagcctaaagagtaaagacaatctggtaattggcccaaaagcctatatagcattgttgaaccaaatataaaactgcacggttgagtagggttagggctggttcaaaatctcagccttaaattcacttcattcaggttgtaccaaaatataagtattt

SEQ ID NO: 42487 - DNA, 538 bp, Arabidopsis thaliana landsberg
  unsure (1)..(538): unsure at all n locations
tcctaagttcggntatatcaataaagatattgttttatgagattaatggggatgtagttgagtttacttaatattttgggttaaagggtcaaaatacaaaccttaaacaaacgctcataattttctatttttatttttctttccttttctgcattttggttttcttttcttaggattttattacggtaataaaaagcctagataaatgcatgtattgtttggttcgtgatcgatataccttcgccgagagcacacacttttcactaaatctatgaagacaacaatgggatattgaaaattcctttggatcttgggatacagagtaagggatgttgattaaactcatggtcaagtatataaagtaggttatggaatcgagttgacgaagagtgcaaagtagaagtttccaagaatatgcatgtaagtttccaccttcaaaccttttctttgatctctgaattttgttcgttcttgcttgaagacaagcaaaaattcaagtttcggagaaatgatcataattcttattgggttttaacta

SEQ ID NO: 42488 - DNA, 1016 bp, Arabidopsis thaliana landsberg
  unsure (1)..(1016): unsure at all n locations
gaaattaaatatataaagagctaactaaattggttttaattacggaaacaaaaactcctattaacgacagaaataaaattatatatatatatatatttctttttcctttctttctggctgtacaagaaaaaatctttagaagaaaaaaacaaaatagcaaaagatcttaaatggatggtgtggtgctatgtgcccatcaactcatcgggtccacttcaaagttatggctcgaccggccaacaacgcttatgaatatttacgcgtttaaacgctattgttcatgttccatcgcttgtgaaaaccggtttgaacatataaaaatcacatacatgtactagtattagtaaaccaggaatctttgtaaattttacatcacattggttcacagctaaattggcatttggggtttagtaaggtaatttttggtttctggaatcaatttgggtttaagaaagaaagaacgaggagaaaaaaaaaagaaaagaaaaatcaattaataaatttattagttcgtaataagaaccctaaggtcatataaaagaaaatcaagaatcgcatgtagcctatgcatgttctcaagaaaggattcacaaaaatgttgtttgtgatgtaatgaactttgttaactacgaatccaaaaacaaaaaaatggagaaatggaataaaacactaacctgacgattttgaaattttgcagccgtagaaatcagaaatggtgtttaaaatctacagatcttctcttattcttgtagagataagaattgtgttttggtagggaaagaagcgaagacgaattaggagaaaatagaaaaaaagcgagttggtttgggcgaaaacaaaacacgtctttgtactataaataagtgttcacgtaagtacagttacggaaacatgatagtgtatgtatttgttaaatgtatagctgtaattcaaagctttcaacgtggccgtcttcttgttgatcaactagtcatggttcacgtcattgacaatctcaagtaattntttgttctttt

SEQ ID NO: 42489 - DNA, 182 bp, Arabidopsis thaliana landsberg
aagccactggcttgcgcctgattcacctgtttgcgcctgatgctcgtgcgatttcaatggcgagctgtccaacgaggtgttccacgaataccgccgaagcaaaggacggatgcttggtttcgccggccagacggataaggagactgcggatgtaacggagctggaaattgaggtcggactcc

SEQ ID NO: 42490 - DNA, 99 bp, Arabidopsis thaliana landsberg
gctggtttgtatgctcacatgagacttttaatacctattttcagaattgggatgtctgatttttgcaatctgtgtgcttttacaggcagcaatgtggaa

SEQ ID NO: 42491 - DNA, 324 bp, Arabidopsis thaliana landsberg
atcgacggggagtgcttcagctggcccagcacctgggtgagagctcgttccgccatggtgttgatttcgtgtatctgtgtataattattgttgtttgggggcgctgggtgaaaaagagacggccgtggcggtcgattggttggtggagggtgtcgtttggtggttgaggatatggtgggatctagtgcccttgctgcgttctggcaaggtcagaggccaggctgacagttggtgacgccaggctgagtccctaatattatgtaagcatgtgccgcctacccggtagccaagtcaatgtataaaggcaggcgagggttcatgctt

SEQ ID NO: 42492 - DNA, 475 bp, Arabidopsis thaliana landsberg
gcttggctcaaacaagattattggtaattttaaaaagaatttaaaaaattacttgtttcgctgctacacctttccctttcatgaagagccaaatgaaatggattaaatcaagaaaagaacaggatagggagacaaaggtgaaaggctctttggttggttcttggccctacgcttcctttcgcaatcatctatctctcgacctatttggcccccaccataaatcatatatattcccattgtgtttcctctctgtcacgtgtcctcttttcatgtaaattctatctttatctttctttccttgttcatggataacccttgtttttcttgacaaaaaaagaagaagaaggataacccttatttcctatcatccaaatctgtttgcaagacaaactgataaattacttctggttgagtttttttaaaaaaaattaaaaattaatctagaaataaattatataggttttaaccatttaaa

SEQ ID NO: 42493 - DNA, 814 bp, Arabidopsis thaliana landsberg
agaaacagtcccgtctcaagctataattgaacctttggcaaaataaaaatgaaaactaaaattttttaataaaattttgttttaagaaaattgggccttttatgcttaagattgtttttaaaatcagtaatagatccatggcatttgcctaatttgccatggggtaaagacggtcttgataaaagtcaatctttcacaacctaaactaaagatttcataatccgacaaataaaacgaccgaaaaaacttaaatacgtgtttttagatacgacaacgataattgatgtgcatctaattacgtctaaatagaaaccttcaaaaattcgaccataccaacactgatatccaaaggaaaaacaaagaatgtaaccttcaaaatgcaaaaagaaaagataattaaaaaaggaaataacttaaaaacgaaatgatttgaattaaataaaaaaacgctccacctgtgaaacgctctcaagtaccacaaaatgtactctctctatcacacacagttacatactccgttgacagctgtccccactaacagctgtttcccaaatccccaaccgttttcttggaaagattctctctttattttagcctcactctctcagacgcatttcccccaatcgcaccgccactccctgacgtgcttttttctttctcttttaaatattcaaatacgtatcagactactcacgttacatcttcttcataactaatccaatttagaaattacgcaaaattacttaaatatgtagtttttctaaatagttttacataactacaatatataagaatttttaatttgaatttattt

SEQ ID NO: 42494 - DNA, 737 bp, Arabidopsis thaliana landsberg
ttcatcaggtgataaaatattttcttcgtaaatattaaagtcgaaatcaatgtctactagtgagaaatcgggtaagaaaaaatcttcatccatacccgaatatgaagtaataatcgataaagaaatgtcaaatagtttcctgattaagacaaagataaatcgagagatgtctttattgttttgtcgtaaagggtttatgaatagaaagtgttttcaggtattcttactatatattcgacaacgagacgcggcttaaattattttctccactccataattatgttgaccagattgtgtatataatgcataaaacgtgacgtatatgtataaactaaacatattatgatcgaaactagaagtcttctcattattgtctataatgatcgtataatttgttggcttctagtggtctgagattcatatacgtgttatgaatttgaaaaaaaaaaaactacgtgttatggacccaaaaaaaaaaagtaagagaagagagacgtgtaaataaaataagcacgtgtttttggtgttgagcttattcccactcggaaacaacaaggatatagaaaaactctgtaaagcctcgtccccgtcttcccgtccatctaacaacctcattactttttataaaggaaaatatacaaaagttatactttattatcttttatttattattttaattgtaattttatccaaaaaaaaaaatcatataaatgttaagttttataccgtttgcaaat

SEQ ID NO: 42495 - DNA, 624 bp, Arabidopsis thaliana landsberg
ttcttcctccggagaacgtttccggtgtctcagcgtcgccttctcctgcggcgaagaatccatgttgcttgttttgtagcagctctcccacgagcactcttttgggtaatttgtctcatctttctcgatctccgtctctgtctccacctatgtctccggctaataaagccgctgctttttcacggttgaggaaccgcgccgcttctgccgtttccgccgctgcagccgctggttcaatgaactataaagacgttttgagcgagcttgtgaattctttggattccatgagcttagcggaacgcatgcaggcgagttcctcgtcgcccgttacaactccggtttccgctgcggctgccgcgtttgcgtcgtcctgcggtctgagcaatcagcgtctccatctccagcaacaacaaccaagtagccctttgcaatttgctctttcgccttccactccaagttacctaactaactcacctcaggcgaacttcttcagtgatgatttcactcctcgccggagacagatgacgatttacggcgatgacggccgttaggagaatactaacattgaggatggttctgtggtgacctgatctaggatgggcaatgactcttgacttgagggat

SEQ ID NO: 42496 - DNA, 609 bp, Arabidopsis thaliana landsberg
tgccggctggatctggggctttttttgccatcatgacttctgacgggatctccaagacggaggtgcctgtttaccatacagaacagatgcccgacgacaatgtggccaccaaaagcgcaggctcaggagctgctggttgggcgcctgagaagcgtgcagccgtcgagaagagcatgaagcgcaacttgatgcacgttgctcgctatttgtcctgatctatatcatgaactatctggatcggtaagtgcaatggtcagaagcatcccagataacttgctaacactcgcttttgtcacttacagtaataatatcgctgctgcaagacttcgaggtctggaagaggatttgcaactgagtcaaactgaatatcaaacctgcctcagtattctttacgtgggatacatcttgatgcaggttccgtccaatatcttcatcaacagaatccaacggccttcgctatacatcggtgttgcgatgttggtctggggtgtcatctcaacattgtccggagtcgttactggattctctgggatggtcgcaaacgtttcttcctaggatttatcgaagcagcatttcttcccggagccttgttgatcactccaagtggta

SEQ ID NO: 42497 - DNA, 565 bp, Arabidopsis thaliana landsberg
  unsure (1)..(565): unsure at all n locations
aacctttctggtgaaattgataacacaatctttggtacgttaactcaatgggtagaaaaaaaaatgttaactcaacgagcagaaaaaagcaccaactcatcaaagttggaaggggaacaattatataaacaatattaaatttaaaaactaacctcattaacatcaccttcatcgttaacttcaccttcaggagggaggtcgtcttggacgaaattgtggttagcgacctaccaaacatttacaaaaattgctctcttatagaagcgaaaataaactgataatcgataatcaccataatttctaacctctgcgttatcttcaacaacaacatgtgtgtgtgtgggggggggattaacaacaatcgttacatcaccttcatcgttaacatcaccttcaagagggaggtcgtcttggacggaattgtggttagcgacctaccaaacatttacaaaaaattgctctcttataaaagcgaaaatgataatcgntaagacaaattttagaccataatcaccataacttctaacctctgcgttatcttcaacaacaacatgggggggggatt

SEQ ID NO: 42498 - DNA, 720 bp, Arabidopsis thaliana landsberg
tgacgagtctattggatcagaaagcagagactcaggggataaagacgctggaaatatgataggcaaggcagaagaacactgtgaaaatgatcgtggtgctgttagcgaattagaaaaacttgagtgcgcggatgaacctgaaattggtatgagttctgaaagttttcagttaactccaacttcagattctgaaatgataatgaaccttgaggtcgctggaggaatagatgtcgttgtaattggttgtggttcttccgatcaaaaagctgaagaagaatctgaaaatgaaggaaatcaagaatcagacgatactgataggaagttgtcacttcctgatgaagatagagcatcaagtttaataagttcctttgaaacagccaatgagactgtggaagatgggaatcagattaataagcaggtcaattttcagtctgatagcgaagcaaaccaaatctcagtgggcatagaagaaaccagtttgctttcggttaaagacattgagaggaccatgcctgaaaactcttccgtaattgcttatgatataatggaaaatgagacgatggcacggctgattcataatcacacttttatggagcttgacgagtacgaaggaacaggtgatacaagtgagaaactcactggatccagtttccagaattcttcagaactattatcctctaatcattctgtggagctgataagtgagagaagtgaggaaag

SEQ ID NO: 42499 - DNA, 1264 bp, Arabidopsis thaliana landsberg
attttcgtactttaacacagacatatatctaaagctaaagatttcttcacataatgggtttgaaagatattgggtccaaattgtcaccggggtttcgatttcatccaagtgatgaagagttggtttgtcattatctttgcaacaagattagggccaaatctgatcatggtgatgttgatgatgatgatgatgatgttgatgaagctttgaagggttctactgatcttgtggagattgacttgcatatctgtgagccatgggagcttcctggtaacatatatctctactatttctgatatttaattctatattttttggattcaaacggatatatagtcataggttatatgaatttgtttatctatcttttcactcctggcttttcttgggtttcaaattgctttcgtaaagattcttgaaactttccattggaaaacaatattcctgaaattaattgaacataaagaagaaaactgattcttgaaatcagatattatcatccgcgtctgttaattgttattgtaaatcttaacctataaactttttagtattattacaattagatgatgtttacttatgtgtctaattatgtttgtcaacttaatacatatctacgcatttgcatatttacagatttatgatatgcttatacttacaaaccgaatcttcttgttcgtgattctagaaaatgaatgaaagatcaaatatcttttaattgtaaacgggtgatgagttcacataaatgctagattttagactgattcattaattatgatcataaatcataattgcattaatattagtgtaaacattatccggagtgtcatgaatcatgattagttgagatacatgctagctttttaataatatgtttgcaattatagaataaagatctggaggctgtacaaaagcagcaaaatatgcaaaatcacagctgtcgttatactcgtaaatcagatggtaaattttaatgaataattataggtgcacttacatcatatcaaaacatgatatatatatatatatatatagatatatgtgtgttctttgtatgtttctagtgattttcattatttgtttgtggttctttgtttgatgatataccttgagaagttaaggaagcttttttaaaaggggaccgagaatcctgttgtcatctttttatttttcttatctttttcaagtttttgttgtcctcccaattttgacttttggggactttgtaaaataaaataacttgcagattataaaatccaaagttagt

SEQ ID NO: 42500 - DNA, 492 bp, Arabidopsis thaliana landsberg
tgaaagccgctgctttgatggtagcatggtccttgctgtctgccgccaccaaccatgttgtctgccggtacgaagagcgtgccgatactagcctgggctattcaggtactgtgacgctgagctcggtcatttgaaggcgctgaagtgtattgctggagtcgcggacaatggttaatcaacagatcctatggacgtgatggacgcatgatacacagtcaagagatatgtgcacggcatagactgctagcttgtatgggttggcatcatagtgcgattgcacgtatagaaagcagtgcttccttgcttctgagccgtctgtgtgtgccaccattccggtcgcaatgagacaaacgaaagtctgctgccaaacgcaagcattagcagcttcaagccgacaaagcacattaggatggaggcaaaacattgttaatccgggtagccacagatgctcctgctgcttgctagacttccccacgatgaagcgagtcatga

SEQ ID NO: 42501 - DNA, 652 bp, Arabidopsis thaliana landsberg
gtacctaatacatccaaccatacacactttaaattacaaacaaaaacttattttcaagctgggcatggttggataacttgggttatttagatatttttttagtttttgataaatagcaaaaaagaaatttggctttctaatttttagaagaaggtaaattttcaaaattttgttggattaagatataggttatattactcaattgaaaagtttaggggtaggaaatgtaatacaattcagacttaaggggtcaaacgtagttttattgctttcatatcagagtgtccccattgattcctatttctgtgaaagcccctctcgacatcgttaattacatgaagagccattacaatcttaaacccaaaattaacttctcccgcggatttaatttaataatccccttcatccttaatccttatttatcaattattccacctttgccctcttctctgttttcccactgagactaaacagagcaccaatttgataaacaattctcaagtccaatgatctgaagcagagtaccaatgaagtgacggcggctgttcatcggagaagcaaccacaagcttcttcaccgcttagaaaaaaaacgtgatcctctgtttgctcagttttcacaaactgtaagaaactccgactaagctatttca

SEQ ID NO: 42502 - DNA, 403 bp, Arabidopsis thaliana landsberg
cctggtgtcgatctggctttcgagcacttcgccgtattccttgtagcggtcgttgacgtaggcgcgcagcgccacggcgagcgcgccttccttcatcgacttgcccagctttccgagcatgcggacgtctccggttcctggctcttcgcgaatcgctacaggatatccgatgcgtaggcggcgaggcgcgaacgttcgccgcgcgccagcgtcacgtgaccgccgtgcggccagccctggaaacggtcgacgacatacgtcaggccggatgtcgtttccgacagatacggcgtatcgatctggccgaggttgccgaggcagatcatcttcgagccggggccgacgcgcgtgatcagcggcttcatctgcttggcggtcaggttctgcgccttgtccatgatga

SEQ ID NO: 42503 - DNA, 859 bp, Arabidopsis thaliana landsberg
ctgcatcggtttcctctttgcgtttctgattttcttgcagcagagattcggtggtcgttgtttcattccaaagagattcagagaatatgtgggatatgagaaagttgtagagcttcaacaagctggtgagcaacacaataccaatgactcttgacaatacatatatagacacacagttttgttgtcatacaattcatttatcttgttcttaactgttttaggttgtgtaatatctacagttttgtgggaaagcaaattgttatagagtgaatataaacttcaataaaaatggaaccaaattgccaaagctctaactttgccttctgctgattcaatatgatagtacactgcatttgaaaaaagaacagaggattctcttgtagactgttctatagatgctatgaaaacagagtctagagagtgttcttaacaaaataaaattttggtacatttggtactaataagtattgctgaaggaagactcaaccgttaagaaatcacattcctaaatccttgtctcagaagacatctttggtatcatcacgtcaaggaagaataagaaacttttagcatggacttcttgtgctgagaatcactgtggtttcttcatcgatttcaattttgtcatctttcatccgctgcaacagagtatcaatgttacgtccgccttctcttatatcagccttgacaagagcatgatacatctgtttgttcacaccgatacaattcctaagagatgcaacaaagctttctacttctttcaaacttccttcatccccgacccaactcaaaacacttgtaaccagcgtcaatccaggtcttcattttctgctacccacttttacacctaaggcagttt

SEQ ID NO: 42504 - DNA, 681 bp, Arabidopsis thaliana landsberg
aaagatacaagcaaaataaagtcgcaggtgggggtctcagtctcagtctcatcgtgtcgtaaactttttttcaattttagtcaaacatctttactctttagtgactaaaacagacaaaaagttgacacctttatatctatttacgttgaccctccactcttacgccctccttcaatcttggccgttcacacaccgcactactcagattagactgaattacatcatcacaacgccactttctgcgtcattcatttgtcttccactttttttttttacgttggtcgtctttgtttgttggtcctctaagaatttgttacgtaaaatgatctaaataatgagaatatttgtgaacatataacatatacaacacaaatatcttttcctattagtagtatgaggtggggtgtgtgtctctaggaagtcaaagggcttgctttaagccataatcatattcatatatagaaagatattattacacgttgagttttaaaataatatgaatatgattgatattacgtaagtggactagaaaaatgaaaataatgaaaacataaacaggcttacatgctctctacatagaaagaccaattttttgggcgaaaatgaacaacaatttctcactaatcttttaaaatctttgaatcatcattacgggttcttacaagctagtgaaattaaaac

SEQ ID NO: 42505 - DNA, 587 bp, Arabidopsis thaliana landsberg
atattgaacaaatcaagagctatttacaccataactgcaatgcaaagacaaatcaatttcaatttataaagggcctaaaggtgaattagagacgctttatttctttaaccattctcattatagttactgtaattcaaagacaaatcaatttcaagcgatcacatcttattttttttatcccattatgtttctctgtttaattattttaaacatgcaacatttccatactatgctttcttcataatccgtcttacattaacatggaatcacaattatagtctaataacaagtatatgacctatcaagctaagttagctttactctcaacattacgaacgccaatacgccacctgcaagttttcccgatcaggagtttcaaaattctcagtggtcacacggatatacataaactttagattttagcccttggaattgttcatatatacatatacaacttaaaacacatatcaatatttgactttgatggcccttattttacgagcaaacaatacattattcgtatcaacgaagccattttatgccgacaaccaatagaaggacaacaaagtacattttttaaatttttg

SEQ ID NO: 42506 - DNA, 946 bp, Arabidopsis thaliana landsberg
tttcggtccaaagtttaggatctatgtgggtattttcaaattttgttaagttcgattctttttgttttagttttaattcgatactttggttaggttaatttgtccaggcttatattttaatagtttctatatttatttttcaaagtgtgtgaaaacgttttcataactaaaaagatcgatgatacattttaacaaaagaatctcaacagttaataaattgtctcgcatgacaaaaatttggaaaattcgtcggtttaaatggtgaagagagattaggagttgtcatgactgattgccaaactagttccgggtacaaacattaaaagcatacatcctattatcgtcacttagaatcctaaaccaaggattaattcacattatcataaacatgcatatgtcatattcttaaatcagtataatgtgtatccaaagcaaactgaagcaataatgttttccatgatttcaaatagaagaaaaaaaaaaatggtttatttgagaaagatacagggtcaataagtcataaactgaggcttgagttatattccaaacaaaatatcaaatcaaaagaacttttagatctttggaagaatttgagtctttagtatgagagagagacttatgttcaatttgagtcatccttcattactaatagatgtttagactctaaggttgtaccttaggatcaaatgtagactaagactctatttgttgcgttcactatctagatagctcctcacatgctggatacaaattgaacataaatcttaaaaagcaagataaggcaaagagactaatcaaatatcaccaacgtggtattggcccaatattaaatcttccaagtgaagtgttggcttcaacgcccgattgagagggatctccgctccaaagtagatgaattcacatggtgtggggttcacctttaaagatataggttttttgaactaaa

SEQ ID NO: 42507 - DNA, 612 bp, Arabidopsis thaliana landsberg
gaactattttgaaatagaaaataatatttttcaagggtgaaaaaaaaaattacttcaaatggccacccatctactgtaatggtttgttagctttttaaaaataggtagattaatttattaggtgatgaatttaatatttggggtattgtattgaaatggaaaagaaaaaattcgtaacaaaaatgtgatgcatgtagatagcgtaaaggtctttaatggttacagttgggcagatttatggcctaaattaaagtgacttgggtgaggagacaaacgttacataatataaccaataatgtatcgacatgtgtaaatcgcatttttcatttgtaggtaggacggtcaccttatttaatcgcattgtgaggtaacaacttccaaatgtgaggaaaaatttaaaacaaacaaaagtacatgaatcatggtttcgtatgcaatatatattcgtctacattacgagattgcaatataattaatttatattcaggttattaggttaacctttttaaatataaaccgagctgttaagtgatacacatagggacattgagatttttttttttttgtaaatacattttagactacatagaaacaaagttgttttggacatgc

SEQ ID NO: 42508 - DNA, 608 bp, Arabidopsis thaliana landsberg
aacgataaggtatgtagcgttaaaactaagtgacaaaaacacattagcaaggcataaaaatgtaaagtcttgattatatgtaaaacatattgtggccgaactaagcctagagaatcaaatgcaaaacgatgaagaagcaggcctagacattaattagttcaacctaagtcctatgcacatgtcaacggaagtagcaacacgtggctgtcctatgaaggtccatgatcttgatctttcatttgcatccatattcccaatgtcgaaagtttgaggttgtagccatgggtagtgtttttgcttccattgagctcatgatactagcagtttctttgcattgtagatattgggatcatttggttagtttgaatctcactacattgtcttcagtttctacctattcaaggacaacctatttcttaacttctttaggagatagagtgtgaatgtctgtcaggtgtacacagctccaaacgaatgcgggtgaggattatgagattatgtaattgtgtcatcacggtgccctgattacagtagtgggaattgggttataggtcttctaaagcagtccgagagggcgcaatgatattcgtgttctatcattttatatg

SEQ ID NO: 42509 - DNA, 552 bp, Arabidopsis thaliana landsberg
gctcccctctgcctccttccctccaaccttgcccccctcccttccccaacagcgccccacccacttttcgtcgccccagatggacgcagccctggacaccaccaagatattagcgggtggtcatcacctccttttctcggttagccctggacacgacagagattttatcagctcctcctgtgcgcccctggagctctcaacctctggatgaaccgtcagaccttgaacgtgcaattttggaatgaacccctcccccttcaggtggacgccgccctagacagcaccaacgtgtcgcgcgtggcgcactacatccgctccaagacgcggcgcgacgccggcggcgtcgagcaggacgacaggagcttccagagcatcgtcatcagcctcaaggtgaaggccggcgtctcggcgatcgtcacgtcccatcgatcttgtgcttgtccttgtgtgcgcctcctatgtgtgggttgatcttgcgcttgttcatgtgtgcgcgtccggaggtggatctcgctgtatcctttggacaactgtggacaaccggtggccgca

SEQ ID NO: 42510 - DNA, 914 bp, Arabidopsis thaliana landsberg
taatgaacctttggtcaatcattgggccaagggacttccagccaaaattattttgagaatttatacaatttatattacaaaaattatttttcaaacttctgttaaactagttatatatggtttttctaaggattccctgtattaaaccaaatttgaatttcaattgacaatattatatagagccaatgtaattatcaacctttacatgaaatagatgaattgtttttagttagataaactttcctttttggttgtaattctctgttgctagctaagacaaaatcaaatgtgggcttcaagagtgacttaaatacaacgtcactaaagttacaataacacgtggcaagtagagagtttgttggggcgaatatgaatcattttcatttttcctttaagcatctgcaaaattaagctttgttaaagtcttttttcgaaccaaaaaaaaaaaaaactttgttaaagttcaatgataaagaaagcacttttgtttttgttatccagaacgaaattagcttttgccgatgtatattttattcaatttatttaaaatgaaatttagatctcatcaaaaaactttctaaagtataaaaaaatacataaatggcatgcgcattgcacctgaaaatgtgcaaatgtcacatacatgaccacgattttcacctctcacgtgtattaagtcatcaataagcatacatatcactttgacaaaaaaagtataaatcttacgaatccatttacttactttattataaaccaattaaactaactaatagtataccaaagtgataaaaagaaatgttccacgaatttcaagtttcaatacagaattacttttacaaggcctcttcactcggttgtttttccatatgttgaagttcataacttaataaattaattaaaagatttaatcattt

SEQ ID NO: 42511 - DNA, 505 bp, Arabidopsis thaliana landsberg
agtctcaagaatggtacgtgatgacccacgttcatgtttttgagggctcagatttaacgcaaacttcaaacatatttcatgcgggtttcaattatttttacctaaatgctccttcttcagaccgtacggtacttaacggacggtcgagtttccttaaaacctcacaacacgatgaaaatcaactctgtttatttattttattttcaacatattttaacgaaaatatatgttgattgagattcaaaaatcaagagagccttaaaaatactaaaaaatgttaaaaaatttccaaaatatgaaaagtctctgacgtttgtaatgatttttgaaaaaatgaaataaagccgacgtgttaatactatgaaattttccccccaaaaaaggacggtctataatgatttgcaatgaatgtgtattgaccataaatagtgattaaatcactagagagccactgaatgtgcattagctgaaattatttgatttgtataatcaggtcaactatact

SEQ ID NO: 42512 - DNA, 811 bp, Arabidopsis thaliana landsberg
ataggaaatcgatacactaatttcggctcataaacgttttactaggaataaaattactcggagtacatttgaaatgctacctcattttttgttggacttgcaaaggatgccaaacccctggagcatagtagttttggtgagttctctctaaaaaaatttaacagttcatcatcgtagaaagagccacttcattgtcttacatgactcagggatgccattgtctgttcaaaataatttctcagtttatcaacaacttggataggaaaacctgttttattgggcagagaaatattttggaactttcactttctgttctccgcttggatgaatattgagttttatagatacactgtttctttttcatctctagattgaaggcagttcttttgttgtatctattgaattagcttttctgtcagtttagttggactcccaagtcatgatgcattcatattatgcttcttctattatacatcactcgaggaaatatgaagcagatcggtttttcatctgattagagtgatttgtgctttctggataaattaacgagcagattctttgtctattgttttgcagtgcttatatgaagctggaaagtttgataaacttcgattgctagacatattctgtgcgatacttgtcccagaagcacgttacctgaaattcttttcaccttccgaaattgttaactctcagagtcacaattcgtgacgtaattatgttatccgacctgtccttcgcaagctcaactgagttgtgttgcaatgctaaaacatgaaatttccccctcacacaatagctcaggaccgtc

SEQ ID NO: 42513 - DNA, 724 bp, Arabidopsis thaliana landsberg
aggaaatgcttttaagtttataatttagcaattctaaatcatgatggtcatcatgttctttaattatgctttctttttaatgctttgtttaatttggtgaaaacttgtaatgggagatttcaaatatatctgattttttaaatatatttctatgtttggtcaaaagagcaaaggatttcgtgatttgagttaaaacggaaaaaaaaaaaagaaaaaaaaaagacgagaaagatgtaacactaaacgtgagaataatacaaacgaatgtaaaatagtgagaaaagaaaaaaagattgaaaaagcttaaacgacgtcgttgatgagacgcctgtgtctgttataatgcttctcgatgaaaactcttgaagctccttccattgttttacgccatgtctgaccaattagagcagagtatgattttaaaaataaagaaatttacaaatcaattaatggaaattggattcagtaattattataccttgccgatggttctgacgagagacttgttcctgagatgtgattttccagaagcaagctgccggataaacagagatcgccgtttactcgccggggcaagcaagagccgtttcctctccactaagccactagtgttactttcgatgtcaacgcccttctctcgagaagaactcttagctgatttcttccggcgtttcgttgactttgacgactcgtcgacgtcgtcaggatcggcgaacttacggag

SEQ ID NO: 42514 - DNA, 1017 bp, Arabidopsis thaliana landsberg
  unsure (1)..(1017): unsure at all n locations
gtcgccattgacaagaaacgattcaatgcttttagcttgatcaacaagatacctggaaaattctcaaaccccaaatctcgaccactagaatctcacaaaccaaaatttagaattcttaactcgaaacagatttttccaaagccgaaaaaagaaaaatcaaagctgtgtagatagatacaagaatattcacttatatgtggaacatatattgctcagatttataaggaagagaaaataaaatgaaagaaattgagagagaaaataaaaaatgtttgaccctctctttgtttttttttgttctttgtatgaaattaaaacaacagaaaaaggaaacgaagaagaagagcgaggcatgattcagaggcccccgagtctcctgggtttctatagatggacaatttcaatattataaatcaatttctgtttattattcttaattgctccattttaatatgtacgaacttctatagctacgaaatttataacccgtttatgtagtttccaaccatccactaggttctaataatgggaataaataaatttgtactatgttttaacaaaaattcttagctattacaattcccagttgatctaaacagaatttgtatctctttgtactaataagtaataccattgtcttattaaatttatgtctaaatttgtaatatgcatgtgttagctagttatataccaatagaaatgtgcaatttataatcaaacataaatcttatatatgcagagagattttaattcccttataataaattagaaagtgaaaataaattctggggatctctaaattctatgaagaaataaaggcttataatgaaactcttggttggacaactaccttgtataactattttttcttgcgtatgtagaggtgttttgaaagccaatataaacatgattcgatggttttataaccagctgaataaaagtcagcttgaaaatttatttttagttttccttcgagatatatataattcagtcaacangaaataagatatttagaaa

SEQ ID NO: 42515 - DNA, 1125 bp, Arabidopsis thaliana landsberg
  unsure (1)..(1125): unsure at all n locations
aaaaataaggaatgatcagagaaaaacagagagaatcaaagatgtatatgcaaattcatgaattctacgtacttgaccattccttagcttgactccaacagctttaccattctcgataacaatgttttcgacatgacttttaagagatagacgtccaccaaacttctccaagccacggacaagcgcttcaaccacagcaccggtgccatcaatagggtactccaatgtgcagcctggcttgtaccattctgcaaacatgtagatctgcacacataagaaacaaagacttcatttaaaaccgatcttttgcaccaaaagtatgataatcttgtttcttttttccatgttagacatgttgtggaataaaggatacagttaacatannnnnnnnnnnnnnnnnnnnnnnnnnnnnnnnnagatttgacccctgcgagcaggaatgcgagaagatcaatccagtttcgtataaacgggtcttttaactccaaagaatcaacgatctccgagaacgggcggagaagttntgtcgctcccaacgctcctttaggacccattttgataaaagattttaaaagcgaaggagcatatctaacaagaaaaaaaagagaagtcattgataaaaaaaaaaacacctagcaaaagatgactgactatacacatagaacaaggtactctgatatatacctagcagcagctgtggagagaacaccaagatccccacgaatagacaatggtggtaacgccatagcagcagaagacaaagggagtattgctccctgcaggttcatcatagtcatgtggttattagcagatgagatctcacgagtagatgtcatttatattcacacataggcacccacaagaagcttttcccactcctggactgcgctaggaccggcatatttctcaagatcctgaataaaaaaaacaacactgaacaagatcagagatactgaaattggctcaccagagcatctaacattttcattatcatttgtaactagaacaaagcaacatagcaacataagctaaacttttttaccttaaagaaatccgtagggtctattcgtgacaagaaatcacctttggggaaggtaaccatcccagaatcatttttttacatgg

SEQ ID NO: 42516 - DNA, 553 bp, Arabidopsis thaliana landsberg
ctaagccttgtataattgttaatatatttaacttcatttcatttattgtcttcttttatactctttccgtttcatattgactatcattttataacttctaaaaactatatcaaaggaaaaagatctatcagcgataacataataagattgatcatcaaaacatgtatgttacaaaaaaaatatatattgtttcacgtaatttggatttcacttgagaactcggcccacgcactcggcccacgaaacagacatcaaagcccaaaagtaaagtaatccatttcttctccaatttgttttctccctctctgctctgctcctcctccgtcgccgccggtgaacacttcgctgaactttttctattccatggttttgcggctgagagttcactctttctacaaccgtggaatctcattccttgtctcttcttccttgaggaatcttagtactgcttcttcgctttttttgaactccgaccaaaccatcactgagccattggtgaaatcagagctcgaagccctagttctcaagcaatactctcatggtaagttctaca

SEQ ID NO: 42517 - DNA, 696 bp, Arabidopsis thaliana landsberg
catgcttgaacatgtaacatgttaataagtctagctagcagaaacaaaaagacgtttcttacctaggtttatagtttttctaaataattagattatctatggattatggtatttgtctttgtcctaactctaacatgttaatgtccattttgacgtactaaactcggtatctattaggcatagtatctatttctaactaatttctcctttcttgtcggccttttctacttaggccatttgtcgtggctcgttactccgatataaacaataaatatataaatgcgcaaatatgtaacaaaaagagcaaagagacatatgaatgaaagcatcaaataagagattgagaatctatcagagggcacaagactgggatgtatcacgttctctccttcatcttccccaccttactcttacttttctgtccttattattacttttgtttcgtaaaaaaaaaaacaaattatttattgttcaaaaagttttctagcatttgttttccacatttgtcttaggattcaaatgaatccgcgagtatgtttgtctagctatctgatttaaaatcgatatgtactgctagaatgtcttattcgagtaagccgaaattttaccaccggactggatgctacattgaccaatgaccaatatgaattaggtttagttacaccacatatagaaaaaacatttccatacttctgt

SEQ ID NO: 42518 - DNA, 595 bp, Arabidopsis thaliana landsberg
gtggctcacttgcaatctactgacactagagctgcagcttaaatacaatagagagaacagaggcttctgcagtttcaaatagaagatcctatggctgaggaccttctggagagataatgtaaatcatgaacctgcagaaagtttcaagttcaagcagagacttaaaattgtaaaaaagcttgagcagtgtgattcctcttagcttctgtagtaaaaaccattgtccaagtatgcctcaaactgtctggtactttgaaaacgtgagagttatttttattgcacttgttatttccttttatcaaagatttgctcattcacataaaacatgattccatgaaacagttaagcaatgaaatccaagacaataagaacaaatttcttcatatattcacataaagtgaaacaaaggtaaccttaacaactagtacaaccacacagcttccattgctgcagaggaaaagcaaatgacaaaaaaaaaaaacaatcctaagcattatctgatataaccagtttccagctttcccttcttcgtaatgaacctaatcttcttagtaggcttagatgaaccagccttctttggagaggagaatgtgga

SEQ ID NO: 42519 - DNA, 872 bp, Arabidopsis thaliana landsberg
aagatgttattgaggataaaaacatgaatccacaagctgtgattcatggctctaaagagagggataaagagtggaactcttcacaaaacggtgaagaaacattgagtctgcgaaactcagaagctaagtctactaaagagattgagagacaagaagttacacaagaagaaaaatctgtgagtcatgggtctagagaaaaggataaagagagaaattctttacaatacggtgaaaaaatgtgttttctgcggaactcggaagctaagtctactaaagagattgagagaaacaagtctcaagaagtatcacaaggagaagaatctgcgagtcatggctctagagagagtgctaaagagaaaaattcttcacaacaggatgatgaaacgtcgactcatcgaaacccaaatgacaaaaaaggcattaaggaacccgaggacgaagagagcaagaaggtagaacgcgaagaaacgggagaaaacgtggaagaagcatcagtagagtttgtaaatgattgggatggaaacgaaatggaagaagaagaagaagaatatggagattattttaatggagatgatgattggattcacgatatatcgcggccacgaagttactgggaagatctaaggaaagaaaggtatcttgaggttctcaacactgaatcagagaagaaagatatttgcaatctcattgagaggtatatatttctatgatcattcatcaaatccctcaaaagcattaaacttgaaactttacttgacttttgatgtttagactaattttaattttgtataccgctgtgcagacgaacagtttcaactttttgactagtgatttgcgacaaaagattgataatttgatgatcactcgcgtgc

SEQ ID NO: 42520 - DNA, 328 bp, Arabidopsis thaliana landsberg
  unsure (1)..(328): unsure at all n locations
nnnnnnnnnnnnnnnnncaacgaggcgttctaccgcctgaccgatggtcctctcacctaccactttattatcaacggttcgcctaccggtggcacctacacgctgaaggtgaacggtgtggagaccgcgcccatcgcctacaacgcgaacgacgccgccatcaaggcagccatcgtcgcggtggacgacggtatcctggcctcggatgtgacggtcgcctctggcaccatcactggcccgttcgctctggcgcacggttcggatgcctccctgaccggtggcaccagcccgaacaccacggtgactgagggctaagcagtacctccgc

SEQ ID NO: 42521 - DNA, 520 bp, Arabidopsis thaliana landsberg
cccccaagcatgtattgccatgccgtgactgtcttaccgacctagtcataggttgagcgcagatacctacacagagacgcaactctatacggttcaaactccacagttgtctataagaaaagaaggaactttggtagctcattggatacctcaacaacatatgataatcatcatgtactggaggcaacaaatctttctgaagaagttgttgacgcaatttagaaacaagcttctcctctttctcatctctaacatcttcaatcaaaggaatctggaaatcgattttacgtttgccttttctcatcttcaaaggatgtgtaagtttagttgaacaactaaaagccttcttcttcaaatgcccaattctagaacgccgcggctcttcttctatgtactcagaatctgatagtttctatcctgtttgttctcgacctgtagcaatatattccatatacatcaaaaacgaagctaatttcacaatcatttcactgatcgattttatctcttctaaaaatttacc

SEQ ID NO: 42522 - DNA, 481 bp, Arabidopsis thaliana landsberg
cgtggccggcgatcgaccgcacccccgggcccgctccgatcctttgccgtccatggacaccgcgtggccggcgagggaccgtacccctgggcccgccgctggagacctcagacccgctcgaccgccgagcgcgacgcgcggaggtcgcccctcgtctcgggcggcctcgccctgcggccctcgccctccggcctcagccgtgcgtagagtccggcgcccaccagcagcagcgcgccgagcgcggcccaggcgacgacccgtccgccggtgccgacgtccgacaggtccagcagcgcgatcttcagcccgatcccggcacaggagcgccaggccggccatccgcagcggcgcctcggtgcggacgaggccggcggccaggagcccgaggcccgtcacagcccagagcacgtcgcgcgccacggccgtgacgtcattgtcgccgtcggccgacgtcgcgagatgcccggcgaggatcgacgcg

SEQ ID NO: 42523 - DNA, 773 bp, Arabidopsis thaliana landsberg
ccacatcctggccggtttatttggcctgatataaccgatgagtttcttaaccgaatccggtttaaggaggagtgtgtctattttggccgtgatggagcgaatgttacaacttccaagtgttttttatttgcgaggaaatttacagccgaaactttagaaccattgttaagaatttctccattagttcttggatttggtccatagttacattttttcagttagtatatattatggtaatgaagtgattataatttagattttaaattcaacaataacaataaattttgtgttctaattatttaatttttattgtaaaatgtactaatttaggaatttatgagaaatggaataaatattttatcttatccacgatttttgtcgttttgtgaggtctttgttctgctcttgtgtaacttcagcgataacccaaagttgcagacttttactcaaatgctaaactctctcttcctctcggcgcgagcttttccatctttgatcactaactctttcttaaaccctaatcaaaaccctttaaatggcgccaaaagttcccaatttgatcagtttagggaaaacagaggagtctctgatgctgcgattaaggttcctactgctccatggatgaaaggtcctctcttgcttcgacccgatgagattctcgacactgagaagagaaacaagccacggaaagttgaagagaagacgttaaggcgttgaatcgtaagagagtggtgtcagaggaaagaaagcgatgaagaagatcgtgcgtaacg

SEQ ID NO: 42524 - DNA, 808 bp, Arabidopsis thaliana landsberg
ctcttttaaaaaaaaattgcattctcttcggtatttgagcttttattactgaaaatacaaattttatttttttttagctctggattctgatagtaatcctgcagttgagaaggatattcaaatatttcaaaattctagtaaaactgcaattcgtagatcttttttttttgttcaaagttttgataaagcaaacgtccctttttccttaaaataattaacttagtatataataataaaattaagacagtgcagtaattgataaacaaccaaaggttcattgtacctttctccattgtcttcaatgaattcctaaaactagaagaagcgttactttagaaaaccaattataaaaatctcctctttcttcatcaaattccacaaagcatcagtttcttctccttctccaagctctcgcatcactttcatcgatttttcctctctgcgtcgatccttcagacatcggcgtcggagtttccgacaggtaaatgtaaaacacagtccactgttattccctgcttcttagctttccattatgattttttgttgtgatttttactgttttctacggaaatgcttttgagggcttttgtttagtttccggtgaaatttacagagaaacccacaatgctgaaaatctgaattaggctcaagttaggagattactacacaattagtgctgtgagaatgaatatacggaccatgctttgtaaaaagattgaaacctttgctttatttttgatcaaaagattttactttcgattcttttagtaaatgggtcgctctttgtttggactataatgatcagact

SEQ ID NO: 42525 - DNA, 553 bp, Arabidopsis thaliana landsberg
agatagagagcggtggcccatgttcatgatcattaatgatgctcataatcgacttgttgatatgtcatcaccagatagttaaccaagttaaaagattgaaccttaatcgatgagatcacatcatcttatcaatatgtatgtaatctgttaatacttatcaactcggatcgatcatatacacgtcttcttcaaatgaactatatatatatatgtattctctttttgttcgtctacactaaattttttgatattttgtaagaataattaaattttaaatcccattaattttgattatatatattccctgattatgtcacacaaataatgtatatgttgctaatgtcaagctggaataaggactataaaactcattaatccataaattaatctgacctttttcatttctttgacgactcccaaattcccaattaagtatgacgttcagttagttgttttgagcggtaaaaatttttctcttgtcaatgggtggcatcaaattactaaacagtctaaactaatcctacgaaaactaagatccttgaaacctatgctg

SEQ ID NO: 42526 - DNA, 1847 bp, Arabidopsis thaliana landsberg
  unsure (1)..(1847): unsure at all n locations
ttccacaaaatcacctcctttgattgtgttcgcacgattcagtctctcaacactctcatcaacgttctggtcgataacggcgagttggaaaaggccaaaagctttttcgacggggcaaaggatatgcgtttgcgtcccaattcggtgtctttcaatattttgatcaaaggatttcttgataaatgcgattgggaagctgcatgtaaggtgttcgacgaaatgcttgagatggaggtgcaaccgagtgttgtgacatacaatagcctgattggtttcttatgccgaaatgacgatatgggtaaggcgaagagcttgcttgaagatatgattaagaaaagaatacgtccgaatgctgtgacatttgggttgttaatgaaaggtttatgttgtaagggagagtacaatgaagcaaagaagttgatgttcgatatggagtatcgtgggtgtaaaccgggtctcgttaactacggaattttgatgagtgatcttgggaagagagggagaattgatgaggcaaagcttctactcggcgagatgaagaaaagacggataaaaccagatgttgtgatctataacattctggtaaaccatctttgcactgagtgtagagtccctgaggcttatagagtgctgacggaaatgcagatgaaagggtgtaaaccaaatgcagctacataccgtatgatgattgatgggttttgtcgtatcgaggattttgattcagggttgaatgtttgaatgcaatgctgcaagcagacactgtcccacacctgcaacgtttgtatgtatggttgctgggctgattaaaggcggtaacttggaccatgcttgctttgtgttagaggtgatgggaaagaaaaacttaagttttgggtctggtgcttggcaaaatctacttnnnnnnnnnnnnnnnnnnnnnnnnnnngtatattgtgaggctttgtcagaagtaatttccatctaagcaatgacctttttaaaggtaagattctcatccttgtttattcatgtctgttaaaattaacagggtggacgaatttattttcttcttaatctttggttaattcacagtttcacacaatggaacttctaaattgatacattcaagatcttgtggtgaagttatagctgaagtgttctggctttttttttcttctttcttttctctatgtttcttctctaaaccgaaccacccatataatggaaaagttgtcagtatgtcacctactctgtttcatcaactacatcttcttatatcaccaatatagctcattttatatataaatgctcctctagaatcaacgtatataaacacacgagaattagaaacaattcaactccaattcaaattaacaatcttagtctctgatctttctacttgtcaatggcaggctgcaaagtactcttcttcctgattttagctctcgccattacttttgtctcagctgctcggcttcttgatgaagaagaagatattgggttggtccctttgcctaccacgagtcctggtcctttaccaacagttggtttaggcccctttcccactgctaattcaggccctgcaactggtatcgcttcaggtacaggttcagcctcagggggtttaggttccttgggtaccaatactggccccgggcctctatcgaccactggttctagtcttttaccaattgctagttcggctaccttgcctgttactggccccggtcctctaccaaccagttctggtctcttaccgggtgctagttcgggtaacttgcctggatcatgttcagggcctttgcctactgttggttcaggtgctgcagctacgggtctgggcgcaggtgcagggtcagtgattggtg

SEQ ID NO: 42527 - DNA, 819 bp, Arabidopsis thaliana landsberg
ggtctcctattaatttgaggaacaagtcatgtagtttcttcataacatcttggccaagaacctctcagcctttagagaatgctcaataaaccacttgaagagataatccttctagaaacaaaactgagcaaactctcactggacatagaaaactccagaagcatttcaaccactataatgtcagctcgtttgacatcttttggagtatcacaagagtatcgttggatctagcacctttctgaccactactttctgcagataagagcttgttattccaacaagtaaaaagggcatcaagtacaggcccaactgaatttgctagattttctgagaggggttgaatctgttcagaacctttatgatttgaacagaaaccatcaggtttccatgctgtttcatccccacaatcacaacaaccaccacctgtgtagatgattgaataatcgtgggagttgtgatccccattctggaaacaaggcacgcagattgcacaagttgggtcattctcgcatgtcctacacctatatgctatatcattctgtccccagacagagccacaaacacctcgctgatcaagattcagttttgctagatttctcaaagaaacatcaggctcctcctggaacatcaaccactgcagcatattcatgctctccctgaacctctttttcatggtaggactcacagcagactttctaggccgttccctagcttctttcaattctagataaacatcgtcatctgtaggtaagagagcagagactaactttgaaatattgcctcggttagctttaacgaattccacttggccacgtttag

SEQ ID NO: 42528 - DNA, 960 bp, Arabidopsis thaliana landsberg
  unsure (1)..(960): unsure at all n locations
gtaaaatgctactcaccaagtttagcattgtacttaaaaattattgnttaactcattatttggaatcactaaaattagcattcatatgtctcaactctaatttgaaagggttaatgcatatgcaacttaaaaaaaaaaaaaaaaatggtaatgagggtttctaaagtcgttacaatatctattagtataagttttacctgatgtgaattagagcttatcgtaaaatcaacccttttcactatagataattgtgtattaatttagagttgcaagttaataagagcaaaaacaatcagtttcgtttcatttaataatgagctaaaagatttcttaattacatgcatcatcaagtttatgttgggatgaccaaattgtgaataaatagctctaagctgaggggaagttgcaatcactatcaaactatttattgacccaagtctcatctttgtattgatcctcacttattaaagaccacaaaaaaacaaaacatatgcataaataagcatgacaaaacaagatgcatgcgcacacttatgtacaaacatgcatagttttgtaaagtgtttttgttgtttctttaaaattatgtaattttaagttttaggataaaaataaaataaagttcttttcttaatgctaagttgaagttagatcaacggccaggcacttctcactgtgacacgagagaaatcttagaccgttgataaaagccatcgataaccgatatttagggaccatatagattttgtgtttaagcagatcatgtggattgtctgattagccttaaatgaccattttaccctctccgttgagtatgtctatgttttaggcggtgggtattctggtcagtctaaagcaagtattctacaaacgccaagtgtgcatatgtcaattataccacactcagaatatttgacacgatcaagcgctttgtcgtcgcatgcatgtggcgtaatggaa

SEQ ID NO: 42529 - DNA, 1329 bp, Arabidopsis thaliana landsberg
gcactccgcttcttcgttgaagtaaaccgtctccttcgcatccatagccatttcgatctcttcacgagcttcagcgaacttgagattaatctcgtccactaccttgtttacatctggcggtgaaccgctactggagccggtgctgtatctcctctgattttccaggaagaatgaagcgttgtttgggatctggaaaattagtgagctagatgatgatgatgacgcttctgagagactagatttcgaatagtgagacgttgatgaaggtttgatttgaccggagacatctccaatcgataacggggaagcggtaatgcttagattctgtgggattcggagagactttctggtgaacagatttcggagagtaattgctgagtgaagacgcatggttcccgccccgccggtaaggtttctccgagattctgtaggtcggcggcgcagataagtgggcaaatgagagagattgaaattgttcaaaacttaagattccatatatgaggaagatgaagatatcttttgggccttataattaggcccaagagtaggtccacgaaagatcatgctacggcacagaagtcaaaagaagacaggtgaaggtcaaactatcaaccaaaccacagaagcaactgaaccataaaacgaagaacttctctcactgaccactccaatggcgaaccactccatttgcattgaattttacgcaaaccagactcctacataaacctcagaactcaaagacagtattgaccacaaactcgcaagccgcaacaccaagaatcttgccttttagaccatatccaatggctcagaccgttccaccatctcgaacgaagccgcttacaattttcaagatgggtttagcctctgcaagcgtccgattggttaaccttgcttctcattcgaagaggaagcttcgtcgttgggctgcctgttatggctctagagattatgaacctgttatatatctccaaaacgacatgacgatgatgaacaatggtggtgtttatgaatacaacggagacccgagcatgttgctgagtggggatcagagacgaggtccgttgtggcagaagaacattctcatgggaggaaaatgccagcttccagatttctcaggtgttatattgtatgatgctgatggacaagttgttcctccggccaagaactctcttcctttgctcacctggaagtgaaaaaaaagatccctaagaatggctaaacctacttagcatttgcacgtttgcatctgatattctatttcttggattgtaatgtattgaaccgtttatgggtttcttttttaactaaaagatttatggatatgag

SEQ ID NO: 42530 - DNA, 824 bp, Arabidopsis thaliana landsberg
tgaatgcatacggtgaaatttttaaccactgcacgaggaactaaatcctgatagctttgacgaacgttaaagtgtttatttttcctatcttttgcctgtcttcatttttgcacgagatgttctgaaactgaatgtaggccagtgcaacaatgagttgctcattaggtagagtgcttcgatgtctggatgtttctctagttcccaatgagttaaatttctagttttggtattgatatcgcagatttgactcctttggagctattgttgttggaattggaagaatgagaataaaatctagctcatttgggtttacaagtctgcagaatcaggacacgtttactctgtttttatatacttcgatacattccataaccattatctctagtacaatatcaagctttgtaatttccaacattggtctctgtttgcaggtgatgttaaaggtcaatggtattacagagcaggtaaaaagactactcaacactcagatgtgttcttaatgggttatacacactgatgggactctcaattttgataaggtgtgtattcgagggtcgtcaagactggggttcctcggccatattcatctgccaaaagaggtaaccgttggttgatcggtgcacctttccttttgattgtcttaggaaccatcggacttggtggaatcaaagctaacaggtgagtttcacttgtgtttttctattactgtattaactggaactattattagtactagtgtttatgggaattttggcacttgcagggcatataatctgcaaaacaagacgttcccttctacaatccttcctccttgatcaagtctc

SEQ ID NO: 42531 - DNA, 648 bp, Arabidopsis thaliana landsberg
  unsure (1)..(648): unsure at all n locations
atacgtatatgaaacttccacataagcattataatacaggatgttttctttcccaggtaactagagactctttctcttttaggctgccatatatggatatagcctgaatcagttttactctagtggcctgtgatagttattgttgaaaggtttatatacacatactatggctattaaatgtaggtcgggaaagcatactttgaactaattgactatttagaggctgaaaaggcattccgtcttgcccgtcaggcttctccttattgcttagaaggaatggatatatactctacggtcctctatgtaagtgtattatcctggtttctaaacatgcaatctcggatgagtgcggaaagaaatcacatttatgtaaatttttcatcagcaagatatgatatttatttgcagcatttgaaggaagacatgaagctgagttacttggctcaggaactaatatcaaccgatcgcttagctcctcaatcttggtattntttgtcgaagttgtttttctgattaacgttttcatttattgttggtaataagagaaataagcaatcaattatgtaggtgtgctatgggaaattgctatagcttgcanaaggaccatgagaccgcacttgaagaattcctacgagctgttcaactgat

SEQ ID NO: 42532 - DNA, 369 bp, Arabidopsis thaliana landsberg
acgatgccgtctccgacgatgggtagcaagggcgtgggccaccgatgagtgagaagctattcccaaatcaatactgccacgtgagcctagaatgtcatagaaacgactaagggggcaccaagcatcataccaaaaggaggtatcatgacccgaattaacttccatttaatgaaaagacatcgctttatctttgcagtttagaatttttctcctcatccaagagcctgagatagtgttccacgaatagaccataaagttccattaacagtttacgtatgaggcttccataattcctaaaatctaggtgtagatgtacatgctaaacctagcattaagcttaatgatcaaaaatgaaaattcaggagcaag

SEQ ID NO: 42533 - DNA, 1447 bp, Arabidopsis thaliana landsberg
ggtcacgaaccggcgaacctaccaaaaccgaacacgaaccagattccttacaaccatccaatttgggaggtctcatatcttcttcaacccgtacgtcgtcgctttttctttgtcttagagcaagcgttttaattattattgcgtcattaataggaatatattttgtatgactcttgttgctaatgttagggaattttattggcttgaatttgatattgaataatgattttattttatttatataaaacaatatgttgtttgtttaatgatatctaaatttaatatgttagcgttactcaatattttatttaattttatatggttttttacacggattttaattcatctttgattgaaattttaacaaatgtcaatcagttttcaaactaataatgcaaaagcttaaatgtgaaagtaattttttttttggacaaatgctttaaatattataggtaaattctatatgtttgattttaaagttaataaattctatattcaaaaaaaaaatccttataaattataaagtacaccaccaataacctctttaagttaactattatagtattatgtttagaatgtagttggacatgttttatccgattaataccaattagaatagttaattatcaagtacacgctatgagcctatgagcaagagaaggcagcatggtccttggcctctttctcaagtcaaaatgtattttaataatcatacatgctgtaaacttcaaattcctactttttcagagtaaacaaaaaaaaatcagaaatcgtaaacatatccccatccctgaatacttaaccgtttgacattgagagtacacgtacaggaatatctagattgattaggtatatataatattttgtattaataatttaaaaaaaaaagtaattatcattaccagaactagctagttgacatctcactacttatgagtattttctaaacgcaaaagattatgttaggtgagttacgtgagtagtgcgcagtaatgcaatttggttaacgctgttcaatacaaatttgaaactagttgaatccagcaaaaaaaaaaaaaaaaattggcttccaaaatattgttaccataaattcataaactttcgttaaacttaaagtgatttatacacatagtatattcaaatatcgataaatgtattttgctaatcaaatcgtatattcttttataccagttttttaacgtcatctcgccaaaacaacaacaaatagatgtaaaataatgaaagaaaacaaaaaacaagatccatggggaagagtcacatgcatggagcatgcaactagcttactttatccaattcccactcaaaattctctctttatatatacactttctctaccacttcttccctcaaaacaagctaactcgatccttctcacttaagcgatcgtaccgatcttaatatctttagccagcgagagagagagaga

SEQ ID NO: 42534 - DNA, 566 bp, Arabidopsis thaliana landsberg
atttcgttactctttgactctctgtattcacctttcatctttgtttttcttattttatggatttgtttattagagatttcagatttgtctttggatttttgtgtaaatgatttaaaaagaaaataaaagaggaggaagaagaagaagaagatgtagaggttgttggtatggggtgaataaagagatgatagaggagagggacttttcgtaaatccctttgggaaatggtatggtgtataaagtataaaatggaaaagtatttgcttatttgtttttaatattattaaaagaaatggttttgttttctataaaaagaaaaaaagagaaatgagaggatagggaagaaggaagatgagctttgaaagcaagaaaagagagcggcgccgctagttgggaattgcaagtgaagaaaacaaaatacgtgtctttttgttgtgggttcacactctcttcttttttttttttaataaagtttttgggttcaaactatattataatatagtatttgatcaaaacttcgtctattacaaaaatataatactttatgaaagttgttttagtataca

SEQ ID NO: 42535 - DNA, 1424 bp, Arabidopsis thaliana landsberg
  unsure (1)..(1424): unsure at all n locations
catatagcatatagaacttaaacagtttatacatatttttatgacttttatacacgaatgaaagattatctctagctgatatagtatatatatgaccaaataataaaataacatccaaaacttagataatgtatgggccaaaacatagatcatacatggatcaaagaatacaacatacaaatataaacatagtatattaaactaaaaaattaatctaaaactaatattttgtttttacaaaaatattatttaatggataaattagtactttttaaaagtgtttttaagctattaattagattacaaggatattctatatgatgatattgaaaaggggccaaacctcccatacgctaggaacgtggtgggctnnnnnnnnnnnnnnnnnnnnnnnntttgtagatggatttgcatttgcattttcgtaatctacaaaaaaaaaatatgaaaactgaaaatatcttaaatttcaaaaatataaatattttattctcatgaagacgcatatgttatgtttagaacagtcgaagctctcaaatgattgatgatactagtgtttcaccacttgttgtgctatttgtgtgagtgtgacctgcatggtattaatacgaatattagactctaaccgtagatgaacaaatcgaattttcatctacgaaccaaaactataacagttgattgttacgaccaaaaaacggctgtgtaaagaggaccttttattgtatttgtcagatcttgtgttcttatttcgtatttgtcagatcttgtgttcttagtactacaagtcatagcacctctacgcgtgtgattaaaaaaatgtttcatacgcgaaactttgactattttgctcattaagctcttttacttgaacttatattataatatctgaactccaataatattagtaatatatttcattactaatcccaatttattagataacgcacgtgtcctctaaaactccaaataaaatatggaaaaagacaaatgacgaggctgtgtcctgttgataaagagatccagtacgtggtccatgccagatattattgtgttatgtggtttaaataataaattgtgaattattgatgtgtggtttgatctattttgggcttaaacgattgaatcctaagggtttcacattgaactgtttgagcatttaagattcattctcacattcacagttaggtagtgatnagtgatcgatttcacatattgggtctaaaagtagagcatttcacatgtacaatttaacttgattgtgatttaacgcgtaatttttatatttcgctttataactagaaaccgaaaaattctactttttcactaaccgaccttgnatatattatatatcttaagntttgaacttttagttatcaactaattangttttattttaaactcaccacatacttacacgtcacaca

SEQ ID NO: 42536 - DNA, 775 bp, Arabidopsis thaliana landsberg
tgatgttggtttgacagtgattaatctaggttttggatatgactaacaggattataaaagagaatattgcacaaaaaaacttgcttgttgtaacttgtgcgtataattgaagtaaatgataaataaaacatttgaagaacacataagtgtgtggagtgatggttgttcttttaaaagtttctgtgtgtgtcagtgactataagtgggagtgagttgtcatttgaaaacgccaaaaccgttcccaaatgcaaatgcagagacccaatattacatagatgttctctttccacttttgtaatggtagaaatctcagtctttatgcattgcaagatatttcatgcaaaaacattaaagaagaacatacacttttatccgatttagtgatgaaatcgaacatggagatcggtacagaaatcacaaacaaattaaaaagcaattacatgtcattgttatatgcatttttggttgatttatcaaaactttctctcgcttttttttttgtcaaaactttctctctttaaaatggttttattaattctgtctctattttgttttccaaaaatcactctaattattaattagcagataacttccctatacattacgatgcataaacaaaatatattacaagaatatattgcagttgttaacccaatcgatttggtatgctatcaaatcatgggcacaaatacaaccttaaactttggataaaaaaataaaaaatccaaccttaaacaaccatgcatttgatcatttgcatattctaaaaaacaat

SEQ ID NO: 42537 - DNA, 1571 bp, Arabidopsis thaliana landsberg
ctcggaaacacaggatggcctattgcctcacgcactctagcataattctcttggttttcagaaaaattaataagtgtttcagctgcgttatccctgagctcttccgactcatcccccaaccattcaatcagaatcggtatcataccggaatcagaaaaggcctcacggtcgttctcattgtaactcaactgagaaatagctccagaaatcctctctctgaactcaagtgacccatctctcagaagctcaataagcaaaggaattgcgccagaccctctaataacagatacagaatgcctataacccgcaagatcccataacacatcagaagctgcaagcttggcttcgttatcccctgctctcaagatcctcaccagttgttccgctatcaaaacagcattaccttcagctacagctaatatacagaacacatcctctgcaatatctttccccatgggatcttgtcccgagagaagctcgacatacaaaggaatggaaccagcttcagtgacaggcctaatgtactcagtctgagcagatatgatccctaaggcattaccagctaaaagctttgccttatcatccccatctcgatacagatccacaagtgctggaatcactcctgcttcaaccagtattcgccgagctcgtctagtaacaccgatcagtccgatagcatgacaagctctctctcttgaggccaagttcccaactttagcagcttctacaagaaacttaagcccacctgaatgaacaagaacgcgtctgctctctctaatcgtcgtcaaagcactaaggatctctaacaagtaccatctacttccatcatcttcccaattattcaactcacgaatcacaatctctaaaccacctaacctagccaaaccaactcgaatcgaagatccaaaagtaactaagctccacaaacatttcacccaaatccttcgaaacacattaccatccgtattcgcttcaagtaacaaccctaataagctagcaatcacaccacacctccccatcgtcaccgcaaatccactttcttcaccgccgcaacaggtaatacatttcaagcaatgagcggcggcagcttgaacggaacgattggagtcgtctgagacacgaagaagaccggcgagaatcggaattgcacgggatatatagctctcaggtactcgattcgtcaaatctgataactttaaaacggatcttacacgaattgaagcagaaccagacgaaatcgcgttttcgaatcggttaaactctgtttcccaatctgggttttgaaaacctctgctttcactttccgtttctgaagaacccatttctggagataacgaaaaagcttcgaattatcaagagagtagtagcacgaaatactcgaaaagaagacgaaaatggagattcaacatctacaagcacaacagaatgaaatattgaaatatgccacgtcagatttgaccagccctagacactgaaggagacgattttcggttacccggtttataaggattttaatgtaccgaattaactcgactcaaattgtatctttgggtggtgactaggtttttggg

SEQ ID NO: 42538 - DNA, 604 bp, Arabidopsis thaliana landsberg
gccaatttgaaaaatatttggtcaagaaaactctcgtacgtgtcatttcatgacatttattgtagcacaagttgtggtgacctactgattgtctgatcgatagcatattagaaaagaaataaaatgaaccttaaaagtcaaatccttaacaactactagcaattaacaaacatgtttgaatagaagtttcaagaattcacattgaaaactttactctctcttttcaaacatgtttcatcaaacggaaatgtaatatttagtccactaaatctctaattaaagtcagtaattgatagttacaaaattaatatgcttcttccatcggtatgaattaattatgatgcccaacaggcaacaactagctaccaatttgatttctaccggctttgatcaacctaaaccggaaataaatttctcggtaatgtgaacacagccgcaacattagctgaaaccaatataattacgacacgtgtatggcgggaatcagacgccgcaactttaattttttaatcggaggtaacccctcgccattgggaaagacaaaaggagatttgcatggtagcgatcttgccgtcgatgttcttcttagagatctatgggtagg

SEQ ID NO: 42539 - DNA, 570 bp, Arabidopsis thaliana landsberg
taatatcatttctggggcattggaccaggttttgaagtttacataagtttcttgtgctcattgccaaacgggagcggggccactatccgagacgccacaggagtcttgtgtaccactacgcttagccacccagcgaaccttaaccatccgtcagtaactatatctgcacttaaagaatcacttgtggtgagaagaagtttccaaaacgtctcaaacaagactgagacatatcttggttcggttttacctcccaatggtacaactgtacggttaaccccaacttggtttaccgtaccaccacagaaaactcaagatctagacatcgaattcaatgtcacacaagtcttaaacaagtttacatttggtgaagttgttcttacagggagcttaaaccatattataagaataccgttgtcagttaaaaccatttgaaaacataaaattttctggtttcttcgatctcacttaaaataaggtctttattcttaaaaatttccaacgaaaaggttattgacactccatcaaataggaacggagataagttttttcatataatgaatgtatggaata

SEQ ID NO: 42540 - DNA, 1195 bp, Arabidopsis thaliana landsberg
ctgatcaaacccgaaacgaagtttcacaatttcagctggattatgaatttcgagtcagttaaggtaatgaaggatgggaaaaggaaaagctgatgaattgtcgctattttcttaggaaaggattgatctttaaagcaaatcccttgaaactctgatggacggcgattgaagaaagcgatggatgctataataactactagggttccagacccagaaacgacaaaatgtatactggtgattaatacaagcgtataatataggaaactgaaattgagagacaaaggagaaacaagagaatgttggaagcttcgggaagcgattcctatagaatgcgagagagagatgattagggttttcttaagggatgtggtgtgtagcaatcgtagcgattagagctactgggctacacgacaagggaaggggatctgtctctatttgggatgttatctcctctcttatggatcatcaaaccgaacatttgattacaaaattgaaccgaacatttgattacaaaattgaaccgaacattggattagactgtctaattaaaccttaatttggtttatgaactcaatattagtttttccaattaagccaattttattttatttttctgtattaaaaaagcaaattttgggttccaatatacaatccacccgccaaaatattttgtcaatttttaacgtatttttgaatcgaaaaaggaatttctgaacttttattgtttttcttcttgtgtttatacattgctctaaatcttatgatacgttaataatgaccttaattcatatttataaggaaaccaaatctattttttaaatattcttaaagcttagtttacactatataattaatcaaaaattgattccaatcaatctctctactactaattctttttgctatatgcctatatttaataaaaatatatatttaaacacataataaggtagtaatacactaatacttaaatatggtccgaaaactcctaataatatgtatatatatatttttacaaaatattggaaaattgttaagctaatggatgaatgaagtttatatattaaaagaaaataacaataatatatatatatatatatatattaattattaaaaagataatactgtaatgtgatgattttataaataaaatatcccctagtattctagtaataatagttgttaagttgaatggtgt

SEQ ID NO: 42541 - DNA, 568 bp, Arabidopsis thaliana landsberg
  unsure (1)..(568): unsure at all n locations
atatctacactgcggtgtaccgcgggtcaatatctagtttgtattgatttttgtattatgaaatggtcaccagggacaatggaagctggaataatcatatttccagaatattcatgaatttctttttctagaatttcatcattggatggtaataaactgttaagacaaaaaaaatctctcttgaatcattaattatttagtgaaagctaaaaatcagaacaatcatcataaaagtaaattgatgcatactttctcgtctgcttcagttaggtaaattagaactggaaagtattataatatgagaacttacaaatatatctcccaaaagctggtgaaagcagtggcagtgttataggccattttgtttgatgtaagtttgtatagaagcgatttaaatagaaatggttatggagctatatggtagtgtttatggtcagatagaatagtaaaggctatatatatacatatatatatatatatatatnagcttttctggttagatcctattntatgggtttataagagaatattacactcttaaacacttgttccaaattattttccgtgt

SEQ ID NO: 42542 - DNA, 276 bp, Arabidopsis thaliana landsberg
tcttttatacactctaattgtattgcctttgaggtatgtataattttcaaactacatttagtctaacaatgtgactacagagaccttaaattgatcacagggatttgcaggggctgtatacagatacattggcttaaaaacagcgatgcaactacttggccccatgtaatagacactcccctaatccgatctaacacagcatttacattacatatgcacatgaatctgcatctaattcttcttaaattgtttatgtccggacaataattgtggaat

SEQ ID NO: 42543 - DNA, 527 bp, Arabidopsis thaliana landsberg
gattacctcactggctgaaaagccaggatatatctctgttccaagctcctcagcttttcctcctagccaacgtaccagttggctcaaactgtatatacaagcaccaccaaatactaaacatctcaaaagaaactaaaccattcacataaagagtagtaaattgatctctctacacgtacctaataacgtagtttcccttgttatcaaacggagaaggaagtgaaaatgcacgatctttcgtcaaaaaccagaatttatcagaagaagcagggatctcaatgggtgcctacaaacacagatataacaggaaacaatatcacagagtgctcatgttcttgtctcaaacaacaagaagagagagagacaaacatgttcttgtctccaatgtggaagaagctcatcaagtgccaggggttcaaaaacattgccagatataatgtgtcctcctacaaattgaagaaattcacaaccaatttcaaaaatccaaaagagagctgataattgcaagatcaatactttgaaaactg

SEQ ID NO: 42544 - DNA, 895 bp, Arabidopsis thaliana landsberg
gttcacacgttctttcacccccagtttttgagtcagatttcatttcattccgtcagattgtctttctttatattccaatgtacaaaatgcatggattgataaatatacacctacttggagttccgaaaaagtagcggatgcgatggctactcgtagagtataggactgattcttatcaatgtttttaagttcgaatttgatttgccatgttgttccttgatatgttttgctatccttttttctatgaacgaaaatgtaacaatgtcattgtcaatcaagaaatagaaatgatcacgctggagatgatgagaatcacctagtgacttgagcgtaaaaccagtcttttctatagtcgctagagccaactacatataccaagtctttatccggatatagttttgcatatctttcccataaaccatattgtcggaacctgctagagattaagaacttcgaaatcataaaaaaaaaaagaagtgcattttagttcattctaatgtttttcagtatcaaataataatatagtttattgaagacactttatctgtagatttttgataataagatttgtatgtgtatatatgtcaaaacctgtcagggtgattttgataaagtttgttaatatattttggattcggatcgggaacataaaactccgcagcagatcgatctggaaaaccaatctcccataacgttgctccatttcttggaggttgataaacaagatcttccacatatatataacatcctgcgcatataatgaattgtaacaaaaaaatgttttggggagttaatagaaagcaagaaagaaaatgaggacctgaggtgattgtgataacatcatcgtacttataatcaccaataaaaccaggaagtcatgcatagagattatact

SEQ ID NO: 42545 - DNA, 768 bp, Arabidopsis thaliana landsberg
gagtttgtttatgcatttgacgtgtattaagtgtgtaaccaattatgttcttctctaaaattgtaagttgcgtttggaaaataataagaatcttgacattactaccgaaatacttatcttttctatgttagaccaatggtccaagactccaatgttagagatttttttactattcatgtgacaacaataattggtatgtaggagtgaaggaagaaccgacaatcacaatccaattaacataaagtagctcccacatcttacccaacgccatcctcaacgttgatatctcaccatccaacggcatccagcttccgatagattaaaccaatcacagccgttggatcaaattttacctttccctcttcttactctttcataaataaatccaacttcttcactctccacccgtctcacttcctctcctactccggtcgacgattatcccaatctcgccgggattctcctctgcaccgtgagttattgtttactctgctatttcctttttatgtattgtttcctctctagggaatgagattatgaactcctactacttattgtgatactttgatcgaatcgtcttccttcaaatttgtatccgctcttgatctgtttcatattttctcttttaacttggatttgattttctatcacttgaaaatgtgttgcccgtttgaattcccggaaaaatttgaaattcgagtttttttttttgcggcgttggggttttttcccattgatttggtttgggatctgaaacaaattggttga

SEQ ID NO: 42546 - DNA, 821 bp, Arabidopsis thaliana landsberg
atttagaaaacttttattatatggtttggtagcatgttatttcaaactttaatcgcataaagatgtagcaggtcaaatgcttcccacattatctttttagctttaataatcacaacttctcttttattaaatatatatattgttgctattatagaatataagtaggtgattctacgtattttttaacgcatcaagatttactattgtctagcccaatttgctactgaaatatcaaatcgtgtaaatcttgttcagaaacttgcgtgggctcgaatttggatgtagggagataaaactggcattaggctagctaataggcaaaaataaaacaaaaaataagaaagactgaaataaatgatatcatcagttcatgatttgatttgattttcatgctctaatgctaaatattttttcttgtgtcattttgatgaattagagatgtccatctttattttaaaatcatacattgccgcaaaatcttcgctaaaataaagaaaatataaaagtggtactgaaaatggttaataactttattatttggtttaaaattggtcttctaacctagataaaataattttatataaatattttttctctaattgaaagatcctatgtaaactaaactgaataaatacacacacatggttctcactcgaagaaaactcttggtcagattttggttcaccattcactaaaatctctgggttgagtctataagtctttcaaatccaacaaaaacaacattctccaaagaaattaaaagtaactttttagtagatcttaaaaatatgtcctcacaattcgttataacatatgtatgt

SEQ ID NO: 42547 - DNA, 611 bp, Arabidopsis thaliana landsberg
agaagcgcagactctttctgagaaaccgatactagattccaatgctttacagaagattccaatccggagcacttctttcacaacacaaccacacgttcaccggagtctttaacactgtcaagttctgactcaagcatttctatatcgtttctcaaagatagattctccagcttcaatgtttcaagctctttgctaagagctagaacataaccatcactttctataggggagatcatttcatgacgaagcttctctaactgttcttccagaagctctacatgtgctttctcttgagcagcagttttaatcctttcatcagtctcagacaatttcatttccaagacattgatttctccctgcaacgcttccttatcactaagaatcttgttaaggtcgtcaagagcagtggcccgtgcttcatcaagccgaagaatatctgacacaataagacatcaggaattaacaaaggctttcacaagatcaggaaacaaacataactaatacagataagaaaatttctacttttttctgcacttcttatcattgtcataagtaccccaaactgtccatctgaaatctgctcgccttcacttttgttaagggactaaaaa

SEQ ID NO: 42548 - DNA, 793 bp, Arabidopsis thaliana landsberg
aaagtctgtccccgtatcaccaggtagtcggagtttgacaatgtttactgggtttagtttaagtaagcctgagtcttctgctagaccagccatgagtgtttctgtgtcttcgaaaagagctccatctttatcagttgacagtagtggcagcaggactagtagtggaagactacactctactctcacaagtgggaggacagtttctaaagtttcttctccctctgcgggatcatcaccttctgtttctagcagtataagatcaaagtcattttcgtcacctctagaccggacttccaacttctctggacggaagaaaacagctacccctgaaagccgtgattcacgactcattattcttccaaaggtggaggttaaagctggcgatgacatggcacaaattcactttctctttgtacttgctagattctcatacaataggctcaatcctttctgtggttgttgattaatggatgtctgtaattgcttaagagatgggatcttaaaggccacaggattcgcagtctaacctctggtggcttacacttatcaccaaacttagaggccaacttatatttccatagtaacttcacagtgttctagtgcaatgcttttggacaatgatgtttatgtacatatatgccaactgtggatttgaatacaacctgggaggattagttattgtcatctcacgaggaaaaactttgaatcttcttagtgagctcctgatgctagatttaaaaatcttccaacgaccaatactatttttgggacacttaatatgccgcctcattta

SEQ ID NO: 42549 - DNA, 722 bp, Arabidopsis thaliana landsberg
ccgatcactggatttgcaatgtaattcttctatcaagaaattatctctgaaatgtcacattggagagaacaagaaaggggagatggcttgtctctgccgctggatatgtaacgcactagaacgcggtgttttgtaagttggtcatagactcatagtaaagctacgcacacgaagaagaagaagaagaagaagaagaagaatagatatatacttagtggttgatcctttgcatacatcttcttgatttatgcttcttcagggtttgaatggtggttacacaggcgatgtcttcatgccgctcaaccatgtgaaggtgttgcatatacttggttttcaaggaactagtctagaattgaaacactttaaatggtgcaagtgaatgttgtcgaagcattggtggatgatgacataaaaaaggagctaatgatgcttcttggagcttcggtttcacccaagtgccagatcaaagtcacataaaatgtatcaagagctatagtagtttttattatttatcttttgacctttgtgatttttccccatatagacgatttgacttatctttactaatcatcatattcatatcattggatgaatctcttttggaatccaaaggaaaacgaccaattcttttgacgtttaagttaggaaagtagacagtaaaaaccctattttgacttacctacgggaagtaagatagtatatatactaaataactgatggcc

SEQ ID NO: 42550 - DNA, 614 bp, Arabidopsis thaliana landsberg
  unsure (1)..(614): unsure at all n locations
gtaaggcctgatttcttccagcacctaaacaatatattgcacaccattgtttaagtgattagaacaaacccacatatgcaaagaacttaagcagcatagagctaataccaaaatttaaccttttcaatgttttcctcattcagttcaaggccagtctcttcatctggaagagcttctannnnnnnnnnnnnnnnnntcttttccattagacgacgctcaatacccatcttcattgtcatagtagaacttggacatgatccgcatgctccctgcagtttaacccgcacaatatttccatcgatctcatgtaatgccacattaccaccatcagacataaggtaaggtcggatttcatccaaaacgctttctacattttcctcagttaaaggtacttccaagatggggtctggggttgctactgccttgacaactgcaaaaatccagaaatcaaccataaaaacctaaatacatatctctccaggagaagatacacacagaagaagcaatgataacgtttcaaatcaatggaaatggatatcaaacttaggaaaggagaacctttactgtaactttagggaaacgttgtaaccatataatgtctgatagagagatgg

SEQ ID NO: 42551 - DNA, 310 bp, Arabidopsis thaliana landsberg
  unsure (1)..(310): unsure at all n locations
nnnnnnnnnnnnnnnnnnnnnnnnnnnnnnnnnnnnnnnnnnnnnnnnnnnnnnnnnnnnnnnnnnnnnnnnnnnnnnnnnnnnnnnnnnnnnnnnnnnnnnnnnnnnnnnnnnnnnnnnnnnnnnnnnnnnnnnnnnnnnnnnnnnnnnnnnnnnnnnnnnnnnnnnnnnnnnnngcaagatctattggggaaagacttaattgaggctcaacgggaacgacaccatgaacaattggggaacgcgctgcgataatgagaaatgaacggggttaagtgtttcaataaaaaagaaaatggcggaggatgac

SEQ ID NO: 42552 - DNA, 936 bp, Arabidopsis thaliana landsberg
acgcactctatgtaccatcacccttctctcctctcactctcttcctcctcctgtaccttaagatcaagattaccaccaacagaacaaggactattactcctaacgagcctagaaccgccccaaatatcaaacctttattgttactcttacccgaagcaccaacattaggaacatcagaagcagcgagtctaagataaaatatgttcccctcactgttttcatcttcaagttgctgtagattcaagacatctttagaccaaaccaagcatttgctcgagccttcatcatatgcataagccttacaagaacaatctccttggcaagcagaggcacaaatactaagactagttcttgtcaatacctctgaattataagctagtttcatgttcggaagaggaaaaaactggttaatgtctccacgagagcattgaagttcagtctttctaacgcagcctgcagagtaatccttcaagtcccagtctttctgcgacataggcctaaacccttgtgggcaacggcaaaaaggctcagacttgtcactgcaaattccaaaggagccacaatacctatagacctgacattgttgtcgaggttgagaccagaacaagttccatgccttgtttccttctaaccaagtgaactgtttgatctgtccagacacgtccatgacgaagcgtgacacgttcaactggttatagatagagtacgtgaagtatgagtctgtggtgttagagaaaaagctgaagttgtagatgtaattgagtctcatctcgggaaccgaatcaaagatcctgctctgagggttccaaggaccacttgaccagtactcattagatccgttccagagaattttgtaggctgtggattcgtctagctcgagagagaacaaacctggtgatggatcttcgagactcttccacgaagtgagtcgctggc

SEQ ID NO: 42553 - DNA, 491 bp, Arabidopsis thaliana landsberg
tgttgggcatctataatcccccacagaacgagttttgcatttttatgccagagattatggataaaaccactatcctggggactcgttattatcactggcagaatagcagaaaccacttcacgctgtatgaggttataggcagtctgcaataagaggattgacatacttagccaaacaaaaagaagcaagattacaagcatatatcaccaaagaccagtcgaggagaaatactttgatgtgtgtcattccaagaagcaaggttctaggacactgtgtgagtggatactggagtaacgaactaactaaaacagcatgacctctctcggccaattggcacagtacatccaagagatcgagcgacagccatgcatgattggatagtcctaactgttgctcttggctgtgcatgttatcaatatatacctgaaatacaactggtcagaatagtgactgggacaaggaagaacagctctaagcacagatgtgtggta

SEQ ID NO: 42554 - DNA, 531 bp, Arabidopsis thaliana landsberg
ccttcaacctaagatgcataaacacggccaccaatgccgtacagcagcccctgcgcaccttgtccttgctgttcttgatgcccttgaggcttgccgcatcctccaccgccggtacagccctgagtgtttcttgatagtaaacgccgcggttcagctcggtctggagctccttctgctgcagggcctgatgcagcagttgacattggcgttggtatcaggattgttgggttgccaacgttgagcaagacatcaaaggggaccaggttgactgcctgccacaacacaaacacacgggagaaacgcaactgtgtcatatgccgctggcgtcacgagctaaagccctggacaagcagctttattaacggcacgagcaggtgtagactaggctgcatcaactttgcggatccacaacatgtgcacacgctgctcgccggtgagcactagcgtggtcctctcagcaactggtacgagtggtacggttcgaggttgatccacacaacgcactgctttctttgcagctagccttgcaag

SEQ ID NO: 42555 - DNA, 414 bp, Arabidopsis thaliana landsberg
aactaataacaccctctaataaaccacttaaaaagtaattaaaacgtttctaaaaaaaaagacaactttgaatatttgacccaaaaagcagtaaagaaaaaacataaagagaccaactttgaataccattatttatcttttgacaaggctcaccaaatcagctaccaagttcatacatggtacaaagctttagcaagttgtcgaatttcatcctacaattgaattttctctttactatttcaaagtttgaatgctcctctgttttcttcgttggttcattgagaaaaaaggaacagactttttacttgtgccattgaccaagaaccacaaagaggaggaaatcaaatggtttttgggagtttgatggattgattgattattcagcaaatcccacagaagaaattagaagctgcc

SEQ ID NO: 42556 - DNA, 747 bp, Arabidopsis thaliana landsberg
tcaattgccttagtcaaccagaattcgagattaaataaaaagtcaatataattttgaagatttaaatcatcagattcatataaaattgaaaatttaaattaccaggtacagattttatgttttaaaccaataaaaacggtaaaatgatatttaaataacattgattaaatcaaagtttttttgtatgttttttttattagaaaaacaaaatcacaaaattttgtagctttaccgtgcatataaattaagtacatcaatacatttaactcaaaaatcacatgctatataaaattagtaatcaattgtataatttcttatacatatatatcatcttaaaaaatagtataataatcatttttggaggtttagtagagaataaacaaaagtcttcttataataaaccaaagttttttttataataaacttctctttcttaacatcaaatcatataattttttctaacatggcaagatatctctaatcgttacacttgatacgtattgtgatcgggttaattactaactcttagaaaccaaaatatatacaataagatattactataaatacatatatattaatttttatataatttattatcaaacatatatacaaggacatttatttctacaaaaagatagtattcataagtacaaatagattttattgatcacactaatgttcaaatatttttatgtaagaaaatcattctaatatagtttctttttgattataattttgaggagatta

SEQ ID NO: 42557 - DNA, 755 bp, Arabidopsis thaliana landsberg
tttagtttttgtagctttcattaatataaaaccattattccccacaaaataaatgtttaatagtagtgtaaagtttatggacatataactcaagataattgtgaggctgtgaaatgtgaactgtgggtaatggaagcaattataagatgtgggggcaattaatactttattggttatggagaaaataatttgatgagtatttttttgtttatatgtttcattttttttactcttgactaatttagtgtgctataataatcaaaaggtaatcagtggaaaacgcttttggttcaatagtagactaaaacttcttacaccaaagttcaagttcaatatccatagaaatgtagctttttatcgattgttgatggttgtagtcaggcccactccatagcataaccaactaaaactatgaagtaggcccttaaactagcaagtatatgagacctgccttagcatttgatcactcagcgactactcaaagagagcacttggatcacaagtattgatgtgacatatccacattcaaaatgactaatgctttaggatctgagaaaataacatagcacataaagagaagtagaggtttggaactgtcaacagtatcttctccacaaccaaaaccaatagtaagatatactagtaactatatgagtgccttgcatgggaaacacatgcgggcttaaagtatactaagaagaccaaaagagaggaccaaactttgttcttataacatttgactctgtgaaacttga

SEQ ID NO: 42558 - DNA, 462 bp, Arabidopsis thaliana landsberg
cacgatccaatctcaaaagaataatatataatcggcttaaaattcgaaacagtaattaaaaaattttcacatcttctactccgagaaatttgggttacagattagaagagaccttgtcataattactacccagtaattttatttaattaccatcacgtggttaaacaaagatatgtcgcatgctaacttatccgcgcattttagctattttccacttaaaacatactactgtttactaacatacgctgagagttacagttcacacatcttttctcttccttcttcttcactgtatattaagaacaataagcaatatcagttttttttttcctctgatcgaagccgcgggaaagttataataatataaagatatttttcgtgagagttgctcgtttatgggagaatcgtgtcagattaatttctatttttgttggtttaattttccatttttaatttaataat

SEQ ID NO: 42559 - DNA, 520 bp, Arabidopsis thaliana landsberg
aactgcatccattagcatccctccctaatcttggcttatttgttaatttcatgtgcgttttttctcaatcaatgacgataatcatgggagatatcttacttctaataaattttaattcttaacattccctctcaaaagaaacgaagagtttgtcttcttttacatcgttgacaattcccggttgtcttgtgtttccgaatggaaaatcatttgcatagaactggaagaccacgtgtcaaaccaaccaatcatgattattgcatttttggcagtacgcacgaacaacttttggtcgacacattatgattaattttcgtataccggaaaagtacaagctaattagatgcaggaaatggcatgcattcgcatttgcagctggttatcaatacaacatacagttacgattactagttattaaagtatataactctctctgtatctctctatactttggttgcttctcatcataaaagttgccggtacaggtacaagagagggggtcgaaagcgcgatgcttttg

SEQ ID NO: 42560 - DNA, 962 bp, Arabidopsis thaliana landsberg
gtttttagtttacctccgagtgttcttctcataacctctggttagatctgatgatttgatgaagatcagtatccattaattcagtagagatataaacatcactgaactgtcttcttagtggtggtggaacaacatctcttatagctataatctgttgcaataccaaatcaaaaaaccctaatcatgatttatttactaatttctacagatatttcacaaaatcgaacaaaaacactaacgttttcatgatcaagatgacgaagaagcttgatctcacgaagcgtacgcttagcatccatatgattatcaaaagcattagctatcttcttcatcgctactagctcgttcgtctccgtatccaacacagagcttcacaaaatcaaaatccagaaattaaaaactccgatctcaaagaataaaacttaagaaaaagctcagagaaggaaacataccaaacgattccataagctccacgaccaattggtataatcggaggacgatacttagatgtgatctcgaataaactaccgaagatatcgtaacttatgaactgtcctccgtgagtttccaccgccggaaaatccgtgtattggccaccgccggtgttcatttctctctcaattgatcaaagtcgagattcagtggttgctttgaggtttgaagtagtgaatctgaaggtatttgtatggttttatataacagtcggagtcaacagagagactgagattgaggattgagcagagatgagttttcgcggtaattgcgaggaagaagatgaagaagaagaagaagagagaagagggaaaggcagagaagatcgtgtggttgagattagagccgcctcaaatcgacggtttctgttcgttgttgacttcgtcaacgttcttcctcttcaaaacgtcctttacagttctgtatctatctatctgccatagttaataaggacaataatagtatgggat

SEQ ID NO: 42561 - DNA, 2033 bp, Arabidopsis thaliana landsberg
tattaacttcctctgcctattctcatactgggctttatttcactgagtagatttgcaggtgatatcgctgagattggtatcattagagcaggagaacataagaaagttcaagtagttctaaggccacgagtgcacctggtacaactctctgcatgtaccattttaagccttttgcgcatcatgccttgtaagctaattaccaatactttgttgcttttaaataggtaccgtaccatattgatggaggtcagccatcatacattatagttgctggtttggtgtttactccgctctcagaacccctgatagagtatgttcttctcggcttgctaagatgcaaaagtaaaccgaaaccttcttcactatttcccaaatgcctaactgtttcctcctttttttaaatgtataaccagggaggagtgtgaggataccataggcgtaagctcactctactaaactgtctcttagtttaatttgtgaatccactataacagtttagtttttccttccgatttgcagttgaaattgttaacaaaggcacgctactctgtggcaaggttcagaggagaacaaatcgtcatcctatcacaggtaatccctcggaggataatgagttcttaattcaatgtgcattttggtgagtgcaacaataatttaataactaactcactcgacgagcatatctataggtattggcaaatgaagtaaacatcggctatgaggacatgaataaccagcaggtcctgaagttcaatggaattccaataagaaacatccatcacttggcacatctcattgatatgtgcaaagataagtatctagtttttgagttcgaagacaactatgttgctgtgttggagagagaagcttcaaattctgcttccttgtgcatcctcaaagattatggaattccctcggaaagatccgctgatctgctcgagccatatgttgatccaatagatgacacccaagcgcttgaccaaggtattggagacagccctgtgtcaaatctggaaatcggctttgatggactggtgtgggcataaaatattcgaaaaggcgtccgcagatggaaaccactgaaagctcatacagcttccccgaacatatgggaaagctttcagcttcatcctcattcataaggtcttgtgctgctcaaactcaaagtttagtgaattctttcttctttattcaaacctctatggattgagtttaatagaaagttggccatgagaatgctcggccattgtgttcagatgaatgtatactgctaaaagcattgccagaatctcgacaaaagtcaacaaattattcagtgtctgattttctatgagaaaatgaaatgcagcaatgtcttctgtgactgtaatatatatatatatatatatatatatatatatatatatatatatatatatcagtgaatcggtgcttcctttttaccaattctattgtcttcatcaactgacaataaacctaagattgttgcagatcaggaaaaagcatagcaagttaaaagctggcactcatttctatatttgagggaagagcttcacgggactctactttgcttttttaataactttttattcacaaaatcaaaacatacaaacactccgacacaaatcaaaacccgacaaatccatatttcatgtgctctgccctaagccagaggtccacaaccaaacccaccaatcttgtcttttacctcctctatagctgtatacctttttcttcttcagtttcttaaggtctctcagaaacattctcagagaagcagagagagacattcacagtaaccatgtccgtctctctgttcactgccttcaccgttctctcactctgtttacacacttcaacatctgagtttcagctgtccaccatatcagctgcaccttcgttcttgcctgaagctccatcgagtttctcagcttctaccccggccatgtctccagatacctctcccctgttccctactccaggttcaagcgaaatgtctccttccccgtcggaatcgtctatcatgccgacaa

SEQ ID NO: 42562 - DNA, 789 bp, Arabidopsis thaliana landsberg
aataatgttaaataatctgtttttactttttatttttgttttggttgattttcttcttattttgtttatattttttattatatatcaaaatataattgatttgactgacgaatatgacaatcacgctagagcatccacattagttagaacccctcatgggtttctttaaaattaaaagaaaaactatatttatgatctaattataacattacaagtgttaagagagatgcttaatgagagattattgtatcttcctcaaaaaaaaacctctctcactcttttctcacagtcacaattctttttctttcttcaataatttaatagaggataccacctccaatggaaatgctctaattagaattttcaaaaagtatcaaatatattaattaagattttacatcattcatttttaaaaaaattatagagtagactttagcaaaaaaaaaacatattactcaccaccatatcattattttcttaaaccaaattctggacaaactctatcaattaaaatacagctacaacactaaacaattaaataacttaaaaagaaaaatcaaactaatttataagacgttgaaacattaaacaagtgcgaaattcttttaaaaaattgtaggtgatggagaccaaacagtaaaaacttacacctcaaatttgaatttaaagtgtttgtgtaaaacagtttttagttttacccccaacaaaatcaaatcaatcaacaacaaaactaatgatgctaaaacctataagagccttcacaacgggggaactctcttactcatttta

SEQ ID NO: 42563 - DNA, 616 bp, Arabidopsis thaliana landsberg
aaactaagttaacctaattcttgtaagcaaaatttcaaacgaactaacacaacatgatttttgtaacatgtcataattgtaaaagtaagagaggagacgtcttattattggaggtaaagaagatagacaaactgttgttttagtcgttaggtgaattgtctccatgtgatttagttgggaataatcgggcttctttactttatgttaaaaaatatgtctcgaaatgtccttatctgtaacaataaatgggacagctaaattttccatacacatttaaaaaacaaaatatcactactaaaacctaagtatttatacagtacttttaactaatttttgtttggggttatcgaatgtctaacactttgtcggaatcacatctaaaaaaaaatagtttaacgaagaaagtacttctcagaatctgcattgcttctgagcacataaaataaataacttaactataagcatcaacacactttgtacctatctttttcatttttcaatgcttttaccaataccgtttatttttccctttctcagttagttttcaatacaaattaagttaaacctaaactaatatacaaattatatgtgtcgatcaacattactattgtttata

SEQ ID NO: 42564 - DNA, 1635 bp, Arabidopsis thaliana landsberg
  unsure (1)..(1635): unsure at all n locations
agtaaactaaatttttttccaaaactaaactaccaattatatctctctagttgactttgtcctaactcctaaattatttttctaatttaatatagaaatctgtttttagtttgttgactatatattatgagtaccgataaaaaagttaataaactttttaatcttaaaaatactaagtttgtgcaagtcacataaccgacttttgattaatttttggagttatgaggtgtgttacttcgtttgtagttttctgcattctcatgttttttgttttgaacatttttacaggtacgtaatatcttttgagttttattacttattcatgaattatggttcctattaacaaatatggtgttgtaaaaaattcgaaatcttttgtttatgaactctttaattagcttaaaaaattttggattctctagataaattatttagggaatttggtcaaaaatatttatctatatgttgtttttatttttcctttggtggttgcttgaagcagtagaagtggaggcacaacgattggttcctctttgtaaaacaattggttatgaaaatcctggaaaatgtcctgctgacggaaacaagttttgtcgccgcaaattggatgatcgttatgtaaaatataagcgttgcgattgtcaagataccaaagggcgaaagcaaacccaccatcgctgcatatgttatatgaaacttccttgcaatcaataggttcggataaaaatatatttgccaaaaataagagataaaggacaatatgtatgtctgtctattttgatttgtttctcttttcaaatatagttatttttgttttctaatatatgttcaaaatgtattatgtttatgcttcggtcgatcattttgttgttcagtttttcttgtatcatcggatcttttactctttatgggatttatttaactatgtaagtcataaaactctagtgataaactgataattatataccttttagttattgaagatggcgtttgaaaaaccttaataggaggaacannnnnnnnnnnnnnnnnnnnnnnnnatatatggtgttcgcttatttatcatagatatctatttttagagtatttattattaatatatatatatatatatatatttatttatttttgagtaacaaaaaaagtataagattattaccaaagtaagaaaaacacgaagttccaacaattgattaatttttataatgaaatctgttacttcgcgtatagttatgtgaatcatgtcaaaggtaatttataattcttttttagatttgatgaattcttattgaaaaatcagaagtgaaattgtcaaaaactttttattatcaatcgttgagctaactctttatctacaattaaacttcttcctttttttttggtggttgcttgcaaataatagaggtgaaaacacaagatgtgttttctatatgtaaatttttcaaccaatacgctggaacttgtggcgctaatggaaacaacttgtgccaaggacaaatggggacgcgtgagataaaacgttatgctcgttgcgactgtaataacatcagatggcgaaagaaggagtaccatgagtgtacatgttactctaggcttccttgccacccatagctcgaaaaccaaaatatatatgtc

SEQ ID NO: 42565 - DNA, 545 bp, Arabidopsis thaliana landsberg
  unsure (1)..(545): unsure at all n locations
nnnnnnnnnnnnnnnnnnnnnnnnnnnnnnnnnnnnnnnnnnnnnnnnnnnnnnnnnnnnnnnnnnnnnnnnnnnnnnnnnnnnnnnnnnnnnnnnnnnnnnnnnnnnnnnnnnnnnnnnnnnnnnnnnnnnnnnnnnnnnnnnnnnnnnnnnnnnnnnnnnnnnnnnnnnnnnnnnnnnnnnnnnnnnnnnnnnnnnnnnnnnnnnnnnnnnnnnnnnnnnnnnnnnnnnnnnnnnnnnnnnnnnnnnnnnnnnnnnnnnnnnnnnnnnnnnnnnnnnnnnnnnnnnnnnnnnnnnnnnnnnnnnnnnnnnnnnnnnnnnnnnnnnnnnnnnnnnnnnnnnnnnnnnnnnnnnnnnnnnnnnnnnnnnnnnnnnnnnnnnnnnnnnnnnnnnnnnnnnnnnnnnnnnnnnnnnnnnnnnnnnnnnnnnnnnnnnnnnnnnaacacgcgcacgccgctgacaaaaaaaggccgctctcgagcggccttttnctttgtgcgtcgaaacccgcgatcaaccacagattcacagatttccagaagcat

SEQ ID NO: 42566 - DNA, 306 bp, Arabidopsis thaliana landsberg
aatattatactgtagggggggcggtttctcttgcaatatcgggccagtctacctgactcgcttatgcactctcgtatcataatacatctgcttcaatttatctagacaactattcacaggttaacaaaccttgtccgtaacaacacaaaaaacattctaaccccacaaatttcattctctgtcgctctacgtttcaatcacaaatctcacacataatcttatgagtccgccgacatcctagacttgcggtcagcatattgcaagatctacatacagagtagatatattctcagcatcagatctatg

SEQ ID NO: 42567 - DNA, 917 bp, Arabidopsis thaliana landsberg
acatgcaggcaaactgagatgcccgctgagctgcgctgtcatggagcacatgtgcacccaagtacggcaaagactgataactgcgccatggatacagtcaacacaccccaggcacagccaaattcagtagcacagccagcactggcctctgttattagctcagcgatgcccaggcatgattcagcgccagatgagcgacatgtatccattgctccgggcacccataatgagcaggacacctcaccagtgggtaagacccaatggcctcatactcataccaacacccgtgcttctgctcaggcgcacagcaagccaacacagcaacctaggcaagttacaattgacagcctctggcggcgggcaacagcctccaagcatgaatgcccacttactgagcaggaaaccaaacagcctaagcgccctgctaattatgcctgccatgacagcacccctgacgatggtgatgcacaaatttctgtgttgacgtggaatgccatggggattaccaccgtacaagaggagctgaccatgatgtgcaccgaagagaagcctgacgtggtcgtgctgagtgagaccaagcttatcccgcagcagcatggcaggcgctggctgaaggacatgctgccggagtatcgcttgtactacagctcccaacgtctgccaatgaagtaccagcaccgacagcactatagtcgttgtggttctggcggtgtgctgctggcagtccgcaatacactagctacacgttgcactattgtgcaagagatgggttccccggcagagctgacaggctgctgtctgtccgtcaagatcaccccggcgcatggcacaagtctccttgtctccggtgtgtatcttccccacaacaatgttggtgtgcgtgaggctgccctacaacaccttggtcagcttacagt

SEQ ID NO: 42568 - DNA, 468 bp, Arabidopsis thaliana landsberg
tgcgtctgattgctacttcttcctcacgaaatcagtctgccagcatgggtcgtggctcctctattgtacccgtcacatctttcaaaggaaaacagagttttggtcgtggtgcatcagccaatcatgtcgcaaatatcggagaaagtacgactgctgcaacaagctcgatgtctggttctcagttaacagaagctgaccgtgtcggaataagtggcctgaacgatgaacaatggaagcaattgagacagatgcttgaagaacgaaatctcaattccaccaataccaaatccggtaagttctttcttgaatcttggatcattgattccggtgcgacaaatcacatgaccggtactcttgaatttttgcgtgatgtttctgacatgcctccgattatgattaaacttcccgacggaaggcttacaacatctaccaaacacggacgtgtttatttaggctcatttttggatc

SEQ ID NO: 42569 - DNA, 541 bp, Arabidopsis thaliana landsberg
taaacaagacagtatttaataagaagattatgattgtaatttacatttaattaaatagtccaaatgcgttgtgctttgatgcttaagttgatgttaagagaatcgttgacattttggcaccgagttctcgaggcatttgttcgtttcaaaagatgatcaaagatatttaataattctaatttctaagttaatcgctgtccatcacatgacaacctcggctgtacgtggtccattcttttaacccttttttttttcttttcaattttctctgttttcaatacataaaaataatcgggatggtccgcataattacagagatagtggatcaattatcttgattacagtggttaaattgtttcgtagatagaaataaaaaggaactttctaatagagttcagtctgcggagagaatatggaaatgtatgcaagatttaaacggacgatgtgaaggtgatgaatggtaaacaccaacttgattgattaggttagaaaatgacatttagtaatatcttgttataaataattcaatagatgactatat

SEQ ID NO: 42570 - DNA, 938 bp, Arabidopsis thaliana landsberg
tcaaaaataattaaaatgtatttattatcaaatatgctagacaagttttgaggtctccgatattggtaaggtcttttctctctctttttttctagattttaaatcgttttaacaaattttaaggcgaattttttagtccatatattttttcctttaattcctctcttcttgattaattcaaccgtcaataattttacttgaatttagtggtgaatttatggaggtaataagaattaatctgtacaaaaaaatagacacctctaactgaccttatttatacttgtaaactcctttcacattttataacttttaaaacatcaccaatttgtgatcagaaaaaaaaaaaaaaaaaaaaccatcatcaattctttaacaacaaaaatattaaccaaaaaaaacatcagctatttattttttatagcatacgagatgaagaaacccagtcaactctccgccaccattctaactatcttcgtgatccttgctataggtttgtatctaaacttattataaccatattaaaataaataagttgtcaaaacaaacgtttttctcttcaaatttaaattcaactatctaatgtcaaatctatatctcacttaatatcgctttcaatacttttatatcttaaccttgccaaatataagatatagagtgtacttgttttgttataagacttaaattactggaaccatgtatttttgaaacttctttatacaattttattgtttccatagttttttaatttttacatgtaaattagtaatataattaaaaaataaccaaacctaattggaaaagtatgtgaataagtctttggagggaatagcaaatttgttccttagtaatgttgacctttgaaaaaccataacgagaagagcgtctggtacatgcattagacaccataattggttagctaggagaacatataattcaat

SEQ ID NO: 42571 - DNA, 583 bp, Arabidopsis thaliana landsberg
ccgagagaaagccatcgctgccaccaaaaccgccacaaagagtctcatcttcattgcctccattgggttatctctaggtggttcttgagaaagcacgaagagattatatgtttagtgttttgtggtgtgttctgatgtgttgtgacttgtggtttatatatacacatagatgcatgtaaggccaactgtgtaattatcactttacagtttgatgaacatcaacacagttaatcattttcgaattgttttaattctttgtatttggtgaggaaaaaaaactatattagcacatcaatctctgtaaagccaactgagatcttagttgaaaaaggaagaaaaaaataaacagttggaaagagtactgcagctgattttagttatgttatcgccttttgttttttattgtagaaatgaatataatatgttttagttctttgtattttttaactaatacagttcatagtaggaacgttttctctctgataataagagtgaaagaaataggaaactgtttgtttttttctgtgaaatgaatagaaaatagataggagaagcaatgagctgtttggaatttgattgatgg

SEQ ID NO: 42572 - DNA, 565 bp, Arabidopsis thaliana landsberg
cttttgtccgccggaggacatccgtggtgctcccaggtgagtccggcgtaggtggcgcccctcactctgtggtcctcttgcttcctatctcgaggccaggagtatagtttcgttattcagccctctagttccagtcatcctcaccgctcttgtattacagttccaatgatgtatgctcatactaggcgcccttctgtagcagtaatacttggtctggtaacttcctatttcctctcttgatactcctctctccctgaactatctcacttttgtgaagaactattttgagaacattgtagtgaaactcagccccctggcaagaactatctcactttgtgtgaagaactttttggaacgcttggctacttttagtgaagcctttctccaactcctacggctcaaggaatggagagaagaatcccatactacctgaaagagaaagaaaaagagattgaggtccctccaccccctcgaaagagaataagagccccaaccttggataatgctgaccttatcagggagaactctttcacacctatgggaaggctcacaaacccattgaccc

SEQ ID NO: 42573 - DNA, 686 bp, Arabidopsis thaliana landsberg
aaataaaactaaagaacaatctaacatgctttcctttgacgggtcaccaaattgaccagccaacatatagatgtggacttacatggttcatggatgaccataaaatgccaaaaaccacactcaatttttaccgatgtcaatgcgaaccgaatttaatattaacccaaacgaaatgattttgtaccggtgaaatcaaaccgtatataaatgatgtatacaacaacactaatcatttaacattaagaatatatatatcgttagttgaatatatataaaaaaatagcattctgtatacatactaaacatatatcatagtaataattaaactttattttatttgatcaaaccgaaccgcacctgaatcagattcgaactgaaccaaaccgaattgaacctcttttccaaaagtcgaaaaaatcaaaccggattgaacagaactggggaaaaaagaatgtccataccgagacatgattttaggctacatgatttctaaaatacaattacgagtagccaattaaaatattacacgtttaattaatcagataataattcttattaatcacctcaaaaatatttacttcctgtttttgaaccgaagagacttcttcttctccattcttgcttcttcttcctcgtcttcgtcgtcttctgtgtacagacatacctccattttatagagagcgaga

SEQ ID NO: 42574 - DNA, 732 bp, Arabidopsis thaliana landsberg
ttccctatgcattccattaatacgataatgaatggtgtgtggcatcatcataactctcaatcattaattaataataccttaataatcaaatacgatctttttttaagatttagagagttcccaaaatgtttaattattttaaaattttaataggtaaaaatttgcaggagaacatccatgtgctcaacaaattggtgagaggttttgttgtttcttttatttttgtttaagttctctctatttatcgtatttgtgctaagcgcttaactcatcgaataagctttggataattcagaacctaaacttttgacattaccagttataatttaatccaaataatgacaaaatattatatctagtttaatttaaaacaacacatgcacacgtaatgtatggcgtcacctatgacgaattgtgttttcttatatttattctttcctttccctaaaaaaatgaatagagcgttattagtttatgatttttatatacatggacggttgcatgacattttttttattactcgttaaaacagtgtcattcatcatatttgacctgtcaaaaactcacgtagcacgttacaaatatatatatgtatagggtcccaatcatataaacagatgcgatatgcatggctcacgttcttggaacgctagagttttttttgaagttttattagttattgataatttctcccactctaacttttttatcttcttttacatataaatatct

SEQ ID NO: 42575 - DNA, 629 bp, Arabidopsis thaliana landsberg
gaaagctttttctttcaccatgagccaccaccatagcataaaggtgatacaagtcattttctttctctgtattgtctcatttcagtgttcttttcagaaaacttacattctctgggataaagtttttagcatattcagagaataactgttataagaaaaagtcgaattttgtgcgcaaaaagaatccctcatgcagaaaaggattttgttttgtctttataagaaagcttaaaagccaaacatggaagtaaaaaagctaaaaatttgatgtggggactaacatataggtctatcatctgcaagataaaagtttgcattttcttatttccacttttctcgattacaccacaaaaaaaaaatgaattttttttgtggttcttgcaacaaaagactaaaaagattttgtttttttcctaaatatttgtgttctatgcatcgcttgaaacttataaacataaatggatatcaaccaaaccataacctaaccgcaaaatgcaaaattgttgcttaatacagaggcaaaaaaaaaaaaaactgaaacaaccctaaaagggtaaaaaaaattcatggaggaaatgaattacatattactaaacagtttcactagaagaactcaaaatgtgaataag

SEQ ID NO: 42576 - DNA, 825 bp, Arabidopsis thaliana landsberg
attatctctttctggggtaaagtctagatttttatgttcttctgatccaaagtttttatttttgttatctgggttttgttctgttctcagtttcgtcacgttttccccttgaaaaaaccaattttgtttttgagtgaagtttctagctactcctctatagctttcaaacgttgaccaaatttgtttgttctctctcgttttcatcgacgactcttgacttttctgagaagttgggtttatcttttgatcgaaatcgacaaaagaagaatctgatctgcaatttccttacagggtatatatatatactcctctctttggattatgggttttggaatctgtagctttctcttgatagtgaatgttctatcttgatcaggaattgtaagaaagatgggttctttcaagggtcatgctttgcctggtacattgttcttggtagttggagtatggcacatttggagctcagttgttagatacatatcgaatcctagttcatttcgggttagagtttggcatcctggtcctggtttcaatgataggatcaagtacttggagctttacgttgttactattggctcgttcattgacttgtgcattgagttcttgtattcaactcatctcaagttctttgttaatggtgttgtgagtccctcccatatgaatgactttgagcactctgggatgcttctcatgttcttcatcctcggatttatcgctttgctctccgagaaatcaaggtattaaaaatgttttgattaatgataccatttatggcaatgatagttatgggttggatctttggtgagttgagaaatcaaaagttgt

SEQ ID NO: 42577 - DNA, 362 bp, Arabidopsis thaliana landsberg
  unsure (1)..(362): unsure at all n locations
ccacaccccccccccccccccncccaccccccccttccccccgtttactctcccaaacaccnccccccccccccccccccccctcccccccctcccccccccncccccccccccccctcccccctcccccccccccccccaccctccctcccccccccccccttttctctttgtttccnccccccccccccccccaaaaaaaatccccccccccccccccctccctccccccctccccccccccccccccccccccccccccccccctccctcccccccccccctccccccccccccctccccccctctccccccccccccccctcctcccccctccccccccccccccccccccccccccc

SEQ ID NO: 42578 - DNA, 186 bp, Arabidopsis thaliana landsberg
agaggatcaacaggtctttgtctgattctgattctgatattattgtggttggagattgtccgtttctggaagaagaggattctccatttgtgccatcaaaaagttataaagtgattgtaagtatagccttcaatcacttttgcttgtttttcaagttcctcttttctatttcagattttatgtatt

SEQ ID NO: 42579 - DNA, 502 bp, Arabidopsis thaliana landsberg
  unsure (1)..(502): unsure at all n locations
ccgcgcggccgcccagctcgctgcgcccgaccttgtgcaggatcaccggcttgccggcgcggtgggcggccgtcagggcggcgaggaagctgtcgacgttgcggatggattcggcgtaggccatcaccacgtcgacttccggcgactccaccagccagccgatggcgtcgcccagggtgacgtcggcctcgttgccggtggctacgcagatcggcgtgcccagcccgcgctgccgcgccaggcccagcaggtgcgcgccgtaggcgccggactgggtggcgatgccgacgcgcnnnnnnnnnnnnnnnnnnnnnnnnaggctggtggagaagaaggcgtagtagcccaggttggcgttgaacacgcccagggcgttggggcccagcaggcgcatgttcgcggcgcgggcggcctcgaccatggcttcctgcatcagcacgccctcgccgcccacctcgctgaagccggaggagaacacgatggcgctgcgcgcgcccttgcg

SEQ ID NO: 42580 - DNA, 731 bp, Arabidopsis thaliana landsberg
gggttgaaagggaaactttctttctttcgtaatgaaaactcgttgggtgaagcatttggttgtagttttcctcttccggttcccaataaaaaatccacgttgaacatttgttggagggatatattgtgaagcattttgtgatgaacgccattgtggagcatttgatggtgaactccattggggcacattttgttgtgttcgccattgtggggcatttgaaggtgaattccattgcggagtagttggaggtgaactcaattgcggagcagttggagatgaactccattgcggcatactagaaggtgtaccctattgtggtgcagttggtggaattgtccattgtggaacatttgaaggtgaattccattgcggagcagtaggaggtgttccccattgttgaaaaccatgaccccattgactaaactttgacccgaagaataattaccaccaaaagatggatttccaaaagaaaaaccgcttcccataggactcccaaaattttgtcaagagactaaccgttttcccacatattcattatctcgtgtatatccagtaagagcttgtaaaaatttcagcttatcttcgacgggattttcagatgtattaatgaagtacttacgccaaaaaatttcttccttaaatgcatgaatgcaagcccaataaaaatcagtgtcattcggaaggtccattgattcaaatatcttcatagccatatcgaattagttgtaatc

SEQ ID NO: 42581 - DNA, 688 bp, Arabidopsis thaliana landsberg
gggcccgttctttttaaaaaggacaaaaaggttttcccacatggtattgttatcgttttggttataggcttcttggtctacatcgtatggccggtcatgttatggattatcaagcagacaccagaaggcaggttggttaaagatgtctacatttacttggttatggctaccgcatattttgtttacatgttttggcttaatttctttcaattctcaacatatggctggtttattatcggtttggctaccccggctgggcctccactcggatcggctctcattcaaagatttgaatgttttaacgttggtgttttgttgccgctctttggatctcttagcatggaacaactagatatatcgtggttgatgcgagagatactgaaccttaaacacatggagggcttcgcttatgaagctatttcggttatcttgatcgtcaccgtggttaaatttgtcgtcacagcaataactgcttttgctgtgagaattccataccgagactccattgttttagccatggttttgtcaaatagaagtatctttgagctcggctacctcggctacattgtcgaacttaaagtaagaactcaattatgtttcaatccttccattttttttttacatgctacaaatttaggggtgttcaacacgattttagctcggtcttagtttcagattttccgttaat

SEQ ID NO: 42582 - DNA, 500 bp, Arabidopsis thaliana landsberg
acagatttttggggactcaaccagcagattaatgctgttcacatgtaaggatcatttgccgttacggcctgtttagccgcgtatcatgctaaaattaaagcgggatcggttactaaagttgtgttatatatttcgtagtctactcttcgtagtaccaacaaagctcatggcacttttttaggtttttttttttatgtgataggcttagcataataacatttgaccggtatcttatatcttatactataatgattagcctatgatgatatgacactttatcctctagtttatccctcgggaaataatttcacaagaaaaaaaaatggttataaagacttttctctttaaatgattggagccttttcatcctcaagtttttgaaaattattgatttcgatgattggaattgtaatgtataaatctataatcattgtaatcattgggacatattctccttaacatatatatcaatcaaccatgggtctcgatatacagatttc

SEQ ID NO: 42583 - DNA, 1007 bp, Arabidopsis thaliana landsberg
tccgaaagaacaacagtgaatcacattgaacctatgttttcagaccttcacccttttttattactcttcctacatcgcctggagtgcggagtatacagaaacgtgcttgacgattctctcttggtcatgaggaaagaggttgtgagcaagaatatcgtaaaggtttcatgtggggaaaatagcatgacatggtttgtggcatcagagaaattaaaggctaccaatcttcgtgatgatgttcagacaacagaaatttccataggattcactcttgacatgctggaagatggaacttacagatcatgtatgattcaagaacctgtttttgcttttcttcctctaagaacttatggtttgaaatttattatacaaggggatttcattcttacatcatcaagggaggatgttgatgaggatagtccttggaaccagtggctgttgtcagaatttccgggtttgtttgtggatgcgttaaggtccttttgcagtcttccttctttcacccagaatctgggtaaaggtgtctcctcatacatgcagcttgtacctctcgtcggggaagtgcatgggttcttttcttctctccctcgttctattatatctagattgagaacaaccaattgcttgctgcttgagggagacggtgaagaatgggttcctccttgcaaggttttaagaaactggaatgaaaagattagggttcttcttaaggatggattgcttcaggagcatcttgctttgggctttttggacaaagatatagttttgtcagattccctgtcaagggcactcggcattgaagactatggaccgaagactttggtgcaaattctttcttcattgagtcacaagaatggttgtctacaatcaatgggctttacatggttatcgtctattcttactgaactttacctactattccgttcttctgggcatggtaatgtagagttaggtatagataagagtcttatagatgaccttcacaggatcccatttattcccctctc

SEQ ID NO: 42584 - DNA, 712 bp, Arabidopsis thaliana landsberg
accaagaatcaatgttaataactcaaaaacattttgttttcattatgtatcgaatcgatttcgtatagggttttggtcgcttacacaaaagccggcgtgtgctgaaacttagcggttaaagtggctttaataggaacagtaccaatggtggccacaaccaaggtctttgtctctttgtttagtgacattacaatggctgcagctaaagtagccatgaatgcaaatattctcagccccaagagtagtttccagctctttgtggtaccaccagccaccacaatcttctctctggccattgttgatgcagtgagtgatcaagagagtgatgaaactttgtgtcagtgttaaagagtatttatatggaaagagtttgagtttggtcttgttgagaggttttgtcggatcatctaactttaatgttcttggagggtactgactgattaggttatggttgttgtgacaagattactgcaaaatagatttccagatttcaagacttgctctaagacaagtcttatctaccaaagctaagaccagttcttgtgacatgtagcatatctcatccacggaagagacagatttcaaacccaaatcttaatgattggttggtgtatcagattatattcatacatacattaacaatgtcacaagggccgaaggagttttagaagtccaccaaccgaagaggaagtctcagttccaatgagcaaaa

SEQ ID NO: 42585 - DNA, 491 bp, Arabidopsis thaliana landsberg
aacaaccaatgcgacaaaaagtagacgttattgttattagcttttcacttatggagattaggcccacggccaggggcatgggccttccactgtaataaaaattaaaacttcgaaaacacacaaaaaaaaacaaagcaataatggaatcgaatcattcaccagaaacccgcatgaaagtttaacaaacaaaacttgcttaagtgaaaataatggtttgtacactcaccgaagttagatctctctgtttctttaccttccttgaaaacttacaaacaatagacagattcgtccaaagaaagagtagagagaaaagagagttaaggttgaagatgagagagaaaatgagagctggagatgagaaacggtcagagaggagaagaagaagaagagagtaatgtgaaatgacggaaaaggacaaaagacagagagagtaaaaaagcaaagacgagcattgggagattcaaattgagttttcctaaaataccctttaa

SEQ ID NO: 42586 - DNA, 572 bp, Arabidopsis thaliana landsberg
tacttgcaatagaaatagtctggggctgagttagctttggcagctaactcccttctgttgagaataaccgagaaacaagttccagagctccccacataggtgcatcattctgtttttagacccacaaaacataaaacttttatcagcaatttccaggttgtgaaagatcatatataaattgcgtatggaacttacaagataaacaagatcaaatgactcgcggtagctctcaagactcttctcaatgttatcgttcctgtagaaataagattagtagttatgaggagaccgaaacagagaggaggcaaaatagaagaagagaaaaactcacagaaacccaatagatatccgagtctcataatccagtccatcagacatccttaaatcccccaaatgatctcccataagcaaaacattccttctctctttcatgtttacattttcttcatcttcctcaccaatgtcaacaccaagtcgatcatgaagtggagcagccatgtataaagcatgttcgtttttgtatagcacgtgaattagctttcctgtattgtaaaggtaagagactatagttg

SEQ ID NO: 42587 - DNA, 147 bp, Arabidopsis thaliana landsberg
acgctatatcgcaggacttctcccatgtgcatacatttaaaggtcatcaggataaagtaatggccttgatacacatcgagggaacagaaccagtatgtgttagtggcgatggtggaggaggtatctttgtatggagcactacttttc

SEQ ID NO: 42588 - DNA, 302 bp, Arabidopsis thaliana landsberg
atctcattgatatagctgataaatctttacaatgaagctccatgcatttcctttgtttctgatcttataacctattgagtttatttatcatcgcatgattataatgtatgtaagtcatgtacatattattattccatgatgcttaaaggttatagtttttttttcctactctctgtataaaatgcctgcgtgttaataactttaatcaaaaactctgaatatatattggtatgaagctcttatttttatttttcttgaacagaaactaaatccaaagcttgtgtacgaaatcaaagtgcatg

SEQ ID NO: 42589 - DNA, 473 bp, Arabidopsis thaliana landsberg
ccccccccccccccccccccccccctccccggtaccccaaaacccccccccccccccccccccccccccccccccccccccccccctcccccccccccccccccccccccccccccccccccccctcttctccgtacgccccccccccccccaaaaaaaacccccccctccccccccccccccccccctcccccccccccccccctcccccccccccccccccccccccccctcctccccccccccccccccccccccccccccccccccccccccccccctcctcccccccctcctcccccccccccccctctccccccccccctctccccccctcccccctcccccccccccccccccccctctccccccccccccccccccccccgccccccccccctcgccccccccccccccccccctccccccccccccgtcccccctctcccctccccccctctcccccctccccc

SEQ ID NO: 42590 - DNA, 746 bp, Arabidopsis thaliana landsberg
atcctttactactaacctggttagtacgtgtccaacgaagttgaaccggttcctctgtttactattatacatttttcagcggagatggagaaggttataagagtggtggtgataaaggagataaaaggagctcagtacggagtgcagctagagaatacggtgagagatcgattggctgaggaggataagtacgaggaagaagaagaaactgagctcgagaaggtcgttggctttttccagtctaagtacttcaaagctaattccattatcacttaccatttctcagccaaagatggcatttgcgaggtaaaaatctatcaaaatttcatatatttttagaaataaagtacgttaagtcatccataaacataagcatcaaattcttgtggaacagaggaactctgttttttgcgttatacagtataacttatactaatgagaatttgtttgaaagagtatatgttttagtttcttattgctagcgtacaaaacaatcaatgtcctaaaataattctttattgattggtggaagatcggatttgagacggaaggtaaagatgaggagaaactgaaggtggagaatgcgaatgtggtgggaatgatgcatagatggtatttgtccggaagtcatggagtcttaccgtctactattgtctccatcgctgattcaatctccgcagttttaacctaagaaccatggccccatacataaaaatttgaatgtgtgtgtgttttatgtagcattt

SEQ ID NO: 42591 - DNA, 550 bp, Arabidopsis thaliana landsberg
ccaaagattgagaaatcgagacatgttgagatgggcaacgatttacctgatcatggtgggatagtgaaacacagaaatctgctcaaaccagaagaaaacaagctctttactgaaaagcctgcaaaacaaaagaaggaattgctctgtgaagagaaaacaaaacgcattcaaaatcaacagttggataaaaaaacacatcagaaagcagctgaaacgaaccaggaatgcgtgtatgattgggaacaaaatgcgagaaagctcagggaagctcttggtaatgaaagtacgctagaggtttccgttgaattgaatggaaatggtaaaaaaatggaaatgcgtagccaaagtgagacaaaactgaatgaggccttgaagaggatggaggaggaaactaggattaaagaggctcgtctaagggaagaaaatgacagaagagaaagagtagctgttgagaaggcagaaaatgagaaaagactaatggctgcgttggagcaagaagagaaggaaagaaagattaaggaagctcgtgaaaaagcagagaatgaacgaa

SEQ ID NO: 42592 - DNA, 1123 bp, Arabidopsis thaliana landsberg
  unsure (1)..(1123): unsure at all n locations
aatgctggctcgactgctgcgactgctttgcttataggtgataagttgattgttgctaacgttggtgattctagagttgtagcgtcaagaaatggttcaggtttgattattgttctttctagatttatttaactggtgtttaaggttttggatatgtgacggctctttgtttgttctgtagctgttccactctctgatgatcataaacctgatagatcagatgagcgacaacggattgaagatgctggtggctttattatttgggctggtaaagtttctacattctctcttcttatgtttgctttagagtgtatgtgcaatgtgttttgggttgtttagttattagttgttacttggaatannnnnnnnnnnnnnnnnnnnngtggaattcttgcggtctctcgggcttttggagataagcaacttaagccatatgtgattgcggagccagaaattcaggtacttagatggtttactctcttgttgcatggccattgagcctctttgttcttnnnnnnnnnnnnnnnnnnnnnnnnnnnnnnnnnnnnaggatataagcacattggagtttattgttgttgctagtgatggactgtggaatgtgttgtcaaacaaggtttgtttccagataaagctcttttgaattcttatgctttactctatgtatggttttgcaaatgcacatgttgtctataaccattaacaaggaattgagtacctacctaaaccacattctcgaaactattttgtcaggatgccgtggcaatagtacgagacatttcagatgcggaaacagcagcaagaaagcttgtgcaagaaggttacgcacggggtagctgcgacaatatcacttgcattgttgtacgattcgaggtttcttgagcaagaaccaaattcatattgttcttgttctatgaatgtatcatcttcagctgttgaatacactaacatatttgggttatacaattgtataaaagaaagatatatttatgagactctatgtcccctaattgttcatacatcaacatgtagttatagctacattctgttccatctggactaaagcaatgatattcattaccaaaaggagctgaaacactagagttacttctaataaagtctt

SEQ ID NO: 42593 - DNA, 696 bp, Arabidopsis thaliana landsberg
gcttgctaatgtcgaaataaaagagaaaataaaacaatacgtggtattagtaaaagcaaaaaaaaaaggtggtgttagtaaattactagcttaaacatacctgaaatggaaattaataaggctagaaaaagacaatctatcaaatattaaattatgttttataaaaattcgtcatcaatctccgatttgtgtcggtccgtaccaattttaatttgttttagcaggaaagcgtgtgcaaaacagtagagaatgtcattgttgagtgacccaccaacaaaaaaagaagttgagaatatcattttaaaatgggtcgaattgggcctactttggcccattatacaacgacccaaaacaaccacggcgcaatctgaaccgtgagatacttagatgagattactttctaaataatcaaacatttagggtcttaattgtgaaataatcatatttgaaagggtttattataataaaaagaaaccagaaaccaaagttagagtgtttggtgcaatggagagagtgacagcatcagcgtcttgttcatcgactcaccttatccacaatcttctccgacatcccaaaccaccgtctccggtctttctcttcctcagacccttttgcttctccgcttcagtctctcaatccaatcaccgtaacaagcctcgatttcaatcattctcctcaaagccgcttccttgtcaa

SEQ ID NO: 42594 - DNA, 676 bp, Arabidopsis thaliana landsberg
accctagagtttggctaatgaaaataagcacaaaaaaaactgtgatttgtcaaccaatatagattcaaagtttgttgagcaatcatcatccatacgagaaatggtgaggtcgtgccatgttccacacactagctgtgtagtgtacatgttccgttatgctctcactatatttttattttctatttttcttattaataattgttgctcgagatataagaaaaataccataatgcaccaaataccccatagaatatcaataacaacgatgaaatgtgaatttcaagatgtgacacaaagagcaaaaaggaaaaaagggagaagaaaaaaaccactaaagaagagattttattttgtgcttttatcgtttaaaattgcccaaattcgacaagacaaataatcttatcttgtccaacgactctcatattccccatacgagcgtttctagtatggttgcgcaatgaccttacccttctttgatgcgttaaggattcgtactcaaaccaaaacgaaagggtatatcaaaattctaattatctatggataatggtcggatatatggtaaattatagaacacaaatgcatattttctattctatgtaacccttttaagccgcacgattccaaattaaattggatattttagtaggtaaaaaaaataagaaagaaatataaactt

SEQ ID NO: 42595 - DNA, 443 bp, Arabidopsis thaliana landsberg
cttttcttatgatagatacgattctagtatacgtttttttttttttagtgtacgatcaatttataaataggcttgatgtattcatttattgtgaagattcatgcaaatctaatctttaagtttgtttgcagtgctattaacggcttcgcacaactagaacctgtattcaaattggaccaccctccattatacaaaacaataatacccaaatctaacataatatcttatcaataatacatatatttctattttattataattattgatatacatactccaaaattgcacaacgtaaccagctagctcattcatctatctttcttactttataaaaatgaaacatcattattattagcctgttagatgttccaaaacttaatatagtttctttgtccaattagatatttacgaaattttaactcatatatatttttttttttctt

SEQ ID NO: 42596 - DNA, 732 bp, Arabidopsis thaliana landsberg
aaccacgcgctttaacctgtcgagtggctgagctgacgtggcgtaaccctctttaaatataacgtaagtggaaaaaaaagagactgatgcagccattagaagaagtcattacctaccaaaaggtcaccgtttccaacttcaagtagtcaagtttctgtttcttaactttaataatctacacaaacaacaatcaaagcaggcattggaggaggtttacttttcatcagagatttcttcatcttcatcttcttccaatatgtacaccaaagctcgtcttctttcagcaaaaacacaagccactcctcttgaagctgtaagaattttaaataattaagcaaattatttcatgattttgaaaaagcatttctagtttgaagaagaagaaaagacagaaaattaagctcttaccgcttactgctagaggagcaatgacagaatgtggtactttgcgaaccttttcattctccatttccaggttcacaatcgagccctggagatgcataagttcttacataaacttcactaattttaaaacaaacgtcgatgttaatgcttgaaattagcaataccttcaaatcctctagctcccactggtttagagaactagatcctgaaatggaaatgaatgcgaggtcaccagtttgtacaaccatcatgcatgcttctcccgagccttcggaatctgtatttgtcttattcaataataaaaccagttctttatcctgtttcaaa

SEQ ID NO: 42597 - DNA, 369 bp, Arabidopsis thaliana landsberg
gtaatacagacataggataagcacatgacacagacctagctgagagagttacatgacgagtctgtacgactgttgtgaaagtattatcgagaaactctttgcgatcgatgagagaagaatccagtctctgtcttcttatacgaactagatctgcaacgataagaagaaaaaaaacgttgttagatgaatatacaagtctttgatctcttaactgtactcaaaattaaattcacgataactgaaattggaaccctaattcaaagaatcagaaacacaaatcttcaattaatttgaagtgaaatcgagtaaatcgaaataaaaaacgtcgaaagattttaaaagaaaagcaatttttgagaatttggaagc

SEQ ID NO: 42598 - DNA, 1264 bp, Arabidopsis thaliana landsberg
aacaagctttcatctgttgggttgtggcccacaacagattacacactagggaccggttaaggagatggggcttctctatcccgcccacttgtgttctgtgtaatgaccttgatgagtctagggaacaccttttctttcggtgtcagtttagctcagagatttggagcttcttcatgagagccttaaacctcaatccgcctcctcagtttatgcactgtctgctttggaccttgactgcttctcgagacaggaacatcacgctcatcaccaagctccttttccacgcttctgtctatttcatttggcgtgagcgcaatcttcgcattcactcaaattctgttagaccagctcatttgatcatcaaggaaattcagcttatcgttagggctaggttggaccctctgtctcggtcttcccgcgtcgtctctcagccaggctcttctcttcttgcctcgtggtttggagtgtttcagcgttcacctgtctctggttaatgtggagtttattttgcaggtcctctgttggctcagcgttgttctccttttgttttgctgagatcttgtcgtccttgggttctctctgggcctcgtcgctggggttcaggttctcggttttttcttgttctgttagatgttgggcatgcgtgccttctctgggcctgcgtgcctgttgtatggccttctaagccttgtaacctttttcgttttattggaaatttaaaaaaaaaaaaaaaaaaaaaaaaaaaatattttagaaataaacataaataaataaatttattgatctgtatgcaaaaactttgaacatcatatattttcaaacagagggagaattcttttgcttaaactgaaatcattgttgctctcattagtgttttttttttcagttgataaacaacatttgaaaaagcatcacaatttcttttgtttaaaaataaaaaccttaagatgagtatacagactctatcgattcttctggaaatccaaccatttaaataatataacattgtgtttttatccctttttagcatcgttttataaatgttattatgatcttagtgttttccaccatttgtggtctcaaacacttaataggttttctagacaaaaagaatgaaaaagaaaacatgcattttggaaatcaagacatattctctacctaaaacgttcaacctccgttgggagacatattatatgatgagaggctacttactaactttctacggtataaataacaaggaatatgtcagaatgttttggtattt

SEQ ID NO: 42599 - DNA, 895 bp, Arabidopsis thaliana landsberg
ttgatccgataagtcataaccacctacgacaaaaaaaaaaaaaaaaaagtcataaccacctaaaacttttaaaactcattgtctaatattaaaatagttcttatcgaataaatttttcattttagaactaaacaattaatgtaaactagactcgtcgttctgtcattactctcatcatcagttttttttttttttttgattcatattctcaatcattattgatagcaaaaaaaaaaaatatataacaagaagtacgtacaatccattgttgtataattaggtcacataaaatttacaaaaagtttgtttgtctttctgtacactacacataaactcggaacgcataattctatctatattgacacgtcatgaagacgtgtcgtaaagacttacttggatatgacttctttgtaagttgcaatgaaactcgtggttaatgccgccaaatctgaaattcttggaaaattcttcgaatatacctttttaatactcatacatatatacattttctcacataacttaatccatatttgaggtttccaccgaatcgaaatgttacaaaattaacgtatacatgcaaatgaatcttatttttccctcgccgtcgccaatggaaattaatccatcagagaaactttagagcatgcgacttttctctgcatgtatagatgagtaaaaaaaaaattactttatgggaactgaaaatggtcatggtcttttgaccaaaattgatttagattctatagttgcctagttgggataatatcttgagccacaaatgagaaaagttactaggttgattttaagaaataaatgacaactgcttaggtaacgtaaaatcacaactgactttgttactgatatatcaaacaatgggtctttataaaaaaaaaac

SEQ ID NO: 42600 - DNA, 382 bp, Arabidopsis thaliana landsberg
caaaatttcttttttctttctagtaatatactagatatggatgtgttgtaacctttgaagaagcaaggacatctagatcacacatgtgtattgtcatggaccaaattactgacacattagtgcatgttgcatgtgaatagagattaatatacttaccattcacagctggcttggcttccgcattttggtgccaaatgatgagtaatgactgatgacaacgagaatatattgttctactactaatgaattgatttatgtcttttacattttactacataataaacatattcaacttgtacataacattaagttgtgcggaacaatacaaatggaaggttgtgaagcattgagatgaaacacgtattgaaacatatgtggtcac

SEQ ID NO: 42601 - DNA, 839 bp, Arabidopsis thaliana landsberg
ctgcttctgtgctatttgaagactccattttttagtttagaaagaatattaatatttttcaggatggaaaacaataaattaaattctctttaattttggaatatgtccggacccgaaagtgtcaatgtggcaagattttattggatgatggaaaaagagacatagacggaattcctaacggcggtggggtcaacgtaaggtttggctgtctgatacacgttaaagtgactcggattgcgaggagtccacgttaagtctccgttagctactgttaatttggggaatatgctggagagagttgagatcaggtgttggcgagtgcaccgaaaattcgtgttcagatttatgacatcgcaatttctctgtcggtggattacaaactgcaatcaaaagaaaagcatatgttaatctgtcaagtgaatattcgtttttattttctttctatacataatgtatatggataattcaaacaaaaagatgtgtaaaatgataaatatgggtgtttatcgtattttatatagtattaggattcatgcaaaaatgcatggattgtctatgatagtaattttggtaactattatttatttattttttatttttttttttcagctggtaactattaaattagtagaatttaaaataatttatacttttaggattcctatgatagtataggatttctatactattttgatattaggagtttaaaataaattactaacttattattattttaaattattagatttatacttttaaaagtattagatattatatggatttttgttgtttacagctctttttttttttgtatttgaactcgtattataatcggttac

SEQ ID NO: 42602 - DNA, 837 bp, Arabidopsis thaliana landsberg
tggttattatatgggacaaatacaatggaagctaaagctgatgtttggaaactgaaatctatcactacaatctttgacccgtagttttggtttgcaatttgcatgacaaactactttattgggatgtgaacagtattccacacctttttgtaactaacaagtttaaaattcagttaataaattttgttattataaatgctcttataaagttggagactttaagtggatcaaatccaatcaaacctagtggttacttacattacttgagaaatgtgacaaaataaaatttaatttgattattctatcgcctgctgctgctggaacgagttggtaatagaaaacaaattcataatttttgacaagaagaacgcaaaattcgctgatgattattaaacccaaacgcgtttttcaaactcgttcaatcaatttccttcatcatcttcatcttcttcgtaattgacttatcgaacaagattacacctccctttagctttttatgcaaatgtagtgcttttaagcattctctcgatttccctcccttattttccgacaaataccaaaccaatattgttccttttcttttcaatcccagatcgatctctttgttttcagacaatttctgttgtctggattcggttcattgcatcgttctttgtgttgggttcgtttaaactttcgattttcccattttgaaaattttgatttttttcttgtggcagattgattgttgttgtgcaagattcatccgttgcatcgacccgagtagggtttttgcttgttccatcggtgttcggagtttttaaaatcattgcctgatccggagtgaacaaaatctat

SEQ ID NO: 42603 - DNA, 331 bp, Arabidopsis thaliana landsberg
ctctcctaaggacatgaaggccctactacaaccggcacattttcttatgtctgtctaacggcctatatatctgactgtttgttttactaacatggccgctctggcacgatgacgcgaatggtggagagggtgttcatcaggagctgcacattgccgtatttacaggagctggaggacccgatagatgtcctactttagatatatgaaaagatcaggacctgccttgagcactatgaggactcatatcattgtacaagatgcttgatactcactgctccagagtgcttaaaccaaccaaaagtgaatcagcggtatgcctctgaatatctaa

SEQ ID NO: 42604 - DNA, 632 bp, Arabidopsis thaliana landsberg
ttattttatgagcattttgtctgcaaattttaaatgatatacataatagatttttattaatctcaaaatttggttgtgaagttgtatctacttctgtgatgaagcacacctaatcaaagaagagtcaatctcaaaatataagactctttcttacttgtgtcttttcgtagtcatatttttaaagatgtaaatatattcagcttttatatattcttcaacaaaaaaaaaataacaataagaagatttcttatttgtagtcttgtagataacgttctcttctattttttcttttaaaaaaaattatgaagttatgtgtagagattctattatgtttcatattgggaaacatgcacattttccagtccactattctttactctttataatgggtcaaaggtctgccgttacagttttaccttccttactagtttatatatcgcaattgggcagctaacattaaatggctatttcatgcacagtgaaagatggttagacgatcattcggagtttcgccaatgatctacacatgtttcattgatttcttgatatttctgctaattaaaattgcgtggatcacagtctaattcaatgtttatggcgtgacagctgatagattaatcaagcagatgctt

SEQ ID NO: 42605 - DNA, 1708 bp, Arabidopsis thaliana landsberg
atatgcaaaagaactacaaaaaccttaggcatcttaagaaaatccatttgttaattgtaaattgaaaccttagttccaaacgtaagaattctgaattacatactataataattcatcgtaaacatgaatgaatcctcctaagtagaagattaacatatataaaacacacacgtatgtaaatagaaagcttactttctacaacggcaagagctttggactcgacgggaggtggattatgaattttctcatccgcgacttccaccggagcaggagtcggttccttcgccggagctaaaacagccggagattctacgtcaaccttactcgtcttttgctcctccgccattgtctctcagccgaagaagaagaacagattttatgttttttccgtgaaaatggataaaattgagattttaggacaataatgagttaaagagtttttatatcctccgttagcttataccggtggagcgctacgcgcgtttaataagtgtgagactcttgttttgcttcgccgttgatttttgtacccatgtgatcgtgcggctgtaaagctctcatacgcattggatgcgttacacgtgattaaacacacctcactgccgacaagtaaagtggttcaatgatgccacgtcacctctgtagaaaatttgtcctccccttcttttttcctgatattcaacaaaacttaattcttccaattataccgaactaaaattttgtttacatataaatggtttaaaattgaaaatcagattttagctgggatttttttattatgagaatttcaacaatcaaactacaatcaagaaaataaatgatctatattattgctaatcttggcttagctaaaaagttcgtattaaaaactgaatctaaatttggagtgagctcgtatgcctatagaattgacagagtgtcgggtgtgtattaaatctataataaaatatcaatcactcgaattcatttaaacaattattttagttttaaaatttaagtggatcaaagggtgacgtggagcctcactgactggtttacacgctggaagacagatacaaaaaggataatgtctgtgtctcgcgcgtgtacaaaactttccggttatgtggcgcgtggtatatgcaatttaaactggtttaagcatgtggtatatggactatgagatggagacatctctttttgtaggtgttgggcttttgtgaatcctaatggcccaacgggtttttaaatttcctgcccaacttgttttaatttaaagaaaggtgtaattttttttctaacaaagcaataaagtaaattaattaaggctaatcactaatcacagactcacagtttcgaacagcctgtgaaagatgtattaatgtatttgtataataataaaaagtactctacaacatggaattatttacgattaattatctgtcttgtatgatgatgagtggtcgaatatggactatgatgtcactgacctttatttaatgggttaagggttatcttctttcttctttcttcgaagttcggattcttttattcagtttaaagcacttataacaaacttttccaaagaggacttttattaattgaaactcttgcagttttatttttttgtaggtaagccagaattatttttttcttaagaaaactttaaaagggggcttggtattttaagttttttttaccccaaataaaaataccaacggtttaataa

SEQ ID NO: 42606 - DNA, 675 bp, Arabidopsis thaliana landsberg
  unsure (1)..(675): unsure at all n locations
tttgattacgttatgttgcgcaattgttaattaagctatcaattaattagcatggatataattcgttattgttagaatcttggtgtcacttaaaaagtcaaatgtcattttttatactatcacaacaaaaagtcaattttcttttgaaacaggctttacaatttaatgaaaaaattaaggacgccattttgggtaggaaaattgtttctgtcttcttttgtccattttaaaaaatgtcccaaattccacaacattaataagaaacatatatttggtttatgggggtcatatatttccaaannnnnnnnnnnnnnnnnnnnnnnnnnnnnnnnnnnnnnnnnnnnnnnnnnnnccaatgaggataccaattcatatttgtgatgacaaaaagaagaaaaaaaaattcatatttgtcattaggataattaatctactttaaatcggcaataaactaaattatttaatggtgtttgatccaaataccgttggaccaccaatctagagatttgtaaggtactatataataagttattaccgntaattagttgacgtttattaatcaaagggacgagaatctatatggaatntgtataatgagcttattaataagcaatattttatttatatagtgagtttgaaataaggatgaagaatattaaatatttccttgaaacg

SEQ ID NO: 42607 - DNA, 823 bp, Arabidopsis thaliana landsberg
cccaaacatgtcaggattccccaagtgaatccttagtattttacagcaagcttcttcgcttggtgagtgacgatctccatctccgatctcacattcttatccttcatcgactggattttcttcgattcgtcgtaagcacgacggtggcaaccgattaaatacgggaaaggcggttcggcgtcggaaaagtcgccggagagacgatctatgagaactctctccatcaaatcacgagaaagcaaaagctctttaccttcgctgagaatctcagcggccgtcatctccaagtaaacaatacgaggatcggaatcagttgattccgttagggttacataaaatatgttccggaggattatatcctcaatttcagccggcgatctttgagttttgctcgtcgccattgattttacgaatcaaatcaaacactcgaaactcgatttgagagataaatataagaattttttttcttaaacttgtattaccgatgaatcaaaagcgaaagagtttggacttatcaatttaaagtataattaaatttagaaaaactaaaattcacgaaagaagagagaaaccatggcgagagatttggaagaactttctgggagtaggtttttgtttatgaactcttttggagtctctgaacgagctttagcaagtcctgagcttggacaaaaagtctatataggatatatgcaaacgtcgtacttactaacgacgtcgtttatacttattaatacaattacttttactggtcataaaaaataaaaaattaccaagataaactcctccaagattttgttgctcaaaaaaactactttgaact

SEQ ID NO: 42608 - DNA, 470 bp, Arabidopsis thaliana landsberg
acatcttcatgtttgtattctcttataatcaaagacaaagagtttgtatatgatttgttaaaactgaactagtcattttatcaagtctgtttcctctctatactgtacttatgttttatctttttttttttctgtctcaagttatgtttaatctcaagcaattatgttgttgatacaaatggtcttgcctctttggccacaccctgtgtagtgctgtacccaacaaaaccaatgaaagaattcgatctatacaaattgcataccaagcagaaccgttttgtcctaaaccaatcatcaaactagacgacgtcgtttcacgtatgatatttaggtggctgtcccgttcctggaacctggagctttttgttgttgtgatatatcccgtaaaaccctaaacatagtcacttcatcgtctcctccactgtatcattcaatctctgtcttccttctttttagcgacctcgtctcca

SEQ ID NO: 42609 - DNA, 444 bp, Arabidopsis thaliana landsberg
cgtcctgtgacctgtgttaatccatttttgaatagcttctaattcgtttgttaatccatcagcagccatgtgtggatgttggatgacatcctgtaacaaatataaaccacattaacatgttaaaaactctacacgattttttgagtgtaatgcaagttatcttattgtggagtttatatggtctcgcctgtgtgatagggcagataaatgatggtggaggttgttgctcgttcactatctcttgcactgttttgagagcattgtctctctcttgtcgcatcgcatctgcatcttgttcgtactatccggctagctgtttgaaaatctcgagttctagtttcttagtagaaagagcaacctctttttctttcctaaaacttgactcttggtcgtacttggctttccatgtttatcacctgcgatttcaggttcttttgtcctgtg

SEQ ID NO: 42610 - DNA, 602 bp, Arabidopsis thaliana landsberg
taaatatcgcgggatgtgttacagtgctttagtgaccactctctttcaagtttcaaaagttcaaagaattcatttgtatggattttatttaaagcgtcaattattagtgtcatggaaatggaaggagcaaataatttgaaagagcatagtagtataaaatattaggtcttatagaaaacgaaaaagagaatgatccccaatttgtacaaacagcttttgtagcttccgatgagcaaatcattcgtcttgggacgtacacagatttaacttccgacatcgctatcttctaaagtcaaaaaagtttctgtcttgtctcttaatcattttctttctactctttggatccaaacctcttgttacctatttcatcttcttttgctactcataagcaggtttcaattaagggattcttaaactatagtagttaacaaaacagggattaaaagccggcatagttaatgtgtgatagataacttttggtcttgtagtgttcaaattaaacatgagaaattgtcttttaatgattgtctttatcaacccacctccatggctagtttctcatatatccaaaatctaaaaatttattagtcatcaaaatattt

SEQ ID NO: 42611 - DNA, 428 bp, Arabidopsis thaliana landsberg
  unsure (1)..(428): unsure at all n locations
acgagaaagaaataaacagtatagatgaaatacaaacagctcacgttagttgcaattagagtaataaaagtcattgttaaaaataaagaacaaatgtttctatttatggaatttgtgtttctttaactttaaaagttttaactgtaacacggcttcacacctaccattggtccataattcgtgtactcatcttttacataataaacttatttgttaattaatttctctataaagactacattacatatttatttataactttacatatttaaataaacaaaaaaaaatcaaaaatagtttcgaatgttaatattgccaaaaatataagatactattcgtgggctcagttacttatagataaaatgcaatagcttatataagttacgtgagctattgcagtcacaggaataaagntaaatatatttcta

SEQ ID NO: 42612 - DNA, 528 bp, Arabidopsis thaliana landsberg
aatttttcattgcagacaacagattagtgaccagaagcagctaacttgggaggatttttgccttccaattcttttggttaacttagtaagtatcagcctttagtttttgttagactccctttggaaccaaatccacatcaaaaagcagatggttggggacttgggatgatgcaggttcttccacgaggaagacgggcttttgctctgcgtttttgtccagggttgtaagactcatagttattatgatgaaacttcctgaaatgctaggttgagttcgagcacagacttggccaccaaacctcctcttctacacaaagtccatcacataatcatttgagccacatagattcttacacaattaatgagaattatggattcttcagacgtttaccttgctagagagggaaggcatgctttgactttctctagctctacaaagcaacggctgtagcgctcgatcctatattgcagtaacatgtgttgttgagttccagagagtatgctatcaaatttatcacgcacaatggc

SEQ ID NO: 42613 - DNA, 506 bp, Arabidopsis thaliana landsberg
aagctacatcggtgcctcctgtcgcaccgtttgggctctgcttcactagtgacgtagattttccggcggtagatctagcgttgcagagtgagatggtgcggtggaggattcatgggaagaatctgatggtgaatgttggtggtggagtccgatgctcggggattgttgacggcgggtcaagtcgagtcaacccgattgtaatgggtgggctacaattagaaggctttatattggactttgatttgggtaactcaatgatgggctttggacaaagaacacgctctgattcaacttcgttgtaatacagaaacctttgtaattgtaaccttctaattatctggtagatatcctcaattttgatctcttttgagtgtactcttttcttacaatacctgctacaagcaatcacgcatttgtacaactaatagatctaatttaagaaacagctattacttggatgaaggtaaaatacagcgctttaaaactaaaaatcattacaaaaaaca

SEQ ID NO: 42614 - DNA, 1105 bp, Arabidopsis thaliana landsberg
agaatttatatgtgataagacaccacagaaaaatcatatcggtttttcttcttattattttctaacctttatgatcgcaacatagggcttttctccatcctctggaaccaatagcactgagtcctcctatgaagatttaaaaaaaaaacaagaagaagtaaaaatctattagaaatggtaatacaatagatacaatgaaagaagtggagacaaaaataggtttcactataaatatcgtttgagtcttattacacaattgtttttgaaaaagttgttatgcttggcataactctttaaaagttgatctaaacttgatttaaaaattgttgttataaactttcattaagtgatagatcgcatttatagtgacaaaactagtactggtttaagattttcataagatgatatgaaacaaaaaagtttcagatttacatccaaaaaatgcaatatatcaaatgaaaagatcacatacaatttagccagcatagtaaacactcaaatactagataaatgttgtaatcagtcaaatgtcaaaatcttcaaatcagcataatctgaaaagcaaaacaaaactcaccagtccatatttattggcatgaaactgaaatgtcttgtaatgacatttcttcttttctcccttaccagtacacttatgagataatccaattgcctgcgcataatcctccggtctccactctaactttgctttcttattcaaaagcatttcctcactctccttcttccgctttctctgctccatctccacttctttggaggtcaacttcaaatccctcaaacttggcaatggatattgttttttatctttgctcatcaacacttctttcaatagttaggtcaaaatttctttggttaacagctttcttatgcgggttataaaaaaaaatacaaactattatatctatatatatatcctaattagcaactccgttctaataatttcatattaatataagataaatgatgaatgatgaataatttgggcaacctagaaattgaatcaccaaaaacaaattcaaaaatattcagttgtactcaccaccaaggaaaaagagtctttcacaattaaaaaaaaaatactaaaaat

SEQ ID NO: 42615 - DNA, 529 bp, Arabidopsis thaliana landsberg
ctttaaatgaacgagtagttttggacatttctaagtgttgtcttgtgattttctaaagagcaatctacttttcgtacaggaggaagctagatgcattgaaataaaataaaataaatataaagggggagagatcgggaattgaagaagaaaggaataaaagtgttttgcaaaacagttttctccgacaattgctctgctttgtctgatgaatacagaccacaactctttcgacatgaacagtcttctcttttccaccattcgtaacactcacaaacaacgtgcgaaccagaaacactctcaacttgtctttcttttattcctctcttctttctcttcttcttcttcgtcatgatcatgatcgtgatcgttttgtccttaccagataacgaaaacccctatgatctaatcgaaaactacacaagattttgcagatccatgtcaaaagtttccatctttatcgagttttagattcaacagctaacctacgtgccacacaagcaaagctggggattggggagggtttcctggc

SEQ ID NO: 42616 - DNA, 668 bp, Arabidopsis thaliana landsberg
cacatcagctaaaattattggtcaacctttgtttttttggtcgaaataattggtcaactaatatctaatcatcttgcataatttgttgagctcaccaattttttctactttggtctcgtctcataccgtctggttacgtgatatataacaatgttctgtaacttgtaataaataaaaagttgtgattcaatattttaaggccagtgggtagcgatattgatcattagcaagttggagcctggtacaactcactatcgaagccaataataaccaattcccaagcacttggctactgatgattttgtgactatttagccgggaattgactacgcacccaactacatgctattacttgaacttctcccgctcaatttagcttaagtttatatatagcttctgaaaccatgtgtacacaaatcactataatcttttcatacaatggagtgagacattgttcgagaagtcgtgcccaattccagacttcttccctaacaccaaccaaaaaaaagcaatcaaaatttcgctagaatcctaattttcgtgagtaaatcacgaaatcaaaatctttttatttatttattttaatcacgagtaaaaaaaccttataaattaagaagtgagcatggcaaagactagtataatgtacatgttaaactataaatatcttg

SEQ ID NO: 42617 - DNA, 115 bp, Arabidopsis thaliana landsberg
ataacagttttcatcaaagcagaagctcaccactagcaaattgtttgaaaatcagggcttagtttggtgttctacacaatacagaggatgttgattgaagtaagttattgtacct

SEQ ID NO: 42618 - DNA, 657 bp, Arabidopsis thaliana landsberg
tttcaagacagtatttttcagacaagaaacggatcactttcctcaacaaatcaaattggaaaccctgttacgtacaagcttgtgcgggtatgttcatagatgtgtatctctgatttatagaacataatgtttttgctgttcctagatttaagaattctgactagtgcggttacaagttgtagcctttcagtatcttatttgagattggttatgtgaatgtattaggttgcaggcgacgggagtctagttcctgcaactgatgaagagatgttggaggtcaagaatttgcttgagaaaaacgagcaagatatgcctgttttaccagatcctatacaaactgaggaatacattcccgatgaaggttcaccttctcagtttctgcagctagaaaattttgaaggtttggtcctaatcactctaagcatattatacatgttgaatcactcctgtttgagcctttgtcggtttaatttgtgtaatctgcatgtattgttagaggaaagacttattgtatacacgcaaagacggatagaatttccttaggactgcacgacaagggtatttattgggttacttgcaatgtcggaggtctgagcagtgttttatgtgtaaatatgtgttcgtgtctgtagcttttcctatctgatgtctaggaca

SEQ ID NO: 42619 - DNA, 261 bp, Arabidopsis thaliana landsberg
ttatatataacgacggaactatataatcaaatgtattggtatgtgcttaataaatcatttaataatataatatactgaagatgtggagctgagtgcataaactttaccattggctagactatcaaaaagatagagtggaattaacaacaaccaagtccaaataaaaggcagagggaagccaaaagaacatatatatatacgaaagtgtggcatggctataggcttgcaagcacaacggatcttgcaactcaactactggtg

SEQ ID NO: 42620 - DNA, 410 bp, Arabidopsis thaliana landsberg
tcttatatatatatacatgcacttaatgtatctaagtggatcgttcttataagaaactccactgaaagattatgatatagaaagcaaaacgatattgaaattacctttaaagacaaaagtaggagaggttaattaaaagaatcttcttaatgccctggtatgaacttttaggaaagaaggagacaacatagctgttgcgccgcccaaaccaacaaagagagtttaaatctacctagttgttcttcgagtgcagcaattcccatacaaagacctcttcttttggaattgttcagaaacaacctgtttaagttgaatacacgcaccacaactaaagaaatttaaagcgtaatttatatactttgaacctatagatgagttacatgagctgctaataaattacaaagctttat

SEQ ID NO: 42621 - DNA, 435 bp, Arabidopsis thaliana landsberg
tttgactcatgttaattctacaccgataattatataaacagaaacaaatccgttttcgttctaaaccatattccagactagtcccaatttaacaaaattagcttggtgtcatgtcctatcttcgttgtacgctaaaaaaaaaactcccaacattcttaaccaaatccttcatcaatttaaatacgagatgacgtgaacacaatcattatgcttctgggatgcaagcagagaggacattgttgaggaggttcaagaattttaaaaatttataatcttggaagattcttctaggacaagaatctacctcaacaacaactccttaaatcccagacaaaatcatggagttgtcttctctgattgtaccaaataataagaagcattttgtaggttgtgttcataggtttagtattaatcttcaagatagccttaattact

SEQ ID NO: 42622 - DNA, 538 bp, Arabidopsis thaliana landsberg
ataaaagtcaagagaatagtacacgttaccttgttgtgccacaataatccatctcagccagtctgttcaaggcaacactgcagttcatgtaaagaaattaataatttgaaacgaataatctgaaaattgtagaagatgttctatttatgcaatctttgtatcgcataccatgagtgaagcatagggatcgaacacttttcaagaatgctccctataattacagcttctctgagattgcatgtccccgactgaataaagaaaaacccaaggaactagtaagaaaactagtcacattctgaaatagttactgtggtaagttcaggaggaggaatatataccttacaaagcgggaatagtatcccttgattgaaagcactaggcttatatagtgactttttcagagcctggtacagagcaaagtgcagcttcttgtgctttctaatatcctctctcactcgcggaagcaaaacatagctataaaaccgttgaacttgaatgactttcaagttggaagcaaagatccttgaggcttgataca

SEQ ID NO: 42623 - DNA, 311 bp, Arabidopsis thaliana landsberg
gcttcctaggtatttattatacaacaactaccaagaaaaggaaagaacggaatagaaaccttaatctagctagctagtataggtgtaatgtataatgtattaaatgtgcatttggacaggaaagaaaagtaaatgaaaagtgaaagtggtaagtccttacgctttggtggcagcgtagatggcgtagaggggatgagaagggacaacaacggcagcgccggagctaatattgacgatggctccacgggggcggtgaagcattggtccgatgagggatcgtgtacccaagtggtggcttcaagattaaccct

SEQ ID NO: 42624 - DNA, 586 bp, Arabidopsis thaliana landsberg
  unsure (1)..(586): unsure at all n locations
cgattccgcgggggtagacaccctgcatcccctggtttgcgtgatcattttcagcgatctgcatgctatggggagttttcgcaggtacatgggaatttacgccgtttttctgaaagacaccaaatgcggcgacatcgtgtacggcggccagccctatgattacgaggacgggacgcttgtgttcgtatcgccgggacaagtctacggggtggatagccactccgtcaacaggaacccctcgggatacggcctgctctnnnnnnnnnnnnnnnnnnnnnngacgcacctggcaaaagcgatccgggattattcgttcttctcttacgaggtgaacgaggcgctgcacctgtccaaaaaagaacgcaagaccatcgtggagtgctttgagaagatattcgtcgagatccagcagaatatcgacaagcacagtaaaacgctcatcgtatccaatatagcgctgctgttgaactactgcatgcgtttttacgaccgccagttcatcacccggaaccacgtcaataaagatatcctgtcgcggttcgaaaactgttagcgagtaccttaaaccgatagcccgaaccctggg

SEQ ID NO: 42625 - DNA, 838 bp, Arabidopsis thaliana landsberg
  unsure (1)..(838): unsure at all n locations
aaaaaaaaagaaatgtaaccttccttttttaaaattattaattgaatagagagatattaatatgattcaaagcctgccacatatttttgtacaaaaccacatctttccaaaccatccaatcaattactcaatacatactcgaaacgtgtctcaaagacaaatataaatagtataaatcatgaaaatatgtaaggatcaaaacacatgtataaagttctctctctttttgtcgttcccatgtgcatcaaatggtgtactctgatttcatttcaaaaatcagatacaatgatgcgttcatcacatgatacatgagattgatatcccaatattaagctgaagaagtcgctttgacttattcctcatcaatgttattgcttgcccttgtacgtacgtaagaagccatttctacatgtactataccaatcacgtgtatagggtttcgtttttgagattcatatttatttcatttttcttcctccaattaaaacccattaaatattaatttagttatagatatatgtagaaaagccttgtttacatgtattttcattatttcatcatggtgggaagccaccagttaaatgttgtcgtcatgctcttactattcatgaatacatgaatagtactagtcgtactattcatgtacccacgaactacatcttagccacttagttcaatgattcaaaaccatatatacccacaaacacacaaacactatgagttagtgttgtggtatctgtttttaacttaggttaggatcaattcttcttcaacgtatacattntaacaattactctntggataaatgaaattctaactctgatataaatttatttta

SEQ ID NO: 42626 - DNA, 506 bp, Arabidopsis thaliana landsberg
aacttgcacacgacataacaagagatatcagtacctcttcggctgtccatccttttttagttgatcttctagtaggaccactcactgttctgtatctttaaccacaaatcaaacatcacaaagcaatcataagatcaaaccctaatgacatataaacatatatacttaaaactgatattataaatttcctactaatcttaatcatcacacataaaaaccttaatcacatatatataacacccacccccaaattcatcaagttgcaacaaatataaaccaaaccacaaaatataattgaggaacgaacaagagatggacgaagagaaacatacccttttgaagagtcatcaattgcaaaaataggagtaacgtcgtcggtgttgttatcagactcggactctgatcgattcaaatcaatagactctgtcataagtctttcagatattgacaaaacctaaaaccctaaataacagcctcaactaacgagaatatagaagaaaacaacg

SEQ ID NO: 42627 - DNA, 604 bp, Arabidopsis thaliana landsberg
catagtgttgaaaatctttatggcatcatctgagtcccaacatttggcgtacatgctaatcaaagaatttcccaagcttatatcagaaaagtacccagctttaagagcatagcaatggatctgataacccatttcccgaaaacctaatgtcccgcagaccgcaagaatcaaagtcaacgaaacttcatctaaaaacaacttctgttcacagagagtgcgatggaatagcgatacagccttatcaggtaagccattccgagcgtaaccaccgattatagacgtcgttgctttcgagctatcgagattagaaggccattggtcaaacatctcctcagcatctgccatcctttcacaccttgtgcacatatcaagcaatgcagtctggatataagggttgaaagcagttccaaacttaatacaaaacccgtgaatctgttcgcttactttcttctctgaaactaaaccacaagcattaacagcgcttgttaaactaaaatccgtcaactcaacacctctctgcagcatatcagtgaataattttagtgccttcaagccatggccatttctacagaacccagccatgagcgcattatacgtaatagtg

SEQ ID NO: 42628 - DNA, 455 bp, Arabidopsis thaliana landsberg
gacattcttcgttgggcagtacataatcctgtattctcaaatttgatagtgatttcttaagacatctcagaatatagagagttcagcgacgttcttcaacttttgtcagggagaggttacaatgttgtcttagcactgcctgatgtggctttattacctgaagaataatactacgaaggttgcggaagactgaaaagtagctgatgcaaggttcggcaatgatgtttaatcattccctttccctttctcgtacttgaatgttttggtgattattagtgtttgttcaaattattcaattctaaatgggattggttccatggttattatctacataaacgtggttatcttcttgaacacgtcatccaaatgcaggcttttcttcttgaatccatgaaacaaattacgtcatttcttcctagaggaagcttttttggatgcattctggctgctgacag

SEQ ID NO: 42629 - DNA, 558 bp, Arabidopsis thaliana landsberg
acattatactagtttataacttaaccattagatatatttttcgttttttttaccaatttacctaaaattattgaaaattaatggtagtagtatctttgaaataacattacaccaacgttccctaagattttcagtatctggattatttctaaatctatgagaaaaaagcattcaaacatttatgtatatataacacacgtgcatttgttttgtatacactacctacaaattaacaaaaaaggtatttgcaaattaatattttgtgatttttgttagtagtaatgtatatatgctgcaaagtagacgattgatcgtttggtataaaatcgaaaactatttattaagacgcaaaatagacaataaaattagcagataagttcaaatggacatataaagtgattttagtttttagatgaataaaatggtaatgaccgtgatatgttaaaatattccagttttgtttagtggaagaaaacgttatcgtctttctttttgcattgaataatgtccttttccggaacagtaatacaatttacaagtgtaatgaccagatttccg

SEQ ID NO: 42630 - DNA, 732 bp, Arabidopsis thaliana landsberg
tctcctccataagaatttagctccgagaattttgtcattgactatatatatttttttttacaaaatcatatataaaataatatttaaaggtacaattattaaaatgagaagcaaaacatggcatatttatcactaaaagttactaaccttttaattatttcttttttgcatgtactgttgcactgaatacacgaaataacctcatgttgtagtgttacctgaaaatataaaagttttcaaactcatggtttgatgtattttgtaacagctatcgttcttaataacagatgcagtttttcggattaatacttgatatagcaattaaaatcaacaaccaatcaataaaatctaaataacatcgaagtcatgtatacatcgaattttatatcttcaagtccacatattgataaaccattttgtaaatatcataattggaacaataaacttatctgtttatgaagaaatgttctgctttccacttctttagcgttttcatcatttgtaatatatagaacaattgtaaccaacacacatatcataaaataatttgtgtgaataatatttacacaaacaggaagaatttcaagataaataaagtctaaactaattagtttaatagctaacacactgaaatgaacaaatcacgatttgagtttgatgtcaaacttattataaattattttacatatcttagaggatataaaacttacccaaaaatttcgcctacttttc

SEQ ID NO: 42631 - DNA, 678 bp, Arabidopsis thaliana landsberg
agcgcaaaattttactacaatctacatttaacaaatatcttctttttttttcccatatcacttaacaatgtgaatttcgaataacatttgatgttaaatctcagctatgctaaacctctaagtctaaacacgtaacatcagatcatcaagtcggcgagctttgagatcattagagaaaagggtcttgaagcaaagccacaagaacacctccattttggccccaataatgaattatattcctattgtcaattgggacaagggtccgcttgattctgacttgccgaacagtgatattcgttccataactatggaaaaacacttctcttataaggtttagcatctggcgaaagatctgatccatcttccaaagtatacaggccataatgtagatacacgagaagctaaaatcttgaaaaagcagagagattgcttcactaatttggcagttgcatgaacagaagcaatcagctataaccaatagaaaaatctcttgcaaaaatagcaatcttttttgttacgagtaaaaaaacaaacgaaattaatcattctattttttcagatagaacaaatgatcagtggacaaattaaatatcagtgactcatatagcctatatgaaacaagtccaccaattgcaacagccgtgatacataatggactgggctgaatttaggcccgat

SEQ ID NO: 42632 - DNA, 474 bp, Arabidopsis thaliana landsberg
cgttctgcaggagccatcacaggattgaacagctgactattataaaatgtgacatctgtagcagatgaagacgtgtactgattttcttgagtaggttctgtatgatcacagtttggggacgaattgtaattacgagcggcatttgagttgacttcatatgccattttttcattagcaacattcattcttggttgttgttcttcctcttcatctctgtgaaaatgtttatgagatcattagatcattaaaaaggataaagctagaagagcagataaaaaaaggcttaccttaagttcaggtgtctgaaagacaaatcatctgcaggatcattcaagaactgtgatgggagagccaaactttgattgttcataatcatatgtacttcgccagaaccaaaacgaccaaacttcaaattctgtaagtcgctattacattggtctgaattaacaggccaccgacggatctttggctgca

SEQ ID NO: 42633 - DNA, 557 bp, Arabidopsis thaliana landsberg
tatgattgataccacagtagaactcgttcgtttgaatatttttttaagtttgtgtaatcttcctttgtaagcgaagagttttggacgaacaatttgagacaaaaacctgactacgagaaaactagctaggggtaggatttgaacccaaaagtttgtcataatcctttttgagttcccaaaattcactgatagtgttaagcggaatcgttcattcaaaatatatactatatgtaggctatttgggaatatcttatacacctgtttgtaagaaaattagacatatttatctattgtttttaaaaaaatttgtaaaaaaacgagatctaagtttattgtcaagttaaacaaatagagaattacgggacgataaaaagaaggaaactaaatgattagagactttatttttatttttctcaatcgacgtgatgaccaatttgatacagactcataatctatatgatatacccaggtggaagacccatgcgttgcatgcgttagaattaatataataaaatacagcctggtggttaagctgttctaattaatattgaaatatg

SEQ ID NO: 42634 - DNA, 807 bp, Arabidopsis thaliana landsberg
  unsure (1)..(807): unsure at all n locations
cattcaatagtaaaatgtgcgttatttatcaaaggatcatttaccacctctccccttccttgattcacccattccagaataggcggtcactgcacaaattggtaacacatcaatcaatagacctcggagatgcattctcagccaagaaactagtgcaaaacaaggaaaattgattttttgataaccacataccctatcttcaggaaaagaatgcgagaaacaaaatgtttcccccttaaatacagatgactttctttcttgatcgttctgaccactgaattcacattgaatactccgttgttctttgctttcacaagttacaagggaaataagtgtttctttttgcgtgggtgatactatttttcttcctgtatgaatctcatcttttctgccaaattcctgcattgcttctttgttttttcccagtaaagttgctggcccatttgagacattgatactccttgaagaagaatcatataccatggtctggtcgtgagtatttttaatctgttccatacttgacatccttgcaaatgaccccttggtcaagcatgcagaatctgcacacaaaaaaaagtcacttagaaaagtgtaatataacgcattgatatgtcttgatgcatattagatagatgacatgtgtctgagataattaaaaaatggttaaatgagataacagcagacctcttggaagaatcaagtggttagcagtatatatattatgaacggngatttcttttttctcacgatcacaatctttaagccaactgggtatgactacttgaatgacaccagaagctgcaacac

SEQ ID NO: 42635 - DNA, 450 bp, Arabidopsis thaliana landsberg
ccaatcactgtttctttggttttatgagcttgtcagatgtttttttaagctattgggcatgttctgattcaactgtgtttcttggtgaaagtgtcattctttgcttcaatttcacttgttttgatctgattgggaagtctctagcttgtgctcagtgtaaattttgtgtcttgaaaaggaatcgaaccttgtgaggatcaggatcacgtgatccctactgaattaggattaagatcttagatttggttatttggggattgtgccttggaaacattgatacaagttttatgcttttagggtgatttgttattggagcttaagttggcatgaggcatgagaaggctgcgagtggatgtgtttggtaaattgattggtcttgatcatgacgttgcaggtggggcagaagcttagctcaaagaccaatgtgaggatcaaaaagggagctactgc

SEQ ID NO: 42636 - DNA, 537 bp, Arabidopsis thaliana landsberg
gaaattttgtcatctatgtggcatgtatatggttcattcatttatatattaacaaaaaaaatggacaatttttgttccaaaacaaaacaatgcatgatcagggtaacaaaacaaaacattgcatgattcacattgacttattattccaaatttgtttcattgatcatgattcacgatatttagcattagttactatttgggttagtgttgttgatacatcaccatctaactttaaattcacataatacaaaataaaaattgataaaatcagattaaaaatgaatgaagatgtatttttgttttcttcttcttctttgaattaagttttaaatttggtttccattcggtttagtgtaagttgtgtaaccaaacctcccactcgcgaacaaaaattcagatttataaacattacaaaagtatccacaataattgctcctacgaccttaacttagtgtaggttaattccaaggtcaaatcctacagctaattacatacctaaacaagccacttccttcatttattatcaatttaagcatc

SEQ ID NO: 42637 - DNA, 536 bp, Arabidopsis thaliana landsberg
aagtttttggatttcttaatagtctgttgcgtttagatttttttttgtatagagagaactcgtctttattcgttgaatgaaaaaacagattctttttcattttgttgactttttttcgattcagatttgttcagatacaaatctttcaccataatataagttgattcaattttcgattgaatatgttagtcaaacaccaaatttccatgtggccaatcttcagttcttcaccatgtgactagaacttaataagttggaaaattcttcacagatcaagcaaaagctaaaaacgtcatcatttaatacaacttttaacgccgcagcataaattgcaaacagacaggggatgatcattaacagtgaaatatcacacttacaaataaataatcgactctgtaattcaaagcaataagcagaagctgaaattgaaagatcacataaacacacattttagacaaacgcatataatctcacattccaaaatcgaagcagagtgctgataattcccaagaagggaaaggtgaaaaaaataagag

SEQ ID NO: 42638 - DNA, 531 bp, Arabidopsis thaliana landsberg
acactctttggatctttcataaaacttatctattcatttcttttctaacctccaagatcttgactgcgttgctcagtccacgtgccattgcatccattccactaatatgagcaatgaatcagtcttacacgtctgtactctctcttcgcctgtttaatcaaccaaacattataagctactttctcggcttaattctgtatgaaacagtaaaacattgtgaatcaagaatcgctcttacagtttagcgtcaaagttgaagccgcctggagcaatcccaccctgtttcatatgtgaaaaacagaagctcttatgagcttacattcaaaaatttacaatgaaattcccaaaaatagcgagtgtctttaatattacatacatttttgatgacactcatcataaccatggttgcttctccaacatctgtaagaaactgatctgtatcccattctgttaagagaatgcgagaacttttgttcaatcacaatctggttagggaggtgttaacaatcaagagagctgaaattgaaaaat

SEQ ID NO: 42639 - DNA, 133 bp, Arabidopsis thaliana landsberg
gaggtagccaggcctggctgcccattgcgcacgaaaactggctaactaaaaccgtcgagagagaccgtgggagctctctgatacaccagatgaccaatgattgaatcgtatgactggcccgacctaaacgagc

SEQ ID NO: 42640 - DNA, 547 bp, Arabidopsis thaliana landsberg
ttctgtttatgatgaaatgtgtaatgcagactcttcagggttgctcagtatgcttcagatgatggtttctccagatccgccactgatgatgttgatcgatgtttaaggtaccgacaatgtttgaatgaatgatgatgacctttgcgtgtgtaatttatgttggcttttccttctatagagcattggaagaactggattcgttgtttctacgtgcgtcgaggaaagattcaaatgcaactgttgtattgatgaagtcacagcttggaacagcgttaaccgcactggacagtcttctacaaacagttccttctcaagtgcttgataaagggaaagctatggtggaagtctacagatcagcatctgaagaagatgcggcaagtgatgatttagaatcctctgagataaagcagctccagtccatactgtgagaggggaggtcacaggactattactatccaaaaacagttgttaatcttacagcattggtaacaaaaactcttctgattcagtgtatatcatgtattgttaacttcaattgatgcatata

SEQ ID NO: 42641 - DNA, 172 bp, Arabidopsis thaliana landsberg
accggactgtgtcagggtcactctctgaagtaagaaatatgtctgaaaaagcgtaactaatacgccgcttaggctcagaaagagcctggagcaagctattaaccttcctatcatgccaattgacacaatgctcgctatggctcaccctctaatgtgtcgtcctccatatgct

SEQ ID NO: 42642 - DNA, 637 bp, Arabidopsis thaliana landsberg
gaattgatgagatttttgtttatttttgaagagtaacaatttttgtttggtcctatctaaattaaactcttaattagctaatgctatctcattatctaacaaaagctattttgagcttaaatccttcttgttttggattctccaacaaacataacctacaaataatatgacgaaactagtgtaaattattaaaatacaaaatttctaacgtattatatagaaatgtgtgtatattataaaatataatcagtaaggtcggggtagggatttattcaattgacttctttaagagatatggacgttacttatgacaaccggcttttgtatgagttccatgcaaattgatttgaaattaacgaataatttacaaagactatgaaaaaggaatcgattccttagtattgtcgcattattcccctacacgtagcattatagttgaattgcaatttcttttctttgaataaaccaggtagttatgaagcacctctcatttgattactactttaatcagacgacatattatagtatacaatttcgtagcattttccgcctagactgagattggatataggaatttaataatccgtggaatattttgaataatagtcacctgagttttttgcaaaatatgactgtt

SEQ ID NO: 42643 - DNA, 576 bp, Arabidopsis thaliana landsberg
aattccgtcccaagttattatacggcaaattgatcaattataaaatacatttacaaaggaaatgctaagtttctcgtggcacataattgtatctgctaacggtttcatcctgaatcaatggacaacacatttcgtaaatcttatgcacatcatttcacctcatatgtttatttcaaagtatacctcttataactttaactttgcgtttcgattcttcgcatcatcaaacctatcaaaatcaaaccctaaatatctgatgacacgttttatgcgagaacgattggtaagttaaccgaagggtccacgattcaatttgataacacgcctaggtgagaaaaaatgttgtacattattacacaactaatacagccaaaaaaaaataaaagcaacaattcgaaggcatgattaaatgagcagtccggccgttagtcgtccagagattttcatgtctatgtctagtcccatctcttctattacactctttttctttgtttgttttcatgtacctaacttcatttccacgtgtacatgaaacattcttccattacaaaaactataaagatagtagctagccaa

SEQ ID NO: 42644 - DNA, 641 bp, Arabidopsis thaliana landsberg
agatcaagttaaaataattgtacaagtaaatttgagtgattaaaaccataaaaatcgaagcaaacaaagtatttttaaaaccaccaaatctcgtatttttgtatcataaaacacaagaattggtaaatttttgctttaacttttatgtatcataaaccatcaaagtcgtttagctttgtcgggctaggtttgaactttgaatacgggtcatcctaatcgcataatatatagtaaacacgaattgtggttaaatccggtttagaacccgcaaatatctggtttaattagaagcatttttatttggataaaaaaatacatgtattttacaaaatttatacctttaatggtattgtttaaagattccaaaaattcgtgtgagaaaaataaaaatgcgacaaggaataatgtgacaatccctttgttttacaaagtttacacagtaactttaaaatcatatcttatcaaaaaagtaataatgaaatctgccagaaaaaagtagaaagaaaatattttagtcatttgtacaagtgataaaatccgtttgacatacacttgtgacttgtttacctcttcatcttacgcaaaacctaagaagcttctttttaaaagtcttaaagaaatatcagctttccatgggtgct

SEQ ID NO: 42645 - DNA, 836 bp, Arabidopsis thaliana landsberg
taccatgtaaccgaagtatctttttttctttctcgtggacaaacacatgtttgttccttaattgatattttgcaattgactgcaggggccaaggtgaagcaatgaatatccaaatgtccactttgaagaatgacctggagactgaacatgagaaatggcgtgttgctcagagaaattatgaaagacaggttggttaaagctctctatttcaagaaacattttgaccatcatgcatattcacgttgacgttggtttttattatatgatgctagaaactgactagattttattacccatcctgttgatccatttcatgaaacagttgttttctgaatactctattttactgcacctttgtcatatatccgaggatatcttcagatattttctgaattgtgttttacattacatgaaatcattgttaggtttttcataacttaaggtcttactgccatcagctaattctgttcttctctctttccatagatattacaactatcactctttttgtttcctacttctttttggagtgcaggttattctgctgtctgaaactattcaggagcttacgaaaacatcacaagccttagcagcccttcaagaggaggcatctgaactacgtaaattggctgatgcacggggaattgaaaatgtaacttctacttgtacacaactttttgtgattcaattcttcctacaattatagttgattcgtgaaacatcaatttctattttcttggtgtttatcagtctgagcttaatgccaagtggagtgaagagaaattgatgctagagcagcaaaagaatctggctgagaaaaagtatcatgaacttat

SEQ ID NO: 42646 - DNA, 742 bp, Arabidopsis thaliana landsberg
gcgtgatagttcgaaatggtttagggcatcacagctactcagccccgggacgagataagtgctgttgagtccttgaatcaccgatttgctgctcgttgtgatcacaattctgcttcctgcttttatccagtcacacccaccaagaatcttatctatctgactcttgtcacccacattgtcaagaacaacaaaaactttttttccttgtagttgagtctttatgtagtcaatcgataacttggctctatttccatctctcccattgtttttgctcttccataacccgagcaataggtccgtgtgcagcgtctcgtctaaaaaaggctctggcttctggctcacgtcatctagaaacatcttatgcaggaaatgttttccacattcactgaatagtctcttggcaagagtcgttttacctattccaggcatcccaacaacgccgataaagcgagtgacattttcagatttcaactctagcttctcttttagttgctctacccttgtttcaatcccatggagtagagaatcatctgaaggagtagtcttaggctctgcttctccttctccttctcctctcggcgattcactttctcttcctcgtggaatctcccctgaaattgttcttaggatttcctttacatgccccacgatttgttcaacctccgcaccctcgtcgctttcaaataagagagagagagagaccaataataattgtcagtcaatttttcttagaattatttaa

SEQ ID NO: 42647 - DNA, 496 bp, Arabidopsis thaliana landsberg
tttaacagaattatgtataataataaagtttaaactagaaatgaaacccactgtgttgctatataagggagcattcacaatagcaaacttgatcaataatcatagctaagtaaaagaaagaagatatcagtcttctataaagaaatggaaaatttagggtttctaataatttcgacctttttgcttctatttacaactcttctcccttattcttcggcttcaaccactcgtcgatttcactttaatgtaagcaaatttaggcagattcaatttcatgttactgatatgattatactaaagatttggaaaactcatacagcatttattcaagatttgtatcgcttataaaagaacatctttatcaattatagtacatacagattcttaacgtggtagttatattacgctcatgtaatagtaacattttcatcaatgtgatatatagtaaacgtttttttgtttcttggggttttaggtcgaatggaagaaggtaact

SEQ ID NO: 42648 - DNA, 755 bp, Arabidopsis thaliana landsberg
cattgactgtgtactctttgaagatgtaagaaccgttgaagttgttgaaggagaagttgttcaagagcacgaagtcttctgttacgacagtgattgaagcagaggttaagttccaagtagagttgttgataggtgagaaatgaagacggatccaatgtcgacctaaagaagtgattttgaatctgtaagaagctaaaccggagaaaacacgagcggtttggtagatggaattggttgaattgttggaagtagttgatgttgcaacagaagagtttccgattttgagtacaagagaagagtggagtgaatctggaacaaagattctgttttggaaagttatgttttgtgatgagccacaagagatcaagtaattgtctggcggattaaacaaagctgatgaagtagtagtagtgtaacaagagaggaaccaaagaagaacaaggaatgattttgtgaacaccattttggatttttagtaagaaccctaaaacccaaattggaaaccgaagaaaacccaaaagctcaatgctaaaaaggattaaacttttgtgttttggagattgttcttgaagatggttgaagaaagaatggggatgttgagtttggtgtagagaagaggaaagtttgaagcttttgggtttggattcacatggcgagaagaggaagacccaattgaagaagaatgtgtgtgtttttgggaagaacaaagaatcaatcaaagacaagaggagagcaaaggaataaggagaaagggt

SEQ ID NO: 42649 - DNA, 562 bp, Arabidopsis thaliana landsberg
ctacagagcctcaatcatgcatctgataaaagaatcaaaagagttatgttttgcttaaaaattttaaaggctcgaaactgtaccaaatgtaagtaaggacctcaagatgtttataggtaatacctctggtttcaaagaagagaatgaggttttagacgaaaaatggatggcaaagtcagtagtttagcgtcgcgtggacttggagagataataacccttagttcctgcaactgtgatataaaccttaaatgagtatagcaagacaaagaaatcacagaatgtcaaaaattatgagatctcaactgaactttgaagctatgtaaacaatatatgaatcattggattcaaaattcaaatacttacatacttgaaaggggtcggatttcctatttatcctccaaactccagcatcttacccacatacagagcaccttctctctgttttctgcaaataaagtcataaatttgttagaccacatatatgtgtgaagaaagacatacgaaatttcaaattctgatgcacatggtgagtgcaaattttgttaggccaaatacatgtgtg

SEQ ID NO: 42650 - DNA, 573 bp, Arabidopsis thaliana landsberg
cattaatgtcatatttgagatttaagaagttttaaatttttgttattattttctcttttatgttaccccaaaatgaaataaataccctcattaatgtcacataccaaactcctcctcttcagggggtccatatttaagaaagataccctcttacccgaattaaaatatcaaataaagtaagctcaatttgcaacatataataatttgttgaatattccccactcttgttgttttccttgcccattttttgatcttgaaatacttttatcttcttattgtttaacgaatatcacaatcatccattttcatttatacattgcatattttcaaaaaagaagccatatatttatttaatcaactgatgacccattcaatacgaacattacgatgcttttaaaagaataaggaaattaaatgttgggaattcagtaaatgccgtttattaaaagctcttatgtataaattcatttagaataaaaacaaagagaaattaacaaaaggacaaatatttaattgagcttagcaataaaaaaaaaatctaaaaaatttcgaagagagtcaaagggggactta

SEQ ID NO: 42651 - DNA, 504 bp, Arabidopsis thaliana landsberg
  unsure (1)..(504): unsure at all n locations
cacacggctatgtgagttttgcgagattctggcgcagacaccgttgcagattcatcagctgagcctgtcttcgcgcctttcctgggagatcaagaccacagaccagcgacaaatgatgctgggacgtgaaacagccaggcagcgcctgcaacagtttgtggcggcgtacannnnnnnnnnnnnnnnnnnngaaagtgactggcgttatgcagatttacgctatcccaacggattcgcgttgcgcatggcgcatcgcggagcctaaacaacagatggccatgagcaggatgcgcaaggaaacaacatgagtagagtcagagaagataagaatttaatcgtagggctggatatcggcacctccaagatcgtggcgatcgcggcagagatattgcctgaaggcaccttgaaagtaatcggtgttggccagcatgcttcacgcggcctgaaaaaaggggtgggtggtgaatattgattccaccatgcaggcgatacagcgcgccattg

SEQ ID NO: 42652 - DNA, 489 bp, Arabidopsis thaliana landsberg
  unsure (1)..(489): unsure at all n locations
ttgataaaatataaaaaagttgtttacaatattttacacatgagatatgtataaatcaaataccttatcctacgttttttatcaccacgaaatttatccacctatagtttagttgatatacttcacgcgacatcaatttcattttgctacattatcatatattgatattgataatactttcggatttttatggagttatatgaactatttttagtccgcatatctctccagaacacccgaacaaagaccatgaaagatattgacaaatgagttttcttctaaatatatgtagcattcttaaatttggatacaaaaaacttactaaacattttgtataattgattttacttaaaaacaaaatagatacccataataagttagactaagagaatcgattgatgtaaagattttgtgaagtgttcaagattttatgagtggatggtggaaaggccggccgtgannnnnnnnnnnnnnnnnnnnattatacca

SEQ ID NO: 42653 - DNA, 720 bp, Arabidopsis thaliana landsberg
attgctggtcactatgggtattatgcacttctgcataacaagaaatttaggtactatgagaattagtctagatttttgacaacaagaatttcccattttgtataactaagaattttgaggttagtctacctttttgcccggcacccgaactcaatattatatttgctataaatattaagaaattatggattcatgcaacggttaaattactaatttcatattttgtataaatatatcctagtccttatttgacaaacaatgatattgtagattcgtgtatcaaccaaaaaaaaagctaaaaagaagcagttttaaaagtcatgtcaactcgattttagttagtgctcaattaaaggaaatccacgcaggtgttttagtagattttcttgatcctgttatatccacatcgtttttatgcgttgttgccatataaattttagtttatacacatccaaattaatttaactcatagctagacatatgcacatgtatacaattatatatgatgggtccagcaagtgcaacatttgtttccgcataatctgtgtcacttacaaattatgcatcccaaaaacaatggatgcaagtcatgtaaccatgcaactagaaggtatatgtgtgtatatatatatagcatacacatgtgtatgaaactgtagattggtaaaggggccgatgtcatagtacatataattgaggtgtgacataagaacccactat

SEQ ID NO: 42654 - DNA, 549 bp, Arabidopsis thaliana landsberg
accaaaaccccacaaagcttggaaagagccacaaataggtcaaagaatgggtgaagacaagaagacggcaagggagacggtggaggaggaaccacttagcccatgttcacggctgttcaattcgccggattttaactgtgcaataatcgttacaatgggatctaaagttaaaggagacacaccagccatcatccacggccttgaacacaccctcgtaaaccaccctcgcttctctagcattttagtaagtccaaacacacatttttatttgatttttaaataatatcttcatcattgttagaaattactttttctattgtgtatgtaaacacacacacataatgtaacatgaaagagaactacttaagaaatgatataaaattattggattcatgttggtactgaatattcaacagtttaacacattttcttttaaagtgtttgtattattggagttattacgccaaacaatcctcttttatatttataatttgtgatttgtattaatcattaaccaaaaagatgatataaaaccatgactatgctggc

SEQ ID NO: 42655 - DNA, 672 bp, Arabidopsis thaliana landsberg
ctttacgttctctgtcaatccgatgctgccctgggtttggggatgcaagtctcgctttcttgtttaagttctttcatcagcttcaggatgttgaactctgtggactaaacggagtgacagatgcaggtgtgcgcgagttgctacagagcaacaatgttggtctagtgaaggtgaacctgagcgaatgtatcaatgtttcagacaacacagtctctgcaatttctgtttgccacggacgcacattggagtctcttaaccttgacggctgcaagaacatcacagacgcaagccttgtcgcagtagccaagaactgctactcagtcaatgaccttgacatctcaaatactttggtctcagatcacggaatcaaggccttggcatcttctcccaaccatctgaatcttcaggttctttccattggcggctgctcctcaattacagacaaaagcaaggcatgcatacaaaaactcggccgcacgcttttgggattaaacatccaacgttgtggcagaatcagcagcagcactgtggatactcttctcgaaaatctatggaggtgcgatatactctactaaattcccactttttctacaaaaccttagtatcatcattatcagtccaaaatcttttcctaggttttggtcgctaaaacccatagattccacctagaac

SEQ ID NO: 42656 - DNA, 346 bp, Arabidopsis thaliana landsberg
ttctctttgctccgttccaaagtttggatctttttcaaacttcactgatctcgatttactggtgttaaatttcgaaaatttcaaagtttttagcttttctaattgggattgacaatgttgggtctttcttgttggtgcagtttcgtgaagttggcgttgcgctgtttcttctttgagagggtatgattttggtgacctcaaagctagggtttttaatactgaatcagaaggcttgaaaatttgagggctctcgtctgagttggattgacgatatgatctttgagggttttggttctgctgaagatgagattcggctttgcattgtatggctttgggaattgctaaa

SEQ ID NO: 42657 - DNA, 146 bp, Arabidopsis thaliana landsberg
agatccagggcatacagatgattcgctccttttcataatatctctatgtcttcaatgcacgtattcacgtttccacatgttttgtgggctgcttctgcgagctggagcaaccatctcaccttgtgatcgtgatatcatctatcaac

SEQ ID NO: 42658 - DNA, 757 bp, Arabidopsis thaliana landsberg
gacgaaagactaggctcttatgctctcattgcaagggctgctttcgatgctacaattccatttttagggaggcttttctctgatcatgttgcacgcctccatcaggtgctcttgaacgaccttcctttagaatataagcgaaagcaacattctttcatctaccaatcattcttcttttcctttttgctcttagctatttatgccttttgtagctaacatatcaatatatacctacatcaaagcctttttagcaattgattagaaaatcttgctctatatcgtttttttattctttctagtgtgcacgagttagtgatgtgtcctgagaggttgcttttgctcatcttaatctacctgttgtagggcaggggcactgttgatccgactgaaactttggaagaggtctactctttgctgctaataatcggccatgtacttgcagatgaaggggaaggggagactgccttggtaattctttaactttcctgcatcctatccacagtaatcacagaaagaaagatgctgacaggctttcgttccgttaatttctgaataccttcatctatcaataaataagaaacttattattaccagatatatcaatttcaaacggttaggtcttgaaactatcctttttcttaataagtaaatgaccagtttcaaacttagttttcacgaggcctgttataattctgttttttcacttgtaaattcttcccaagagtaattacgagatgatgttatcaactaccaggtt

SEQ ID NO: 42659 - DNA, 815 bp, Arabidopsis thaliana landsberg
aacgtttcttttttaaagttgaaattttatatataaattaagaaatgattttgatacctggccaattcttcagcggatcaaagactctctccaacatcaaacctcacaaaacatgaccttaaggtgcattcactttgaaaaatctcttaatacacacacataaaactacaaaagtttagctgtttattagtatgccattaccatataaatttcagttttaaaagcaatttcttcagtttgtgtgttgagaaattatattccaaggcatactaacaattttcttagagataatttgtttaaactttagatatcactatgaaatttttcaattttttttatcaatcaattttctttttgttaaacaacatattagaatagagaagaaggaaaagtacatgacatcacgtgggcattctagataccgtggaaccaagtcggacttatgagaaagcgatctttttatttctcccttattgtctctatttacaaacttttcctttgtgttttttgtacatagcaaatttgcaagttgccttctgttcataaatttaatcttcgaaacacaaatttaatgcgtaggccgttgcccacaaaatgcatatgtctaggtccctatgatgtttataaaaatgaagtcgttggtgcatgcttgctattggtcatctaatcactagttagaaatggttgaaattgtttttttttcataaaatttgccgagttcaagattcttaactcttaagatcgtatatcattttcggtctgaactaagtttcaatgcttctatacgttaactcaaccatgatattacataacat

SEQ ID NO: 42660 - DNA, 573 bp, Arabidopsis thaliana landsberg
gaaaaaaaccggaaaaaccccaaaaacccaaaaaaaaaagaaaaaaaaaaaaaaaaaacaaaacaaaaataaaaaaacaaacgcaaaacaagaaaaaaaaaaaaaaaaaaacaaaaaaacaaaaaagaacgaaaacaaagaaaaaaaaaaaaaaggaaaaaaaaaagaacgaaaaaaaaaaacaaaaaaaagaaaaaaaaacacaaaaatagaaacagaaagaaagaaaaaaacaaaaaaaaaaaaaaaaaaaaaaaaaaaaaaaaaaggacaggaaagagggaaaaaacaaaaaaaaaaaaaaaaagaaaaacaaaaaaaacaaaaaaaacaaaaaagcaaaaagaaaaacaacaaaaagacaaagaaaaaacaaaaacaaaaaagcaaaaaaaggaaacaaaaatacaggaaaaaaagaaaaaaaaaaagaaaaaaaagagaaaaaaaaaaaaacaaaaaaaaaaaaaaaaaaaaaaagaagaaaaagcaaaacaaaaaagaaaaaagagaaaaaaaaaaaaaaaaaaaaaacaaaaaaaagaaaaaaaaaaaaaaaaagacaaaaaaaaa

SEQ ID NO: 42661 - DNA, 928 bp, Arabidopsis thaliana landsberg
ccctagtgttaaatttcctttatttgattccaaaatttgttattgtgaaacaggcaatcgataggcttccattggttcctggtgttcttgaacttgtaggcatcggttacacaggagtgagtttcttcttctctttgtatcacttgaaccaaagctctcatgaacctgttttgaggatatagatgattcatcacttcacttttggatttaggattagttctctgaatttagaatccgaacatctgcaattcatatggagatatgatatcagaaattgattgctgcttctcgctagtgtttcaatcttaaaagacgtgtgtagtttgtttcaattgtgtgatggaccttattaacatttggtttttctatggcagtggttcacttacaagaacctggtcttcaaaccagacaggttaaccaattctctctttaactctgtgtttggttgcatgtaatactgagaatggaagactcaaattctcgaggaaattgtttgttatctgtttcagggaggctttgtttgagaaggtcaagagcacatacaaagacatattagggagcagctgaatcaaaggaggaagaagaagaagaagagcctttttgaggccattcatgaattggaatgaaggatatcaaaagaatctaacacaaaggccacgtccttccttcaatctttccttcttgtaactaaataattttcatcctttctctctctctgtctctggtcttttttagctcaaagtatcatccatttatgtcaaagtgttgtaaattcctcaagactatatatgagatgttttgtttcattttccaaaatttcaaactttgtccccatttagtcttctacccttcatgcatggttagcttagcttaatgctgaactgttgaataacgatatgggccttatgctaaaagaacaaaacctatg

SEQ ID NO: 42662 - DNA, 816 bp, Arabidopsis thaliana landsberg
  unsure (1)..(816): unsure at all n locations
catatatatatatatatatatataaatatatagataattcactcattatgaattgattgtgaattagaaggttagaattataaacaaattaatttttgtaatggcagtgcatatggaaacgtggtttcactaccgggtacagctgtgaacggcgtcnnnnnnnnnnnnnnnnnnnnnnnnaagacgcgagttatgggtttgcaggacgatggagtccaatgggaaaattcgtactaataatagtaatgttttatggtaggtttaagcagttcacagtcaaatctggccgcgcatggatactttacccctcgtcttcctaacatatcgatcatatatatataaatgttatataaaaattagtctcgtatgtcacttttagcattccttttctgtgtgtgatgtacaataagtttgtatgtagtttgcatcatcgttaattaatcctcgttaatattatgacaatgtatgaagatataatataaggcgtataatgacatcgtgtgtttcctgttgtaattcgaaaaattaaagtttatgatcttcactcatctccactctctgtctgacacacatgtcttcttttatacatgttcagatccagatgtcatgtttcgatgatgaaactgcaaatctccttccatatgtttcatccacaactctctctctcttttttttaggtaaaggaaccttgtatttcaagtgtagctaggatcctaaaactagaagtttgtgcccacggatcctctttcatttcgaagtatcctggcatcgctcattacctttgtggcgtgaataaaaagaattggctgatggccg

SEQ ID NO: 42663 - DNA, 340 bp, Arabidopsis thaliana landsberg
  unsure (1)..(340): unsure at all n locations
tcttttgatgaaggttaactccggatttcttgctttaacattaagccctgattagatcataaagacatttcatacacacatatattagcataatcatgcggctaattgtggacccatatgagaggaattttttacatcacggccaatgaaatcgatgagatgcaagaatgcgaatgacannnnnnnnnnnnnnnnnnnnnnnnnnnnnnnnnnnnnnnnnnnnnnnnnnnnnnnnnnnnnnnnnnnnnnnnnnnnnnnnnnnnnnnnnnnnnnnnnnnnnnnnnnnnnnnnnnnnnnnnnnnnnnnnnnnnnnnnnnnnnnnnnnnnnnnnnnnnnnnnn

SEQ ID NO: 42664 - DNA, 642 bp, Arabidopsis thaliana landsberg
aacccataattgggcattttcttaatataaaaccaaacgaatgggccttttctgggttatatgaatccggcccaaaggctaagctggtcaagtactagcatgcggcccgtaatattaacattaacattaatattatcaaatttcttaagtttcccttaccacgtgtcttgtttttctacagttaattgaaatctttgattgatcggatagatctttctgaatctcttgaatttttactgaatgaagccaatgaggcgctgattagtgctttttttctggttttcttgagagctaaaggagatagatacctttgaacaagtagaatctgagacggacttaactattttacacattggttttgtagatgactgtaattgacctaatggtccctatatgtaatattagtttttttcttgtgtagcaagaaagcgtcgaaaccagctactgactgttgtttggtttgagtctcattgtaaagatactgtcccaaaataagagtttgactaaaggtttgattagtaatctgttaacaacgaaatttacctctcttttttgttggtttataaagagcatagaatttcaaatgaaatcttaaccgttgactcgaaccttacgtgcctaacaatctcacatttgtgctct

SEQ ID NO: 42665 - DNA, 340 bp, Arabidopsis thaliana landsberg
atccttcacctgaacttttggctcagaaagacagagagagaagatcatattgattaaaacgctgagagatgattaagagtagaaatgtttcttctaaaagatatgctcttttattaggccaagtagcttggagagtggagactgttttttcctctctcaccaattttgtctcctattccgaatgatagaatattcctagagaaagaattatgtaacacaatagtagtttttttttataaattgatttttttaaattaaaaaactactgcctagataatttttattaaattacgttagtttattttagtctttttctttagaaattatattcaaaacgaag

SEQ ID NO: 42666 - DNA, 1891 bp, Arabidopsis thaliana landsberg
tgtctctgaaggtgctctaacgattgtacagtccgcaatactagctaagaagggaccataatggtccaacgtgaacgccacgttgatcgcacccatcatctggtcgtacgaaccttgtgttaacctcccctgcgttgtgcagattccttctgcgttcacttggcaaatatagcctttataaacctaattacgataacacataaattggattaacattaacatttgacatatgtatcacttatgagaaaatgtatgtacctgagaagcattggctaagaggacttcgtccggagcacaaggtcgcggtttgtgattttggtcgagtgggttacagagaagaggaacgagcggaccagactggttgtggtagaaaggggcattaggtgggaactgatcatggttactgacattgaccgtgtacgcattggtcatgtcaacggccgtcgcagtcatcgtcttcgttatatccaatgtctctccaatggttttaggatctaaacacggaagaagttgactcaatgctgagtctgccgctgggtcatgcacccattggtccatagccatacacgtgtccgcaaccacactgtttattaagtaacatcattagtttgataaaaacaaattgaatcttgaattagatcaagtgacgacgaaatatcatttacttgtggaatacaaggaaaacggcgctgaggaggatagtggctgtgacgagaatccaaccaagaattaccaatctgatataattgaaacactgattataaacatttgatttggatatgatatatatgataatataacaacgtattctaagtgtaactcacaggtagacaagaactcgcaatccacagaacgaaaacactgtttcgaaagaagaagaaaaacagaaacaaaaataatgagattattctgtatcttcagatcaaaatagatatgttttgatttgtgacttacaaaggccgaggaatgcgactgcgagcattacaccagcgatcacatttaacacatatctcctgaggaaaacgcatttgagtcaaacagagcttctatatatatttagcttgtgaggcaagaaatatatcaaacgaatacttattacttacacagggtttagtgctccggtgagataacggattgtctggttagcgacacggtcggggtaagtgatgttagacatcttgatcatgttgttgaaatgatcgatgttgcctctaaactcgggaggaaagaggttatgtccatcgagctgaatgtctttagcagattgaatcgagtcccataagctcgttagcttagtcaaaactccagttgcttgtttcacaatgtacataaacgtcctctccacgctaccgtagaactcgttttgccccgtgtacagcattgcagacccaatcctgaagataaacgacatcgcgtcacaaattagtaatcttataagattatttgaagttcttaagtaatttaatgagaggttacacagcggctatggtgaagaggaggagaaagccgagggaaagagtgtagcagacgcgagagtagccgtagttgcgacggccacagccacaacagcaacaacagaggcatgagcagatgagaaagagtccgagcaatacgaaccacgcgattgctattactatgaatggaactgcagaaaatccaacggactggcaaagacaaaacaataaccattacgattttctaaattttggtacaaagaacatcacatttattttattttaaaaaaaaaactcacgtttttgtgtagtttagttttcgcccttaactaaatcaattgctacattatctaccccaaagcatcatactactactaattagtttactctggtttaattgtctaaacgtccacttaagtgtaatcgtttccaaaata

SEQ ID NO: 42667 - DNA, 706 bp, Arabidopsis thaliana landsberg
atgtcagtataaggtatacgattcgaaactacaggtaaatctttggaccaagctttaagctgttcaagtgtcaaagcctcctgaggtttcttctgagttctctttctctccgttaccttcgcagccgcgaacgacggtttggctagagaagcggagattatagtgagtgtgattggtattgcgagaagattgacttggtttgtcttggctttgtcgttatcatcaccatcttcatggacaacgttcgtagctgaattgttttggcatgagattgaagggtaatttctgggtagtctctgacgattttccggtgaaaggaattgagaaggtgacgaagaatgcagagggaaacgacaagccattatgtgattcaattgaagtagagtgaatttaacttacatgaagaagtgaattgcaataaaccaagctagtcgagaaagagtgatcgccattaaaacgtagcaatgagcttcatcatttcccaggctaaagggatagaagaaacagaacacagaacaatcgtaatataaaaaggcttcttaaagcccaataacaaaaacttaggccatttaactctaaaaaaggcattaagaagcccagacgctaaaaacgaatcgagacgcggaaaccggtctgtcagtgtcactcatgtatgtgtttgtcgcgggtgatttttgatattttttttgtcgtgtatatggaacat

SEQ ID NO: 42668 - DNA, 441 bp, Arabidopsis thaliana landsberg
acactgacaaatatagtactgtaactggaggaactattcaaacttgctgctttggttgctgctatatacgataacactgttatagaaaggagtatactcatcgctgcgagattgtaaattggaatacacacaaatgtcaagaagatatacaatttattgaaagataacttatgtcctaagtaattggtatgatggtttttactctgataattaaattagtgattatggacaaacggaaaaatcaggaaatcttaaaaatatttgtttattttgttggatcggtttgttgttgctgaaagtttttgatcgaaaattttgtgattgaatatttagagttactttgtcaaagttggatacctaattaccaaatagcatttccaatctaaatctaacttatacatatgtctgtatgtttgtaactaacatatgaacacatatgtc

SEQ ID NO: 42669 - DNA, 575 bp, Arabidopsis thaliana landsberg
gttatctataaaacaccacttcttgcctggaatgagaatataaaaagttagcgaatagcaagcatctccctgcattcagggacataaccaacttcgaaaaatttattaacctattctaaggcttctattaacaattcaggctacagtgagtgccaagtgtaacgatggtttgaatttgaactctcgagagcaaaatgcatgctagactaacatttggtttatgcttataattgatcaaatgaattagtaaaataacatgctagcatataatcaaatcacactcctcaccttcttgattgtagaagaagagcttgctgctgggagatccttaaagattcagtatccagttcaggtgcattataactgcatggtgtggcatgacaatgaagcatgtgtaagtgaaactcacattccacaaaatatcagaacaatcctacgttcaaaaattcttttgtacaaaacaacaataataacatgcgagtatataatccggagactttttttcttctcatttaggaaacaacgagattcatttaccatgatcttctgtttttaacaggtattgaaacataact

SEQ ID NO: 42670 - DNA, 677 bp, Arabidopsis thaliana landsberg
ctaaaaaaaaggatgaagagtatagagatttgagcatattacagtacctagagtgaagagtatagagatttgagcatgaataagcagaggattttataataaggaacacatggaaatttctctcagacacttcagtatgcaaccttacttgcctattcatgccaaaacgttttgcttcatgacttagcacaattttgcctttttttcttgagagatcatttttgctctggttttaggttggccttgagatatcattgtctgttttctagcagagttaaagaaggagaacaaatttatgttttagattgtcattagcatctatattatatatgctctttcatacataagtagctttctaacaaaaatccatttttggttctgcatatgtttaatagtttacatagaaaaacattttggtctttctgtattttctactaagcaaaagttcaaatttgatttactctgtgtgatatttgaatgtttttcagattttggtggtcagtgtctgatggagtgtaatgcaaagccaccgtttcaatgggaattggaaaacttgatatcttttggcacttctacagctgaagttcctagaaagctaaagccaatggagtgggaaattgatggatttgattgcacctctctgtattcttcaagctttgatgcagtagcttatggtg

SEQ ID NO: 42671 - DNA, 302 bp, Arabidopsis thaliana landsberg
tggggaagcttgtattgacgaaaacagcctatcgggtcactctcagctgcgcgcgttatcaccctatgcccgcgagtgagacttgtgacctagccttaaaacggtctatttatgcttcaatcttaagcaaacaacactcccacttatgcatacattacgattggatttaagcactaaaatactgcctatttataccaggttcgctactgctactgctaatgatagggagctcaaatgatacagatctccttaactcaagagatgattacttactagtgctcaaaatgctggaaaagcttgat

SEQ ID NO: 42672 - DNA, 772 bp, Arabidopsis thaliana landsberg
acttgcacttaatcttcttagatgtctaacaaatactttaatcttcttttcctgtactttatattgctaaaatgtatatttaagttctctcataaataccatatcttaccaaaaatagaaaaagaaactctttttaacatgaactcttttacaggcctgtctattcgtaactctatttgggccggcatgataattttccatacccaaaacacgccatcgttcagtggaaacttagtaacactacgtggtgggtttcaacaataaaagcagcacgcagttacctacagaaacactaaaacaacacatttcgtctctatcattctttttcttctacaaagttgcagagactgttggataaggtctcgaggctgcaactgcgaacaaagtacccacaaaaaaatgtcatttcatcatctatgttcctctccctcgtctcttctacatgaccctcttcctctctgcaatcttctctcagtgtatcccaaatccacaccaagaagtttcctctcctcttacaatcccaattcttctcatttccactccagaaaccttctccaagcaacccatgtttcagtacaagaagcgattccacagagtgaaaaatccaaacttgttgatgtagatcttcctataccagaacctactgcttccaaaagctacgtctgggttaatcccaaaagccccagagcttctcagctccgtagaaaatcttacgattcgaggtactcttctcttatcaaactagctgagtctcttgacgcgtgtaagccaa

SEQ ID NO: 42673 - DNA, 398 bp, Arabidopsis thaliana landsberg
gagaaaaagtgcagagtcatgacatccaggagaaaccatttggtataacgaataattatgaggagggtccaccttagagcccggacccataactatatatcccatatgagatacatatgaagaggctatggtttcatgcaacggacgaagtccgaatgatgtagtaggtgtatatatattctggatcgtacttgccacacactgctatggtggattcgtgtatcgagcatggggtaagctttacagatggagttgtaccagccatgtggactcgattttagatagggctccagtgaggggcatccacgcacgggaatgagccgaacctctggagccaggtatatacacatggttaggatgcgtcgttgccatgtaagttttagcttatacacatccaa

SEQ ID NO: 42674 - DNA, 974 bp, Arabidopsis thaliana landsberg
tgtagacgaatctgtcgtttgctagctaatagtaaatcttaagacgctgttaaggacctaattgtagtataaacagcatgatcgtatgtccagacttgatcacaactatatagcattaaaaaaaaaaaaggtgatagttttagtcttttagtagaatgttaggatgtgatttgactgtaagcaatatgatcacatactattattatttatctattttagatttgtagggaaaagattctaaaaagtatatacaaaatttggtaaatagttttggaagacagcaaaatcacacaaagcactagcatcggttagaaagcaaagccaccattacttttatgcgcacacaaagtggaatcttaaagttgtaatgtgtgaagcactataggaagatcctttctttctccaatctttttcttattttattaccaatttggatgacaaacttgtagtgactttcctaaatcagaaaacaaacacatatctgaggacgagagagagaaaaagattaatcagaccgaagaaggaatcttgcacaacagattgttttctttattctgggtggagttgggtcattgctatgtaataagttagatttcgaaacagagagagttcatcaggtgaggtcacaagcaaaaactagagcttccctgaggaatcttgattaatagatcctttaattgtaactagagctttgatcttacattagcatttagctttatagtaatcaaaaacatagttgaatggaaaaaaaaacgaaaaaaaatctatggctgcaaaatcatgggtctaacaatccatcaaaacacttagttggctacttacttgagattttcatatagacgcttcttcatataaactaagatcaccatttatcttcttctccagcttcttctgtctaacagaggttgactctactgcttgaaaccatagcatagttatcatggacatggagtgcttgtgaaatacgcccacag

SEQ ID NO: 42675 - DNA, 468 bp, Arabidopsis thaliana landsberg
gcatatcgaacagcagatttatgacagttatatgcataaaacatataagcttataattaattttgtcagtagtttatttttctgaactcttaagctgtagaaatgaaagcctaagaagcataaatgataaatctattgtttaaaactttaagctgttttcatatttgcaacggttatggtggctaaaaattagtacacattttatccagtctttattattctaaacataattaagaatctcatgtatagatatgaatgtgtatgtatacacacatacgtaagaatatggagaggtggaacatgtatgacagaatggtctagtctatttaatcagctaattaaaaagctctccaaggaaaaagttggcaaattgactttcaaaatttacaaatcaatttccaaaccaattgatatgataatcattaattttatgttaaaataatcgttaacaatattatctttggtttt

SEQ ID NO: 42676 - DNA, 575 bp, Arabidopsis thaliana landsberg
  unsure (1)..(575): unsure at all n locations
cttatctacttgggtgattgaaatcaactaatcaagggcacttgtttgagtgcattgagctgctccatttcctcatttaagatttataacactttctaaactttcataattgttaggtttaaacgtttctgtaatcttttactgttattatgttacatatgaaggaccataaaagtaaaaattaataagtatattaaagttttaacgtacatgcaatttgttaaaattaatattttggtgaaacaaagaaaatcttgtttgatattttgtttgtttgattgaagttttaacaatgcgtaaatattgtttcattgacattttcattttttgcaacattttttgtttcaattttgtgtctacattatcgctagtaccacattcttttcgctatatcgccgattaattgtatcaaaagcatcatatatttcgtttctacaattgtaaagtatgtaaccaacaaatccattttttcatgtctaatagatggtacatctcaatctcagactngaatntactanntatatnnatattataaatatctcaatctaaagcaattcagagagatattcaaactc

SEQ ID NO: 42677 - DNA, 483 bp, Arabidopsis thaliana landsberg
aatccaaagtcaagaaaacacgagagacggtcactaagaagcatgtttgcttttgaagccacaagtaagcctattaccaacagtgtaggttccattactcacattgaacatctggagtggaataaagatcctgatgtcgtcccctactctattggtgatctcagtgaactaggtaagtcctcgaaaagattcaagcttcatttttagtttctgtttgaaatttgaattgattctaaatctccattggtacattttgaaggagtcgatggaaatgcaaagaagcgtgagaatttggtttttggggaggaagaactttgtattagagtgatagggaacaagcaagagatagagataggggattttactgagcatatgaaactaaaagatgaaaaggttgaaactctgtgtttgcatctgatgaactctgagttagaatcaaagcggttgcgatcttgtattgaaggactgagccaagaaatgtta

SEQ ID NO: 42678 - DNA, 939 bp, Arabidopsis thaliana landsberg
gatatcaatgtccccttggctcgatcatcacgcccaaagtttcttcttcaccttgtctcttttcacagtctcacacagcatagaaataatcgaaagatttctttttaaaatctgggatttgttttttttgttcattgatcattttcgattgttagagaagaatcaaatggcgatggctatggatcggatcgtcttctccccttcatcttacgtctatcgtccttgtcaagctaggggatccagatcttccagagtttccatggcttctacgattcgctctgcgactacgtgagttttaatctctctatttccaattcgtgagcttatttttctttaatgctttgaatttgttctgatctggagtttggtttgagtatcgatgataaacctctgggctttggttgatccagtttcttattttcatcaatttgattcccaatgcactctcattgtgtgtagttacgagttatatgatcacatgtattagtttctggtttgtgaaatgaggaatttgcttcatttgtgtttaaaaaatctttcatttttactggttttctgatttatctgggagatttctttagatcaaagaatcttgattttttttattttttatttatttgaaaagctatccttacatgcaaaggacaatctttgtctctatgttaaattttgataatctcttcaactttcccaaacgcatgcatgaattgttttgtgtttatgactttctttttacttggttgttgacccataagactactatgctaaatcattacttcgttcatttattctcttgtttgattattatgttaagaaagcttgttggtgtagtagctgcttagactttttctaaagctttatttggttttaattacagagaggtaacgaatggaaggaaactgtatatccctcccagagaggtgcatgtgcaagtcccgc

SEQ ID NO: 42679 - DNA, 392 bp, Arabidopsis thaliana landsberg
tcccgaaggaacaggtgttacctattccgacagcgataaatctccaatctttgggatgtttaatctattgaaaagttgttgaatgagaatggtctaatgatttttccggtctcttcttgcaaataacacttttatggttcaatccactcttatcaaataatttaagtcaagattttcagcgtgtggtcggaaagtccttacacgcaaccgaagtatgatataaatttatctttagcatatggtcgaaaagtcttttcaataaacttagttaaatagtagtaaacatatacactagctacacgtatttcatctttattatggtcacacatactacacaaccaacaaaaactacaaggcgatagcatcacaatgtctctgttgggccttcccct

SEQ ID NO: 42680 - DNA, 635 bp, Arabidopsis thaliana landsberg
tgattacgtacatatgataatccccaataccaattaaaaataagcaagtagacacctaactacaaatacaattgtgttgtgtgtatgtgtttttaaatatttctttcttgaaaaggttaattagagaacctagaatcagtcaatttccacctaacattagattataccaaatcctgtaattcctacccattcctgctcaataaatggaaaccacacgaacaacttaaaaacactgttcatcaaagataagaaatccaaatttcaaaaaaccattgaccataaacgaaagacatatatctaagcgtttcggttctgagaaacagcaaaataaattcagacgaaaaagaacaaaaacggaaatcggaatcaaaattctatcatcaaactaacctgaaacgaagtaggtaacggcgagatagtaagattcggctaataaacggaagtcggtgaacggcgttttcttcaattcaagcaactggtcccgtcgtcgctggaaagagagagagactcatatggcggttacttgtatctctctgtgtatattggttcctggaaaagtagtatatgagaattttattatacgacaaaaagggagggcaagaggaatattatgcaattaaatattataaagtctg

SEQ ID NO: 42681 - DNA, 624 bp, Arabidopsis thaliana landsberg
aaaaagaacaagattagccttagttttcgacagcaaattcttctccctccgtaggtttatttttggcttataattttaatcaaattaagtattggcttatgaacattaaagctctttaccacacaaaaaaaaaactataattgtgacactttgacgcttttggattcattgcactttaaaaaatattctagatccaaaaaatgaatcatctaattgtttttatgctagttattgctttgtattttagtttgaatgaaggtaggggttgaaatactttagaatttcaaaacgaactcactcgtggttgtattctcaaagttaagtgcacatccaactatgaagacaatatgggtctccataatgtgaaattcaatcagtcctacagttttactttggatgaaaaaaggcccaaaagaatagtatgggcttgtcacttaggcatgatcagaaaatggagtactttcatgacttatggagagcatgtagaggagctatgagagttcgatgtaatgagacacgcgcatggattgccaaagttgatgggatttacttagtgagaattgagaaaccatgaaccaggcacctgttttgcaatatgggcaaataggtacaaaatggtacatt

SEQ ID NO: 42682 - DNA, 493 bp, Arabidopsis thaliana landsberg
tacattttgattcgctattttttcatacacttaaagtacatgtgtcatgatgattgtaccattacatctttctttatctttttggatgaaacccattaatctttctttttaaaaattgatttatttagtcaacaataattacattgattacgtttcctaataagccctatatattctgctaaatattgaccaaactaatgcaaaatatatgttataacattacatcattgtaacttgaaagtatcatcgcataatcaaaatgaatcgtaattgtccgctctatagtcctccgtgtcaacgctgcagctgtgctggcattacgtgccaacctctatttccaggtacattgtttttaatttttatcttcaagtttttgtgttcttctctttttatgggtcatatcgtactatgattttggtgtaaaccaccaatttatctacactaaactgatacgattatcttttatggaaatcaacaaaataataaacaaaag

SEQ ID NO: 42683 - DNA, 763 bp, Arabidopsis thaliana landsberg
tcaatcaccaaccagaaatagtagtttatcaataaaaaatgctaagaactaaaacccaaagaaatgaataaggccataagatgcagtaaaaacatctcaccagcggctaataaacgtgtcaacaacaacaatgaaaaacatcccgaataacttaaaatgctttccagctaaagattctgtgatctgcagttctacaagaaacataaactcagtgagatctaataatgaaaaggcttttggatttcttaaacactaagcagcagcttttgctgtgtggggaagaaaagctccacaaacctcaaacatcttgtaataaaagtaaaaacactaagcagctttggctgtgtgagaagaaaagctccacaagcctagatcttgtagtaaagcaactagatctctaacatcttcattctcttgaagcctctccacatcttcttcaccatggctcttgtactcatgtttaccttctgatctccttctcctctgtatcaccttccttctcttgtcatgatctgccattcttcaacatccacagagagagagaaaaagagacaagtcaaataaacagagaagatctcaagacagagagcataagtgaaacagagaaatattactctttggacagacttaattgctgagtgatcccagagatgcacagagggaagccatagttaccactaagagttgtagacagcatttctttctttgtagtgaatggatctttcagaaatctggatcttgtttttaagacgaaaaaaaaaga

SEQ ID NO: 42684 - DNA, 955 bp, Arabidopsis thaliana landsberg
ctcttattattggctcagttagatattcgaaaatctacccttcacctatatatgaaaaatttaagaaaacgaattttcagagtcatgtctcttcccatgcaatccattgtataagctgaattgaggataacaaagctgcagatttcattatgtaagttttcattataaatgtaatgttactaatcataatctatatttcatacatatgcatagtaaaataatggtctatgataaggaataagaatccgacaaacaagaattacgacatgcgctccatctctgaatcagctaatcaaagattagatagaaagaaaagcagtcgttgacttttactttcatgtggcattataaaaaacggatggttgttattatatactttcaacttgatctagctagttgcctagtttgttcgtccagaccactactagtattttgtaaataataccaattttacttttcttatagtaagctgtgaaagacatgtggtaatagaaattatatagagcaaataattacgagtgtattaacgtaattttatattataaaatgctagtattatattaagggtgtcttaaaaataacaataaacccaacaaaagtgttttaaagaatacatttttgacatactgtctcaccttatcctagaaaattacttttcaatattgatatttctttttaaaaattatgttaagacacttataaaaataatgcaatggaaatgttcttaggttacataaagaatattgacgtcatcaataggtggtctcatgctcgtagaatatcatttgtaaataatgtcgttttatataatccaaaaacagacttgaaacataatgtaatttcagttttgtcatcattagcttagcttattcacctaaagagttaaacttatattgtttatcagtaaaaatatctataagctatagaggcttcaggcttgattaaacagtgcttg

SEQ ID NO: 42685 - DNA, 261 bp, Arabidopsis thaliana landsberg
tagtgacacacagacaatggcaggcgcgctcactccactgagatccaaggggagggctgacgggcacggtgcggatctcactgcgcggtggctggctttgacttatgactgttcccgtctgttgactaggccagagctgctagagatgcgcatgatcagcaccgggcccgacttgacgttgttactgctgcccctaaccctacctttaagggaggcgaccacgtgagcactaatgactcacgatggggtagcgcatcgtaa

SEQ ID NO: 42686 - DNA, 746 bp, Arabidopsis thaliana landsberg
atgagacttgctccggtggtttctcactgaaaaatgattgttggtgctgtttgcgacttaaaactaaacaagctcgttgttggaaagaaaaagaatttcccaacgctaaggagctttgtttcgccaattgtccccctcttgaataatttttatggattctgtcatttcgaagcagattttttttaaaaacgttgataaaatctaaatatgtatgttgcatattcgatttaaggttttttatgacatttatttcgattttagtggattcctttacattaatgttacgatattcttattttctataatttaaattcactgaatatcaaccaattacatttctaaataaaaatatatattttataggtgttagataatccaattacagttgccaccaaaaaatatggaatttaaaactaaattacaagtatatgatatttaatttggatggggtttgttaggaaaagataaaataatttgcatagttttagtttttgagtcaaccaaatggatcaatagattaattgagaaaaagaaaagaaaaaagaaatcaatcataatgttttcgaattttttggaaagcttatacgatggaatcggagacgatgacgccgccgacgacgacgaagacaacaacaacgacgagaaaaccccgaaagcctcaacggaaagacacgatttctcgagaaacgccgttcgtttgtcaccggaagaggaggctcaagcgcgtggggttaaagatgatttga

SEQ ID NO: 42687 - DNA, 1831 bp, Arabidopsis thaliana landsberg
taaataaccaaaaactttaataaaataaactgttacatattgtaaaaaattagatttttataaatgtttatattcaaagagagaatctttattgagtacaaaaggaggaatatatgtgatagatctaattacataatctactttacataaatagaagaagatatcgcggagtgattgatatgtgattgatctagtcagatatcatgattgatccttaacaacttatatagtagttatgaatctacgtgaactatggatacaacatatccggtatatttctatacatctcttttgaatgcatgatccttaacatcggttttcactttttcacttgaagaaaagacgaaaccgcgtcggtgagtttaaattatctcattaattggtgcaggtctacggaatccatggaatgagctaaggtggagccacccgtaccagatcatttccacccaattcccactaacaaccagatggtattagatttgattgattccccaactccttaaagacacattattgtatttccgaaaataccctttataacgttaacattaaaaagtgtcaaaacgaagtcgtttctttcgagaaagcactctgaatacaccaccaccaccaccaccaccaccaccatgttctccacagcttcagatgcggctttttgaatacaaataaagagagagaacaaccgaacagagaataagagatacgaggtgatcactctcggaatctgggattttgtgtaataagctaccgttaagttgattttcatcaacgttgttgttgcggaatcgtaacagatcaaaaagatgtttgatggtttcttaggccgcggatttgctcccaaggggtttgtcatctttctccatctttattcatacgatttatctctctcaccttcaatttctctttgggttaaccgattttaaatgtgtgatttttgattcgaccagaaaaccactgataaaactgactaagaatcggatcgatgttctccggaggaaaaggaatgctacgataaagtttctgaagagagatttggctgatctgatcattaacggtcatgactacaatgcttttagcagggtagttttcttggcctgttttgcttttcttttaaaatttgatggattcggattttgaatgattttggtatggtttggatccatctaggcaggagggcttcttgatgaactaaggtatctctggagtctcgactttgtcgagcagacctgtgatttcgtatacaagcagctctctaccatgcaaaagacgccgtaagttttctattcaatgcctttgatatgttgtatgagagatttccatgttagcctttttttaatttgtgtcgatggttttttttttgccattctcctagattattggcataatcttagtttatgttgtttgttttgtgttattcattgagttgttgtaacctaccctgactatatgaaaagttttttttgtatatctctgctacatatcaatgtgttaggttttaaattgactatcaggttaaaagattgaatattttgaactattgtcagttacctcatattttggcattttcctatccacactgttcctgtttccttagtgatgtgttctgtttccttaatggaacattctcaaagatgattcaagtatttgttctatgcggaaatatggtttggttcattaattgatttgggcttgttttttttttatgcagggaatgtacataagatcgccgagaagctatctcctcgataatgattagcaactctggatgtttctaatggcctgagctgcgtgaattgaggcaaatgtttcacgaaaaatacacagattcact

SEQ ID NO: 42688 - DNA, 547 bp, Arabidopsis thaliana landsberg
atccgtagtcttaaccatgaaatgtccagtagaatgtgacctcgagaatcgccaagccgaggcttctattagccttttgcttgaaccagcggttggaggattttcctcatcatggtttatgtcctgaatagtaattgtgactgtgttgtggaatgattcaagccttccagatccaatcatgccaggatctaactcacaccggcaaacaggacaagtcttgtgtaactcaaaccaaagatcaatgcaatttgaatgaaagggatgacgacaaaccgttatgagcctaactgtatcttcatctgaaaactctgacaagcaaatagcgcattccgtcccatgatttttcttagttgcagatgaatagtggaatacaggaaaggaccggatgataaacgggtcgaggccagtattttcaggcggagtggccacatggattaggtcaccgtaaggtgttccgtgaaggttccaagtagtaaataatcgattcagaagaaactgccagacgaaaagaaagaagaatccggcgaaaattacaaagagaagaaca

SEQ ID NO: 42689 - DNA, 501 bp, Arabidopsis thaliana landsberg
ggttaaagttagtcattatcaaattaagccactccactaattacaagctccaaaagctttctccttctttttctctctaatctctatttcgtacggatttctctaaccggagcgatggagattgacggtggagatcgtatttccggtgaacgaccgatcattatggtcaccaacgacgacggaatagacgcgcctggccttcgttctcttgttcgtgtcctcgtctccactaacctctacgatgttcgcgtttgcgctcctgattcgtacgttttactctaatttttgtagaaatgtagctcaaatctcctttggtatacgatcgaatcgctcctatatgatggttatgtacgaattgaatttctctagatatcgatttcgagtttctggactcatttagaaatgctaatcgtttgatataatcttctcgaagaaatctatttatgtgtttagttttgtacatcagattctttctcttttcattgtttttgttttgctttg

SEQ ID NO: 42690 - DNA, 584 bp, Arabidopsis thaliana landsberg
atcattggagatatatattggactcttacgattcacagagatcgccatgtcactgaatctcatctcactcgtagttgtatcgagcatcatctttctgcctattttatcaaccaatgctaaataattgatctcctcaataggtgccttcatcaaaagagcttgacgaacttcttcacttgaaatccattgtacttcatctccactctttaaataattgcccccataatcaaaatgtatgaatgtgtgatggttattactcattatcacctgaaatagaataaaaactaactttagaatagttgtcttgttaactctgtaattcatgttgtatcagtagtcccagttgtatttgtaacatcaatagtaccataactacagattggagaaatccttctttctgttttgctcgattcaaccactacataccttcataaattatcaacgtaatccgactataataggctaaagcaaatgataattaacaagattgaactcaattaacataattttgaaacaaatttttcaggatatctagaaccctagtcttacattacagatgtaactgtaacacttgtttctatacc

SEQ ID NO: 42691 - DNA, 178 bp, Arabidopsis thaliana landsberg
cctttatgccatgattttaaagagagctgttcattcggacatcactatactttgaaaggattttacactataatcagtattgaggcccggatcggacctttagactatggccagtcagtggcgcattataccttatctaatgatatttgggggttgattggagcaaactgagctcatt

SEQ ID NO: 42692 - DNA, 587 bp, Arabidopsis thaliana landsberg
tatgtacagtagatggttgattcatgcccatttaattttaaaatagttaaaccaattttatgatttaaattgtatatattttaaactaaactgaaatatttatgctatagtatcaaagactttgaactattacgtataacgtatgtgttgattttatagcatattatatgttgagaagatagtttatcatatatattttataatatttgaaacaattggttaatagattttttttattttttttaaaacaaaataaaaaataaaaccaattttacctttcaaataaaatggagaagatgtcttgttgacatgatgctaatgactaatgagtattgatccgaaatattgttcttggatgtaattacatcataagatttgtcggcttcgaggattgcaatattatattatttgaagcattattattagatgtgtgatcatttttgtggctctaaatgcttcccacaatgaaaatgaaaattcaaaggaatgttgataaaatgttttagccttttagggtctaatgactcgtgctaccattaagtattcaaaaaaaaaacaaaaaaaaaggaaataattaattcaggtta

SEQ ID NO: 42693 - DNA, 805 bp, Arabidopsis thaliana landsberg
aggctagaatcataacatactcatgtagtgcttgcattttaggattggcaaaagctccggttctaccagagccgggtggtgcaagtccaattacatctttgcctgaaacacattagatttttccaattaattgcaatgataaaccctaacaatcaaaaagttgcaacctttacaatctcgcaaacacctaaactcagaactaagaacctctaaaacgatttaatcgtaaggaatttaccttcaagagcaaaaggaagggcttcggcttgaattttggaagggttcttccatcccaatctctcgcaagctttaacaagctcctcacgcacaccaagctctgcaaacgtcttcactacttcgttctcttcctccatttttcagtactcaccaacaaatttgcgatctcctggacctcaaaggccgtaagggaatcaaacggcgttaaggaaaaatcgcgactttaagaattccggcgaggttcacggctttagataagtcgagtaaacgttagggtacaaatcagaagagactagtgtttgttggctgagaaaagagagcgagttctagctatcaagggttttagttatgttgttattttaataacctaattgggccaaatatgggcctgccttcttaaagtttggactagatatcacaaattacagtggtcgatgaaaagttatcttcacaaattacacaactctctatgactctacagctgtaaacacaaaatagatcgcttgtttttatttgttaatgataccgaaatggatggcttgtaaacaatgtaaagagcaaattttaa

SEQ ID NO: 42694 - DNA, 432 bp, Arabidopsis thaliana landsberg
agaataatcattactattatagtaattatgctagaatgtctcattttactagtcgtttagttcttgtacttgtttgtgctaacctcttatctatatatacagaagagcaatcttgtcaatgcatgcaactccgaatctgtttccattaatattttaggaatatgttctgttatgtttgtgcgcaaattacgttaaccgtagtatgttgggattcaaattcatgttgtgattggcccaaaaatattactatattgtgttattgttaatacgaaaaattttgacccaaattaaagttaatatgtggttccatcacgaacttaaataggtcattccaaaacaagttcgaacgcatcacatctaaatgcatatccctctttggagaaacgatggattttaccacccaactacatattggtaaaagtaaaactattc

SEQ ID NO: 42695 - DNA, 577 bp, Arabidopsis thaliana landsberg
aaatataataaagaagtgtagatttacgacaggtgcaaatgcattttgttaaaatgctatttcagcaaataaagaaactaaaataagatactgggcctagttacacaaaagaaaaaagaaaataatactgggccttaaaatctatgatttttatatatctgggcctgtaaatacagaaagattgcgtcctttaacattctttccttggtcagatgaaaaggaaacaaatcatttattaacaaaaccaagaaatgggaaataacaataaaagcacttccctcgctcaagtcaatttaatatttccaaaaaaagcaataaaatctgccgtttcgttttttcctttctcattcaattcaagaagaagaagaaaatctccgcccaaaaagtttcttcctttgaagtctttaagccctaatctatcactgtctgtgaatcaacgcctccctgcgtttgtttctcagttgaaaaaaaaagataatgatcgcaaaaaacttcctccttttgctctgtttcattgccttggtgaacgttgaatcgagccctgatgaggcggtcatgatagctttgagagactcct

SEQ ID NO: 42696 - DNA, 621 bp, Arabidopsis thaliana landsberg
ttttttaataaaataaaagtttcaaagtgaaaaatgaagaaagtaaagcaaaagagatgttaagctattgattcatttttccttttacaaaaacacgtcattttcacacaaatcataacgttttcttttacctttttacttaggtttgctttcattatggtctagtcttcataatcgatcatcaagtatattatactaacttttttttcttgacttttgtataaccaatgtatgagaatgtactaggtagaaaacacctttgcaattataaaaatgaataatggacgtgaaaactgaaaagaataagaattgggaacactaaatacaaatcaaagacttggctgctatacgattccttcctctatttttctgtgccctttaattaaagactaactaaattcaacaagcttgaaagaagagaagacatgcactgcagaaaacgtaactaatgcattaaagaatctgtgactctctgatgtgtaaagttgagaaaagcattatttaccaacataacagtgtaacggtagtattcggttttttggcagttctttaagggcatttctggtacctaactaaaacttttaacggtccttttcctaacctttactatcccattctatt

SEQ ID NO: 42697 - DNA, 712 bp, Arabidopsis thaliana landsberg
acactgatataaccctgcaaggttgttatacttagacagtattagtatggcttaattaggtattaaaggacttttcttttagaacattttttcctgagaacttctattgatagacatatgtacatagatatcatcttaattgtgaaataaatggaaaaccaaaaatggaacctaaaaggtgtggcgccgccaacaaatgcaccgcccctatctcattgcatatatgtcgggacatgtaaatatccaaacctgaaagctaagataatgtttttgaaatgactttttcatcattagatagggaagtgatttcgttgctttagttttctaaatttattgacatttgtcaacttcttgcatatccacaacttattctacaaagtgacttagtgattattgacaaattgaccattatgaatgttttaatggtaagaatacaacttctgatctcgggtaagacgcaagtcgagatccatggttatattgtttacttgtctggtaaatatttatgaaaagtgtccacttcgaatttttgaaaatttgctattttaatttgcaatgctctacgtcgcaagtaggaataacaaaataaacatgaacattgtcatgtatgataatgtctacaaatatttataacaattataaggatgataaaaagactaattaaaactcaaaaagtgtactacataccatgtacgaaatcggccaaacaatc

SEQ ID NO: 42698 - DNA, 698 bp, Arabidopsis thaliana landsberg
  unsure (1)..(698): unsure at all n locations
tctcttcttattacaagagcttcatcatctctctttcttagattcttgtctcaaagaatcctcggtttcttcagtactccggtcaatcccgaaacacttaagaaannnnnnnnnnnnnnnnnnaaacaaagtacatggatgatgcaaactatgacttgaatctttctccaacgaaccttctccttcctctgttactgttgtgactctccttgttacagctggtgttatctctccttttatgctttgagagcttccaacctgtgattacaaaaaccgatgagttcattaccaaaggatgaatctaagaaacaagtcagtggttaagcatattcacaaatcacaacagatgcaacatcaatgcacttcacgatgattccagtcaacagataaaccacacaaacttgaagagaactgtttggttctaaccattttccggatcataatctaaatgtctgaaacgcaacttagatttataggttctttttttaagaatccaagaatctctgagtcatgtagcactagacatctctgaaagaaaggctagtgaggaatctaatattgttgcttaaagacaaaacaagacatatctcttgtgaaaactaagcaagcaaatagctttaaaacaaaggaaagaccatcctcggttcgttacctaaagaaagctaaactaccaaccaaatttaagaaagagacatttt

SEQ ID NO: 42699 - DNA, 170 bp, Arabidopsis thaliana landsberg
aagaaccgcaaatgcatatgattagagacaatcggtagagatatacaggagcatgaggtgacatgatcggaactacctaaatgcaaccacttgtagactaactgtacttaagagggagttaggagccacaattggagggacggccatgtggacaaccacgtcaaagcttg

SEQ ID NO: 42700 - DNA, 813 bp, Arabidopsis thaliana landsberg
cctcctcggaagcctgcaccgtctacacacgcactcccacaatctatatatacaagaaagaaaaacacagattattaatctcactctaaatttaacgttaggtttaataaaaatcatataattaccgatcttctttgcgtaaccatttttcttctgtgagttttcctgcaagaatattgttgtaacatgtgagaaatatgtttttgaaaacataagtattatattgagtataattagtttgtgatgaaaaagacgtacgacatcagcctggacgagttggagaacaagaagagatatgagaagagaagcgataagagcttttgaaatagccatgattctccaaggagagtttatgatgagagaacttagctcaaatcagactgtaatgataaatgtggttttagttgttgtgtcctaatgagaacttggagggttctatttatagcactcctttggatggacaaccgaccccattttcggtctagactattctttttattttataaatatcttattaaaagttttaacttttcagggaaaataattgtttctgagttttataattcaaaatacgatatgattgcaagtactttccaacagtggctgaaaataaagtaagacatttttatattttttaggtaattgagaaatcatttgtattttatcatttttcatttgtattcttataaatattttttgcaatagatattgattactagaaatggtaaatagatttttaagacattgttatcagcatattatttatgtgtgtttttgtggtttattttctctttttcaaaatgggtcggttgg

SEQ ID NO: 42701 - DNA, 482 bp, Arabidopsis thaliana landsberg
atggaactgtactcatgcgggctaactgaactagggcttgtttagagtgaagcaggagccattgcagatgtataagctgtgttaggacccctgaactgtatattattgatgggggttggcgttgggtaagaaccctgtcccggccacgaattcatctgattactaaacggtggacccggtgagtcagttccagtgtaaaagctggtgtcgtttcttcttggagcatttggaggcggttcagatgtattgtattggttcattagcacaatgttatcatcttgacttgctgcaacgttctttctttgatcaggaaccacgggagaggctgaacattgtgtctgcaacggcctgtgaacgtacctgcaacaagaacataacacacaaatcagcagaaagaacgacaactattgaaagattaatagaaagaggaatacagaaattagacaactcaccgagtgaaagctgaggcactagaaggatga

SEQ ID NO: 42702 - DNA, 813 bp, Arabidopsis thaliana landsberg
actaaatatttactgcaaacaaaaactaagaactaaacaccataaatccaaaatctaatttcaaactaagaaactactgccattttaaagccttaactttgtcaaatgatatatatgaagtaaaaaaaaaaaaaaaaaagtgaaagaaaacggaaacatgaaatagaagcttcgttaattaaccggtggaaatacattttcatccccaaaaaaaaaaacagttggaaatgcatcatgcatgcaccatgaaactaacatatttgccgtgtttgaatttacattttctgaaatagaattataaatatggccttacgtgcactccttaatttcataaacaagcctctttttttttttttcctttcttcatatgattagacttttagtataatataatgaatattatgagcacaaggctgcatatacttaataaagtgatgatggttagctgataacttggttgacgtataacatgataattaaagtccattatcaggaagaagaagagtttaagaagctaaaggaccaagtgtgaaaacttcttttgtttctttttaaattttttttgttgttttgacggcatccatttggacattttactagtgcggatgcttacggaagcaatattgcatggtcgcgtaatggcttatgacatatttccgactcactaaaagatagtgtatggtagagtatactacttacgcgagtatcgtgattaatgccgttataaatatttttagcaaaaactatacttttaactgaaaatcacttctcttgggtatttaactttttcatctatagattcgtttccttttc

SEQ ID NO: 42703 - DNA, 400 bp, Arabidopsis thaliana landsberg
cttttctgcgcagttgcgggtacaacgccgttgctttgtctgtcaaaccagatcacttctcttgcaccacttgagcaacagtgacatcactcactcaggaaagctctcaccagttgctcagtggcaggccaggctgttttgttttgggaccatgggctgggacgcgagcaacggaatgatttgcgggaattgtgctgtactgagctcaacgacactgacagggccgatgagtactgacgctgcgatcctcactattgtggatccacagagatcgatgagtattcgggacaaagtctgtccgaagattcgagccttgcggtatcacgaagtctaataccttgacgatagtgagagatgcttgagcaggtctagcggtgtctatacgtgtgcggaaccttcc

SEQ ID NO: 42704 - DNA, 263 bp, Arabidopsis thaliana landsberg
ccatgcacgaggagcccaactacccatacacgtgtgaagggtggctgctcccaaggcatctcgggtagattggtcagacctattactactgtatgcacgccatgcagcccctacaataagtctctcgaagcatgctcttaataactggcttcttctcttgatttatacgtcactaaatgctgataactttccttatcgcgtcttattttcctttcatccttgcattgatcttgggactgcagctcataggcaaggacatgcat

SEQ ID NO: 42705 - DNA, 456 bp, Arabidopsis thaliana landsberg
cttgctgtataaatctctagaaaatcgttcaacggttcacggaatgtgattcaagaatcttgtttatgtttgttctttgtatttaggtatctaggtttgtgtgagacaacagaacactataatgtatccttgtggctacgttgctcaagtcaccaacttgtctcctcaagccactgagaaagatgttcataggatcttctctcactgtggtatcggcgagctcgttgaaatcaccgggtaacaacaacgttcattgatcagtagattattaatcattcttgaatctgtttatattttgtttcatgtctccatggatttcatgtgccaaggggatgcattaacggcttatgtaaccttcagagatgcgtatgctctggatatggctgtgttacttagcgtaagtaccttaattagccataaatttccagtatgatctacttggcattgattataatg

SEQ ID NO: 42706 - DNA, 1032 bp, Arabidopsis thaliana landsberg
tgagctcttcaagattagcagctgagtgataagtagtaacaacaggagaagggtttgataagtgagaagatgtgaaacttatagatgaagatggctctattgcagttgcagccattttgttccccagaagtatcactcaaagactctgtttttgatcttacaaatccccaaggatacaaaaaccctaaatctaaatccaatgacaaggatcaaattttgagcagtgattggatcaaaaacaatacagagaagatcatagatatgaaattaatcaagccctgaagaaaagatccaaactttatgaaagaacattctaatgaatcaatgtgaagaacaaagtcaattcgagaaatgcttcaaaaagtcaacgaaaatggcggatgagaaaaaaaaactaaatgaaacttaaatcataagagaaagaactgaatagatgggtagtcttcaaaataattgcacaaatgaaaatgatttcaagaagaagaagacaatctcagaacagatgggagaaaaaaatcagaggtttatctaaaagctaaaggtgagaaataagaagactgaccaaatagtaaagtctttggagaatagtaaagaaagagccaattcctaatccaatctcctaaattttgtgacgacgattcaaaaaccgtaagcaatgtcgtcagcaattgaagacgacttgagttgtggtgaagtgggtctatgacgtcttaaataacgtcagctttgagaaatatacacaaaatgctaagtagattgatgataagtggaccctttctaataaggtcataacttataaaatgggttatgttatgtctacacaaaaactcaagataatgcaagagtagattgatgataagtggaccctttttaatgggttctgtattttatctgaagagcatgaataattgaatttatcaaactttttctttacttggtagttggtacatatatgatgatgctaaccaagttcattttgattagttcttcaaccaaattttggtagattaaatatcataacataacattaga

SEQ ID NO: 42707 - DNA, 563 bp, Arabidopsis thaliana landsberg
  unsure (1)..(563): unsure at all n locations
aatacatggaaatacaatatcatcgtaattatgtatctctattgattttagagtaagagcgagtatgtcgacaaagaagaatgtagattaagtgaaagatttaacgaaagaatttcgaaaatggacgaaagattataccatgaatctcatgctttagtagaaatagaattgataataaaaagaaagaaaaaaaagaagaaaaaaaagtagaaaaagaatttgatggtggaatatgagtagtaaaatgggacaataacacatgaactatatatggtgatgatgaatctaagtaatttcaagagactacttttgtagtactcactccggaagctaaaagaacnnnnnnnnnnnnnnnnnnnncaaacaaaaactttcaaaaggatggaccggctcattttttggttttttacaaactcggcccaattcttaattgtccaaaatcatattgggccaatttcaaaacaattagggctttacttcgtaagctctatcatattcgccggaggagcaatcagaacacattcggagattcacttgcaaacatgggtcgtcgtcttttcctc

SEQ ID NO: 42708 - DNA, 685 bp, Arabidopsis thaliana landsberg
cgccaatccacctaaatgagaacacttgctagactttgtttactcaaagagtcaaacttatcatagaatcaaataaaacaacagaaacgtgtaccctcaaccataaaagctcaaatttcacacttttatcaacaatacataatcatcagagacacttgcaaactctggtctaagcacaaatcatgaaatcaccaacaatatcaagatgtggctaaactaatttttggagatctaagagactaacccaagaacagagaaggaagtgagaaccaccggttttagttgcatccaataaccaacaggaatagcaccacggagttcaataaccggaagagtagctaaagcaaacacaacagcttcgtctggccaaccaaaacggcgaagagtggaggcgattctgagaccaaagctcgaagatttgatagaatcagtcgcagcttttgcatctccagacctagcaaaccaaagcagagagaaagaagcccacaacacaacgcaaatcgcgaatttcacagggtttacaccaattgacggaagctgaatgatttcgtttccttcttcgtcttctttggtttttctgagaaacccatctggagaagaacagcatctgatgaaattacggcgtaatggataaaaaagactggaactttgactctgcaggaaacgaatttgcttccatttgggt

SEQ ID NO: 42709 - DNA, 769 bp, Arabidopsis thaliana landsberg
ggatccactcgcgcggatgtgatgcgggctatatacggtccgaatttttgaaggttgttttctgctgaatggatccattgactagtcctctatgattcttgacaattgttcttttgatcttttcttaatttttcttggtttttaattcccttcagaattggtttggtggttcatgactaaaccgaaaattattatattcgctttacacaatttttagtttggttaatagtaatacaattcaaatgtctgatccaacatagaaatcaagctgtctcatctcaaatgtcatacactactcacaagacttaagaaccgggaatgtagaaaaccaaacgccaaaaatctgaaatatcagagagagcagaatatgtgtctctaaagcttaaatcttgttttgcttgagaattaggcattaagaggagaggtcaaggtaaactaaagcagggactttgattatctcatttacacgcttctacttgtttcacataaatgagaatgtggaacattcttcattacgagttaaagtcagagcgcctacagcaaagtcagctcaaccaaaatagacactgcacaaactagtgacataaggaagttctaagcaaaataccatatgcagtctctctctaccgataaggaaaacctttcaggtcgtaacggccagccagtttctgagcaacaccatcgtagaggagtttatccatcatctcaaacttcttgtgatgtgttaccgccgtctcagcatgctgtttagacagcttctctgcctccc

SEQ ID NO: 42710 - DNA, 195 bp, Arabidopsis thaliana landsberg
  unsure (1)..(195): unsure at all n locations
tgctgtggctcgctcgataggacaggggggttccgattgcttgatctcggccgcagatataatggcttgccaatccaattnnnnnnnnnnnnnnnnnnnnnnnnnnnnnnnnnnnnnnnnnnnnnnnnnnnnnnnnnnnnnnactttagaggactcaccctcagcttcccatatttgtaaggccggacacgcaag

SEQ ID NO: 42711 - DNA, 643 bp, Arabidopsis thaliana landsberg
tgcctcgacttttaggcgattttctattacaatgttttggtagagaatttttatttgtatatttatgatgtatacgtgcatatgcattagattgttttgtcggtttattatgatcaaacaatagtttgtctgtcagaagattcaagaaatatctttgagtctgagagtctccaaaagacgttatgatgaaaatttggcatatacgtatttctgacaagctgataatattgtcatcttgcatttcaagcagtttcgacaaaattttatccaactgttatattcaaactaattgaaaatcgaaaaaccaccattaaaaattagttaaaaataacatatcattttaaaaatgcaatatttaaaaatttaacatatcaatttaacatgcttgttttcttaataagttttgatatattataaaatgaaccgcgtgattacaatttttctttttgtgatggaactgtcgttagttaaacacttaaacttaaactttcatgtaagttacgtttattcatatttgactcaattgaaacccaataatcaggaatgtcaaatattatatgttttgtcggatttgtaacgtgattctcgctcatttaataatgtgataatatcataaaatttaatctatgtagttgttaatatg

SEQ ID NO: 42712 - DNA, 342 bp, Arabidopsis thaliana landsberg
attccgggcagccgtagccccgtatcgtcgcccccagcatgcccagcgcacccatctcgcggagaatttcacgatcgaaagtttcgtgccggaatgcttcgcggatgcgcggctgcaatcgcttctgcgcgtaatcgcgcgcggcatcgcgcaacgcgcgctcctcggcggtgagttgcgactccagcaacagcgggtcctgccagtcgaacatcggcttcatgtcgtctatttgtgtgtgaaggtaaaggcgccatcccagtccttgcccggcgggttttcacgcaggaacaggatgcgctcgaggaacagcgcataaaccggatgcgtgcgctctgactg

SEQ ID NO: 42713 - DNA, 625 bp, Arabidopsis thaliana landsberg
acacacaaatcgtgctcgggacgcattggccaacctatttcgaagcatttattttacctgtggaagacgtaaaaaactgattagtgatgttcacggcttttaaacacagatatggtagcaaagagatgtaatatggtgaatattctgaccagaagaactcgttcagatcatcgcagtttctccacatagaatgatcagcagatccattcttattcttctcagcttcctgcaggcatatacaatacaattgactactcactttaaagttaattcaagcacttcctcaaacagaaattcaccttttggacaaccatgtatatgggagtaactacatccgcaaggaaagattcgtgtcctccaccatatgctggagcaaccttctccccagttatcatactaactgcaccggttaaaactccatgcaattcatatgccatctgaattaccatcaacatcaacattgtgaatattgatcagactgactgatgaactttctaagaagatgtattaataacatagaaacagaattttccacttacgtggtggaaaatataacacaggcactctggcatgaacctcaagttcgacgcctattcccatatgagaaggtagagtcctatataca

SEQ ID NO: 42714 - DNA, 535 bp, Arabidopsis thaliana landsberg
cagattccattttgttgctaagttctttttctttacttctggctgtaataaattcgagtgtcttcatactttgggttttatagtttaaaacagtatttttggacacgagtgatgagaagaaacaaatttttgtttttgttttttttatagaattgtatatttttattaagctctctaatatttaaatgtcagaaacttcggcttgccggagaaataaatattctttgaaacttttgatttatgtgtgtgacgaggagatggggtctttattttggtattgctgctcaacaaagcatttacacactcagtttcgcttctctattcagacccactttctttgttaaaaaagaaagaacagaaactatataattttaatgtcatcccttgtctctatcatgatcatatttcaaatattttttttgttccaaaggttataatttgatccattcaggtgccatcgacaatcctttgaaaatatattttctctagtggtccttttctctgatccccaagttgtatctttgaacacttttgt

SEQ ID NO: 42715 - DNA, 814 bp, Arabidopsis thaliana landsberg
aaacgagctgccatttctacagctggaagttttggctggcaggtttccatctggtcatccaatcttcaggaaatgccttgcagctgttgcagaatgcatcagttcaaagaatttgggagtctcgtccagctgtcttcgaacaactggtgcactgatcaatgttcttggaccaaaggcgctcattgaacttccatgcataatgaagaatttggtaaaacagtcgcttgaagtatcatttgcatcccagagtggtcgaaacgcaacagctgaagaacagttgcttatgctgtctgttctagtcactttggaagcagtgattgataaacttggaggtttcctaaatcctcatcttggagatattatgaaaatcatggtgctacatcctgaatatgtatctgacttcgacaagaatctcaagtccaaagccaatgccattaggaggctccttactgataaaatacctgtaagttcttcacatacatatatgaatctagtacttctttgcttgtaggtagtgctcttaatagtaacctttcttccaggttcgtctcactctgcaaccacttctacgaatatacaatgaggctgttagttctgggaatgcaagcttggtgattgcttttaatatgttagaagatctggttgtgaaaatggatagatcatctatcgttagcagccatgggaagatttttgatcagtgcttagttgcccttgatattcgacgtctaaatccagcagcaattcagaacattgatgatgctgagagaagtgtaactagcgcaatggttgctctcacaaagaagctgaccttagg

SEQ ID NO: 42716 - DNA, 1286 bp, Arabidopsis thaliana landsberg
aatctgtaatttattcaaactaaggtaatggagttttgagtctaactaatcaaaaccatatcaacgttcaacattttttagactaaaatcaaacaagcttttatatttggatactaaatcgaaaatgttttttttataacaaaagtagcacatcaaattgattctttttcgtctcaggacttgcttgtatacatctgacctctttgaatgtcaaagactgaaaatacaaacagatattacacaaagtaatggtgataaattggcaacagaaatgcgaaaacttgagatcaaacttcattaaaacacttgaaagcataccatatccgacccttcaaactttcaatgcgaaagactcgcgctcggttttggcaaaccacgacgctggtactttttcggggtaaagctagatccgtttaccagatatattactaccatattcaaccaagacccattaactttagatcgagacacaaacagttcatctttgttacactttgatcaggaatatcaatgtccatggaggccacgatataagacctgcactcaaccatgaatattgaataccattactcaatagaacaagaagagcatgaaacacaaagagcactcgtatcgctaaatgaaacatttaaagaacattatgtaaccacatatactactaattcaacacggcattgaaatgccacaatcaaaccattgatatagcttagaaggctaatagctcacagcttgattcattgtccctatattaaatcatagtcacacaatgatgaatttgttaagttttagttgtaaacttcttagagtagaacaaccaaatcgtgatcagttatcagatatgtcccagctccaagctacaatgcatagcctctatatacatgagagtgaataactttaccttatggactccattttgatggaagctatatcgtaagcttggagcttggacatatctgataactgaatcacgaaaacaaaaaatgtgatcaatgtatacaaagtcaaatagacagaactgcaattgtaaaagaagagttaagaatttgtgattaccttccgaagaaaataaaatgatttggagagtcaggagatacaaatgatgtctctctattttattcacgtcctgtttcaaccgcttcattcccgttgctcttcctggtcttcgaaagacaacggattttgtctgcaatccttctaaatgcataagctccgatatgactgcaggagacaatttctttgttttaagtcattcatggtggctgaaggtaatgatcattcataagccg

SEQ ID NO: 42717 - DNA, 1274 bp, Arabidopsis thaliana landsberg
tgattcttgtcgttccaggagccacaccaacaagatagtttgtccgtttgttaatatctgactcccagattctggcatgtggatcatctgggtacctaaaagagaaagtctttgagtatttttggatgtctgtcaacattcttgtgaatgatataatggaaagaagagttttaatagggttttacctcaaggcatccatgttcggagcaccaaaattcactctggcagcaaccttcaagaagaaattatcctcgtagtcagtggcatacatcgaaaggttcaacgggcgaagctcaagagtggacatgaaaggagaaccggtgatagcacagcatacacaaacatccacataacttgaagttgcccttacgatcaactcctcaacataaaccctagagacctcctgaatcgtcacagtagcccatttcgttgcatccaagtaaagttgaaactttgggtaggcttcctcactacccaaaccaccataaagaaatgtagttctgacaatgtatcgccttctctctttggtactgagtctgtaacaatacttcttattgtcagttgggaaatctcttctcctacggtattgcatcgagttccaattggtattggccaaagttactggcttgccctgtttgatgatctctgaatctgaaacccatcctagtccagttcttgggtctgtgtagttacttgagccaccacaatctatacttacaaactctgcaaatatagccactcaatcaaaatttcatccatttcccactaactacaataaaacgcatgacaagagaatcttagtattcccctactcttcaatcccattacaccataaattgaacatttttaaccataaatagtctaaaattgaagacttcaacgcaaataagaacaaaaatttgtgattgaacatcaaaaaacaagttaaagaacacatcaagaacaagaatttccacacacacacacagacacacacaaataaacactcattgaagcatttaaacaaacagattatgtgccataagtacctgtaacttgagacagaacaaaaggtactaggaacaaacatgttacagccaattgagctaagcataaacccattgaagatcacacacacatcgatggctcttaaatctctataattcaatgcaaaaataccaagttcttttcggctttgaaagtggtcacgagataaagaaggaaagcgtgtgatgagagacagtgaagtgaacaaagactccaactttgttaattgcttttactaaaaaaagtca

SEQ ID NO: 42718 - DNA, 450 bp, Arabidopsis thaliana landsberg
cctaccctagaagaactctttttatcacaatttcaaaataatgagaagtggatgtggcgtataaaaagaaggggggctccgcgttcacaagacgtctttatacattaaaaaaaaaaaaaaaaaaacagcttggtcacacgagacttatcaattccctcttgtgttttttttttgtaaggaaacggacgacgttacattttcttggactaaacatatcgaacaacgtacaaaaaaatggtttcttcaaaaaattacaagaaacttcgtcatacaagactaattaattcccacttgaattctatatataatctctttgtaaggaaacggacaacgttgacttcgtgctaaacttatcatcataacaaaaaaaactttggtttataaagaaaattccaagaaaaacttggtcatgacgacacgaaccttcattttgtatttgtatgtatgggc

SEQ ID NO: 42719 - DNA, 603 bp, Arabidopsis thaliana landsberg
aaacgtcccagtccatttactttacttctaaaccaaaccaattcaaaatcactctcatttattttcgttcctaaattaaatatgtaaattaaaaatcaaagtaagaaaaaaagaagacttgtccaaaaaacaaaaaaaaagactaaaaaaagttcactagagtccattttcttcttcttcctcacaccaaaaagcttccattgatttcgcatcagatcttgctctctcttctatctctgcgattcttctggatcttctcaaatccatgaaggaatcagatctaaccaccgaaccaatcgcacaaaatctaatcaagctaataagcaatgtctgtttctcagtcttcgttttcacagttctcatcttcacagtaatcgcagtaacttaccaaccaccagatccatggctggaatctgctccagcactcaccaaactcctaaccgaaaccgaaaacgcaactttcaaaatcgacggttcgattctcaaaaccggcgaagatctcgcttcattcttcgcatcatcacctttctcgaactccacaagagcaagtcaaggagggcaccatttgaggaaattccaagctaaaactcggtatttttacct

SEQ ID NO: 42720 - DNA, 504 bp, Arabidopsis thaliana landsberg
tttacatggagatttcctgtcggtatagcgtcctcatttctccatcgcttccacttttttcctatactaatttgatctaattaattcatatgtcaaaacattaagaaaatgaaactcgtaattcatactggaatttaatagattaattaaaatgctatttattggcaaaataaactcggtttatatctaaattttagaatcactaaaactttttgcccaaaaaaaaaaaaaagaagaatcactaaaacaaaaaacaatcaaaagaaaacccatgttggtaaatcggataatgaaaataattagaatccccgtcctttgtgtattttggcgtagcatgaaactatataataaacatgcattcattcttagacttctcgtagcttatcaacaacaacgcgctcgatctctctcagcctgtctgacaactctatctctagatctagagttttcaatttattgttgagccttttattaaaaaaaaaataaacatgaacaaaagaaatg

SEQ ID NO: 42721 - DNA, 189 bp, Arabidopsis thaliana landsberg
  unsure (1)..(189): unsure at all n locations
ctcttcccacttgggcccacatatcggtgtcctgcagtggcctaccgtacgactttcttcaannnnnnnnnnnnnnnnnnnnnnnnnnnnnnnnnnnnnnnnnnnnnnnnnnnnnnnnnnnnngtgatccgtccaatgaccttcccagtccaagacatacatacgtaacatactgtgaagcgaatgaat

SEQ ID NO: 42722 - DNA, 1188 bp, Arabidopsis thaliana landsberg
ggatatactgctcgtgtggtgagtttttttaatcaaaattttttgtagcttctttcttttgtgaatcatggggggatgactgcttctctcatgtcatgtttgtagtttggagttgttctggctgctgatgctttgttcgttggggctcagcaactaggccattatattcaggagttaagaggccattaggatctctctttaaccacgctccaagtggctatatttctcttcaacaaaaaaaaattgaaaagttttggaaggtagagtagttgaaatagatcaaaaatacatctttgaatcctgaaattccaatggcaaacttaccctttgctttataccaagatccgtattatccaaagaataatttgcttatataaaaaagaaaattcgttgacgaaaaaaaaaagaaaaaaaaaagaaaaaaagaaaagaaaattcggcttaaacttctagtagacaaagttaaataatctaggacaaaaattgcgactattcgagtttggtccgaaatcgtaagtaagagagtttggtcgggacgaaaaaaagaagaagagagtttggtccgaaaaaaaagttagttagagagtggaatattcgacccgcggaaaaaaaaatctttatccaatttaaatgcgtgtcgttttactagaaatatgaagcacttcttgttgtttcatcgtctggaaagtggaagcatattctctctcccatcaattattgagccaacccaactatggttaaatccagcacagttccaactaacccaggttataccggttgattacacgtggacggtggagatttttctgactgcttctctatcgcaatttgctattcctctgcttaaaaactagggttaggctacgattctgtttacaccaaaaaagcttttcgtcatcgccgtttggctttctgaaacaaatcacaccgtttaagattttctctggttctgagattatggagatggagcgtgtgcatgaattccctcatactcacatggatcgtcgtcccagaaagagagcgcgtctcggttgggatgtgttgcctcaggcaaccaaggtataaattctcttcacctcgttatttatgattccaatttgagtttttgtgtttgattcctttgaaaatttgatttttatttaaaatttaggatcggtttaatttttgtgttgattcttctggatctgc

SEQ ID NO: 42723 - DNA, 442 bp, Arabidopsis thaliana landsberg
  unsure (1)..(442): unsure at all n locations
ccccccccccctcccccctccccccccccccccctcccccccccnccccccccctctctctttctcgtactccccccccccccccccccccaaaaaaacaccccccccccccccaccccccccccccccccctcctcccgcctccccccccccccccccccccccccgccctcccccccccccccctctccccccccccctcccctcccccccctccccccccccccccccccccctccccccccccccctcctcctccccctcccttccccccccccaccccccccccccccccccccccccccccncccccccccccccccccccccccccttccctccccccccccccctcccccctcctccccccccccgtngcccccctccccccccttcctcgtccccccccccccttccctcccctcnccccccccccctcctcc

SEQ ID NO: 42724 - DNA, 1244 bp, Arabidopsis thaliana landsberg
agataattgttttatttttttgcccttttaatttggagagatatgaaccgattacatatttcggaatgggtccctttttcatcgtgtgtaacagttttaccaaacagtaatactttgtgaaagttttgattaattaatgcaaaaagattagaaaaaagcgaaactaatttttggattacactagaaaaaggttaaaatcaataaccaaaaaaagaaaaaggttaaagttacaaaacacaccggtttatagagtgataaatgattattgttctgttgaattgacgtgccagcttagcatcaccttactattatcagtcacctatatatcacaattcacaggcttcttgctttctctcattggctcgtcttcttccctttcttctccaatcaccttagcttgctgatcaggtaaactagattggtgtttcgtgttgttttcttctcaacttaggtgtttgatttgagaagtttttctatgtatgttggcatgttgcgttcgtagcattgcatatcaacggataggtttgaataggtagaattaatttgattgatatatgaaagaatgtttgtatatatactctaggtctaggttattgaatattgagaaatttattttgttaggtttagatgaattattcttcgatgagtggttcaaagttcaattggcaagtcttttcaatgattgtagtattttggtgatgataagtaagttgttaatgactctcaagtctgaattcatgttttggttttgtttccttgtaaaaatgtgaacgtttttcttacagaagctttcacaaacaaagtatggttaattgagtgactaatccactaattctcttttgttgttttatatcgtttattaggtaatgttttttttttttgggtgtgtaaaatatgatactgactcaagattttatcatatttctgaatccataagctaaagtacatttgagagaagcaagagagatagaatggggcgtggagttagtgcaggtggaggacaaagttctttgggatatctttttgggagcggagaggctccaaagctagcagccgttaacaaaactccagctgaaactgagtcttctgctcatgctccacctactcaagctgctgctccaaacgctgttgatagcatcaaacaagttcctgctggtctcaatagcaactctgcaaacaattacatgcgtgcagaaggacaaaacacaggcaatttatcacggtatgtctttaattctttcgct

SEQ ID NO: 42725 - DNA, 382 bp, Arabidopsis thaliana landsberg
actgctgttgtttcacaatcgatttggggatttggaatcgaatcttcttcgatttgggaataatgagaagaagatgagagacttggggttcgattctggaagcttttattttccactaatagattcaaatcatcctgcatttggccatttcatttcttaggatgaatcatgagagaagactatttttaggaattttactaatcttggacactgttttagtctagtcgtcactttcttacttatgagaagatgaaatagtaaatgatcactttatgtttacaaattttgagtctaagtgactcaacaagttgtaacagtgttactgtttggtcaactctttgtgatctttccatggtgttgattttttgactcaagggcttct

SEQ ID NO: 42726 - DNA, 353 bp, Arabidopsis thaliana landsberg
gatgatcagttcatcaggagtgaggctggcacggttccacgtgggttaatctttcactattgtgactatgtggtggatgactccatgagcgtgttaaggacagtgttggtaatgaaacgaacacttgtggcgcctgagacattgaccgatggagagtgtgttcatcttcgctatctctggcaggtttgaagtgtttgtccttttcgagtagattatacaaattttagtaatctgattttgtagcgatgagattgatgttctgatcctttaattgtagagtgcggatcaagctcttccatttagaagcgcatgcaaagatgtcatcttccaccacagttgttatgtgaaagtac

SEQ ID NO: 42727 - DNA, 340 bp, Arabidopsis thaliana landsberg
  unsure (1)..(340): unsure at all n locations
tgcgccctcatcgtcctttggtataatttttgtggttgcggcgctactttcaatgtggtggcagtttcgccatttccctccactctcatgctctcttcggctcctctcgcttgctctggtgacccgaatttggtctgattgagagaaatgacgaccatggagcagcggagaaaccagaatgctgtccaacagcaagacgatgaagaataccccgcgcggacctttccctgtcgaacaggttcaggttcaatttnnnnnnnnnnnnnnnnnnnnnnnnnnnnnnnnnnnnnnnnnnnnnnnnnnnnnnnnnnnnnnnnnnnnnnnnnnnnntgggctcggc

SEQ ID NO: 42728 - DNA, 1020 bp, Arabidopsis thaliana landsberg
tatatataagaagcatcgtataatatttatgaagggatacatacaggccatccattatgggccgcgtaagagccaatgcctaattttaagaattttcttaaacaaattattatgaaaaaggaccaagaatgctggatgctcctacatacatataaagttttgataaaattaaaataattaacgtctatatccagaatgaagtcaatgagcattatatatccaaaactgatctttccacaactatacaatatggatgtgttttttttttcttttggttgcattctgatatgttccttcttcttgtctgcagcgattacttgttattttgggttattcgtggaaatacaattcaaccatttgttttgaacgtgtaagataagtaatatatggttaaattatttaccatttttctcgatcgattggataaaggacctggtgttattagaatataagataaatgacaaacaacagaaagaagcgtgattgcctttacttgcatgcagatgcagtagtctcccattttgaatgactgctctaaactcttaaagtataactattctcgtcaactaaagtttttgtttcttttttaaacgtcaactaaagtctatatcaataacaataatttatcgcctaaccagtaaccatagataaagaaaactttaaatctagaaaccattagcttctgaaacaaagtaaaacagcccttaataaagccatgaccatgtcaactgtttcggaccatgtgtagtgtacgtagtaaacatttaaattgataatgaaatagcaagacgcaaatggacgtttgtaaaaattgtatggttggtaaaaaagacatgaggctatatatgaatttctgtcattaaatcagctttaggtattacttgttaggattaaggttatcgtagttgattagactaattaactaatatatgaaccaaaaaagtataatagtcaaaagtagtagttgagatttcaaaaagattcaaggtggccataacacaaatattattgcaatacaag

SEQ ID NO: 42729 - DNA, 512 bp, Arabidopsis thaliana landsberg
ttgcgaggaaactctttattttgatgccattgcatgaaaagattactagggatgcagcacaatgcatatccttaagtataacatactccgaagtcattataacagcggtgcttaagtcaatctgcgaagtggaaaactggaaatcattatctttttgcaaaaaagaatcattaatatcttttggcaaccacatcgttgccaaacaaattctggcagtagttttttaagccattggttaagaaactagaaaactcgttaccttttcctcatcgttgaagcaatgttcagtcatccaatctttcagcgcatataacattgaaatcaagacacggtcagacataggagatccaagcatatctataaggaaatatagagagaaggtgtagcatgtaccttcttcatcatcttctgaatcagaagcttcactcaacgcagatcgatcactcaagctttcatcaatagctgacatcatatcaatttgctcctcctgcaaatgtgaaggggttaaaaat

SEQ ID NO: 42730 - DNA, 1041 bp, Arabidopsis thaliana landsberg
  unsure (1)..(1041): unsure at all n locations
aacaaccacacaagagcctcaatactatcaaccaacaacaataatcctaattactcatcagacctccatcaactcccaccgcatctacaaccacacccgagcctcaatattaaccaatccctcatggcaaacgccgttcacctagctgagctctcaagagtcttccgtgcctctacaagcaccaccatggactcttctcatcagcagctaatgaactacacccacatgcctgtctcagggctcaacctcaaccttggcggtgcactggtccagccgcctccggttgtgtctctcgaggatgttgccgcggttagtgcttcgtacaatggcgaaatcgggtttggaaatgtggagatgagccagtgcatggacttggatggatactggccatcttattgattggtaattgtcagtttaagttatggtttttatattgtttccatttacttgttggtaaaacgtttttggttgttctttctattgcatttgtttacctgttctaggaaaatattaagaatcaaagactagtcaaaccaattatggtctggctctatgatttttagttacaaataaaataaaagctgcaagaattcccaatttggtttcgatttttgagaaaaagttttcaaaaagataaaagacaaagagtgattgcttttaaagagtaatggcacaagtaccaaatttatccacatgaatcacaaaatacacaaaccaagcccttagtagatttcctctagatgtcaatcttctctgtataaaagactgaaaactttatattcaaaaggcatctcaaaaacagagagagtgaagaacacttttgcacagcgagattaaaaaaaaaaaccataagatacctctaacataagctgtttctttcatacgcaacgaaggaaacatatagactgtaggtgaggctcacagagaacgcatcaaaacccgtctttacctgcangaatgtngataaagatcaagaaacattagacacatatcagtccaaagttntaacctcagtcactagtcgcttatagcttctacaca

SEQ ID NO: 42731 - DNA, 790 bp, Arabidopsis thaliana landsberg
gaaaggagtgaatagatatgttgttagcacgatgattatcacctcttgagagaaggttggctaatactgagaacagtgtagctacagatggaaactcgaaaaggagcgacgataatgctttgggaagtaaaacaactaggagcttgaatgaaattcttggttcttcatcctctttgacttctcgttctgatgacaagaatgtatcttccagaaggtttgaatcttctcagggaataaacaccgatttcgtcccattcgtgccacttccttcagatatgtttgccaagaaacctaaggaggaaacacagataggtctgactgacaataaccaaatagatggtgtctcaggcggcaatcaaaatgtctatcaagaggacaagtcagatgcaaatcactctggcaaagaaacagatcgccttgaaaaggaagatcacaaatcagaggaacctgcgaggtggttcaaacgggtcaccgaactgcacaatgtttcagacttggaaagtgcaatgccgcaagagatttctcctgagaaaatgcctatgcgaaaagaagagaatcggtttgtggtgagtaggaagaaagaccgttcattgacttctccagcatacaagaggccagaagattcagactttgtcccctttgtcccattcccacctgactatttcgccaaagagaaacaactcaaggaaccaatagatactattccagctccggcgacagaaaaagtttctcaggtagtacaacaagaagcaagagaatcttcaagcaacagatccgagagagtgaaggg

SEQ ID NO: 42732 - DNA, 947 bp, Arabidopsis thaliana landsberg
taatattattagttgtttagtacataaatttttatacatcttagccgattagcacatttcatgtagttacaacactttttacagtaaatcaaagcatctctgttgacaaccaaactgagatgtattttgggtagaatgttaaagaacattggttacaaaaatcattttaaaaaatgagtggctgattaattcatcacaaccattgttaattgtatatcaaaaagtttgttcaaaccgccttcaaaatttcttttaatcgatggaccgaaacagggatagagttacgtataatttaattattttcgtcttcgtttgttgcattgtcattaacattacgtacatattaaagataaaccaaccttcacgattctcccctaaaggcacctttaaatagaaaaaacgtaacctccaaagtgagattattttctcaattaaccttagacttaagagagaagttgtaagtttgttagtggcgtacgtagataagagagttaagtacgcaactcaacattttcactttgtctcagctataaataaagatgttaagaagaggttttacattccaacacatagaaaaactctttcacatatattgcaggtttataattttatcatctttttttatttgtttgaaatcttgtggcaaaaatggttaatgttgaccatgatcgttttacaacactggttcatgaactgaaccaggcgaaatatgagtttcattacaaatgtgcggagttagtgagtaatcatgaagctgctcaacctaagaaggtgctggatgaaaagaaaatggatttggaaaagctctacgagaaggtgaaagaagttatgaagaaaatggttgctctcgctgaaaacccaaaaaaagaaggttaattttactttgctaataaagatctcttgtaccgtcataaataaaggttaattattttacttttcttgactat

SEQ ID NO: 42733 - DNA, 336 bp, Arabidopsis thaliana landsberg
aaagtgacaaagggatcaagacttaattcttgcaccattgagctggaaacaaaactagaacaaaatgtttttttttaagggtcttcttgatccatatcaatatatcatcatcaacgaacagtatatacaagacaagctttacacacttgggaatgtattatgcaactctagaatctgtaaattacaaatttacacactcaaattcactctcgtcttttctttgttaaagaaatattacaaaagagtagaagaagaagaagcatgcaagtcaagaaacagagtgacatcttctcttctgaaacatgaatcgtctttccgaattcgttttctcctccg

SEQ ID NO: 42734 - DNA, 309 bp, Arabidopsis thaliana landsberg
atcttgtgattcattattactagctagatccatgttataaaataaatatctatagttttatataaaccttactaaatctattcaagcaggacaatatatatttcatgtttgtaattttatgaatcatgaagcatgcattgccgcaagtacttccttgtatatagtttatattactaaagaataattattggtcgagcctatatattgtcagtgactattaaatacatggagctagtgaaacttcagacaataatagtaaaaaaaaacaaacaaatttctatagtttgatagtatccctgaaaaatatat

SEQ ID NO: 42735 - DNA, 831 bp, Arabidopsis thaliana landsberg
tttacgtcacaagccgatcgtgtagcaattgtcgttattggatctgagcttctcgattaaaaattgacgcagtaattggatctaataagagcatgaggttaaaatatgaattatttgagatatgaggaaatgaacaaattatacccacttgtgttcttttatgttaacaatcttctggtttgtcaactacctgttgaaccatttctaaaaaaacattgtttctgttcgaatttaaatgtgggggaaaaaaaataaaatacatgaaatataatcttagaatctaaggaaacttattattgggcaataaataagaatttgctgaaaagttttaggggcatcttttggaactctcaagtttcaaacaatggtgagtctaattttaaataattgtttggtgtgtttagtaaaaaaataaaataaaattaatacacatgaccaatttacgtatttgttattagggaaattttttaaaggtttatacaattttggaatgtttagttatttttaaaaacttaaaagatttttttttattgattttggtaaatgacaaaaactttcactaaaaatttgaaaacagaatatttgacggatgctaacaagcttttagaaagtactatttcgaccataaaattggatgaacactggatgtaaatggaattgataacaaaagaaatcgagatataaaatatctattgttatgtcttcattcagcttataagatttatcatctattggcaatccgaaaagatgcaaaactctttgtgatatggtatgcgctaatgttcatttaatgccctaagtttcacccattagaacacaagaagaaacttt

SEQ ID NO: 42736 - DNA, 694 bp, Arabidopsis thaliana landsberg
ctgcggaattatgtcggtttggtttttagtctacaccatatattgcagcaaccaaaccgaacgaaattatcatgtgcatacttttgttgtttaaaaagtgttctaaatcataaaaaaaaacagtaatgtttaattaccttttcacagttagtagcatcagtgatgattcctctagcaccggaagcttcaacttgcttcttgatctcggaaacaagagccgtcggatttgcaccggagaagactccaccggcagacataataccaagggcaataatcccatactcggcaacgtttggtaggaccacaaccatcacttgacctttccttagtccgagagatgtcaacgctttggctagcctctttgtgtccctcactacatcaccgtacgtcacagcttttccggtcaccgcttctacaaacgctacattctctgtgtattcttcaactccttggagcacaaattcaggcttttttcacatagccattagttaattccattagtatttataaaccgaatcttaacctaaattataataaaccgaaaccggaaatgaaaaactgttcttagctatattaattaccagtgtaagtttgtcaggaatgggcacagatggatacaaactgcggaaaatgtattcattatcttcttgcttttgactctccatttttaaacgaattgaatttgatttatgtg

SEQ ID NO: 42737 - DNA, 662 bp, Arabidopsis thaliana landsberg
aaaggccactgagtaaatggctcaagggtttattgaagccaattgagcattgtctggcaacagattaataaattgaagacacaaatacccaaagtgcatgctatacaagactacagttcctacctcttgtttcttctttctgaggacttgtcttcggtggtgcacagattttttcagtgcctttgtttgacctttcaggtagagacttttttacaggtttagaggaccggattatgtcaaataggccatcctctgtaaggaacttagtgctgaacagaatattataagttagaatgctagaagaccaaaaacacctcaaaatgttactgtaatgatatgcaatcaatgaggacacaccccagctctttagctttttcagatttccttccgccaatgtcttcatcacacaaaaggtaggtctgaaaacaagaattgtaactttatgccattacctttaacttaacaaaaataaaaataaaaaaaggtatgaagaaagaccgttttcttgctaacagagcctgtaatacgaccaccatgccgcttaatcagatcttctgcttcttctctttctaaactgcaatgtcaaaagggtacaggaaactgtaacagggaatagtaacgtgggaaaaggaaaaaagtatagaaaataaaaccgtcaagtg

SEQ ID NO: 42738 - DNA, 656 bp, Arabidopsis thaliana landsberg
atttatatgtattgaaaattgtcgactcgtatacatagaaggatctagaagatattgaagatatggtatttatatgttattgatattatagagatttgtattcatctagattatgaaacactataaatatgtaattaaccttaacatgtattctagatctttctatagtatatactttctctaaaggaaattctaaatgatctttctattatacacctttgagtgactgcatgcataggccacgacgctgtgtctttaatacatgacgcggcgaaaatcaactaaatcaatcgtcgtctatgaaatgttattgcaccattttattttgctgctccaattttctctattttatttttttcaaaaaccttttgatgatttacgtctcttttatgttttttccctggtgcttactgtctccactaatttgatttttagaaaataaattattagttttgccaaaaaaaaattaactggtggtgtttctaaatattattgcgctgattcttttcagtatcatataaatcctaaagatctaatggatattaaaatttagtaaggggttattttcctacactttttaaaattatcccttttaaatttaaaagtttatattgttttttaaattgtgaaggtaactttgaaaaacaaaacataca

SEQ ID NO: 42739 - DNA, 587 bp, Arabidopsis thaliana landsberg
  unsure (1)..(587): unsure at all n locations
gataaaatttgtacctgatccgaaaagttttaatatccataaatttgttagtggtaaattttctccgtgggttggcaaaattttgttcaccaaccgtaacggaatttacactcacaaatttcaatatctctacctttcttttcatctcttttggtacatatcattaactcctttccttttcaaaagacaaatgtatattaaatagcaagtgattcaccatccaccaaatgtgatcttctgattagtgatatttctttagacaatttaattgatggatttgaaaggaaaaaaactttgatatatatagtatgaagaagtttctttgtatttatccaagaactgttagttcaatcacttgcgctttgtttacgaatgatatatgacgttaactattcaaatacgatgctactctgttgttgaattcatgcgctttgttttcgtctttgatttttaataaatttacatgttcaatacaaatatcttttttattggtataacaaagaaccatgataagactgatacataaaataagatgttgtcatgttcttatttaactactatatacttatatngatcatgctcaatgg

SEQ ID NO: 42740 - DNA, 186 bp, Arabidopsis thaliana landsberg
  unsure (1)..(186): unsure at all n locations
atgctccagtgcatagagggtgggactagagctaacacagtcctgggcctagctctcagaaggagaaaaagnnnnnnnnnnnnnnnnnnnnnnnnaattagatagacgtgcccagatcagatccaaatattgtacggctcggttgaggacaaccctttcgaaagagctccagtcgattctcacaat

SEQ ID NO: 42741 - DNA, 1038 bp, Arabidopsis thaliana landsberg
gcatatatatggacaatctatttgacatatatggcaaaccagacgaaagctgacagctgaacaatgacaagtatgagtgttcttggtcacacgcaatcgcattctttttattcaattgaaccaaccatcagtactagtagaatttgtcttttttttggtttttttggtgtctacaatgcagaaaaagtgtcgcatagatatggacacaaacatgtatgaattttgatcatctaagcatatatttatcaggaagtctcaaaacttgcttcatcatcttctttttctctctatccttaggattataaaaagcaaaacttcatgttaaaaaactctcttacgaaatacagcttagaaggtcattagatccacgattttcacatgtgctaacaaagtgtaaattccctatatatgttattgggagattgattttataggagtttcagattattaggttccactattctgtagtttatcgactcctctattcttagtagattataagtgttatgaaagagctccgttactcatgcaacccaaacaagaataacataatatctctcctttgtaactctcgcttacgcaaatgcaagagtattttcgtgcatgaattaccgaaatgggctaccattaacttgacccacatatatgatgatttgggccatagaatgtttttgttactttcttgtaacattttgattaaaaaaaataaaattgttttctttatttatttaaaattaatgccaaaaataaattagggtcggtagaactagtatgaggttaaccacataattcacaaatgaaaccaaacttaggccacgttttaggtcataatgcctccttgaatcatataacatcattcttcaatagtggccaaaataaaacactatttctcttcctaagtatatataattgcccttgcatttttgtcctactatacttttattttcgtttaagaaaaaaacaattggcacgagatatttgccgtcagaaaaaaaataaaatgatatttggttttccgtattttcttccaccaaaaat

SEQ ID NO: 42742 - DNA, 551 bp, Arabidopsis thaliana landsberg
tacgatctcctccattgatcgaggagtagtcttgatcttctctattttgagttaactttgctgagaacgggttcccacttttcagccaatatgaaaatccactcctgttgccacttggatcaattgagttacttggcttatcagagtgagggaatctggaagaacctgaggcactgcgggaagaaataattaggggagccccatcccccacaagaccagcaaaattaatagcttgcacagtatctggtgacaatttcgtccatgtctccttctccaggaccattttaagcgcctgtaagggagaaaaaccaaacaaagactttattttcacgttatcatgtaggagaggtgatgcatgaaattaactagctatgtggtattggcaatgtcagcccaataggcattgtaaaacggaacttacatgcatgctttgcctatgaaatgcagtgaaataattttcgcatacaccctttagcttctccctaaaatcaacaacttcaaatccacagaacgcaaaccagcaaggataaaatgctcaggtttatgttttt

SEQ ID NO: 42743 - DNA, 524 bp, Arabidopsis thaliana landsberg
gtgttttgcataacaatacccattggggataacattaaagggcttttcttacaagtattattactctccacctgcagatcatcaaacttcattggcctcaccagagtactccgcttaacaacgttgacaggggacaacataagagggctttttggagaattcaactgttccactgccattttattgttcctcgcatgcttaatatcaaatacaggtactcgtttcttccccaaatcattgcaggacttagtatcaaacacaggtactcgtttcttccctaattcattacatgacttagcagccgatgctttgctgtaacaaagctgaaccaaagcccctggctttaaatacttgttacttgaacttttcaacttctttttcctcaccgaggtttttgaatccaaatcctttggagataccttccccatatgccttctttatcctcctaacagctactacaacacttcccaatagattaatttccctatacacctagtgaaagcagtatgaaaatcatcaatcca

SEQ ID NO: 42744 - DNA, 299 bp, Arabidopsis thaliana landsberg
ccaaaacaatgcacccagtttaccattcttctaatggctacgccctatctcgaggcgttttctgcatcaggataagcatcgcttgcaattgaagttctaatcctaaatccacagtactttctgtaaataacgtcgcactactactttcttcatcatgctgcactattctctcttacatcctgctatatatgaaacaaatgtaaggagtggtctctactttgcgtagtaacaaaagaccacgaagtattctatattcaaatagccggccataagattcaacacaatgacaaggtaataat

SEQ ID NO: 42745 - DNA, 329 bp, Arabidopsis thaliana landsberg
aaccacctcccacctcgtgcacgcggtagcgccagtcggcacatgacggccgtgcaagttgaacgcgtcgaggtgatgtgccccaaaccatgccactggactgaatgcagctacatgaggtcgtgctgccatgcctgccacaccgcagggagcacgatgagcatcacaggatcgaagttacgttcaagtacgacccggagagcagggccgtcaccttcaccggcaagtacggtacggcttggtggacccggctgcaccgacgtcgtgcacacgcatccgcgctggcctcacggacctggcgcggcaccggggcgacaccacaacacccc

SEQ ID NO: 42746 - DNA, 1034 bp, Arabidopsis thaliana landsberg
tgatagtatggggtttgaaattttcactccattgatatatagtgattttacaccagtgagctagaaagttccagagaaaatttctagaagtaactagtgaacttgagagttgtttcaaaagcttccacgtcattaaatctccttttattgggccttataagttatttataggccgtttagcacattggacttgatttatgtctttgttctattttgtatttttatttcttatatctgtttttattgggccttgaaagttattccaggccttagcccattagacttgatttatctcgttttattttagttagagtttttgagacttgagacaacctacctaaccatactatagacaagaaaataaaaatacttttgtatattagagaaattttgaaatccgtcagtgtgtatattcaatattcctaacgaaaaaatggccaaagcataaataccttatagcgatatttgagtatttaccataaaaccattcgaatactgtcacggttgtaattttctaatattgctcttttgttattaaaggaaagagtgaagggtgttttcgtcatttaacatatccatcgggtcaataacggagattacctatccggtgaccttatcccctcgccggtgagcgaatctcagatccaaaattttgcaaaatcctcagatcgtcttaccttctccgaatcgatcgatttttcatggaggacgacgacgagattcagtcaattccatctccgggagattcttccctttcaccacaagctcctccttgtccgccgattttgccaacaaacgacgtgacagtggccgtcgtgaagaaaccacaaccggggctttcttctcaatctccgtccatgaacgctttagcgttagtggttcatactccttctgtaaccggtggtggtggtagcggaaacagaaacggacgaggaggaggagtaagcggtggtggtggaggaggaagagatgattgttgaagcgaagaagctacaaaggttctaatcgaagcttggggagatcggttctctgaa

SEQ ID NO: 42747 - DNA, 516 bp, Arabidopsis thaliana landsberg
ccacgaaagtacatgaaaaaaaaaagctggtaaaacaaaaataaagtatgaactttcccatcacaaattcaacttataaaatacttttgaatttcatcctttttaagcgttagaactatgtttctaccactgaccacagtaagtacaaattgaagatgatatttcaaacaataatcatctaaagaagataatgggaaatgttttgatatgaattgctgactccactaactctaaatggcttaaaatactttagttatgacaagtcaaatgattaaacccatttcctagcaacttgtaaataatactacctttaattgggtcaacggaaaaaaataattattagagatccaacattttgatattcaggtatttacaagaagtcaataagtcaaaaagaaaatgataagaaaatattttttgtttcataacaaagaaatatttgtgcttcacactactcataaattattcaatacagaaatcaaaattggttaagttaactcttttatgttatttaag

SEQ ID NO: 42748 - DNA, 581 bp, Arabidopsis thaliana landsberg
aagtccatttatttcctaagggaaaagttaaactttttctccaagtgtcaactccttaaatctcgccatctataaaagtctatcagatattatatgaatgtgtcgttttcgaacagcaacaactgtatttttgagtgatcggaaaagattttccaaagtatagaagaagacaaatacgttttacagaactagggataacacaaacaattatgtccacaaagccccaatgataaaggcaccaacaaagaaagaacgcaaattgttaaggcctctcttcttcctcataggtatcacatagcactagtttcaagataaacctaatgggtacctcgaaagctttgcgatctcttctcatcttgctgctccttaacataacattcttcttcggccatgttacaccaggagccaccgtcaagccatgccctccccctcccgcaaaacaagccaccacgaaatgtccaagagacacactcaaatttggagtgtgtgggagctggttaggtctggttagtgaggtcatcggtacaccaccgagccaggagtgttgctcgctcatcaaaggtttggctgactttgaagct

SEQ ID NO: 42749 - DNA, 253 bp, Arabidopsis thaliana landsberg
  unsure (1)..(253): unsure at all n locations
ctactacggacgactcggctcattagtttnnnnnnnnnnnnnnnnnnnnnnagagaaaagtgtacgtctttagtccggtcttgctacgtaccgtcatggactacttgttctgacgacattattaatatatgcaacacgacagactaagatgagtaactgggcttccgaggaggaggaggaagacggcggcgacagcataaaccggctaagagacacggcgggagaagctgcactgccgtattcagtgagcctt

SEQ ID NO: 42750 - DNA, 1221 bp, Arabidopsis thaliana landsberg
aattgactgaaggtatgttccctaatgcagtcaatacaatgtattttaatgtcatgaaatccactatatatccgcgtaaatgacattaagagaaaacaagagcatgtagtgtcacctgaccaacccatattattgaagctgcaaatccaaggtataaagaggctggtaccatagtaaacctagaaccaataaccatatatcaagacaaaaagtgttaaagactaaaagattcaaatagatggagacaggtggccaaaagaagcaagagaacatatgataataccatgatggcttcagattagcagcaacaaagagccaatacccagtagttcctaaaaccagagcattctttgatcccattaaccggacaaccaaagatgcaaccatggagcaaaacatgaaggacacatacaatatccccagagagattgttcccaaatcctgaagtaatcaaaacaactcaaatatcacaacacacacacacagtctaacatgtcctgctcctaaattcatattcctctctcttaagatccatcaatacaaaatgacagtataatttaacggtagagcaccttatttacggtagtttcgaggttctgagcagcaccgtaagcgaggaagattagcagaaaggagatgctgaggatatgaacatcccttgtgtagcactttccagctctgactttccgatcctcaccagaggcagagatcaacggcgcctcctcgtcgtttcgagattccatggcggagatttagtccggtcacctcactgactacagctccgggaaagatgagcggtgctccacggagagagtgaaagtcaaactctgtagagagagagatcgatgcctaccgtttcagagatttggaacttccaagaccggtgatgattgcggttcggtttattttggtacggtatttctaatttcaatttatatcggttcagactaaattgagattggtgtttgttgggctgggccaattaaagaatctcaagatttataatttccgtttatttcccggggaaactgaggaagaaacgagatcctttacaattttgtatttattatacccaaagatttgtaaaccctaatttcaatagcatcataacgtaaaatcaatcatagaaaatatcgaagagactgccgaaaattatatctttgaaatcaactggtgaacatattaaccgaaaataaaatcgaagagaaaaaaagaacctat

SEQ ID NO: 42751 - DNA, 855 bp, Arabidopsis thaliana landsberg
tagatcgctttgatttttcacagagattgctttgattttcacttccatagagatcgctttgatttttgtttatcagttcgttgtttggtcaaatcgaaagctcgatcaggatttgaagctcaatcgggatctaaaggtttgtatggttgtaattttttaaatttgtgttgtgtttatgacgaaacagctcaaatctaacctagtttctggattagctcaatgatttgataattgtggtgaattttggtgaaggatacaatggattcgtgaagtaatttgaggtagaatttccaagaggcgtgaatctcatatttcagagttattcaaggtactactctttgattatgattatgtggtcattttcaatgctttgttctcatctttcgtgaagaaaacttagctattgtgaatgatgtttatgttttgagctcactggtttgattagatgcatgagtcgtgaatgatgtttatgtttagatctcactgctttgattagatgcatgagtcgtgaatgatgtttatgttttgatctcattgctttgattagatgcatgagtcgtgaatgatgtgtagcctttgatctcaccacttgaaaaatgatttgatctcactgccttgattagataattttagtacacataaactgctacttgaaaataataaactgccacacataaactgctaaacttcttgtgaaaagaactgctacacataataattttactacataaactgctacttgattttcatttctgcttatgatgcttcgtttctctttagtgtttaatttccatttctatgaaaatcaaaggggttttatatttcaaatatagtcattaactagttatcccataa

SEQ ID NO: 42752 - DNA, 306 bp, Arabidopsis thaliana landsberg
  unsure (1)..(306): unsure at all n locations
tcgacaccatgaagaacactcatccccccaannnnnnnnnnnnnnnnnnnnnnnngattgacacgatgctctccaagacgagcgccaaactgttcagccgccccacggaagacagtggcttcctacgcggatgctcgtcgtcagaaagatcacatccgccataccgattaaaaagggatcggtctgcctggctggggttcactagggaaactgccctctgcgggcttcaaggccattaagaaggctctcaccgtaggacgtaacatcatgcgccgactggcgtgtcgatgattctcagcacaagct

SEQ ID NO: 42753 - DNA, 412 bp, Arabidopsis thaliana landsberg
gaagaatcatttccacacgattttccctgtgatttcttcatttccttcgacttaaaacggtaagtttcgtggaaattgagtttttttttgttatctataattctccttttattgtgtgtgttcttctgtaaatcgaagtttgtgtgtttagttctaagatagattttactgttcgatgaagagtttgtaccgaacttctgtgttcaaaacttccgtgtagataattaactcctagggttcttctaattttggaaagattgaaacttttatcctaattccttggttctggacatcttcaagtgtagattatggcttagaacaattgattatgtgttttgttttcatcttcaaattttgattttacatcatttcaagaaaggtggtaacttcttttttttcaagatcttaaaag

SEQ ID NO: 42754 - DNA, 496 bp, Arabidopsis thaliana landsberg
ttttctatatttttagttatgtccttgatgaaaatgtcatatataattgcgatttaatactgcttttgtaggtttctattgttacatttttagctagtattcatgtatctggacttggattgaatatctcgaattctccgtgcatgtatcaaattatggtatggcctaaatctgtataatagtttcttgatcgggatgatgaacctgacattccaaaaaatcaaggaaagtacgaacctcttttttttttctttcagtgatgtatctggtttataatttatatattatatactccatattttagtttatcaaatttattaatttaaaataactaccagtgcctgttttttcaattccgtttgaatcaaatatagggtgcccaccaaaaaaaagagaataaacttatcttcgcagagagatcacgttatctttgcaacgaatttcatattttccacgttactttattattggttgactttcaagcttttagtatttt

SEQ ID NO: 42755 - DNA, 842 bp, Arabidopsis thaliana landsberg
  unsure (1)..(842): unsure at all n locations
tttttaattaataacatatgcataaattatagaaaaatgcgaatgagaaatttagatacttatatattattagaaccagctctaaccgatttgtgggaataactcttgtggttgtgcagaaacaagaccatagttgatggagcatggcaccaaaagaaccactagaaccaagaacacaattcctaaattctttgccatatctttttcttaattttctaaaccttttgattcaatactcatatttatgtacctgcgtggatgatttaagctccaacgaagacaagttcagcaaaacatttattgcattatcaagtagtttcgcattttcgggtgaaacatttattgcttatgatgtcagtgtagaatttgatatagtctacagaaaaccaaaatttaatgaatagtccacgacgaatatattttttccctaacatatttggttcaacaatctttattatatggggtaatatgattagtagactcgaactccagctataaattcaaaatcatgaattgctaattttttatttctttaatcataaatgaaaaagatatgagtctgattggttccgagtgtggttttaaaatttttgactgtaaactttaggatgcatatgttttnggttgttactgtagattttagggttataataattttgtagtaaaatttaaaatcatgaatcatgtccacatgataatactccaatctctaaagtgagtgtaacatcttatactgagaagaaagaaccacaccaatgacattggccaagaagtggcttcgaagtggtaacgaaatgatgtgaatatgatatggtcgaggattttcatttgagaactcatat

SEQ ID NO: 42756 - DNA, 707 bp, Arabidopsis thaliana landsberg
tacgcgcataagagatctcaccgattcgtccacatgaagcgatgagatctcttctattagagcttccattaagtaaattgccagtactgattacaaaagcgtggatctgagtgatgtgccgcttgagtttagaaatggatagcagaaatttgatgcgtttcggacacaggagagtccgatgtaacatgcagaaatgttttgtctgtaccatgatgttttaattcttagagctaacttcttcaaaaaccaatttgatttggcaaaccggaacgtaccgtccgggtaaggcacttatacgagaaccgaaaaattaactagttaagaaacatatcttatttatcttctgcaataatcatataaaaacattttgagcatacacaattatattttcactataacttaactctcttctcttgtaactcgtaagcagtaatttttttgtttcttaattagaaaaagtagatttaataaaaatcccctatacgtatatgataattaacgtatatatgttacttcaataacattctctaggaggagtttggtacttagagcgatcagtacaatagtcatagttcatgtacttgctcctcaccatgttcgaaaagttctgtttcgttccgcttaaactttgataattgcctgcattccaccagtagttggaggatttacaagcgccgaccttattactccgaccatctatgttgcag

SEQ ID NO: 42757 - DNA, 616 bp, Arabidopsis thaliana landsberg
caaaaatattgtgaaattatcatgaaaatgaaaaacgttcgttttttttacaagaatgataccaaaatgaaaaacgttcgattcgttttacaagaatgataccaataactttttttgtcacaagaagatattaagataacttcaaagagcagagaatatcgaaactttttttaaaaaggcagagaatatactttggacagcactgatatcatttttttcaaaagaaaatgtatttggtaaggaatcatttttcttgtgattctttaatcagttgcatgaaaaatgccaaaacaaatatatgcttcttcttttttgaaattcagaatattcggccacggggaccacacacctcaaaacgaaaacaaacgagaaatggaattttagacaaattctagtacacgatacgacccatattatttgtatactattcattgattgattaatttgagcattaagaatctgggttggtcgttattaattgtttaattaatcaccggcttggaaaaaatgattatcctttctctctcaaatgggtcgttggtccttcattccttcatgaacacgttgccacatggaaatcgtatgaaagcgcgttactacttaccacaatgggacc

SEQ ID NO: 42758 - DNA, 811 bp, Arabidopsis thaliana landsberg
aaatctaataacaataacatatcatcctcatgccacattatattttgtggttgtccctcactccctcttcttaatatttttctagttagaccgtaagatgattctcggaaggtgtcacagtgatatccgaagtgattccgatcatctatttggtgtaggtttatgtacttccctagtcatggtcaaccaagcattccgaagaataatgcaaataactaaaattttagatgaacaatttttattccaaaattagcaaatgattcgttaaaattttcaaaaatatactacatatttgaacgtagatacaatcttcattgaaagtttgaaaccaatatttatgaatccattattggtatggttttacttccactgtcccatttataagattttttttgggactaaaagagcgtatgttgaaatttattatctttgtaaaaatatcagttcatttaatcattatgttgaaatttagtatctttgtaaaaatatcattttatttgtaggtacaagatgtttgacaaaaacaatttgtaggtacaagatctaggtgtttgatataataagaattctacctaatgaagtaatttgttacgtcaatgaaacgttaaatgtttaaatcgtaaccaattagttaattatccatatcctatcaaaacaggtgatttatccacataaatcgcctaaatttatgttgtgcgtacttgatccaagacattgatcaagtacagataaaacaaatacaacatctcattatccagaaggtggtaataatattgtaacatcatactaaatttttaagtcgcccttgcaa

SEQ ID NO: 42759 - DNA, 568 bp, Arabidopsis thaliana landsberg
actatcatatcctcttttgatatcataaatttatttataattaggtacggttttcagatattgggggggttacgtaatacagaagtgtacataagagtatttgattacaaaatatactctcattagtctagtgtgcaacttacgcctagtattaattaaaatatatataaaaaggctagcgttcaaaacttaaagaatggttcaaacatgattttcaactcttaaacacacaatttctattatgacaagttgaaaacatcatattcaattattaatgtatccaactatccataatccatttgtaatttagtactatagtctagttatatgacaaagcaatcggtctccatactttatattatacacacaatatatcaaccaggtgatagtgcctacaattaatttgacttgctccttgaatttttggtgtagtagtagtatttatttagcaagtaaagccacaagaaataaataagcaaattgtcattggcttgattaaaggttctagaaaaaagtgcaaaaaacgaatcacagggaacaagtctctatgacgcgccaactaatactg

SEQ ID NO: 42760 - DNA, 911 bp, Arabidopsis thaliana landsberg
gctcttaggtaaaagtgtgtttggtgctaaaatgtttgcccttggggtcgtcgttaaaattccagtgcctaaacaaacagccaagaccaatttccaagtgacaactggtcgcgctaaatacaatccatcaatcgattgcttggtttggaagtgagtttatataattttccctccgattcatctctataattcttttgttggtgttttattaatcatttggttttatcttttactctttaggataagaaaattcccagggcaaacagagtccacgctaagtgcagaaattgagttgatctcaacaatgggagagaagaaatcttggacaagaccaccaatccaaatggaatttcaggtcagtcttcgtctcttttgggcactgttaaatagaaccagatttgcttaaagcaattattaaccgtctcagctttgttcttttctaggtgccaatgttcacagcatctggtctgcgagttcgttttctcaaggtacacgttgttatcgatgcttttgaaagtaccatccttccaaaaaatgcaatgctaagtagcagaatctcaaagccattgtgccattaaatccgttcaattctttttatgtgatttgcgtgttggttcatctgtgtatggtctttcaacaattgattgctttactacttctttggacctgaccggtatccggaatgattggcaggtctgggagaagagctggttacaacacggttgagtgggttagatacatgacgaaagggggatcttacgagatcagatgctgaacataaaacacagttcaggttcagtgacatcagacttaaaaagtttcatggcttctagtttttgttccttatgcacaacaaacgcgaaagagttaaatatgttttatacccgttttagttgtcgtagattaagagt

SEQ ID NO: 42761 - DNA, 569 bp, Arabidopsis thaliana landsberg
taaaaattgaacgaggcaggtttgaatagctcgccactaggaattgtcatattgaatggattacttgttgttgttgtagcattaccaaagggaccaccaaatggatttgttttgggggcacccgggtttggagttgacccaagcccgaaacctccaaaacttcccatactaagttcagttgtctgactagcctctggagcttcttcgtccatttcatcttcctgtgtatctacaatatcttttttctcaccaaatggacttgctgaagttggtgaggatgcagggaaaggggcaggtgtagaagatagctgttgtggctgagaactccctggccaactgaatgaaggagccgccatgcttgcaagactagactgtgttcctgatgaaaatccagacaggaacccagatgaactgacaggggttactgtagtccctgggtttgaaatttcacttttcaccggcagtggctcattctgtgtttttgttgcatttgatacagaatctacagtactctgcgtacttagaattgacgaactttgagcctctggtttttaggtactagacggcgc

SEQ ID NO: 42762 - DNA, 572 bp, Arabidopsis thaliana landsberg
gccgttaaaaatcaatagatacaataaacgaagacgattgataacatgaatcatgagagagtgaatcatctcgaattgaaaccaaatcagatcgatcaattcagaagaaaagaggagctgcataacgcgagatttcaattaggtgtttgagatagaaatggacggttttcgagtaccttgaggaaacagagacgggagaagtctccggtgaaagagatcgtcgaggagtgtagtcaagacatgcgaacatagctcggaaaatctttgcgattagagtttaagggttttaagcttttagcggaacaatggttaaaacggcagcgttttgtagaatagctttattatttgggctttatcgggcccaattattggctcctacaaatcaaatttacctttttataatttgttcaaaaattactagattggtttcattttttttacatcaatctttagatttattaatcttgcaaaaacaatttatttcagaaagtgtatgatgaacagtcaaattccactgctctaatcactagttctaacctctaaattggtaaaagctatttgctaggtaggtg

SEQ ID NO: 42763 - DNA, 493 bp, Arabidopsis thaliana landsberg
tgtatataaatacatatacaagttttgctaaacgcatacttttttttttatctcaccgtcttttatttcgtcttcctcatctttctcgtctctgaacctcttctctaaggcctctctctttaaacctaattatcttctttaataacttagattaaattccaaaatgcagattttatgctgttagtaattacgtaattgatttcgcttttgttaaattaatttgattagaacgaagaagaaaattgacaagtgcaaaaatggcgacggattgcaatagagtcaacgatttcttgttttctcagcagcaagaggtaattaaatcaattaattgtattctctctaatttcatgaattttattttctaagccgtggtgcaatgtttttggtatttatttaaggtatatttagcgcttttggtttaggagcaaaattgaatattcgattttgaaaattctaaagatggtatcgaatctgggtagcaataaaataaaaa

SEQ ID NO: 42764 - DNA, 763 bp, Arabidopsis thaliana landsberg
gactacacgttagccacaaatatactgcatatttcttctccggtgaggaaaacaggtgggatctcggatgcgattcttactgttgcattcttctctcctagcgatttttgttgagccaaagtttcacgaccgctaggactccggataagaatccgctcaattccttggatacttattgagaaggatcctgaatttttgtgatcgacgatgtgagtcttagattcatagtttagaatccatgttgatgtgccctccataattaaaagccttgttgattaaattatgtctgttttggctctaaaacaatcgatctcttctttatttatagaggttcattggagtctccaaattcacttaggtttcaaatttacatttatttagaaaaatggaaaaaatgatgccctaaataaacggaacatgtttaatcaatgattatctaaacacaaaattaaaaaattcgggccaaactgattttttttgttttgtcaaatgttttagttgactaagtattatcaactaaaaacaattaaacagatatatttttcggattccaaaagaagtttaaatatagttgaatttaatgggaaaaaaatagaaaaaggagtaaaaaatgtcgagccacttggtcctttgttactcaatcattcgccgttgttccgatcattactcttctcttctccatccaattaaggattctctcttttaataatgctttcaaaagaatatctaatttcaggaataatcaaaaacttatttaatttct

SEQ ID NO: 42765 - DNA, 640 bp, Arabidopsis thaliana landsberg
taaatccagtaagcgttaaaaatacgtcgaataatatgtttttaattaattaaatactatatcccttctgcaactttttgggacccggaccctctcactaacaatttctatagccacattctcgtcatgtgtcagcccaattcggcccatttaatcaatttaaaaagctatctccacaggcctgttgggcttttgcaaccaagaatttcagcttttatttttgacgcacctattcaaataaaacgacgacgaaagaaattattgtctggtttaaataaaccgagtctaggttaaccagccaaaaccgagtttgttgtcaagctttcataaggatgaatcatatccattcattgttttcgaattggtcggtccttgtgtctgaatcaattgcgtacaaaagttcatttatttaatggtaatgatttaggcgtttaatttagcttttgcaagtcaaactatgagacattattacaatcttgaggctccaaaaattcctatacgtttcttccttttaggtagttcaatcaaaatgatgtttatataataattttatagtaaagagtgaaattatattggctatttaaaatgagggatagaaccagaagtgagacatgataaagaaaagaccctaccaaaagca

SEQ ID NO: 42766 - DNA, 941 bp, Arabidopsis thaliana landsberg
tttaagcactcatagcaaatatttagaactaagatctccaacacgagtacaaaagccataggtaatttaattgataagaaaaaataaccaaaaaaaattaagacaataaattgttgagtgggacaaacaagcctcgagcgtgtcgtgttaccctataatgcttcattgacacccttctcctaaagtagtctggttgattatgaagataagcatacatatatatacttttggtaaaaatatatatagtcaaatttggaataaaacataaatgatatcggtgaatatgtatatatgactcttcaattagtaagtgtgtgttttgccatgttctaagcaattctgatcagtttgataaatggtgaactacaaatgagaaataatattaatttatcttttgattatcggccaaatatttgtaagaagagttgttcgatattcttgaattaatatctatatttagttagccataaccatcatatttttcaaatcgtttatagatgcgaaaacgtgtgtcttaatttctaaactacttaaacttgttgtaacattaagcattaatgcatgtactcaatttaaattgacttggtggagaaatatttaaaatatcattcgttgatgaaatatatataatatttatacattacatacaatatatataactatttacattatctaaattacagaaatgcatgacattaaaaaaagaaaagagagagaatagttccttgtgctattttttttggtagattgttttgtgtaacatgacatgtatatcaatacatttatttttttttatcaaatttatatatcaatacatccaccacagcctacatagtttgagaataataagctaaaacaagtgcaaaaagtttttttttttaatcaaatttatatatcaatacatccaccacagcctacatagtttgagaataataagctaa

SEQ ID NO: 42767 - DNA, 552 bp, Arabidopsis thaliana landsberg
  unsure (1)..(552): unsure at all n locations
acacccggcttcacattcatcgctttcatctcttcccatttcttctttttctgctttagctttcttgaacgaggccatccgttcaataaaatgttgaaaatccgaacagaaggaacccaattcgaatccatcgtccctcctattctctccaaatacattgaagcttctctaacatgaccttctttacaaagtgcatctaacaaaacctcaagcaacctaagttccgtagctgatttacaaaccggttcataacttctagcgaattcaaaagctcgtatagcttgttgcaccatacctacaagcaaattggaaaaactatattaaagtcaaaagctttatgcttctattactctaagctagctctttgtatcagcaatattgatgaagctacaagaaatctgcataccagcacgagcataccgtctgatcaaaacgatgaacgtatctgcagaaaccaaattcgatccttcatcgcttctcactcgatcaaaaaccaacgaccaagcaatttcaaattcacgagctttacatagagaatngacaacagaatcg

SEQ ID NO: 42768 - DNA, 550 bp, Arabidopsis thaliana landsberg
ggcgatgcctacgcggcgcgggccgatgcggtcgacgagcagaccgaccgggatgcaggcgatggcgctgttgatcgacgagacggtgatgccggccgagatctgcgcgcgcgtccagccgaattcggcctgcagcggcgcaatgaacggaccgaccgaatagacgtgcaataccgaggtcgcgtaaccgagcgcgccgaccagcgggaaaaaccagtaggcccgccattccgccagccccgcaccggatgcacgcatcgttgtctcccgttcagatgccgctgcagcaaagccggaggcgcgacgcgtcgcgcgccggcgccaatcaggcgaacgcttcctcgccttcgagcttggtccggtgcagcatgcgacccgccttcgggtcatacggcgtggcgcggtgcatggtgccggtgttgtcccagatcaccagatcgccgaccgaccatttgtgtcggtagacgaactgcggctgcgtcgcccagtgacgcacattcaccagaagctccgagctctttctgaaatccatgtcgacgacgtggcgcgc

SEQ ID NO: 42769 - DNA, 540 bp, Arabidopsis thaliana landsberg
gtgtgcaaaacaagataagcaacaatctctagtgtgcttctattgttttcaggatcatgcacgtatcatataatgcatagagctaagattttgacccaaatcaatgaaacacagaataaaacaagtttgaactttgaaccaattaacaacatatagaaacataaccattctcgaattgatagttgcaactcttcattttttaaccaaaagtaattttgttttctactctggataaaacgtttttatacttgaaatcccaacaagatcattaaaaaaggaagaggtagctggaattgatcaacgttgagtgaaaagagaacgacttatgattgcagtagcttccatgtaacgttcaacacatctcgaaatacagctactctcacttccaccgaggcttgatcctggcttcgttacgcacttgtcgaaacattttgtcctcaaagtctgcacaaccacaacaataaaaaaaaaaaaaactttgagatccatcgacacaaggttgatgcataactgaaattagatttgatttggtcggaaaaa

SEQ ID NO: 42770 - DNA, 581 bp, Arabidopsis thaliana landsberg
aactacaacagattgtacatatctttttctgttttatataaagtactgctaatctatataatgatctgatatatattttcttcatagttgagttaaagttgtttgggtagctaaataaacaaataacccgaatatttgtcagtatgatggacctatggtactgtaactgtttacaatttagttttgtgtcttattcacctaatcattataatgattttcctttagcttcacctcgtccgtctatagataactaaaaacgtaactaaaaacaaataaaacacatatataacaaatatgtagcactaatagaaaaagacaaatccagaaattcaccacacaaaactaatatagcatgtacattattaggtttttacagctagatgtattcatgtttttttgcgaaaccaatttttactaatatatcctgctgtgtaatattttagtggggcttcgaatgaacttatataatactttatatagaatcctgattagtgaatgcaacaagttgagttctttctaagcaaaagcaagttggtgtccctttaaaacccacatgccaaaggttttagtaagatgaaaac

SEQ ID NO: 42771 - DNA, 897 bp, Arabidopsis thaliana landsberg
  unsure (1)..(897): unsure at all n locations
agttacatggtatactagtagatgtcgttaccagtgagaagctgttattgactagctcaaaccgtctataatgtttttattaccactcattcaaaagattcgttttggtgttgtattttaagacggtttaattaagcgatccaacaaaaccgggcgtataatttagtaaagatttccaattttaggaggtttttattcaagcaacaacccacatagcaattctatttaatttaattacatggttattttgaaaagtgaagtagtgtcgttgttagtcatctcccgattttaaatttgaatattacatattattgaaaatatataaatacacacaaaaaaaaagagcaagtcttacaaaggtcttagactcttagagatgccagtaaacaaatttgatttgtaagtaaaaaagtataagattatctcttaattcacaaacgtacactattagacttgaccaaaaagtataacatgacaacattactacaccgtttagttagaatacaatatttctcttcgtagagcaaaatcggtggtatcaatgctttgaaaacgatagatatgaaaagtgttgaaaagccaagtataaaatctccttgcgtcaatgaatttgatcggttctctctaatgccttatcgcgtcatagcatgcaacataatgcttttaagaaagtatattaataatagaaatcctctctttcattatttatcaaggactagtttatcttttatgtacgttgtgctacatgttaatctctatcgtaaacctacataaaccacactcatttttttcttcttctaaataagcatgtnttggttattatttaaatttggcaaccagtaccaaatacacacacnacatgtattacctaaaaanacatgtattacatctttgata

SEQ ID NO: 42772 - DNA, 722 bp, Arabidopsis thaliana landsberg
ctatctgtttttatcttgaccgagcttgtggatccttcagggattggtttatatccatagatattctgagcaagcatccctactataggaggagcaaaagaagctagaatcgactcgaatgatctgtctaacgcgtagatgctcgttcgcgctctctcaggaacaatctctgcaaatattggactgtataaaaccatttcaagtagatgcttccggaagtaaagaaaagccaaaatattttgaatatgattgaaatataagtattaaacttacccgtttgtagctgcaccgttccatgagatgcataatcccatgatgacaagaaccaggccatggctaaaggccgtggagggatcatcaggtaatccgataagcaaaattgcagctaaaggaattgccgagccagagcttacctgagagaggaaaatcctaccgccatttgggaacttcttggcgagagtatctcccatgtatcctccaaacaaacctccaagagagcaagaaatggtgaaaagagtcacgagaaccgcagtttttttgtgggagaaaccaatgagttctagccacaatggtgcaaaagccagagctgaccaagggaaagaacccgaaactccctgagcgacaaagatttggaaagacggaatctttatcaccatcttagcttctttcaatagatctcttatgtctgaccagaaaggtttgtctttgacatgttctgtgat

SEQ ID NO: 42773 - DNA, 971 bp, Arabidopsis thaliana landsberg
tgcatgaattacaacgtttttggctcaaacctaggaagattataataatgatctacttttcttatattatgtataatatattaatgtttgaaacctagaaaacagagtccataactcacacccaatattttcttttataattagtcaattcaaacatttttacaacagtaatttcaaacattaaaaaaagagaacattctcgttttttttataaatttaatatatatccaatagtccagcctaaactgcaatttgcaattaaaccaatttatcggtagtaaattggaactcaacaattagactcgatttaatcatcatgattattgattacggcctgaaccacttgcttccccctcagagacaacactagctaagccattctctacatcttttaccacattctcatagtggttccgcgttaggctgttagaaagaaataaataaataaaaaagttgattggttttagggtttaattgttggatcttgttaaaattacaagaaacaatggaatatcaaacctagttagttcggttaacttgatgcggaaggcattgaaatcctttgacggttcctcctcgtaacgaaacggctgcagattagtctccaaacagtgtttgagatttttcacaaacttcttcaacctctctgattaacaaaaatatgttaccttaaaattaatctctctgtgttttatgcatatacatatacaaaagttacataccttgcgtatccttcaataaattttgcttcccgacctcatcctctctaaggtaatatccataaacataagtccattccaggacccttctacattctatgatctgtatcatgtatatatgcatcagtcatcacctaagttatgtcggaaaccaaaactcaaaacataagatatttctcacactagtttgacttttgctaacctgaagtccagcttctaggatgaacttaagctgcgatacgttttctaact

SEQ ID NO: 42774 - DNA, 643 bp, Arabidopsis thaliana landsberg
gtaaattcttcatctggctgttgcaaaagggacaaagaaacaagctgtgggtgtaaaaatgagaacgtgaaagatgacaagaaagacaatgatggggcactcgatgaagactatccaatggattactatgcacaaaaaggtgaagaatggaactcttcatatctcaagaagtcatctcgtcccattcgaagaaaccctttaccttcttctgtagtttagaatgctgacagagtaaattcaaccacagcaggtattaccaagtcaaaaaggcaaatgggttttgatgatgttcctggtattttcggatgggttgatttgcttgtatcgtaatcttcatgctgaagaatgttacttggggaggtcttgaagcgaaaccttagactattacgagagtttgacataacatgaagattggaagagtgaagactcctggtctcttttgatacaaagcggtgaggattaaacgctgtttgcagagaagctactacacatgtttatttttgtcttctcattacttgatctgatggggttacaacaaaaaggtgatggaagtgaaaacagagccctgtttatgtgtctgtagggaaaactgatgatgcttgctgtatatttggaacccgttatgtaatggttttttaagttt

SEQ ID NO: 42775 - DNA, 517 bp, Arabidopsis thaliana landsberg
caaatggggttttgatgacgacatgcatacctgaaatatatattcatgtactttgatgaactaaaaaccgtttttaaaatttctccttagaaacttcttttatcttcttagaaactcgcatgatggattccataaggtggtgaagtacttgccggaccacctccggtattcacattcatgctgcttctatcagcggaatccgacgacgagccaactctttctctactatttccatgttgttgttgttgttgttgctgctgttgctgttgttgctgttgttgaaaccctccctttccactcatgctttttacgactgtccaactccaagaaagtctctagtcatgctctgtttgtcagcgcttaatcctttgttcactcctccgtacgaaccaaaaggagaatcaactccgttaacgtttcccgttgcgccggggttagagaaagaattcatcaaatcctgaagattactctcattttctccgtagattccactcccaaagcttcttaggatcgatga

SEQ ID NO: 42776 - DNA, 648 bp, Arabidopsis thaliana landsberg
taagcaaactcaacgcccaacgctcactatacttagcgtgtaaagcacgcgccaactaggattgactcaaaggcctaacgatcttcaaatgtacagggcccaatatactcggcccataaactctaaaactattcaaatgttaggcgcgtgacgttcacctgtgaatcagctgatagaaatcattatccaatatccagttatgagtgggtgactccaaatagatccaactggcaacgcattattgacacgtgtcttttcatttctcttcttccggcgttttctctccgccgtttcgccaccgtacgtgacaatggctgtttctctctccgccgcctctcacttactctgttcctccaccagagtctctctttcccccgccgtcacctcttcgtcctcgtcccctgtcgttgctctttcttcctctacatcgccacattctcttggaagcgtcgcatcttcttctctgtttcctcactcctccttcgtgcttcaggtattcgtacttcattcatactttttgtaaatttctctccgaacataacattttctgttgattttagaaaaaacatccgatcaatgggacgagcacgaggatgatttcaccaaaatgtgccgcttctgatgcagctcaattgataagcgctaaag

SEQ ID NO: 42777 - DNA, 800 bp, Arabidopsis thaliana landsberg
taaagccataacctagatatcgcctgctcgttcttcatcccttcaacacgtctgagcataaaagccggaggaggagatttcccttcttcctgagctaaagtaagccatgattggttatccaagtcaggattgtcttcaatcaatactccttcccactcaaatatagcacctaaccaaccacaacccatccgctcttgcctaagtaaaggattgtgcaatgaaggcttatcagctttgttctcaggaggccataaactaggcttatcatcagcaccagaatcaagataattccaagttttcggtaaccgatcgtctttcttcttctctttcgtcaattccatagcaagagccctgatcggaaacaccgacattcgattctttttcacactctgcgtcatcaaatgagagagaacacctttcgcactataatctaccttcaccggaaagcgaacaatgctctgtgatttctgcgttttcaattcattcttcactgtaatcctcacaattgaaggtcgatgacccaccaaagatacagcaccaatagcctccgccatgattacacaatcaagaaactcccaaatcactaccaatctatgattatcaatcaaaacctagtacaattccaaaacctgtgagaaagctgcaagtgacgttaatcaagatagaattctagaaccaaacagctttccccaccgctaaaatcttaaaccctaatcgatcaattacccagagaatccattagaaaagagagaaactttaaaagtaaaaaaccctaaaagtgtaaaactttcaagacccag

SEQ ID NO: 42778 - DNA, 625 bp, Arabidopsis thaliana landsberg
gatttcatataacttctggttagaaatccaatcctcccaaccctatcacctcttggagacctctagtttcttcagaagaagacttcatctatatatctatgaaaccacattttaagttcatctaaacaccaaatcacctttataatttagatccaagttaaactaaatccctatttgatcgtaaaatttttatcaagtacaatcctcatttttttttttctcgaagaccatcttgaccatattgtttgccttaagaacgtcaccatgttatttaccttataggaacgtcaccctacattcaaaagtgacttttgaaaagtctacaagaagaagccaaacccgacacaatgaaaaattgagataaatttgactctagcgggcgagcccgcctactcgtgctcactaaaaagctagcaataactgtacaaacaaaacccataaaatctaatcgtatgctaaatcctaagaatctatattatacaaacaatataaaaatattaacataacatatacttattatggatatgatattacttaaaataatttaatgaatttttttttatatgtatgttttaataaattaaagggtataatgaaaacaaacatactttagtaaaacgaatta

SEQ ID NO: 42779 - DNA, 568 bp, Arabidopsis thaliana landsberg
acatcaaccatatcataataacacgtgataacttcttctttttttgtccttttcctttttttcctcccagaagacagaagaagaagcaagatcatcaagaccaatctcgtagacttcttgtctctgtccaaaaaccataaagaaactttattggcataaaaagagaacaatctcgtagattcttgagcttctgacaatggattctttgaagaatagaacattgcttaaggtcattgttcttggagatagcgggtaataatttcttagattgttttaaacaatttctagacttgtctcttgttcttgataaccatacaaatcaagggtttattgatttttatgttcttttaaaatggaaaatttaagaatctatcttgcctctgtttcttttttttttggttctgaatctttgtttatatctgcagggtaggcaaaacttcattgatgaatcagtatccttgttaaaatccacctttaaacttataaattagccacacatccaggtttgttttatttagttcaataactgaaaagtctgtgttagatctgtgtttctgcggtaaccttg

SEQ ID NO: 42780 - DNA, 609 bp, Arabidopsis thaliana landsberg
gaggaacatagcatgtacattacaggaaatgttaggcaaaaacgatgaagagtttgctgctgatttcttgggtttaggagagcttcaaactcacagtgaaatctcgtagttatattgtaggtgaaaaagtttcttagagaaaatcacactatgtaatgagattggtgatatctctgaaacttcttcagttttgtctgtttgcattgttcatataaccgctagtgtatgtacttccagtgtttgtatacaaattcctaacttcttaccaaaaaaaaatcggctgatgtgtgtgtataagtgtatgaattgttttcgagggttttcaaaatattcctaccatgtttttggacaaaaaaaaacaaacggtttattgaaaattatgaaaaatatgccgaattttctctctggaaacggtttctcgcaattttttttctttcgtttctgaaactgtacgcgaagatgtaacttcattcatattctgaaaattcacagaaaatttatttatgtctttacgtttgataaacatgattgttgagaaaatgattggagcgagtcactgattaacgttctaagcaaaaatgggaaacgctataggcaaagcatcaaacg

SEQ ID NO: 42781 - DNA, 5264 bp, Arabidopsis thaliana landsberg
  unsure (1)..(5264): unsure at all n locations
ttatatttttttaatggaataatgtgtttttcttttgtcaacaaaaaaagagagagttataattgttaaatgtcctggttggatatcactcgaatccaattcttcacatagcctttttactttgttggtgaaaagtttcttaaagcacaagtaaagccacaacttttatgagctttgggacatgaatttccaaaagttaaaacaactgattactttctaaagcatcactaaaaatgattagttacgttaatattgtgaatacttaaggcatacaattgaacgaaccttcctttcttattatagccatgaagatcagttacaatttaagtaactgatcaagcttaacctcactatagataatcaaaagatagtatccaaaacaaaccctgaaaaaaccttttgaccaaacctattcctgagtggctttcttatattcaggcttcagctcataagttccttggttgctccctttgttgttgtatatgcatagatctttcaacaagtctttcaggaattgctgcaccaaatacacttttccataagcaacacaaaccttcatttttggtatttgttttcttatttctccattgaatctctcagtcaaacactaaacaaaaagtctgtaatttccttgtgctcacctctggctggtcagtttcctgaatgagcagcctcagagtccaatttgattgtctttcaaagagattaaacatcacctcctccatctctctacggacccttcttgttctcttcatttctgatgtcctgttcgtcaattttttcttttcctgataaaaaccaatgacttgtaagaattcaagatccttaagctacagtaatgtgtgtgttacaattgggaaagataaaataccggagccgcggttgggattatcattcctggcattggcctcatatgcattcctctggcattatcaatgacctggtcaagaaaccagaaacatgatcatggaaaaatgcagaggaggtttgtttgaaactccaagtcaccacacaccactttacaacaacctggatctgtctatttttgcccatatacttgtttgttctttcacggcacaatctcccatagctttcaatgttttcgttatgaggcctcatatcaaatttgttctttatcttcccttctactgacatctttcctacaaagaacattgttgaagaaaatctgcacaactgtcaaacaaaataaggtacacctggactgtaaatgaacataccaatgctaaattcttcacccaatgatccaaaatcttataaacgtaaatgccattattcaacaattataaccaacgtaacgccatagatgaaccaacagttgtaaaataacttcggagtacaatgtgtggagaagtgtacaacttaccatctgaagactcacagaaaacattcataggaataaaatctttagacatatccaaagtgtaacgcctcggcatgtttccagagtcagctcgagctaattccattacgaactgcaaggcaaaagagttaccatgttttacaccaagaaactcgtagtttaagtgacgagcaagaaagttcatagaaagcaagctcaaatgtagaaagaaaagagaaaagatctctaatttgcagaaatgtttcatacactacccaatcctcaaattacaaggaatttcatgatcaaagtgaggaccacttgatatctccaaactcagaaaacccatttccccaaatccatggaatttcagagaatgtaaaagcaagtttctcaaaggatgaaattttcccgaatggttactagaaaccctaaatagctaaaccacgcaattcctgaagaagattcaatgtaacgagagatacgcatgcagagaggagagaaaatgcgcaggacgaaaacatacttgggtcccttcgtcctcgtgagccagaggatcgacgccgaggatgactttggcgtcaggacggtacggatcgtcaggaaaagaatgagattggagagaactcgcgacgagagatggagctttcatcagcaacatcgatctctctgccaaacccgtttccaacgcttcattctcattcttccttaccttcatttccacctttacatcttccatttctctcagactcatgattgtaacagaggaattcaaagcgcctttatatacttaaccttccaactatggatcgcttaattaatagaccaaatagaatcataaagacgaaagctttatttctagattttgcaatttgtcaatgttagttaaatccacgcactactacaaaaacgtttaatatacaaaagagatcagtctctcatgttcatgggtactcatatgcgtgaccgcttcgttttcctctcagctaactttgtagtcgcatttcgtttcttcgaaacctctttcttttgtgctccactcaattctctagtctttgtctcctcttctttcttcttcttcattgcattatccaacgcatccttcacaaagaactttagcctccatagtgttggttcgtcctgcatacaagcaaaactagctaagaagaagaaaagacatgtctttggaccagaaagccatcaatgaaggtggcgtatagtaagtaagagatttaccagtatgtccatctcaatactaacttcctctgctctaggttgaaagctcgggttagcctgagcaactatacccaacactttctgtagatcatccggtgacagttttaacaatgccaatccaatattacgcttctcctcaattgtgattttcctgatacaatcgttcaccacaactgtaagcaaatgatacattgaccagagaacgctcaaatttaagagtgattaggccaacctgcatctttccacaactttacgcattagcttctccagctcgtcattagcatggcaaatctggacagcaatatatcagtttgttagtcaaaaggttaataatacaaaaggatcactgatatggaaaaaaaaaataacctcattccccaattctctagttgttttgatatgagatgcttcttttgctagcagcgcctcctttgctgcttgcttctcctcttcctctcgtattttctcctgtaatcacttttgttaactttggtgctactaagctccatcaagagaatagtgtgaaagattataacatttttgttacctcttcttgaacctttggaagaaagtgtgcccacttctcctcaaacttttccagtaactttttcgccatagagtaaacatcacttgtttcttcattataattcattgcgttctcaaacactagccgcatatcagcataaatttgcatgacatgtttgtacccggtaccatccttagcctccatttgattttttatcgtgctgaagtccataggcttgtcaataacctacaatcagatcaaacatgttataaagagacccgcttacagaacanagacaatttcataacattgaatggaaaccgaggaaaacacacacaaaaaatcttaaacgtagtcacatagcaaaacatagtagtgtacttttaagacttcccccacaaaaatctgatgcttctaataggcaaaagctatttggtcagatgatcatactcaaagaatataccagtaaagaaaggtgaaattctggtagctgtaataggcaaatgaagttaaatcaactttaaagttcgattaaatgttctaccaaagtaagaatcaaaaaggaaattggtagctctaaggctctaataagcaaaaggcatttactcagctgatatttctatgttttaccaaaagaagatatcaacaaggaaagttgaaagctgagatgaaaaacgttacctcaaagtagtcatgcaaaccaagaccttcaacattgacaggatgcataaacggccaagcgcacttatgctgagttatctgagaaaatcaatacaaacaaaattaatgatccaagttctccctggagacaacaattcaggtgaagagatgattcttctacctgacgaaagattgttccaaattgacgcataaggtcctgcattcttttagcagcaacagcttctctacgcgcagcctcttgttgaatcttcctaatccccacaacatgtctccctttttctgtatctttaccaatagagccagagtttgagacaccaatgctcgagtaaaactcctccacttctttcagtttatgctcaagctgcacatagaaccaacaaccatccattgaatcaactatgtaacatcaaaaaatcaattcaaagccaatcttcaaaccaattcataacgatgtaacacgaaaatacccaaattcagtacacgatagacaacattattgagcgaaaaaccctaaagataataaatattgagattatgtatctagtaagtaacaggaataaaagctataaaggagaagactttattaccgaatcaacccactgtaaaaccnnnnnnnnnnnnnnnnnnnnnnnnnnggcgtcgacagagaaaccctgtaaacctccgccggcgacatgacctggcactgagtcagccattcacagcttttcagaaaaaaaaatccctcaagaaaaggaaaaaaatctgcgaaagactggaatgagtttgtttggtgatgatgaacaaaggaagaagactgaaagagccgtgtggtggagatggtggactacctgtcgtttttaagatgcaaaacgacatatacttccaaacgctatatacaagtcgaagagaaaattaaatgacaataacaaaagatatattttttgacaaataatcaccctgaattcaaataaatagtttgtatttttaatcaaaaaataaataaataatgttaccacaccataaacttcttaaaaccacatcatatatgcagcaagccagcaaatatagatatatcttttgacaaatattcaccttgaattcaaataaataatctgtatttttaattataaataacataaaaatgtaacaacaccgtaaattcttaacaccacatcatatatgcaacaacttttgataacatgcgtttttactaaattttgtttattcgtgaatagcatattgttatttattttattattattaattattagttatagtaggcatgttaaaaagttttgaatggtgacataattattagactactgttaaactgtttaatccgcacgattcatatacggtcttaacttaatttcgattttaaaatttgaatttcacagtgaactaatataatctcagtcccttgacgagaattgtacatggatactggaacaccgagttgctaacgatgttgtatctgtg

SEQ ID NO: 42782 - DNA, 408 bp, Arabidopsis thaliana landsberg
cttttgcttgattagcattcacaccctgttgatctttgttgctgacctccggcaacatcaatggtgtcgggaaggtacctacgagaggtatcagagacggtcagaagataagactacgacgacttgaagtgatgcaaatttgccaaaaaaaaaaaaagcagtaagatatgtgtgtacttacggttcttcttcaggttcattcttgaaagcatttttggtaatgcattcgaaagccgcatctacattgaatccttctttggcggaagtctcaaagtaaggaatgtttcctttagatgcacaccatgcctttgcctttttctcagaaacctgacaaatataggataactttagcataaccaaactctagacacttaagtatttcatgaaatgaagataacgtctcaccac

SEQ ID NO: 42783 - DNA, 711 bp, Arabidopsis thaliana landsberg
aattgcgttttcaaattcgttcgaaaaaatgacataaaaaaaaataacgtattggtcttcaaaccaatggccacaaaatccttcccaatatgttctcagtcctcaattagtcaattatagtcaccttttgtcttttacaagtggatctctcccaaaaaagtatgtacatattttccattttgcttattttgtctatatttttgctattgttagttagattttcttgcaattgcaaatggtgaaataaacaaaagtggaaatttcttttgctgaaacatacatccagaaacaaatgtttttcttataaaccaaatggtaatagaatctatagattaatacctaaacaacacgtgctataacagaattatagttacataaacaaagtttttgaaacatgagtgagacaagtaagagaacaagtgttatttgtgtcatagtatcacccagcctgatcccaaaacaacattcttctacaaatctactgaatcttgggggttggtctttgataatctctggtttgatcaaaagaagtgagaaatgacaagtcactgttttcaacgttcagaagtaagtaaagttccacctccatcatcgagtgagttaactaggcattattccagcaagctcatctgcacagacaaatgaactttagttacaacttcccccagaaaattatacagaatagaagttgagatgagcaatgaacagata

SEQ ID NO: 42784 - DNA, 1034 bp, Arabidopsis thaliana landsberg
  unsure (1)..(1034): unsure at all n locations
ttattaacatttttttttattgcccgggcttgtgactctgtttttcttgtttcccctaaaatcactaaattttttatatagtttatataatttatactatattaggggaacaatgtaaaaaagtagggggtagcaaagtcttactatatttgaaagagatggatcgaaaagacattttcaaaagaagctgggacccacaaaggcgtcgcaaatcgcgagcattaaatatcttcggcgaactcgtaaactccaatcacatacttgcgcagaaacagacaaaacatgttgccataactcaacgaaccatcaaagacatcaagagacggnctctttctctctctgtctctagtctctactctcgaacgggctaagctcagatcattacaagattcgcttttgtgctgaacttggtcccattcattagttatttgcttaaagacaacatttttatatgcttccgttagctaaatccatcactcccccctttaatcatttccctgctctgttggccccagaaacagcttgctaggattcactacgacgtcgtttcgggtttttctccagctgtggataatggctattctctggaattgattctattcactattttgttactggggattttctcagcaaaccaaaacaggttagttttggcctgttatgtggatctctgtttctttggattttggtaaacttctgtatcttagattcgcaaagttaagaaaaagttagataaatttcttgcttttaggcatcttaggatgatgacaatgtgagctttttgctaggatttattttttctggggatttctgagattgnnnnnnnnnnnnnnnnnnttcaaagaggcgcatgagacttggcaggttagtctttcttttacccttatgtaaaatcagatcacctttttgtgggtctcttttgattntctgaaagttgccaactttttggggtttcttttaactntttcaattttttacatttaaagcgatttaggaatcaccttttggagaatcctnctgtttaagcttactac

SEQ ID NO: 42785 - DNA, 267 bp, Arabidopsis thaliana landsberg
  unsure (1)..(267): unsure at all n locations
ctcttttgacagtatttccaaaaacttcctattatctaaataaatactcttataattcccaactagtattgtttgtttgtagctgaggaactgttcctggaggtcagatacgtcttttaattcttttctgtatttttgntttgttactactcttggtgacaattgaaacatccttattgcaaaatttatgttgaaacgtgtccataaaatttatctgacaaaccttatcacttcccttatgatctacaggctgaagttgcaccatct

SEQ ID NO: 42786 - DNA, 378 bp, Arabidopsis thaliana landsberg
tgatctactctgctctgctcaagatcagaaatcgtcggtttagttctccggttaaaagtttcgtctctgcgggtgagatttttctctatgttattctctgcttgagacttcaaattctgtgtttagattcgatttcattgagctcaacgttttaaagagtccagttttgagttgcgttactgttcttatttgagactgtttaattcgaaaaccctaagctcattctcaaaagataaaacttgccgctatatagtttctcagaagtgaagcttttttttatatatatttatgaacaggaattggaaaatcaatggagggattaaagctctcagaagcggaattgatatttttattcatccttcccagagcaggaacgtt

SEQ ID NO: 42787 - DNA, 596 bp, Arabidopsis thaliana landsberg
gtgtttggtttgggcggtgtattgtaacgattggatcgaagagtttctcgaggatgaagtaaggaagttgattctcgagcaaaatgaggtcttcatccacagtagtttgaagacaaggctcctcaaatataggatcccatgttttcttgatgcatgatccttggtcctcaagtaaggtgtaatctttactccttaaaaggaactctattatgaaaacagagtcgtgtaggatcatgtccacgaactttggagattcaatccaggcagttgactcagagtagcttgcccttattatatcttcttcttctttgattattcttctgagttcatcaatcgttttttgacctgcaagcctttctgagaatctcgcaaggtaaatcttcttatgctcctccatgtttaagtagcccattaactttgtgtttgtgatatctccacgagagttgagagcttgaaattttaaagaatggtgaagaggtccaatgaggagtaattgaggcgtgtaagcttctggatttacacgacgtagacggtcagggactcggtagatgcaacgatgctcaggatttgtaggaaaccaccacatcccaggagtc

SEQ ID NO: 42788 - DNA, 598 bp, Arabidopsis thaliana landsberg
ctctcagaaagcttcattttatttcattttaaataaaaggagtgaaatgttatatgcaaattttgttgttgttttttatagcaaggtacactacatgtggtgtttgagggtaactatatagcatatgactacttatggcttatgtataggctaattaaaacaaaaccaaaagttgtatagtcctcaaaaatagaagtgaaaatcaaaaagaaagagcatttgaaaatataattctgtttgctacgagacgacaatgaaagacagagcagacatttaccttagttgttttggggtgttttaaagagagaaatttttaagatttgagagaaatggtgatgaagagaaaataattgatggagtgaatataacgacgtagatatgtgtttatataagaaacaaactgatgcgcgtgaaaagctatgtcaataatagcgttcgacttttgtccaatagtacttattaatagtatatagttaattttaacactatcttattaaaagaactagttctcatgattcccgttgatgggggatttatttaactaatttgattcaatacgcaatacatatcgtattctttatcatgattaatgtcacgt

SEQ ID NO: 42789 - DNA, 978 bp, Arabidopsis thaliana landsberg
  unsure (1)..(978): unsure at all n locations
ctcactgagtcagagcagaaagcttttgattgggtgtgtggctttttcagacctgaccaaactcagtcagggagcagaactcaactcaactcaattgcaaaacctgtcttttttttactcttttcttattttcttcatcatttttttctataacataacctttaagaaaaattatttactgttttaattataaaaaaaaactatttactatccacagtaaatagtttaatgaacaagtttctgacaaaaagaatcagaaataattaattacagaaacatgaattgataaatttgttgctaatcagtgacttagtgacatcgtactatcactaatattgacaagagatgagcagaaacaatttaaacattgaaaccaaactaatataactactttacacaagttaaatcttttatgctaatataatgcatggatcacaaaaagaaactcctaattaaattagacaaaaaaagagagaatttgcattaccatcttaacaagaaatacaaggttataagaacaaaagatgatcaaatgaagagtgaagtagaaacagaagatttagaagaaggccattcatcaagaaacctataaaacctcttgcttccttgctcttcttcattatcatgatctctttgtttcagcttctcctctaacatcaatggcctctcacgtgtcctcaagtcagtaccaaggatgaagcaatgtcgatccggctgcttctcctcgttgttgatgcctctacatgagccatcatcattatcttccattgctgagccagagcagcttttgattgacccggaaggttctatggagaagaaatcatccatgtatccacttcttcttcttctactttcaaacatgttttgaagataaaaaatagtcaatcattgtgttgtcattagagtaaaacagaggaggaaggtgtgtttgaaacctggaagaagagtcgagaaagagattnggagtgaattgagtag

SEQ ID NO: 42790 - DNA, 825 bp, Arabidopsis thaliana landsberg
cccgatgcttataaatgtggtttaaacacttcttgggagaaacaccacaatttaacatcaaaacatgcatctagtgtagtaacgctacgtgcatagatcagaattttaatttctcttagattgatattcaatagaactgtataagatattgcgctgaagaagaatcttctgactatatgcatacttactgacatcaagaagtgcataccaacttcatcaataacatcatgaacggcaataatgtaactaagtaccaaaccaaaacataaatgtcaatcttttcacgtctaacacaaacgatacatcctcatacttcattttgtttcaagaaataataaatcatatctaattactaatgcatactttcggtgtctaagtttcgggcttataatattaaagatgaaagttagtgtctcttagaaattcatactgcaacgttaaaatccaaaacatatatttgtgtggatataaattttgatcactcgagaaatatttcttttaaggatttaaactttcgcactaaaaatccatatacaaaaataatgagaaattagtattttcttgatttgatgaatgaatgtaaaggtgtagcatatagtttctaagttttgaagcaggtatcctctgcgtccaccttcctttacttttaatactcttctttctcaatcttctgcattaaataccttaattacattagattatccgcgtataatttgatatccaaattttgtaatggtttattgactataggttttatagacgcgttaacttagttatctcgaactagacctattttaagagtatatgcgagttaatatcattttt

SEQ ID NO: 42791 - DNA, 913 bp, Arabidopsis thaliana landsberg
taaaaaaattttatgtgtaactctataatacatacataaaaattagtgtaatagtttatattcttttttttttttaaacctttttattttagataataaacagaagaattgaaagctaaaatgatctaataaaacatgattggatcaaatttttacaaacacaaaatttataacacaacatagttactgaatcaaacacaaaagtggagaatcacatgcgatttttttctttttttcaacaatcacatggattaaaacttatacaacgaaaatctaaattaacaaataaacatgaacaaaaaagagaaaagagaaaaagtttcacaagatcaaaccagcaaaagtggtttcatacacaggaagttcatctccgtacacattatgatgatgatgatttccaactaaatcaagctcaaacagatctgaactcgaatcacttgcaacatcatcatcatcatcgtcttcatcatcatcttcataatcctcaaaaccattagtcttaaccaaactgttttcatgattcttgtgataatctcttaagaactctctcgctatctcctccactgatctcctccctccatcttccacattcttcttcaccgactttctagcgttaccgttactgaaataatctgtcttctttgctggtgaagctctcggggacgataacattgaccggggaaaatctaacgcttcttttgatacgcccagatgatttctcgtagcctttgttcatacacgaccttgagaaagaagaagctgaagaacacgtagtagtagatgaatgataatcattacttgttttcctcacgcaagcagaatcatcgtaactagtcttgcttggataactcttaaccgcattggattgttctgaattgctgctgaacaacgaatttaagaagttaacgattct

SEQ ID NO: 42792 - DNA, 440 bp, Arabidopsis thaliana landsberg
tggattttgtttaaatctttttactctatctgaagccgaaaaatcttatatgttatttgatgtattggttttgaagtctcctatcatttatgtttttttgcttaaatggttcttttgtgacatcaattattaagttgctctattttatgcgtgtgtgtgttttaccatagaagcggtagtagctgactatactggacgaatccctaaccttttttttttcgtccggaatccctaacctacgtttaaaatttgaggcagaaaatttgaggcagactttagtgttgctaattatagtttagggttaatatcattggtttgtaaaaaaaaaagaagaaatcattgacttatgtaagtttttattattgtgtgtcgattgatatcgcaatgttgacttcatgggcctaaagatgattcattatcttgtttggccaaacaaaaac

SEQ ID NO: 42793 - DNA, 405 bp, Arabidopsis thaliana landsberg
cccaataattcgaagatttgcattagataaattagaataatgcttttgaccccaagatgtagtatctattgctccaagttttgactcttcaaccaacttatatacgtatgacaatatgaccccaactcccaagttgcccaaagtccatagattcttccccacaaagtaataaagatcgcattaacaaatgaaaagaacaaaagaaaaataacaatcatgttttgtgtgatcgattactattaaaaattaaaaaaagatgaagaaagatttgggttgtataataatggcaaataatgagatgccaaagagaagacattttttttattttgtcgtacacccaaagataactatgaccagagagcgcggccttcactctttctagaggcagcgctcacacaacatgac

SEQ ID NO: 42794 - DNA, 355 bp, Arabidopsis thaliana landsberg
agaatcacttgtttcatcatcaattatgtcacaccatggctggtgatcttgtgtaaaagctgaggtcgacgaagggtttgaagtatgatcattatacttcatgatttccttgttcttgaccatcatttgggtttccttagactcatcaggagatgtcgaaatcaagggcggaataaaattctgatcatgttgataagcaactactcgaatcgggctagaaaacgaatccagaggctgatcgtcaatgtgagagaggccttgggtttgatcatacggattttcaatatttggtaggctctctaagaaagaagattgcccaaagagatattggctgtgtgatgaatgtcaaagaaga

SEQ ID NO: 42795 - DNA, 1295 bp, Arabidopsis thaliana landsberg
gcacaaagaaatgtagcaatctagtaatcaccgaatcagtacactgatgaattaagttaatgaattgagtgagttgctcacgagaaaataaattaagtctactagctagtcctccttaagagcaatctcaaagtaaaaaagtaactttcagagtacagtaagaaacaaacttaaaattgataccaaacaactagaaacaagagacaggtgcagaagagaagagaatctttcatttacattccaactgatctagtcctattctcaatgaaaaaaaaaactcgttatgaagaagacatgtacaagaatccaattagaaagaagacttcagtctgcaaaaaaggataaaaaccagtgtgcaagtataaccttattctcacataatgaaaagaaaagaaatcgtcatgaagaagactacctacaagtatccaattagtaaggagacttcagtctacgacaaaagataaaaccagtatactttcttaaggctacacataatgctcgattttgaatattcccgagaggctccaaagaccttgaaagcaagaaaggaaagggcggaaaaaacagttgaagaaaaaactactcacatgctttcaagattgataaactcttcctttactagcaaggctgtaagcttatagagcccaactggaacagggctattcacctctagtctctgatagtattggaatttaaatccaagaatttgtgaagcatgagactgcacatgaaaattattttttttagcaaaaaatagtctcttgagctaagcattagaagataaaaatacgaggaagacattccaaaccttgggaaagataggaattagattgagaaatgtgtcgtaatcttgttcgagttcaaagcaatctaaaacctattcatcaaaaacaaagggtacattattactaatcgggaaggacagattgatgcgttatgcaatatcaaacaaaaatatgacagaagcaacagtgaaaacttacaatgtcgaaaacacggtttggatccaggtcaaaatgcccaattaatgactgcaagaaaatataaagttcagaaaaagtaaatgggcgaaatataatgtattggccgaatcaaaaccttgataattcccatcgttgctgctgatgcattgtgcgaagaacttgcagatcctcggcacaaaagagtggcctgcactccacaaaaaggaactgctataagttggtgtatgtataatccgactcaatcgaatctctactgagataatatgataataaatctgcacagttataggtaataaaactagcagaagatat

SEQ ID NO: 42796 - DNA, 901 bp, Arabidopsis thaliana landsberg
ctatttactctttagcagatagtgaccaaccagctgtcctcttttacggttcattttttaatcacttttgatagttttttggctttgtccctcctgcgaatctgtatcccatattgttttgttttgacatatttaacgataatgaatttgtgaaatcacttttgccctaacgtggttaattagtgccaataagatgattagtttgtatatattttcaatcttcacaatagcagaaagataaaaggaaacgccaacaagtttgatctaattgcttttgatattattgcagctaggtcgtttctctttatttaaacatcaatataactgctagagtgctagataaaaattgttacagtttgatgcggttcaactttcacttgagattgaattctaaatattctgcgtgttacggtgtatgtatgaaaagtttatgtttagttcatgtgaccgacctagtctaattaataaaggaagaactagatttgtggcttgtgagagagccatatgattgataaggaccataatggtttggtacgagttatgagtgtactcttattatactattcactcacaaaaaggttgatgagaaattacacatttatagggaaaagggaaagagaaacctacaaaaacattaggtataagtttccaaaatggcacatgggtattgaatattatatcgaacattctagataatatcatatagtatataattttgccaaattatacaacaatatacatatattataatgagtctaaaatggcgtaaataaatcttcagattatctcaaaatctaattttagaaaatggtgatcacatttgaaagatagttactttaatgtaacgaagcatatttaccttcaaagttacaatgtttttgtatagaaaaacataccttat

SEQ ID NO: 42797 - DNA, 532 bp, Arabidopsis thaliana landsberg
aatgttgtttattgtgtacatattatatatgtgacatctcatgtataaacaaacaataatataaaggaatttttttcgtctgactacatataattgtgatttaaatacagtggtcatatatcaaaaattaaatcgttaataaaatagattttttttaaaaacataactttttaatcacaattttttttaatcactaattacacgccgttgaaaattggtgatttgtcgtaaaatggttgtaaggtccaaaactcaaatgtttgaacttggaagtgtatttttttatattttttttgtcaagtagagtcgaaatcttttaattgtctttccctaaaattgtttttatctgaattttctttgtccgtaattatctcgactaaacgcgttttggtgatcttatgtggagcatatattaaggaaaaatggataagaataataataatttcagattaagatggttttgtttaaaaatataatgatgtggaccgaaagatatggaatgaaatcagggattaaaataaaatataatact

SEQ ID NO: 42798 - DNA, 537 bp, Arabidopsis thaliana landsberg
taagagccttctctctctctctctgagaaaaaacacatatagccaatgaccttctcgtggtcttctgtgccataaaagccattatatacattcaaacacaatctggcgccacatatacacatgtactagtgtatgtatatgtcctaacctctgtattcatatctctctccttgtctgagtggtgcgatgggtatccccataagctgcaaacattgaaccatctgcaacattttgactcgttttcttttgtgtttttccaacatctgtctcttcttcactcgctctctcctaatcaatctccccaacgacctctctttttttttgtttcttcactcagatctctctccctctctctctctctctctccgggaaaaatggataacttcttaccctttccctcttctaacgcaaactctgtccaagaactctctatggatcctaacaacaatcgctcgcacttcacaacagtccctacttatgatcatcatcaggctcagcctcatcacttcttgcctccgttttcatacccggtggagc

SEQ ID NO: 42799 - DNA, 322 bp, Arabidopsis thaliana landsberg
ccattaacacaatttcagttaatgtctcgacttttgtttgtttttgaatatatatcaaacattgaggggtgtaatattaaaccaccaaatttccaaataatcagaggcaacgattaagtcacaattactgaggactaaatttttgatttaacacttgagacaaaagtgggaacatgagagtacaacaacaaaagagaaacagagttggatcactatatatcgaggaaatgtcttaaatcacctgaaacacgcataaatagacaacatcaatagataatgcagtaacagatcttttttagctagtttcttgggatgaatcata

SEQ ID NO: 42800 - DNA, 109 bp, Arabidopsis thaliana landsberg
ttggcatagtttgaatcatcattgctctttccggggagaagtgtcctctaaaggttcaaactttctcgctggaggaccgtctttgagaaggaacgcgtgttgcccaccg

SEQ ID NO: 42801 - DNA, 333 bp, Arabidopsis thaliana landsberg
acattaaaaaaaaaagaaaacaaagttgttttgagaaattccttttctcgctgtgataatgattgaacctctcctgttactcctaagtggtcagaaagttgttttgagaatgtctctgagtcgagtatgcggatgtgtagactaatctgagtgaaaaagtgtgtgcaagctatccgaccgagaaatagctacctcactgagaaaagaagcagtgggtgtgaaagctcctcaactgagaaatagctgcctcactgagctgtatggttgatcatgtttttcctctgttacttcaggctggctcctgtgtacatcatgctgcttcaggaactttta

SEQ ID NO: 42802 - DNA, 470 bp, Arabidopsis thaliana landsberg
tacaaaaatataggcctgcgcaaatcatatgcttcaaggcaaataggagtcatataaaagtcataaataattgactaccagtcttcttcattcataaaccatacaaaccataaatgtccgagtattcaaatcaaccataaactcttcttagtctttcatacaaattaaccataatattctgagtctttttcaaaccataaaccagaaacgaaaaagcatatgcataataatcaaacttttttttaaagtttacttgttcttgaagcttccctttcccttcatgttgttgttgttcttcttcttcgggtatccaagcttgcttgcctccctctgaacttcgctctccggaactatcctctttctctctctgattacttaacttggatactgtgaatgatgcaaaaaataccaatcagcaagaaaaaaaaattagtaatgataaatgggttttattttacattcgcttacac

SEQ ID NO: 42803 - DNA, 611 bp, Arabidopsis thaliana landsberg
aggagctttatgcatatgattaatattctggtttatctgatcaagatgaacatttacaaaattgcaaagtttttgaaacaaatttgcaagagttgcctggatcctggattttcgttacataaaacttaacttcttattttcatattataccgtaattatttatgtaatgatggaattatacgtcttaatgtttttcaattgcatgtttgcatttgaaacttattgtatatacacacttgtacacctatagtatagatatatagtcaaattagtttgaagtggatcggaacataccaaaaggtaaagcatacttatgatcgtcatcagtttttaatttctagtcatcattagtttaaattcattttttacgtgctctttttataacaagtttgttttatataaaataaattagaggaataagtggataagactgatcaagaatagaaaaatcaaaaaggaagatgtggtctttaaaggtcgccatgcatcataagatttgcttacgtttccgtaatctttattttatatacactattattagacttagaggttttttcttttcttttttggaatatgattatatgaaatcggattcatgatatatacatgca

SEQ ID NO: 42804 - DNA, 513 bp, Arabidopsis thaliana landsberg
gaatttgttgccgagaacctctcaatcaagggtttagggtttcagatgtttctgattctagtgtatgctcgaacgatctaatcatggttctggatttttagttgagtttcaattgtgtgttctctcgactgaattctttagtatctggtccttttatcaaaggatctaatgaaaacattgcttgttttaatggtatggttagggttgcacattatggtgaacttgatgctgagtgtataaacgcatactatcgatatggattagctctcctggcaaaggctcaagctgaagctgatccacttgggaacatgcctaagaaagaaggtgaagttcagcaagtgtccagcaatggtgaatcgctggctccttctgttgtttcaggtgacccagagagacaagggagttcaagtgggcaagaaggtatggattattgggaattgtcttaggttaagcttatgggtatagatgcttctgcttctttgtttgctgacttcttttctccctcatgtatag

SEQ ID NO: 42805 - DNA, 406 bp, Arabidopsis thaliana landsberg
aatacttgatttcttcgagttccagaatttgaaactccacaggaggaattcgcagggaattcgtacagatcagtcattgcatcgagagtaaaatcgataggagatgaagagagatataaccttgtgtaggagtataaagagaaacgcggaggacggagagagtcggagatgaaacgaagaagcagatagagtgaagaagaacgatggttctatcctataagtatatgcatatttacgattttaactctactttactcaaaaactcaaaaacattcactgactccaaaaaacaataacaagaaataaattgtaaaaaaatacactaatttgagatcattcataatttgaaggaatacccaaaaaaaaatttacccaatttgtttgatatcaaaatcttcaattgcta

SEQ ID NO: 42806 - DNA, 1195 bp, Arabidopsis thaliana landsberg
aggggatttcccctacttctttaccatttgagatattttccacttcctttacgctttcaaattccgaacccacagatacatattgcccaaaaacctacgttacagacaacccacattaattaccacagatattttcatttatgtctgtctatttgaaatattttttttttggtttttttggtttttctcccgaaacaatattgtacaatgaagtacatttgtacgtggcccgatggccatattacacatgttaactaaaataaaatcaggtttgttgaaaagtatattacttcggattttttttattttttacgtatgttcaaattcggactaaaattatagattattgaggaaaataaaataaaataaaaaacctcaaaaactaaaactatgctaactatttgtctaaaaataggttttgaaacgctagtacatatttctcaattaaatagtgatttatatttttgacccaaaaatagtgtaatttacatgtaatcatataaacaaaatttttccaccaaagaagatattatattgaatcagtgaatgggtttcgtatcattggtgattgaaaaaggatggtggtgacattttctcttaaaagaagaagtaaatgcatccaatcactttttcttcagtaaattcgagattgtttttagaaacgcgtgactaaaagcatgcagctggacagttcattttcttaccatattaatcaactcaagaaatatacgcagagaataatttacatctttgctcaaagtttcaaacactctaagaattagcaatttaatacttgatttgaaaccctcaggggtaaaaaataaaacaaagtacattttactaattaccaccttactttcctcgtcatgtgtggtgaatttttttatataattcttgtaattcagaaaaatttacagcttaagaattatatccccatattctgccagatctttacattgccatgcgtcaaaatgttttgacctccattattaaataaataataaatacacaaaatatgtctttatgtacttatttttgtttattgatatcatcatagtactcattatgttgtgggggaaaaacagtaatcatcacattttatagtgatctgatttatttattttttgttggacccaaagtttaactctatcattgatatacttattgtaatggttgaagaaaaattgttgtagat

SEQ ID NO: 42807 - DNA, 1418 bp, Arabidopsis thaliana landsberg
atgggtaggaaatggaaaccggtccggtagggctggtttacggaaggagatttggtgttagtgctttgggtaagtctcttgtagacatggtgcgaggcttcaagattgacgacatagttaccaataagtaacgtgagcaataaccaaagtccaatgttggagcaaacttctttggtcattgtgtgtatttaatttctttgtggcttggtttttgtttgaatgaacgtagatcatgtcaaatttataggcaaaggacgagggcaaacctgtcaatatcgagatttgaatattatatttgataatagagtttttaaattttttttggcattaatgtgaaataatgaatgttatactgctataagtgaagaaaaaataatactgacataagtcagactcagacatctataaaagttgtttccacaatattcgtaaattttcactaaaaattagaaatattatactgtattttgttgtttctattggtgatcaactgaaggagtttgtgctggtttttcaatgtcatatgactatatgtataaaactgaaggaacaaaagttaatataagaattcgtattgaaaagttgtacaccttttctttctaacggctaaaaagttgtacatttttagaagtatctaaatttttggtcatgtcaaatttacaaagtacagatgaaatatttacaattaatagcgttttttttggtttacatgataaagataagagtgttgttatacatgtaacttgtaagttatttgtaagaatatgttttacttgctcgagtctgaatatgtttttatcccattaagtcaagtattttatgctttcattggcaaaaaagtcaggttcaatatatgcttatgcgagtctaaatctcgagtataacttgtttttttgataatactatatactataaaactaataaaactacgaatttgatatttttacacgtcaagatttcaaccagagttaataaagaacgtgtctggactctccaccatccggacatacacgaggcgtggagattaaacaatgcattgcgaaatgaaaaagagcaattgaatatatatttgaatattatagtggaaaagtcaaaatttggactctacctttgtcccttttgtagtagtatcatgctttacttttttatacgactgtcttatcttttgacataacaaaaacagaccttagagcatgtccaaatggttaagaaccatttgattcttaaccttgcatcttaagtatatttataatctaaattttgctttttgtaagttaagataagtaaaagagtatcttagtaaaaatgagctccattgatgtatcttacaaagaaaatatcttagaaaaaaattcagtttttacatcacaatatcttccaatacaagtaatgatacaaccaaagtcatacaagcattt

SEQ ID NO: 42808 - DNA, 575 bp, Arabidopsis thaliana landsberg
agataatggcaaacccaaacaaaggaaacaaagaaatgaaaaagtgggtatttttgatgttctgtattaatacacagaaattaaattatatagtacaaatgtaacttgctagctaggttttttgtgtgcgaagaagattatcctcgatgacattcctcttattttatactagctcgagccttctaatatattgtgtttttggtgtcttttgtcctatgtttagcagtcgttttggttcatttgtcgtgttaaagtctatcttttgtgtcttttttattgtgttttgaatcttgtacatgttttaggtataggattgggtggtttcgaacgtgtttggatcaaaagcagggatcaaagctgaaactaggagcagagactggtggaccgatggatcggatagctgacggatggcataaactcagtcggatcgattagtcttctccaagaccgattggtctggttttctgactcgtttccttttatttttcagtattctacgacactcatttttaataaatatatattcttggccaaaaccagcaaagtataattaagatttacaaccacgttcaatt

SEQ ID NO: 42809 - DNA, 1892 bp, Arabidopsis thaliana landsberg
tatagagtgattttttattttttttcattatacaaattacaaatgactaatttaattaattagtgaacttttaatttgtcgataaccaataagaatgatggaaaacggcaaaagagtcgactgttgaagtttgtcggaaagacactccaccataatataaatacaaatcttatcactagtggaaactgtcgagtgtgtagttctcttttccttctaataaaagaatattatctttctaaattcttccaaaatcatttggaattttctttcctttttctttttgttgacatgaaattttggagtcttcttctatcgccaattacgacttaaaaaaacgattttatatatatcaacatagctctaccaagaacatgataatcgcaaatatacatagatttgcctatttgtacacaagcaaagttagttttaatactcagtatattacatctcatgaaaagaatttacagttttttctattaaagctgtgggagttttcttctaaaatgttttttttttgtcgtcctttgtaaaatgttctacattcgtcattttcaggctatctttgatttcgaaagctgtgggcgttttctttttttaattttttttttttttttttttttgtctttttgtacgaaaataaaatagcgtgcactgtattgtttctttcaactttatttttggactagtgaaagactagacattttgttgccctgcccctatattttttgtgtttattttaaggttgtttttttttttctctttttataatgaccgtaatgagtttttacaaaatctgcttcaaatatgtaatgaaaaccttgataatatgtacatgtactaaaaacaaaatcttgatatgggtacatgtgaaaatagtatttttctattctaagaatatactgtttttatgttctaaaatatcaacaaatagatatctttgcatttttttatacatcaatattagtattacctacattgtcaaagagatgtaacccaacttatgtcgcaactagaactacatctcaaaaatcaccgagccgagagaaaattgtaggagtcctcgaccagcaaaacgtaggaacatcaactcaaagcagtcgagaataagaaccaccgacttacattaagcagaagatcaaaccacaccacacatcatccgaaaagaagacatccaccatcgtttcaactttcaacccttgaccaaaccaccgatgataaagacttgtctattatagtttactaaagtttatgatcaaacttaaatttctgttgttagattgatacctctaattcctttgaattgcttcttagatttccactttacccttccaagatttttaagcaacggaaaattatgtttcacttgtttcagattttaatattccccttctatgcaaattgagggaccacgtagaaagttgtgagaatctcaatacacaaaagaaatagaaacaatgattacatgcacaagcacgaggccataaatttccttatcctgtacacattttcaataaagatgtaacattccaaacagaaaaccctcttgtagctcactctacaaaaaaaagagtatagaactccaatattaaagtttataggtcgactatttcaaaaccaattgctataaagtaaattgatcaatattcttatatatcatttgcaatttctctttatttagttttgtggtgattccgaatattaattacaacttgtaccatttaattcaaccatattcgaagaaaacattaaaggcaaaagaaattaaggggaaaaagaaatcaaaagttaaaaaaagatattaagaccaatgagaatagataaggggtaaaagacaaaaagagaatataaaaaaaaaaaacaaatagcagttggcgccaaaagtaaaactaaat

SEQ ID NO: 42810 - DNA, 1149 bp, Arabidopsis thaliana landsberg
gatagattctcatatataaatggtttcaggtgcatctgctggagaaaagcttcgagacagagaacaagctagagcctgaacgcaagactcagcttgccaagaagcttggtctacagccaaggcaagtggctgtctggtttcagaatcgccgagctcgttggaaaacagaacagcttgagagagactacgatcttctcaagtccacttacgaccaacttctttctaactacgactccatcgtcatggacaacgataagctcagatcggaggtacttatacatgggactattatttatctcaacaagattacaaattgaatgatttaccttaattggtccaaaggagaaaaataaaaaaagcatcaagtgaaaagagaatatgcttttcctatttttcaacacaagctgatagagagaatccatcatcaatcatatataaattagaggagagactagaaaaagaaagaaaattggggaatcaaatcaatcaacgagtttaattatctttttatgggaggaggttgcttgtgttgaccgttgtgattaaagttagaatctttccaacccgacaggttacttccctgaccgaaaagcttcagggcaaacaagagacagctaatgaaccacctggtcaagtgcccgaaccaaaccaacttgatccggtttacattaatgcggcagcaatcaaaaccgaggaccggttaagttcagggagcgttgggagcgcggtactagacgacgacgcacctcaactactagacagctgtgactcttacttcccaagcatcgtacccatccaagacaacagcaacgccagtgatcatgacaatgaccggagctgtttcgccgacgtctttgtgcccaccacttcaccgtcgcacgatcatcacggtgaatcattggctttctggggatggccttagaaaaccactctgataataaatgtgtgtttatttaagttcaagagtcatcttcttgttgtttccatgttgacgataattgttgactcgtggaataattccgctgttcaacggtatttttatcagttgcattatatgcttttatgaaatcaagtcaatgcagtgttctgatttgaagttaaaaagattgatcttcttcagaaagcctttctagagagaaagagagagat

SEQ ID NO: 42811 - DNA, 530 bp, Arabidopsis thaliana landsberg
  unsure (1)..(530): unsure at all n locations
cttgtatattatttatactgttattgtattatgtatatttgctatgtattaatatgttactgtgttatatatgtattctaatcttatattatattgtgttattattattattattattattattattactttatgttctatcttatttattatatttgtctatttgttactttgttgtcttgttatttatattattcactttcatataatttctataatatgttttatattaatatattattgtattattgttattataatttatatttatctgttntattttatcgtttattactcactttttgttgtgtgattaatgttattatttttctttgtttattgttcaattgttgattgtatactaattacttatattatttactatcattcttaattgtattataaatgttgtcttctgttgtttatactttaaattgtatggttctattatatttatgactatttctgtgattattgtttttgtgtttaatattattacttactgtctaattctatctattgatttgttg

SEQ ID NO: 42812 - DNA, 488 bp, Arabidopsis thaliana landsberg
gtccaaccattctttcattatgcaaaaccattcaccaccagaatcatctaaacctgatgttatctatctatctatctctttctttagcttaccgttgtattgaatggcatgcctaataaacctttcggggttcctctaggcattggcccataagttcccttatccctcgcaagaaatcgtctgtgtgttcttggtgttcccacctgcctcaaaaaacgtttagatatacaggctaaatacccaaataaggcataggcttattctcatgggtttcagatacagatttctcatatcatgcagacctactatcaccatttctacaatgtgcatgtaaaatagtaggggaataaagaacaagcctaacctccttgaacgtaatagatgaactgagccctggaaacaattttttctctagtctctggattattctagctgccacattttcctttttcgcctcatactcttttggagggagtccctagtaccaa

SEQ ID NO: 42813 - DNA, 912 bp, Arabidopsis thaliana landsberg
  unsure (1)..(912): unsure at all n locations
gaatgcgtgttcaagtatatatgaaaaagaacataacaaagaattactttctttatttgaatattcggatttgtattggagttacaagtcctctttccatgtctaaaagctctatttgtaacgttcttgatttcactctaaaacctcttaaagtgtttcaaatgtgatctcattatcgacatccaagttgtaatctttcacaatccacaataatcttttatctcattttttacattttacatatgaaacaaaattatatgtgcttgaaatggggaccactaggtctggtaaattcttattgatttagacttttagtgatcaacataaggttaactttccttgtacagcaaggaaatagtgtatttaccgtagcgggaagggtaaagagaggttacaatttggcatcattcttattttagtagagagacctggacttggtggtcgaaacatttccaatggccatgccgacatgttctctctcagacagctcaatcagctgaaaacttgaggaagaagaaactagagagggttttttgacctgattatttattttggctgactcattcttctcacatcccaacaaattttcgttgatatctgtctctgtcttcatttccgacatggaatttgttcaacatcaattcttttctttagctttatgatccctcacaaataaataatgtccctctctcaatttgcagcaaaccgctgacgatcaaaaggtgagccaagtcttttacatgtcgataattaggtttggtcaatgaaatgtttgaatgtttcattcttggtttctgatacgatgagaagaagttnggtttcaacacatttttttgttgtggtgtgatatctaaattctgatcatttcaaattgatcaaatgatcatcaactgattaagcatcctttaatgg

SEQ ID NO: 42814 - DNA, 670 bp, Arabidopsis thaliana landsberg
aaaatacaaataaaaataatctccgtcacatggttacgttaaagtttttgtttgtacttaaaaaaaagtctttgtagatataagaagcaatataacagctttaaaaactatgattggaatcttaggaaaaaaaaaaaaaaacgatgattagaattattatttttattgtttgttgatacagagtattttcattgagatctttagtaaagctttcctacaaataaaacttgagtccaaatttcagatctctattcttttcgaatcatttttttctttcatatttgtttatacatagattaattacctcatacgtatattccatacgttgcatgcatctcgcttacacacttgaattccgaaataatgtaatggcgtggcgtgttgacaattcataaatagtccaaaattaagttaccaaccaaaaataaaatttaaaaagtaacaacgtgcaagttttaatctgatataactagtttgtgctagataatagaatttcattttaatcgaatgtcatatcccaaaaacaccacaacaaattgatcattttgccttcatgtaataatgatatggtcgcgtatatatgtggctattatgcgataggtgaactcacgtggttgtatgttaaatataaacaatacgacagctggtacggattactaatgatgtatat

SEQ ID NO: 42815 - DNA, 245 bp, Arabidopsis thaliana landsberg
ccgatggacaaagggggaggtggatctttccctcgacgccgaccacgccctagggggtacacctctgcactgtgatcggctgtgataccagtttattgctacgaccgcgtcaatctaaagttaactgctggtttgcgagatatttgctgttccctgcttcacggatccgtcgactaaggcacgcttgacaccctggtcatgcttgagaagcttccgtacccagaacattgtgttttcatggggtc

SEQ ID NO: 42816 - DNA, 721 bp, Arabidopsis thaliana landsberg
acctaccatcaataattattctatattccattatcttctttagcagtttcttttgtacgatgttgggcaaacaaagaaatataaatatagtaagaacttacatcattaatcatttatatctgtcaagttcggttcaatcttgtccttcttgctttcatgtaataaattacatgttggtgaccctctcctctcttttgttgcatatttgaagtacaaatatttcaaaatacacataatttaactctttgagaattggtatttgcatacggataaaatagttttctcatacaaatttagttaaacgtgatttaataaagtgtaatttaaggattaatttggatcaaaacccaatcccataaaatcaatttgagcaaaaaaaaaaaacaaacaatatgtacaattttaagtggttcacctacaaaatgagaggtacatcctctaattaatttatgttacagattttaatatattaaaaagttagtagttataatttttttcattttcatcttaaaaaacagaggtaaaaaaaaataaaagagaaaattctagaaaaaaacaaataaacatgaaatataccccaaaatattttgaatagacattattattctaatgtaatttagaagtttcgcctagtaaccgcggttactagctagatattcccattttttacagtgtatccaaggagattaaattttcgtaacctccaacagaggaactttac

SEQ ID NO: 42817 - DNA, 495 bp, Arabidopsis thaliana landsberg
  unsure (1)..(495): unsure at all n locations
cgtgtaaacctacgaaatggtcattgacaacaaattatgatcaattacaagatatatcgaccataaccttaacagtaaaaaaaaatattttctcagcttatataagtaaataaaacgtaaagtagaacaattagaaatgtatataaccaaaaaaaaaaagtgtggatggagccgagctaggcagaagaagccgagtgaagtgaagtagtgtgaacacggcattggggaagggatcttcaaagtgtgaacgcaaccaaagggaacagaatctctgaaccaaagatgccctacccaattttcaattactcgtttaggccatctcatgttacacacactcacgtctcccacctttccataattttccattgccatcaccttnntttttttttttttttttttaaagttttaaatatttctaaggtttttgttttcctgttaaaaatagttacaaggttttgggtatttggaatttaaataaatattttgaatttgtta

SEQ ID NO: 42818 - DNA, 726 bp, Arabidopsis thaliana landsberg
agctatgtctttttaattagactgaagaaatagaaagaaaaatatttgaaaaagtatactaacaagtccaattgtgttgtatagatctgaacaaccgataaagatgtagtcaaatataaaatcattacaaattttatatgaagagatcgcatctaatcatcctcgaaaccgacaattcaatcggttattaattataacaaaaataattacttcgaatctcaatccgaataattgatgcatcttatatattgatattgtggtggataaaataaacaaacaatcgcattaatgatgaacggctatacctctagacaaacttatacaagttggaagaaattgaagataattttggatcaaaaaaagtttgtggttttgcttggaggcattgccaactaacaatatctgtctccatgtatctctctattcatatcctcatatgcaattatgcatgtacatgtacgtatacattcatagatatgcagcatatgctctatattgtatagatctttagcccataagtttcctgcacatgagactaaacgttgattttgataataaaagcgtaattcatctttcagaaaattattgaagcaataatactaattgaatttttgaaaatctagttagctatcaccacttatagagttatagtatatacttcaatattgtaattattatgacataaaattgtgttcattaaattggcaacgtaacgtgactttgatg

SEQ ID NO: 42819 - DNA, 920 bp, Arabidopsis thaliana landsberg
ttccttttggctactgactctctctctctcttttgctctcgattaatacttctacttaattagggttttgggtaaaaaaattcgcccttttcaccattaatctattacccgtgttggcaaacttccaagaccagtcttctttcttttttggcttttcttattgagggccaatgaaagcaactaattaatttttaaagtagggtctatcaaaattaattaagacaacccttaagttgattccaagatgcagaaactgaccatatatcttttcttttatctcaacaagtgacgacgatcccttttaattcacgtccttacaaataactatctagaaagagaactgacccaccaaaaatggaatatggtgatgatctcacgctaaaagcaaacgtgtttatacaaatgtgacatcgagtgtgcacacgtacgtgtgaagagggaatggtggcataggagattgcgccagataaagacagtgaggacaactaactccatatactaacttatatataattaatacaatgcattttgatattcactttttgtacaaaggaaatgataccatacgagtcgtacgttgctaatattcttggtacctccaagtccaaccgcaaaacaaaagatggatagttagttggagaggatcagctgatgaaaaccaaaagacacagttgtgagagagctactagctagtgagtaccacatatatacgtatattgggatatatatataccttgaatcttacacattttgcttacatctaaaatagaaaatgaaccagtaattagtttttgtttggatccataaatatcacatatattacttaattatttcatataatttatcactcaaattacatttctgtataccagttgtagtattttaatgaataactctacctagtaattgtaacattcaaa

SEQ ID NO: 42820 - DNA, 1100 bp, Arabidopsis thaliana landsberg
  unsure (1)..(1100): unsure at all n locations
gttttttttttttggtaggaaatgatagttgcatagttgggttctattattacgcgactctaagctattggcaatttaaaaattgttaaatattgcgaccatattattttaaatagacctccctacccaaatttgtttttattatttaaaaaagaccttcacaaaaaagtataaatttgttttttatatatattacatgagttaacggtggagaaaaaatagacagccacatctatacaaatcatacaagtagatatatatatattattattattattattattattattttttaaatcatacaagtatacaacacaaacttttaaatgtccatatcatttgtaccattaaacttttaaatcatacaagtttatgacaaaatcaagttttgtaccattcaaacttttaaaccatacaagtatacaacacaaacttttaaatgtccatatcatttgtaccatgaaacttttaaatcatacaagtttatgacaaaatcaagttttgtaccattcaaacttttaaacttttaaatcatacaagtatacaacacaaacttttaatgacaaaattttaatcggagaacccgagttgtaccattagacagactaactttcagtttaatgtccatatcatttgctcaattatgtgtttgattccaccaagtcatctatgattgatttacctctaaaatctagatagcaaagtgtggtattcactttttactgtgagtctgtaatatcatcttttgtcaacaaaatgcagcggccggatattttattcgagatggacttgcgcaaaactcttgccaatagacgtcacgtgctcacccccaaattattcggtttcacgtggacactggagccattataaagttggaaaatctcattcaataattttaagtgacgccatcaggaccggtcatgaatgatgaaataatcggnaatccatacagaaaagtagaaacttattttttataggtatgaaaaggtctatcagatagttaacataaaattaaaggtgttgagataacttcttcaaacgtgactttgacgcaacccacgttgataaacgaagtcaatggagaatgaagaaaaggaagt

SEQ ID NO: 42821 - DNA, 594 bp, Arabidopsis thaliana landsberg
aactactctctactcgtgtgcatcccctcaaatttcgttgactttttttagtaattacataaattatatgttttaccactaaaaattacaacaagataaatgataaaatacggatggaacaattaagaatatagatagttctgtttcacactaagcaatttggtagttgattatctgctcttattaagaccaatgacaaacgataagtcaaattgttccacattatataaccatgtgtcgtggatctcaacccaacatttgacttgaaacaatttataattaattagttgtaattcgatatacagtggatctagaacttatttataggtaaataatgtggagtcgttgtctttccattaatgtcagtgccctatttcctaacctcactacgctctttcttactcgatattagcagcactgtatttcctacattttaacaccaagtaattttgttttattatagcacaagtggacctggttcaatatttgtatgcttttgatattgaagtaccaacaaaaggcgatcataattcgtaactagaagtctaaaaccgtagctgggacaaaagtcaaacgatttcactacgttatatt

SEQ ID NO: 42822 - DNA, 799 bp, Arabidopsis thaliana landsberg
ggcaaatgtgatgtgaacagtgattgtatcttgacttttcttacacttgtttcaagactttctcgattgagaaattaaaacgcacagttttgtaatagtagcggcagattagagatgggctttattatcaagttgtaaaaatattggggtttaaattcgaaaaacaaaaaaataggtcatggtttaaaacgcaattccattataactcaggggtttccttgtttctttatattactatatcttccagattaaaaataaaaggatcgttaaaccctaaacccgcttcttcttcttctttctcttcttctccctcaacgccgctctctatctctctatctctctctacctcaaacttattcttcgaatttcctctgaagaataatcttatcccaatagcgagtatgagttcttcaatagtgtcacagttacaggctctcaagtcagtgttacaagccgatacagagccttccaagagacctttcacacgcccttcgattctcttcagtcctaaagaagcagctgatttcgatatcgaatcaatttacgagctcgggctcaaaggtatgttctcttctcctattatgcaattctaatgaacaagctcaatgataaattaaattctcatcgttaattatttttgttaattcaggtctagaagtacttggaaacaaagatgagaggtttaaaaattacatgaacgacttgtttagtcataaaagtaaagaaattgatagggaattgctgggtaaagaagaaaatgctcggattgattcatcaatcagttcgtatctagtgtact

SEQ ID NO: 42823 - DNA, 984 bp, Arabidopsis thaliana landsberg
ttattattattctctataattctgaaaaaacccatttaaatacaaaagccgatttcttccaatctcatgttagagttttttctccattttgtttgcattctatatagtatcgtcacacaaaggtttcgtcttgtcactttactttgtttgcccccctttggttttttgtgcttcccttctcttttttttttgtttgacgacctgagggaataccttgatttgtagatttttatccattaatggaagataatcagcgaagcagattcagaaaaatctgtgtcttttgcggaagccactctggtcacagagaagttttcagtgatgctgccatcgaactcggcaatgaactcgtttgctctctatctctcttctcttcttcttttgattgcttcttgtttggttttgtgataaaaatatgaacttttcttcaaatcaatacagatatcaccttcgctcggtttttgaatgtcaaaatacgaactttttagtttacttgttcatttcaaacaatgggtttggtggattttatttgtgcttgcgtctattgtaagcttttgtggtatttggggtttgttgactctttaaatctaggcatgttgtcatttgacaaaactgtgaaatttcttcaagtgttgaaatgggtcttcctctgtttttttaaatgtgttatctttgattgtgtgatttttggaatgtgtaggtgaagaggaagatagatttggtttatggaggaggaagtgttggattgatgggtttgatatccaggagagtctatgaaggtggtttacatgtacttgggttagtttaagaatcctcaattagttttatagctctttcaatctcttttattttcaaacttagagtgattggattctctgtgattgcagaatcattcccaaagctttgatgccaattgaggtatgtatcttcttctagaagctcatttgtccaggaagtagtaaacttggctggagttttgaagtt

SEQ ID NO: 42824 - DNA, 829 bp, Arabidopsis thaliana landsberg
catgtcccatcctactgctccaagactgtagtctgtaacagtgagccatgtgttgaaatactctcttagctcagtgaccactccgtctttcaatttccacacgtgaacccagtacacgcgtgaaccctcccacccttctgcaatcacgcagtcatgaccaggcaccactacttgtacactgcttggctcaaacctgaacgaaacctgcctcggaggttcccctgttagcagcctcatcatgtgttgacaatggtgcggtccatggaaccaccattccacgtcactggccaccactttggtcaccgtagaagtgtcgccttgctgcaacgctttgtagagtaactctatggttccctggtttttcatttctggggtaagtcttgttgatatctctacgttgtgtgcttccatttgtatatttctctcttcagacttagaacaggataggttttcaagtgaaaagtcttatatttgtgttgtgtgcttacgtcttgtggtttcagtcccttttatagacaacataatcaagtactcgatacaaagggtcattttaagacttggtcctttttcaatcagctttctttataataacaaataactcttttttttcccctttttctattgtcggtgataaactgaatatcgcaataatcttaggtcgtttttcgagcaattatttggtttgtaggtatttaatctaggttctatctttgttgtttttcagtttgaataaaacattttatcataaccgataagtttgttcgctgaaaacaaaataaaattattgatgaactaatcgcgtctatcgaattaaaagtagcttagaatt

SEQ ID NO: 42825 - DNA, 773 bp, Arabidopsis thaliana landsberg
ttcaatttttacaaaggttttttaattcattcaacattgttcttttacaacacatgcgtctctcagaaatctctccgccccagatccatctctctctcaagcaaacactcttaaacccttttgatttctcctcataattattctcgaaagctccattgtttattagttattcctgcaaattattcaattttaccattttgcttctggtttttttagtcgtctctctctctcttcaatctcttgaaaggtacttgctttatgcacaaaagttataatcctgggtttttttgtactacactgtagttattaatgcctgaacaatcttcttgatctgggtacattttgcagattgagtaaaaatcattcctttttttttctgggttatatacactgttcttcgagttctagggttccttaatttcgtttctcctttttggaaagtctctgactttatgtgttttaatgggtctagttttttcatgtggtccatttaattagctagtggaagaagatggatgaattgtgtaaagattatttttggttctaagtatcaaaaaaatttgggggtaaattgagggagatgggttgtgtttgtggtaagccttctgctattgaagatagcaaagatagtccaagagagcgtttctcaagcaaatcctcttctgagtttagagtttcaagaccggttgcttcttctagaagggaggagccgcttaggattaaggaacggtctgatgttgttagtgtaagaccagtgttgagtaataagcgat

SEQ ID NO: 42826 - DNA, 587 bp, Arabidopsis thaliana landsberg
atttcctgaagcttttccgcttcagacgtaaagctcgatctggggatcaacaagctcatagaggacaagtgactactactatcaatccctgcaacacatcattatattaataactcacaccaatgacataaagctaattcatttacacacttacattgatcctaagctaggcattgaaagataagtacgtatctcgacacaagctaaaattggaacactacttaagctaaaagtgatcacctttcttgcataaaagtgattaaagttcgaatttttcaggatcatcaccttcactagctacatttcctaacgttacacaagttaagttatctcgcgtaggacaaaaaaaatctccatttccaaagatggggatgattaatttcgcaataggaactgtgaaatggcaaaaaaaagaaccttttaatacagaggaagacgaagatgcttgactccgccattggaaggatcttgagatttgagaagcagaggagaagaatctcagattagtctcggtggtaacaatgggttttaagaccgtagcgattctacgagagttctggaagaattgcatgactcgtgattctact

SEQ ID NO: 42827 - DNA, 772 bp, Arabidopsis thaliana landsberg
cgtctgtgtttcgcttgaatctatatttttgctatttcctggaatgatgatatatatgtatgttattatgtagtagtcaatatttttgtatattgtgaataattgactttttcaaggtaaatataggtcagaaacttcaaattcaaaatattaaatattataatattggtgaaaatatatagtcaaaaaatgattttaggttcggttgataatttattcaatgagagtgatttacccgaataagatgattgtgtgtgagcaaaaagattccacaatgatgccaatttaagcttcaacaagtgctttcctattaacaagaacaatttatgtaatatcatttttttcgtttgttttgcaaaactgcaaagtcattttattttgtttactttaataatccttgaaaatgttataacagttatttcctcaaattagaccatcatactattattattgttattatcaaccgttgataaaaatggtagtagcatgtacaactaagatagaccgttacaaaattcgtgtattgttaattattatatagtttccgtatgttgctgttttcagctcaacttgagtaaatataaaatattaaactgtttattctaatattggattcttttgtgtagtggcaacttatttttttttaaagcttttttttttacagattacggatttcaagtatgaaattgtagatccaatcacttttttcacaatttgttaaagggattttaaaaggtaaaaccctttaccagattttaaacaaaaagccttt

SEQ ID NO: 42828 - DNA, 531 bp, Arabidopsis thaliana landsberg
gaatcgaaaacttcacctgcctttaaattatcaaattctctatcaaattcgttgcaacacccacaattgttcaaattaagcttgaaactaccaatttaaagagtacgcaacactcggaatcgttcaaatcaagctcgaatctaccaaaccagataataggattacctctctcaaattcgtttgaatcaagcttagatctacttagaaatcgaatctaacaaactagagaagagcatttatctttacttcgacaaggccgaacgcgatctgcgattggagttgatggtacgccattttcactttcttggtgcgatcgaccagtgtcgcgagcttatctcggagatctggcgccgatactgctgcagcactttcctccgccgtgtattgcgccggagaggcctggaatctccgtggataaaacgctcttggcgggaactccattgtaggaggaaatcagttatcacacaagtccgaagagaaatggattcgaatttcaaacagtcgtttctcaaattctcttttggtttcttc

SEQ ID NO: 42829 - DNA, 590 bp, Arabidopsis thaliana landsberg
tattaagatattttaaatatagttccatacatatatatttcttaaaagtataatataggaatacttggagtatagaaataaatcatacgtacatttattctagactgttaactgattataaatttattggaattaaatatgtttaaagattctcaatagcaaaaaaaaaagaagaagatagtgatagacgttcattgtttgggtaattttttcgttttcgagaactaacgaaccatgtgatatgtgtaagcactaagcagagtcgtgcgtgcccacctttataaacaagaaacattcgtctacggcacagtttttttttttttttgtgatgtcttattttgaaattgatatattaaagtaaagtggtgaacatctcacagtttgacacttataccatatacctaacttctatggaaaattaaaaaaaaaatgtggagcgttatatgaatatttttttataataaaaaatgttatatgaatttaagaaatagaccaaattttcaattcagtgggactccaaagttctagaaacctagaaccttgtgtgtacgcatggtaggcagaagattttcccccgaaagctcttcacc

SEQ ID NO: 42830 - DNA, 619 bp, Arabidopsis thaliana landsberg
cataggacatgatttttgtttaatcattcgtcattccttttatcctggactatatgatcataatttgtaagagcttatacacctttatagctattagtgcatttgtttttaatcttctaatgtcaagttatggtccgagttatatctagtaatgaagaattataacacaatgtgtgtaaaatgtctgatacaaaagaaactccataaattagatttgtgaaaacttaatctacaatgatgagaaaacaattagatttgtgaaatctctaacgaacaaatgactatgtcaaatggcatatttaaaatccgtttacttttcacatcgtttaataaatttagtatcaaaataagtcaacaaaagatgaaataacattaaaatcaatcaaagagatatttttgtacaaaaatctatttttggtgaatataattttaattccctaagaggattgctgctatgtaaatgtagatgaatccaaatggtactgaagtttgtgttttgaagtgtctaaacttccaatcattcccaagaagaactaaaacacccctagcattgtgtgtgcaaccaaatttccatttcataaatctataattctatttatctcatcatcagcaatatcct

SEQ ID NO: 42831 - DNA, 525 bp, Arabidopsis thaliana landsberg
  unsure (1)..(525): unsure at all n locations
cgagacatcccggtcactgtgccatttcggatcgaccaagacatcgccgtctgcgatctgatggattggctgctgatcgacgacagcgacaccctgaacggctacatggcggcagcaaacgtttaccctccaaagggggttcgcgggcagaaccggagaatcaggcgagcggcggcggttcgaacacttcggcacataatcagcgaagccgccaagccaaactcgnnnnnnnnnnnnnnnnnnnnnnngattctgggggcaaatagtcgtcggtcttaattagaccgatctgacagcttttcatgcctgagaaaaaaatctgaaatagcccccgataactgccgtgaacaagcggcaatcagggagtttcggaaatgtcagtcaatgagatggtggacgctgatccacgcctcaaggttgaagaggccgccgaatatctgggcggcatcggtcaccacacaatgaacaactggcgatcccagnggaaggggccgccctttatccgggtcggtcggtcgggtcgtt

SEQ ID NO: 42832 - DNA, 2139 bp, Arabidopsis thaliana landsberg
tggattaaaatttggttaattaggagattaatattgggagatcattaattaatggaacatatatagcttatagctgtttttcttcttctacaaaaggctatataggttaaaatctcatttcttttaattgaagtatataaaatattccataattggtgttagtcgtacgaatttttattgtttatttattgagattgtgagctccataaatttagggggttggttgggtagttatagtattattttgtatagtttattatcatactatgatatagacttaactttctggttgaacaaaactacgcatatagagttggttataattaaattttagggacatacatcacatatatttctcaatgaatatatgagtacaactttaggttagcaaaacatttagagattgtcataaaaatggtacgttggaattctcattcatagttagagagacttgaaagctaaactaaaacaaaatcaggaaaaaagaatactatcatacttgcaaaagaaaaataatactatatatattatacttctaaaaaggaaaagtcgtattttatctaatttatgttatacttcatatgctgaaacaaatggaaatatatgacaaagaagatttgatggcatttgctggaagctagacccacgaaaaaagcataaggactcttgatgatagttgataccatgtgttccacttctttttatatcttcgttttattgcaacgaaattaataaataatttcccacatgaacataacaataatgaagtcgaagctaagctaaataaaccatgaaatgtttctatatagttttttcataatattcgtgttgtttttttcttctctagaaaacttccaagaactaacaatttcttgatcataaaagtgaccggtaaccaattctatccctaagcttgaaagcgaaacgttttggatttgttgctcagtcctatacttaatatgtatgtatatctgaatatttaacataactataactgtttttatgtatctttaaaatacacaagaacatacaaatttaaactctatgcatcggcagaattacaagaagaacaccatgcttgatcagttgatcttgaagatgttcaaagctttgatattactactctggtacgacctctgaacaaactcaaaaataactcggttccttttatcgagagaaccagaattaaaccaacggtaaccaagactcaaattcaaaccatgcatgctttagtttactgatcatatctttatccagtttagctgagagatcatttattcttcatcacttaagactatcaaatctccatcttcaccataacattttgatcttgtggtctaaattctacaatggagaaagctttttggaggagattctaagaccatctccaacacgcagggttctctcatcaattttaacaattaaaataataataaaattctgaaaaggagaagaaagagagaaactcatgaaacaattgtttctgaaatctcttgggagagagacgtctctctactttaaaagattttacttgccagatgttttatatttattggtcagatttaactaataactttaaatttaactaactaaaaaaactatgataaaaataatattttttatcaataaaggacatttttgtgagaacctaaccgttgtggatgtctaagcagctgaagtcgaggaaactaatctctcgtctcttccatacaggttcgattctatgaagaactgggagctataaccctttgataaagcctcaatatgatcccacatatctgcggttatctaagggtttagaaatatatacataatgtgaattcgttgtggtaagtggaaacgtatggtatgaggtcatgaatgtaactaaggaacttgaagatagtatcatctatattaggaggaaatgcaagaagtcttatatactatgattctttacatgtttattattcttgtgcgcaacaacagtgtacaagtgaaacataccactccaagtgaagaatggacaaacagaattagacttgaatctgatcatggacatcctcgaaagatctctccccgttaatggtttcacgattctctacatgttgcagaaactccataaccacttggtcggtccaaggagctccgttgggagct

SEQ ID NO: 42833 - DNA, 438 bp, Arabidopsis thaliana landsberg
tgctggctgctgcgcccgacgatgctggcggtgccggaaacatacaggtgcgcgccatcattccagcgccgcagcgtggcgcgcgaaaagctcggactgcgcgggccgtattcgcggggatagctgaaggcgctgacctgtcgcgggttttccacctgcacccccggcgatttgcctgcgaggaaaaaaatattcagcccgctgccatgggtgccgatggcggtggcggccggcaggttctgctcgaaccccggcttgagcgacagcgcacgatgacggccgacgctgaactgccggtagcgctccgcatcgccttcgccgcgggtgatgtcggccatgtagatccacacacgctgccagcaggggtagcccagcttctgcatcaggcggtcgaggcgcacataggtgcggaaagacgcgtgatcgatatgccgcaac

SEQ ID NO: 42834 - DNA, 301 bp, Arabidopsis thaliana landsberg
ggcggaatatcttgatgcagtggtttatgaacctcggatactgcttgagtattttggcgcgggaagcgatttggctgtgaagagaaatcatgatgctgaacgactctagggggtgcaggttccttgttttcccactggggatatggttgagaatgccacatttgggtcgaagtgatgcattgcacgtggagtgttcatggtagacctaaagacacacaaccatgcagatataactgatggggtcagatgattacagtgtaagaactcagagaatcgacttgaatcgaaaagaaaatttggc

SEQ ID NO: 42835 - DNA, 157 bp, Arabidopsis thaliana landsberg
tactccaggctgtaggatgccggtgggggacggacatgcgcgaatggaccatggactgggagtgttgaggcagggacgaagagtggtaattggaaccagaggaagacacgcctagagaatgtgtccgtggagaggaacacatggcgaccagggaact

SEQ ID NO: 42836 - DNA, 725 bp, Arabidopsis thaliana landsberg
aaatattaattaaatagctttccctattgatagcgaaatttattaaaatttcattaaacgaaaacgaagtgtcgaaaaatgttttttctcaggaaaataaaaattatttattttttgggggtgtaaatacttttctagtgagatctgagcttgggaaatggagattgtagaagaacaagctcctctcaccatttcttcttcttcttctctctaaaagaaaagagacttcaccgattcttttttattattccttcccagattttctcgggaaattaattcttttcctcctctttcttctcacttgttgttgttccttaacactctcttcctagatctactattaactgatttcatttcacgactaaaccatcgaagtcttcggcaagatatggatttgtttctgttctattaaacttgtttcaatcgagaagtaaaaaaggtgagatttgtcgaccatcggaggcctcttatggtttgatgatatcgtttggttttcgatcgtctcaagtttttatttttggttctttctgaatctaaagcttctccctttctttgttcgctcacttcgctgtagtctctatggattttttgagaaaaaaacgtcgtgaaataacatgcaacaaagatccatttgagtttcttctctatttgcctatttgactttgtttttatggaaaaaaaaagattcgatgaagtttttatttgggattttctgatcggatttt

SEQ ID NO: 42837 - DNA, 706 bp, Arabidopsis thaliana landsberg
  unsure (1)..(706): unsure at all n locations
ccaaacctttgggttgtataactatggaccctagctaatcctggtgactataatgattaaccaacttaacttctaataaacacaatgatacatacaaacattatatttctaactacattgcataaatcgaaccatctaatctgttatgttactggatacattgtatcaacctatgcaagagttttcgaatgaaaagttgggatgatcaaagtttaattaatcttcaaaaaataaatagtggggccaaaatagaatttcttgaaaaacttgggggttgtacttcaatacccacgttttataaatagtgggcttaactttttacatgtaggcccaaatcatcttccgacgtcggttagggttcttgttgatgatatcacctgaaactctgagtttctctctccgcctcnnnnnnnnnnnnnnnnnnnnnnnnnnnnnnnnnnnnnnnnnaattcctagctcctcgactccaaaaaaaaatcataaacgtattaccgtctcttgttttcctcgtaaggttctcaaaatcgattatcttcattacactcgacttgtctctgtttcgaatcctacgtcgtgtttttcttttcagtattcggttacgagaaatcttaaaccgtacttacatttcaggtattatatcggtcgaagtctccaatcatcggtctgagtaatctttgacaatgtatgtgtaattcccgaccgattg

SEQ ID NO: 42838 - DNA, 711 bp, Arabidopsis thaliana landsberg
tccggtttgtcgttgatgctgttttgacgaatcggtactcttacccaaaaaattcccttgaccggttttggtagatctagaacaaatcaatctatttgactggtttggttaataaagtgtttgttttcgatataatcagaaaaataaaataaaaaaacgaccaatgtgtgttatatacatgtaaggatcttagccgttcattaatctcactaatcagtccaactattgatggtactaaaatgactaatggttacgctatcaagtgaatgtgtcaagtcaaactatatattgagccattatcaccatgtttttggctccatcttcttacagattgaaattcgagtgtttacatgcgaaatgatgagagaaaatgaccaaccactttttctattttgtctttcacctctcacatattttatttcatgtttctctctcaattattatcgctcgttcataatagaaaaaagtcgtccctagctagacatcattattgttggaataatatttgactgcattgcatacattcaccaagcacagttaaattgtgttcgactattgtgatgtcataacacacatcaagtgtatatttattattgtgttcgttgtatctggtttactaatctcgtatgggacgacaacatatatcattattggatttgtaaatttggtactaatttcctttgaatttgaatacggatatgtacctgaaag

SEQ ID NO: 42839 - DNA, 2713 bp, Arabidopsis thaliana landsberg
cattcacaccatcacctgtcattgaaactatttctcccatttccttaagcatcctaacgatttcttgcttatgccttggctcagctcgagagaacactttccctccagattttgacagaatctcggttctccgtgaagccggaagagacataaactctttaccggtgaagctactctgcgaaagatcttcattctccgaaaacaatctaatctcacaacaaatagcttcagctgttgatttgttatctccagttataaccattactctaatcccagcgtctctgcaatcttcaattgctcttccaacttcttcacgcggaggatctcttagaccaacaactccaacgaagataagattcgtttcgatgtttgaatagctagaagggtccaaaagcttcttgtgtgaaggatgttcttcggaagagtaatccgaaaactctcctaattagtctttgtaagctaatcctaaacatcttaatccttttgaagtcatttcagaatgtttcttgaggattacttctctgctagattcatctaaagctacaagagatccatcagcaagctgtgcaaaagaacttctctcaagtatactctcagcagcaccctgcaaagaaaaagaaaggggagattcacaaaacgttcttcaccaaaaacaagagaagagaagtaataatggtgtttagtgtttaccttaacgagaagccggttttgtccatttggttcgctcacaataacactcatggacttacgaacgcgatcaaactctaatgtcgctacctttttcgatcttttgttccaccaatcgcaacaagctagtgcagcaagaatggagaaaagatcaatcaatcaacaacatagcagatgaatgaaattgtgctaatgtaatggtgtgaaaacattctaaaacttacctagcttcactgagctaccattgtctgaaaagtttgcaacttcctcgatgttctcactgttcttcttctccgggatacccatcttctcaacaagaactttcaatgctgcttctgtaggcaaacctgttgctctaaacaacttcccttcatagaacactccagcatcattacaaattgaacatatctcagcaacagcttgcaagttagcatccatattgttgcagccccaatccacaattccaccatctttaggatcataagtcgtaccactgactgaaaacactcgagtagtcgttgttttaccgcctaatgtgaagaattcggttgcagacatctggtttgttgttaaagtcccggttttatctgaacagatcacagttgtgcaaccgagtgtctctacactcgggagcttcctcactatcgcgttcttctgcgccattttcctcgtccctaaagctaaacatgtcgtgatcacagcgggtaaaccctcgggtatcgctgccactgcgagagcaacagcgattttgaagtagtaagtacatttctcgaatgaaaacttgatattcacaggtttatagccatccacaacatcccaagaaacaaagttcttgtagtttatcatccacacaagaacacagacaatgcaaatagctgtagtcaatctactcccaaactcgtctagcttcttctttaacggagtctcgctctcttcaagcgacgcctcgtgaatctgtctctggattttcccgatctccgtatccataccgatactcgtcacaatgcaaacgcagcttccgttaacaaccgttgttcccgcgaaaaccatattttctttcccttgcagttcacaatcatccagaactacaagattcgctcctttcaaaaccggcattgcttcaccggttaacgagctttgctcgactcttaaagtggatgttttcaaaccggaaactctcatatcagcagggactttatctcctacatttaactccactatatcccctggaacaagctctctagcaggcaaattaggcaacacattcccatctctcaaaacctttgcagattcacattgcatctctttaagagcctcaagtgctttctcagcattactctcttgccacacaccaaccacagcgtttaaaatcaaaatcaaaacaatcacaaaaggctcaacaaaggcctcgaaccctgaacctgagccatgttcctcgctttcacctaaaaaggctaaaacgaaagagataaacgcagcaccgagaagaatcttcacaagcgtatcgtcgaattgttccaatacaagatgccataaaggcttgcctttctccttagcaagctcgttaaaaccgtacttttgacggcggatttggacatcttcgctagttaaacccttgtctaatcttgtcttgtactctttcaaacattgctcaacagaccaagaccacgccgagaacgacttctcctcctccattggttcaaaagctttactttaactcaaaacggttattttcttcttgtgtatgtgagaaaccgtttatcaaattcctgtagaaaaatttcaatcaaacaatgaaatatcaatttttaaacaacaaataaagttacagtttttattgacggtttgatatcttttacaacatagaacataataaataatcaaagatctaaaaaaaatacaaacccagaaacccaaaacaagaactgagttaaacagagagagaaacagagtataaattcttacctaaattccaagaaaaaccagtaagagctttcgtcattgaaatatcaaacagtgaaagact

SEQ ID NO: 42840 - DNA, 886 bp, Arabidopsis thaliana landsberg
aaatatgtagtataaacgaatgtatttttacacaatatgatataaagaactaattctggcagataattatataaaagttaatctatatatattactatatggtaagagcatgcaccttttaagatatcagatgtattgcaagagctgataagttgggtcatgagacgaccatatttctcttcggctatctggttcgttacactggccaagaaaagtataaaatacaaagataaatctaaagattggatgtttggaagttaaataacataatgatgccaatatgagagatcagaagtgtatttatctatatatattctgcaaaaaatagcggatagagtaattaaattaccagctttttccttccagagccaatgctttgaaatgttatccaatcttgcaacaatactgtagatcgaatacaagccatcctagcagcttcattggattcttctgtcatctgtagttatgaattatgatacgttttgggtgtaaagacttagaagaatctaaaatatataagaaaggaatgaccaaagcatggtggaaacgtgtccaaaactgataatgggtgaagattcccatgcgtcgatgtttagaaaaaatcgagcctagaaaactgaatcgtcggcgaccgaaatttattgtttaatttttatttaagattagttaaacaatggaattacattggaaagaacttatgatattattataaatgttgacggtctctgttttccaatgtaaatataaaaaaattctagctatgaatgttattatcattagaaactgaaaaagtctgcctttacattgtaatagcctatgattttaattccttgagaaaaaaaaagttaaaaacaatgagtcaatataaactaagaagtcacttctt

SEQ ID NO: 42841 - DNA, 631 bp, Arabidopsis thaliana landsberg
ccgatagacccagttgaaacctaacattagttaactcacactgtctctctaaacatggcgacgttatcttaaattaaatattacagaatattttccatcacatacacaaataaaaggagatgtattctccgtataaaaacatataagtagatttcatcgttacgtattcgaatcaaacgattatacactgcacgcggcaacactaacgaaatggatttaagtctaaggtgcaaatgaatttatttgtgataatgttattgagtggcgctagtcgcacactcaacactacaaaacgtcgacaataacgaaaacaaaacattattaagtggcaccacacacgagaatattcgtagtgagacacgcttcttactcgttattccaacaacaaaaatgttaaacataacaatgtactcttttttttttttgataaaagatcaacacaaaataaaaataccttttagattcactttttcccgatatttagataacaatctgttaaaatctagaaatctaaattatttgtggttaccaatccatttacttttaagaaatttactgatccaaaaacaagcgtgtggtgcacgtgagaaagtatggtttgatcaaaccaatcaaaaacttcaaaggcttc

SEQ ID NO: 42842 - DNA, 774 bp, Arabidopsis thaliana landsberg
  unsure (1)..(774): unsure at all n locations
gcttgactgtaaattgtggttcgaagctgtgaatatggatggattagacgtaaagcataaacaggaagcaacaaagaaagtgcaaagtctgaaagaaaatggaatagctcaaattaattcttaagcaagctaattcgtattgttgcttcgttgatggttcatggctatctccaaaccaacctgcaggtattggatgggcacttcgtgataaggaccgatatattgtaactagcccaactcaaataaaaggaccgatatattgggccgataaattagagtccagtgataactttttgttttggtataaacaagtgaataataataataatatcttctagttagaccaatcgaaaaaacaaatgaaaaagcttttgtaatctatgaagtttgttttggattaaaaaaaaaaaatctatgaagtttgttttcgagtggagaaataaaatatattaaaaaatatcttaaaaggtgagatattttatcttgaaaaataaatatcttgagaatatgtactttcagaaatcagtaaagccaatgtaatccacttgtggacaaatttgaaaaagccgacaaatacttttctaaaaaaaactggcgtctttggaatggtatttttggtttgaacgttaaagattaaaatttaaacactaaaaatatgtttattgaaaaagaaaatcctaaaaggatattgtcgaaaattagatatcttccagcanatttagaatcaattatcttcttttctttgtctttcattttcttaatttaaggcggaaa

SEQ ID NO: 42843 - DNA, 568 bp, Arabidopsis thaliana landsberg
aaccacctccgctaggtagagaatagtgattactttatggttaactatttttttttccccttcagtgaagtcattcgtacggtaacgggaaaaaagggtactaaaaagacacaattattttaatccgtcgattagaaagaaaaaaaaatgttaccacttaccttttttcgtctatcacattttcaaatgggatttgaataattgaaagcaaaatatatagttaaaccttcaaaactttaaatactagacgaatacacaaaaccatagtttccagaaatacttttctttttgctcttaaaatcaatgaattcgactataagcctcaagtacagaagttatgaacttatgatcaaaatcagaatttgatgctcaccactcatccatctttcgccaccacgtggagaggtcatggagaataccttgaactgtttatcaattggatcgtatcccaaatagctttccaccgtaactctcctattttcctgagctagggttatatatcaccgggcaccgtttcatcactccttttgagtacagcttctccttaatacagaccaagccatgaaca

SEQ ID NO: 42844 - DNA, 606 bp, Arabidopsis thaliana landsberg
  unsure (1)..(606): unsure at all n locations
agaggaatgttagagcttgtgttaatggaattccaagtcagatatgaatatttttttataatcattattgtccttataactggtttaaatacctcaaatttatattttatcccctgtttttttcccgggaaaacgaatctcaaaaaacgaatttcctactttgacattattttatctccctctnnnnnnnnnnnnnnnnnnnnnnnnnnnnnnctctatgaatttatcatttacagagttcaagatcatatgatattttcactttctggacaaaatgggacatttctcttccatgttcaacggtatagctagatccttctcgatcaagaaagcgaagaacatcaacagcagcaaaagctacgctaaggaagccacagatgaaatggcgagagaggcgaagaagaaggaacttattttgagatcctctggttgcattaatgcagatggatctaataacttggcttctgttttctctagacgcggtgagaaaggcgttaatcaggactgtgccatcgtctgggaggtacattacttctacaaaaagttatcttagagctgggttatttggaactttgcagtctttggcgtttacttagcacatttcgc

SEQ ID NO: 42845 - DNA, 607 bp, Arabidopsis thaliana landsberg
tactataataggctaaaatcacatcattttctaatgttgctttttttaatatatatcaaataaaggcttaaattacatttatataagaaatattgtaatacaaatatcaatttagagctattaatctacaattacaacctgttgcccaattgatgaataaatcaaacatgtaattaaccaaactttctaatttatcaggaatcaatttagctaaataataagacataaatttggccaagaaaaagaagagaaaacatgttaaataggtaatgggttttaatattgggatagttacctttatttgaaaactattaaggtttgatttaagacacgagtcactcgagagtcgcatctcgccagtcaaaaactaaattaaaaaactatatagacccaaaaaataaaaataacgacttttgtatttatactggcaagattctcattaaaacccagcaaaaaaaaaaaaaaaaagacatagaaggaagaaaatttgagtgggtgagaattttttacgatagaggaagagacagcatcatctacttgtgttgtctgtgtacatatattacagtaagcgttgcaatataccttcttgaggatcttctcacattaa

SEQ ID NO: 42846 - DNA, 503 bp, Arabidopsis thaliana landsberg
tatttaattttagagatagaacatttgaatgaagacgaaagtggataaattgataacaaatacagttctccacttcaaacgggttctcacatccgccttgaagccacgaagcttcaggccacgttatttatctcacttcattcctcaactccttcatgaacaagaggtactggttctattgtcgagatttaggtttaaaaatctctgttgacgtttattattttgtttctcactaaaccagaataaaccgaattaataccaaacaatgttttggggatataattccggtacagtgttaaatatgtagattaacttaacttacaagttacagcggtagagttttagaaaaggaaaacatgaatcttatcgattaaaaaaatgaaacaacaaatgatattgtataactcgtctctatataaattgatgagacatgtcatctgaagaaatctatttcattctcttttcgcttctcttactcttcttttgcaagttagggtttcatt

SEQ ID NO: 42847 - DNA, 515 bp, Arabidopsis thaliana landsberg
aaataaaatgccctgttgattgcatggcgcaacacatcatacagcaagctggcttatgggctttgttgttaaacatctggcgacaaatataaagggaatttttgggttaagatacaaccaaacaaaaaaaacaacagtaaatcccgcaatttcaataaaatataacagaggcatttcttccttggtataagtaatcgtaggtttggctattattgtaaacagtaatggaagattacaccgccttgccatccagtgttgaagaagcgctggccgaaatagccaacttgcaggcaaaaagacgaaaagcgcgtagcgtttattgggcaagcatatatttcattggtacggtagttttttttatcgtggcgctgaaccaggaagaccagcgccaattttgggcttttctcatagcgggtatttgctccgttttttttctgctggcagccaaaggcaaaattacctggcggccatcgccaactgacagggcccaaaccaggggagaggagacagacagg

SEQ ID NO: 42848 - DNA, 628 bp, Arabidopsis thaliana landsberg
  unsure (1)..(628): unsure at all n locations
gattctcggcataaaccagattgtattatctcatatcaaaaaatttggtacaagaaaataacaaatagtgattattcgattttgcgtacttctatatacaacaaagctatggaattgtaaaaacaacaacagaacttaatatctcacagcttgaggctcctctgcttcttcagctttcaaaaaagctgaaacattaaaaacaattagcttctctatctttctcattgttttgcatctatggattcttagtttacttacctctcttcttaaccttgttcctaaaacctctcttcctgctgaatgcagtttcctgaatatttcatacaacataacacaagaatgaatcatcagaaggaatatgctaatgttcatgagctaataatattgcgcttgagtatgcagcggattaaactacattaagatctttgatagaatttataccactggctgacccatcttcactgcttcacggattgcctctactaaatcacagttagcctcggtgtatagactggtcacagttccatattgcccagctctagctgntcgaccaatcctgtgaaggaaatccactgcagaactaacaaaatccccctgcaataacccccgagatttacactaaagattt

SEQ ID NO: 42849 - DNA, 518 bp, Arabidopsis thaliana landsberg
tagaatctgatcgagagaagtatcgatgaatgtttttcttctgacgcaattatcgatgaatgttcgatttaaagaaaataatattattagaaatacttttttccacgtaaaaacagcataaaaactacttttaccatcgagtaaaaacaaaaaagtgcagtggaactcatacgtccagatccagcaattacgcacacgacacaaactagttttgtcatccagtcatcaccaaatctagaacacaaactagaaaatacgtatcgtaaatgacctaaacgccattcagattcaggggtatttaccacgaaactacaaattggaaagcgagggaaagacgattccgacaaagggtaaaagcgtaatcttcacttaatcgttcttgagcatctctctgtaccttagaaacgaatctagcctctgtagcttaagctgttgcttaaacttgttgatgaaatttgaagctttatcgtcgacaccttcttctcctccgtctcctatcgacgtcgttctctcaactc

SEQ ID NO: 42850 - DNA, 374 bp, Arabidopsis thaliana landsberg
cgccgatcttcgcccggcgccgcgcgcggggccccggggcgtcgaacaggaccaggctcatcggacgaccgtctgcttgcgttcgagcagggccgagctcgcggtcaccacgaacacgatgaccatgtagcccgcggcgatgccgaagaagatccagtagagatcggcggcatggtcgcggagcagcccggacatcacgtacccggcctcgggaaccccgaacgcctcggccacggcggtgttgcggacgagcgcgatcagcacattggtgatcggcggcaccgccgagcgcccggcctgggggagcacgatcagcgtcaggttctgtcggaacgtcagaccgagggcgcgggccgccttggcctgcccggcgc

SEQ ID NO: 42851 - DNA, 615 bp, Arabidopsis thaliana landsberg
  unsure (1)..(615): unsure at all n locations
aaaaaaaaaaaaaaaaaaaaaaaaaacaaaaaaaaaagaaaaaaaaaaaaaaaaaaaaaaaaaaacaaaaanaaaagaaaaaaaaaaaaaagaaaaaaaaaaacaaaaaaacaaaaaaaaaaaaaccaaaaaaaaaaaaaaaaaaaaaaacaaaaacaaaaaacaaaaaaaaaaaaaaaaaacaaaacacacaaaaaacaaaaaaaaaaacaaaaaaaaaaaaacaaaaaaaaanaaaaaaaaaaaaaaaaaaaaaaaaaaaaaaaacgaaaaaaaagaaaaaacaaaaacaaacaaaaaacaaacacaaaaaaaaaaaaaaagcaaaaaaaacacaaaaaaaaaaaacacaaaaaaaaaaaaaaagacaaaaaagaaaaaaaaaaaaacaaacaaaaaaagaagaaaaaaaaaaacaaaaaacaaaccaaaaaaacaacaaacaaaacgaaaaaaaaagacaaaaaaaaaaaaaaaaaacaaaaagaaaaaaaaaaaaaaaaaaaaacaaaaaaaaaaaaaaaaaaacaaaaaaaacaaaaaaaaaaaaaaagaaaaacaaaaaaaaaaaacaaaacaaaaaaaaaaaaaaaaaagaaaaaaaaaaaaaaaaaa

SEQ ID NO: 42852 - DNA, 479 bp, Arabidopsis thaliana landsberg
atgtcataaggaggagactgtgaaacatatgagaaagtaaatacaaatatcattctaatcgggttctttggcatttgcgtcttaataagcagagaacatgaggcacgctaattgtacctgactcatgtacatagagatagacaagtcccccaatagagatgtttatttttccttccaattttttaaattacatataaataaatatataagaaaggaatgagctaggcttgattcacaactttcgtctttttttgttataaaagaaagaaatacaaagtcgtataaaaaaaagagagagcgaaacaggaggaagcagcaacacggaaaaggtggaggagaaaaagagagtacttgttgtggtataaagaatgaaggagtgagtttgtgtgtgagttttataaaaataaaaaagtaggagcatattcacacaaacaacaacgtagaaagggttccaatgacaagtaatggctaaaggggag

SEQ ID NO: 42853 - DNA, 505 bp, Arabidopsis thaliana landsberg
  unsure (1)..(505): unsure at all n locations
caaaacccattaccccaaaacccctgagtgggtaaaccctattgaacatcgagtttaaatatggtatgtntttctctaatttaatcatatgagttagtgctacagccgtcacgtttttctgtgctcacatttccgtcaatctgattcataagcttaggagtgtgtgtcaatgacagcttctttgaggtgtttagttacttctaaccacgctcttcaccaggaactgtcactcagactcttcagggtgtttaaaataattactgctccttccttctttgaaaaattaatacgctcagtcgctacatctgctctcaacttcgccttcagagccttaaaaattagttctacaggggccatctctggcgtatagggaggcagaaacattgtatcactgctcagtcttttcattactctccgtgctagcagagactggtgtgttggcgcattatccagaagaagcagagctcttgtttctccaggagttgttgttgaatctaccaatttt

SEQ ID NO: 42854 - DNA, 839 bp, Arabidopsis thaliana landsberg
  unsure (1)..(839): unsure at all n locations
ggtgtgttgagaaacgaataaccaggtgctgaagaagggtttgatgttggaacagatgtctgaggaggatttgaacccccaggagtagctgagctggcaatcaacccagcaacctgtgttgagggttgtgtacttgtagtnnnnnnnnnnnnnnnnnnnnnnnnnnngacccttttagcagctgcttcctgctttgctgtctcccttcgatcagcctcaagaaacggatcatggcattctcctcttcggcgctggtcagcaagatacgatgttctcattgattcaatatattggtgaatactctctacctgaacaaaacaaattgaaaccaatataaggttacacagagttcaaaaagggtttccacattgaatgctagtagaaagaatcattatgcggtataccttagcagccacatgaacaaagaagtcatgaacattagacatgactttcggaagagattctaaaagagaagcatgtcgactatacttgtcagaatccaaggcgagcaattgctccagctcttcaacccattgacgacactcgttaagatacttctcaaaccttacaactgtctgcagtagaaaagctgttggtttcttcggaatcccacggtaaaaatcagaaacttgaactgttgtagtaacagcttgttgttgaccagaagaagctggagctggattagttccttgcccctgagatggttgagaaccaacactaacaactcctcctccttgtttccaatgaggaaatcttggctgtagcatcataaaagaccgaactgcaatctccgcattacgcagcatatctttggcaaccatcataagctcatgcaaaac

SEQ ID NO: 42855 - DNA, 579 bp, Arabidopsis thaliana landsberg
ctacagtcaagacatacattttataaaaattataactgagtacacattgtctatctatctcaacaattgcatattactaattaggagtacaattctctcgaagtttgtatatcgcttggaatttggatcaagacaatttgaatcactctcaaaactaatctcttcaaaacccatcacatgctttctaccactaaaacaggcccatcacatgctttctacctctaaaacaggcccatcggatatgttcctatattttttgtccgataaagttataagaagcgcaaggcccataatatttttagttattaaaaaaattagcagacgtagggttgacttaaaaaagactcttattacattagtcgacaagtaaaaaacacgtggcatatattgtgcgttcgtagagactgtaataaagacggagagattcttctagagtcagttcttcttcttcatcctcttcttccccccaaatcctctctcgctagggtttctcattccgatccataattctagatgtccgaggtattcttttgattgagctccgcttttaaccaaaccatcttagattcttgttttcat

SEQ ID NO: 42856 - DNA, 668 bp, Arabidopsis thaliana landsberg
cggcggccaggattgcaaacgcatgaacaacggtacaataagcaacatccgctccacggatattatatagccaagcaaccgggagcattcctccaatcaaaatacattccaaagctgaactgagaaaaagagagatctttttactacgaaaacacacctcatcaagagcagcgatgaccaaaccacgagcaccctcttgcttaagctttgccctcaaatcttcgaatttatgggaaacagaacggccagcaaactccaaaggatgaacaacaaccggactcatctcagaaggtggacgactcttccaaacttcatccacaagatcagtagatgtggtgattagtttctgattcttcttggcaaacgatttcccccatctattcgcagtgtctaccgagacacaccatgaatcaacacctatatttgcctcttcaggtagattctacattgttaaaccataagctaaatcaaagaacacatctcaaagttacaaaatttatggattgatcaaaagattagttgaggactaacatcagacatccaaacttcaacaagaggatcttctcccatccgcattagtgtccactcatcgataagctgttgcaatgcttgcaagaagtatcgaccatctgtccaaagtcatgcttccttcttcgtagtaagtgaca

SEQ ID NO: 42857 - DNA, 617 bp, Arabidopsis thaliana landsberg
ctttgagttatagggcttgggtggttgatttcttcgtttgacattctggaatttttgttgatgacttgatggttggtgaaatatagaacaaggaagggttactcaggtgattttgatctttctaacgtcttaataagttatagttcttgatttatacctaggttatgtttggtaaattgtttatactctttgtgatatacagagatcagtttataagccaaatggaagaactgaacaaggagataaggttattttctattctttgcgttttcatcttatgatgttgctacacatcttaagttgcttggttggtaaaagggagttccagaaaacagtagattcgagtttggccgatgaggatagtactggcataaccgcaagtgagtagctaatgtttgcagtttactcttcttgtctgatttttcactgtgttattaagagatgatggcttctggatgagtttgtaatagcagatatcaaagcttttgaggattgctctggagatgatttagaagctattaagaatttgctatctgatgtacattctcaattggcgaaagaggaagaaggatccctggctgagcagaagatgcaagaacgggaggaatggaccagga

SEQ ID NO: 42858 - DNA, 352 bp, Arabidopsis thaliana landsberg
taagtctttttgttcaaatgtacatgttagttatacatgaatcgaattactattttacgaagaggcactgtttgtaatagtctaatagagaatctctaaaaaaaaacatattacataaactacttttaatatgtacatctgttttatttatggtcctaaactgtataacctaacaactaatatatgcagacctttagcttgacccagtgctatattaaataatttttatatttgtattaaaaaaaaggcttttaatttagaccctagcaccttccactgtcccacacatgttctaagcgggcactgaatatatgtgtatgtaatatattgtatgtatatataaatattatat

SEQ ID NO: 42859 - DNA, 1022 bp, Arabidopsis thaliana landsberg
atccatgaaaaccctttaccctgttttttcctcttttttgattaaacaactcttactttttaaatgtgtatatcgtaaatcttggatttatttgacataaatagatacccataatgcatggattcttttgatataagacttgatttgtatataaaatcaacttcatcatcgttctaatccatatatactcccgttcaattcctttgtcatttaaagtattttttttcacatggacccataactgttcagaattaacttaaatcccaaaaggaatgatcactgtacaattgactctccttaaaccttatatacaaatatatgataactaaccatgctgctttaaattaaccaatacaagataaccaatttataatattcctccttaaaatgagcaaaaaatatcaaggagaccatgcatcttggctaatagatgtctaacagagttggatgcataattagtaaacccatccttgattccttgtgacacacaattttgaaaatgtgaatagttgaatccaatacatgacagcagttggagttgtgggatatgtaactcagtgtataaacttaactagccattaaagttcacaaactacgtaagtcattgctctatatagttcaaacaagtactatattattagtcaataccaaaaaaaaatgaataaacccccataatgaacaaaactctagaagataatctctaccaaaataatataaagattcaaatacaattgtaactaggcttgcaccagtttacatcattttctccaaaatttgaaaccttcgaagtcgttttgaaatagatggaagcttttgatatgttgtgtaacaagtactgagaaaacagagaagcctacgatgagatatggtacagagattgctactgaagcagtttcaccttcattggtggttcctggcttgaagaataaaccatcttcgaagtagaaattaatagagcaagtatttcctacaccgattttctcttttttttttttttggcccctccaaccttaaactcgatt

SEQ ID NO: 42860 - DNA, 569 bp, Arabidopsis thaliana landsberg
ttcttttaatatctctttgaggaattttttggtttcttttttcattcttgcaagtcaattagaacatcaacgactcgttctctaatcactattctttcttaaacaaaacccagtctgttgttgatcttttcaataaacaatattggcccaatttttttctaaagaaagcatctgcaacagagctttgttagaagaattaagtagaggaagataagagaaagagtaaattgggttcagctaaataaaaatttggataaagagttattaaatggaatggtgttgttaatgtcggcgcctgtttcatttattttggatagagaaattttagccccactactacttccatttttctcatttattgatcccagtcctttttttcttactttttaccattaccttcttaaatatttcctaacattcgaagtttgaatattccggtaaatgactaaatgttgccaagggaaattaaataaccgtgaatgttgtcatgaattgggttccacagacaaaatttaggacaggaccactcgcattcattgggtatgtggttcgcatacatatttatatca

SEQ ID NO: 42861 - DNA, 898 bp, Arabidopsis thaliana landsberg
cttcactacaagtgttttatgctctgtctttatccttgtgttgttttttctctattcctagtgtttcgtgtagatttgggagtcagggagaacattaaaggggcaattaaaagaagttttaattcaaaatttaattgtggcatttttcaaaattaaagacaataaagattaggaacaatatattatgtatcttttatcaaaaagaagcaaagttgaaagccaaaaagaattaaaaataagttgaaaagagaacataaaaaacagttattactgactatatttgcatataaacaaaacaaatgtctcatcttatcttattactaatggtgttacaagtccagtaattttcttaaaaagtataaatttctacattagctagaaatttgttttggttcaaaaaagagcaaaaaagaaaagtcgccggaaagtgacataggtatatgcttatatgctttagcaaaagttgggcttggatgttttggtcagtgagcctttaattcaaatcaggcgtggcaaagaaacaacgtaatatgtaactttccgataaagaagaaaaaaataaggaaccaaccaaagagattatttatgagaatagaacatgaaagcaaagtaacctgaagaaacatgagccacttggatcttctcttggagctccatcaacttttcaaatcctccaaacacgccatacctaaactgtcaacaaattgtttggtacttaacatgcatgaatatatgtctatcaaaatggtagtaataaaactactaaatatacgtaattaaatgtgacagaacaagatcacaatggggtcgggataaattaaaaacacttaattccccaaaaaagcactaataaaccaaggtgagatatttagttaggggattagtttaatggaaagga

SEQ ID NO: 42862 - DNA, 552 bp, Arabidopsis thaliana landsberg
tttgacctacaagcaaagactgccttgtggatcaatatctacaacgcatgtatcatgcatgtacggccacttttacaaaagaagttattgaaattttcttataacataacacacaaaacttgaacttaaaatcaaattttatgttccaatgataggcatttcttgagtatgggttaccatcgtcacacaatagactacttaccttgatgaacaaggtaacttgtttgatcaaaatcccaagaaagaactctaaatgttaattgtagaaacatttcaaacctaatgatgccctttgtaatttactggcaggcttcactcaacgtaggtggcatagtcctcaacgctttggcgattgaacatttcgtcttgcggcatccttgtgaaccagaagatgtaagtgcattccatcttatttcattccaataaatataatcaaataccacaagaagctaatcaacatcttcatgaaagaaggactcgcttgacgagaaagaaacgctccttcgtcacacttacggtttaggatattcagagcccaatgtgacatttgca

SEQ ID NO: 42863 - DNA, 540 bp, Arabidopsis thaliana landsberg
gaaatgatctttagttttcggaaacccttccccaaatcccccggccggttgctcctttttgattgcatgttttagtttcctcttgatctcagaaagaaagtaatgtgaactgtttctctcgttctgcaatttgtttcccatcaaatgagaatcaggtgacgaaccacgactatttcctatgtccggacttgaaaagctagctgatcttggcttcagaatgaaaatccggtcagaagcttcacattcttcttgtggttcatctttcctcctgaaaaaactagaccatttcttatcagcaagagaagattgttctgactcaaccaagctcaagctttctgctcctttctccctaggcacaagtatctctggatcttgcagaagtttgagaaacaattcttcatccgatcccagaatttgaaacacttccatcaaatccttagatgtaagtatttcactatttcctctgggacggttcccatgtaaaagcttctgactgattaaaaacttgaccaactccctcagtttttctttgtaatcttc

SEQ ID NO: 42864 - DNA, 718 bp, Arabidopsis thaliana landsberg
cactgaacatgttctggtgagaacacagacaaacgacagatgctctcatgacgacaaagaacaaaccttttgattaaaccattgaaaactcttgatcaaagctatctccagtaaaataaggtctttcttctggaggatcataaggaatgtcaaaggggttccttccttgtaacatcacagaagggagctgagcctggaatctgtaatcctttaacagtagtaccatctgatgaattatttcgacgtttttcaagtgagttcctcgaacccgtaacgtgaaggttgttggtgttgttctgtctagggctagttgtttcttcagcttgaagcttattcttttgatctaaagctagtctaaagcgtctcctcgctcttcttctagcgattaaagactctagtctcttatttctctcaatctctgaaatcccatgctcattagcattactcatctcctgtttcatctctactttaccatctgattctccatatttgatctcacagttgcaaaccattggttcttcaacgttaagatgacccaaatcacgagaaacttcctctccaagaaactccttctctttgttttcttcttcctctactacattggtttctaaagcttttggagactcttcgaattgaggagtacgaccaaggagatcattgtaaagagaagtcaagataactttgtctttctcttcttcgcttgcttgtgaattccatt

SEQ ID NO: 42865 - DNA, 1537 bp, Arabidopsis thaliana landsberg
aacaatcaccacgcgcttcaaatctctcatcacaaaccttaaatctttcaccaacctcccatcaatttcgctacacgcgtctctgtaaaagctacgcgatatcacgcgccgctctggatccaatttatcgagcactaacgacgcgtactctctcaatcccgccgtgaaaacaacgatctggtacttttctccgatcttcttcaaaaactcgtcgactcctggccgtttgatcacgaaaaacgttaagatctgaccgtcgattttgggattcacgacgaaatcgtacggtacttctggtttctccattgatgaatgaacaagagtttcgtctagatctaacacgatcgtcttcttcgtctcgtcgaatgatttaccagatctttcgtgaaacaatgaatacggagaattctgaaaatcttcgcgaggtttgaggattttgaatccttttgttgcgtgacgagaaaacaaacagagaaaagttcgatgacatctgtagatcgatttgttgatggtggcgattacggtggttgtggccggagacggtgagcatccgatctgagatttccggtgacggcggaggtagttacgttggtgacggctgatggattttgtcgttttcttgagtatgagtttcgtcgccattgaagaagaaagagagagattagagtttgcgagatttttgggagagagaggagagtgatgatgttgtatttaaattaggatcggtgtaacggtcatgtgtttattttaggttcggaatccgaagcaaagcttgattcggaagcagttttttttttttttttaaagtttggacctacacggagtttacgttgtattattaccgttgggaattctatattaatctcgagattcatttcctaaattaagaaacaaaattctatatataacacagaatagacaaatattatatatatatatatatatttatcttattatataaattgtgaatcataaaaggtgttcaaagaacagacaaaatgatctaatatatgatatgagttcttaatagtttctaatttttaattacataaattctatttgtagttgtaaatttaatgtgacaaaatattgtcaaagtgttcataattcatattcaaaactattgtattggagtgaaacgacttgaaacaaaacaaaacaaagtcctacataacatctataaaaactttatctaaaaaacaataaataaagttcacaaaaatttaatttatatcaaagcgaaccgctttaattatgttgcttggatgtcataacttaacacattttgatgtggagaaggaaaaaaaaatagattttgatagttcaattaatattttaatattgaaataaaacttgacttgacatgaaaaaaatcgaaacttagataaatcataaaacccggcccgtatatagattttttttgaaaaagactataacgatcttttttttttctatgaagattatacagagtccaaccaaattcaagaatctcaattataaatgcccagtggccaaaggtaatcaccatcattaacat

SEQ ID NO: 42866 - DNA, 300 bp, Arabidopsis thaliana landsberg
gatgaggccgatgatctgggttggggtaataatatggggcccgccgtttttcatgcggtcaaaccgggaagtcaggcgttcttggaccgcgatccgcgtgcctatcgtacaaaagtctatgacgaccgttacccatcatgcccagcctgtcacgctgtgccagttcttgcggacgagccggttgccggcttggacgaaatagggttcccgggtcgacatctagaactgcacgacgcgcctttcgtcgggaagtttgacgacgcgcggctcggagcttatttttacgacgatgcttacatg

SEQ ID NO: 42867 - DNA, 823 bp, Arabidopsis thaliana landsberg
agatctggttcgacgacatgttgttgaggtagctcggcttactagcaacgcgcttgctctcattaatatgtacgcctctacgcaagaaaacttttcttaattaaatgttttcatacagaaaaaaattgttttatacttatactagaaaattaaaaagcttatgattggatgtatgtatacatgtatgtcacaccttgtacttgtcatataggtaggtattgttgatttttctgtataaatcgtatgtgaatattttgtatattattgaaagatggtgaaaaagttgcaacaccttgttgccttgttggactctttctaaggcccacaaatatctgcttggtaagattcattagtaatacaattagagaatcataatcatagacattgtctattttggtaattaagcaaaacctagttatacttgtacctttgtctttttttattttatttttcaatgttccttccgtctgttgtgaactagtctgtatgtgtttttgttttgttttttataacattagtttgagctatattaattagatttgagaacttataaatatggttatgagagagtaattggtctatacaagtaggacggaatcataaatgaaacacgagctatattgagaaatgagaatgccttagacgtgccagctttgcgactacgtgagttgtatagcacaaataaagtctgccatacttgtgaatacatcgtctacctaacattgataatgagctagtgttgggaggaataaagctgtactgttgttatatatacaccattaacttaaatacgcaatccatataaaaaaaaacgcaatccaaa

SEQ ID NO: 42868 - DNA, 1047 bp, Arabidopsis thaliana landsberg
  unsure (1)..(1047): unsure at all n locations
taccgagcttttttcttaaaacgaatctcaccatcagcttctcctacacaaccgaattctgatcaagcagaagattcaaaagaagttcttgatgaaagctagtcatcatgtgtataatagcagtttggcaaagtagattgaggaacaaggcatcactggaatgtcattactgtagatccaaaatagatacaaaaatttattgttttcttttgattttatgtcacaaatatatctaaacgtatcaaggtttggattttgatccacgtacgattttcnnnnnnnnnnnnnnnnnnnnnnnnnnnnnnnnnnnnnnnnnnnnnnnnnnnnnnnnntggacataaagattataataatcatctcaagagttgcattaatgttctaattgttagattcttgtttgagtttaccatctttttaccatcaagtccatcttaagaagatatatttggcattttcttgagtcaactccaaagtctccactttttgttttctattaaccgatagtccagtcaactctgaactttctccgacacttcattgttcttgaaaaagtctccaaagcaatagtttattttttgtctttttgaagcaattatacaattatttcctggctattgccgcgttttttcataatctattccttaactggtccctatttcttaactcaaggcaagaacttttctataaaatagatcttgactttcttcttctcctatctaagaccattagttcaatgcattggatattcctgcaaaaaaggggccaacaccattcccgttcaagggatgaaattttgttaaaggatgggaaaaccaccaccggtggggggttaaactcccctcccccaggaagggccgcacccgggggtttttttcccccccccccccccatttaaaaaacccttttggggtggatccaacccaatttttacccctctcccggggggggggggtttggtataaaaaaaccccccgggggggggggggggggggggggtaaaatgggggaaccccttctttttctctctccccgccccccccttttttt

SEQ ID NO: 42869 - DNA, 1117 bp, Arabidopsis thaliana landsberg
acgatcggcccaatttctaaaccaaacaaaacaattaaaagagtatactgtaaccaaaccatagtaaaccctaaccattccaactaaaccaaatcataaaacgtatacgctttgattaatagtatgattaacatctatgttggacattcacaaacatatcaaaccgaataatatattttatcacctttatattgataaacatatatatgtcttacattgtttatcgctttatagaagttaaatatagcatagacaatatattatttaacatctgtactttcaattattatcaaatacaaaaggttcacggtctggtctggtctgcaattttgtatgaaacaatgacttctacagtctgcaatctgcggcatgtttagcctacaaaacctacgattcttctaactcgtcccgtgacgaccggacacaacccacctatgtgtgaaattaaatcaaatgttcattatattatttcctaataatcgagaattttatttgtcttattgatatatatatattaaatcaaaaatatgtaagaacaacctgtaactcaattacatatcaaaaaaaaaaaaagacaagtggtttgtataaatgtattataaataattttatgcatgtatcatgtatgaatatgagttggagtaaaagacagagaagacagtatctacttgacccacttaacacaagccgatgttctctcccttccaaacattgttctctctttaagcttgccctaaatcttgtgtgatcctgtgtgtgattttcttatattattatctttaaacacttgattttgtttaattcttaattcaatgctcacatgctattacgtagtttctcgttggcgtttaatgtacagatcgtatccttaattaagcacataatcggagacttgacgttaaataagtttttaattcgactatcaacaatatatatgaccacgtttggtgcgttcgtttcacggtaaattcggaacgcaccaacattattcacaaactcgtgtttgatatctgtactttatacatacactgatgactgaacaaaacattaaaacaatgaaagtgtgggtaaacgcacttaggcgagcaatttagaaatgttactacatcaaatggat

SEQ ID NO: 42870 - DNA, 520 bp, Arabidopsis thaliana landsberg
gttcgtccttgtcttctagtttcgggctctaagaaatcgaaaaaatcatgagtcactccaacgtttggttctctcatcctaatcaatacggacctggatcccgcacctggtaatgttgatcttttctaattctgataaataaagcgacctcccttgtttttgattcgtgtttctctagactgcctgtgttttctgaatctgatcttatattgcctggtaatattagtgaactaatttgattagagtgacacaaagttgtgttaattttagcgtaatctcttagtaatgtagagtttttattatagaaatgttgtaactttgctgttctgttactgtttaagtttgttgtaaagtagaaaagttttgcttgaatgattaaccgtagtgtgaaaatgttattatcttaattggttctgcgagcaatcttttacatacttggtttagcagtaacatcatctttgtaaaaattaacacttttcttttgttaattattagagatttatagtgctctgccatatag

SEQ ID NO: 42871 - DNA, 557 bp, Arabidopsis thaliana landsberg
ttgtttatatactataggtctattagctagacagaattaagagctatagcaaagttgttaaaattgataatgcgatgctttttcacataactcaagaaaaccaaatcaagttccgatccatcattgtttgtcgaccaagggatgatcagtcgataggtccacgtacgttgttgtttaaatgaaaatagttaacatggatgtaaatttaataagtaaacaatgaaaatgacaaatgaagtagagaagatggagaaaacaggaccaaggacttgtaaaagaattgccaaataaacaacaacgtggtcctatcaccttctgcttctccctacgcaccaaccagtcaaccatactcaataggtttcattacaagacaaataacacactctcttttgtcttttctcttttttcgaatgggaaacactgactagctttgtttgtatatttaaatcgtttctaacagagagagcgtggcgaagtgtgaacacaaacacctagaaagatctgagagtcaattcttcggggtgacatatgcatgtgaactgtatgaagacgcgttt

SEQ ID NO: 42872 - DNA, 580 bp, Arabidopsis thaliana landsberg
  unsure (1)..(580): unsure at all n locations
cctaatactcattatatcaataatctaaagaaagataaatgagattagagttaatacattgaagaacgtatatgattgctcaatgccaatttaaccaaacaatcgtactttgagctaagatagacgtttgacttcatcgtcaaacatattagtagaatgaattcgacatacacttaaatctatggcatcgttcttagtgtttctgattgacatgccaacaatatatctcgaatgcatcgtcatttgtttaaatctatttatttgtataatctaataacattttaatacggtatactatactcgaagtagccgtataaaataacactagccatacacgtatgtatcgggaaaatcccatgtagcaaataaagcacaagtttataacaaaatacacgatactaacaaataaaagaacatacacgatataatacagtatatgtaaatttggggttataacattgcttncaagtgtagagtttggatcagattctttctactgtcttaaaaccacgaagagaatatgctcttttattcttttcttttctctttttttctctttttcgcagtattagtcagtcag

SEQ ID NO: 42873 - DNA, 1017 bp, Arabidopsis thaliana landsberg
taacccaggaaaattttttcttggaaatcacatggaatccttgttaaaaacttttcacttctgaccattcttcttttctgtacttaattccagaataacttcactatcaacattaccagcagagattggagatctatcacgtctaggaacattggatcttcgttctaatcaggtattgtgctcatttctttgatggatattgttttctgacaatctatatatattttcgaaacctttatctattgacagtcactttctaatcaatggtctacacacttgtgctttctccgaattttcagctcaaggaatatccagttggggcatgtaaattgaagctctcgtacctagatctttcaaataattccttgacaggattgcatcctgagctcggtatggttagcaaacagcactaagcatttctgcatcccctgcttgctaataaatttacatatgacttcataagaatagttattagcataaaactcatgtcctcacatttttaggaaacatgactactctgagaaagcttgtgcttgttggcaatcctttgagaacccttagaaggtttccttttactccgtctctgtcttgtttcttgattgcctagtcttaaatagattgatacttgaagaggcgaataattctcttttgttttttttgctctccagctcattagtaaatggtcctacagctgctctattgaagtatcttaggagccgcctttctaatagtgaaggtactttggtccaacttccctctttgtctctcatctaagtggtcatggctaactgtaaaaggtttgcaattatagaaacaagtgcaagcactccaacaaaggaaaatgtgattgcttcagcagctcgtatgtccatttcttcaaaggtaagtgaaccacagatctgagcaccatcctgttaagaattcaatgttcttaatagaaactagaagttattatcttaattgattgcacaaaactcaggaactttctctggaaggtctcaacttgagtgatgtccc

SEQ ID NO: 42874 - DNA, 473 bp, Arabidopsis thaliana landsberg
ctttacataacgattatatgctacaacttacctaattcttgcattttttgtgcttgtagatttgtcatggtgaacttctcaggatcatggacttctcaggattccgaaattcgcaaggaagtggaatgtccaatttgtctaggtatcttaataattaactttttcatgtatttgtttgtggtatacatatctaaatcaggcatatgtaagcctccttgaccggctttaataaaatttaaaatttagctaatgtcaagtaacaaaaatctttttcttaatataaaatatatttaatgggagatacttttatctctagagctaagaaacaaaagatctaattcatgtacatgcatgtgttactgtttttttcttaaagccattcatgtattaaaaaaaacaaaaattttgtttggagccatgttttccttctctttatgtggagtctacctttttttgaatttttttttacgatc

SEQ ID NO: 42875 - DNA, 561 bp, Arabidopsis thaliana landsberg
ccttgttgttatatgacctttgtgtcaccacatcatttttagattttgttactgctatatatcatgtacggtatagagttctaattaaaaccaattaacagttaatatgtagatttactcgtcccgtatgttatttttaagttttatcacactttcgccttaacatttgattaagtaatgatatcataaaggatttctgattgaattcagtaacaagacggatccttcattatgcatgtatatttatcagatatcaagaatattattcaacgttataagtatatcgaaattcagagtcagaatatggtatttaattagcgatctcaagtacatgtacgactataattccatacaagtacattagatgaaacggctacatatgcaacaagcgtcgagcgagatcagcactcgtgtaaactttaaggagtaaaatgtcatgtgcaacctttgaccggtttaattctacaattttaataaatatttaaaatgtttaaatatatatgcaaactaaaaaaaaaaaagtaattgattagcttaatttgaaacgacgtctccttaacg

SEQ ID NO: 42876 - DNA, 758 bp, Arabidopsis thaliana landsberg
gagatcacgaaacagtaacgatgacataatttgtgatgaccaaatgagtgaaattccttttttacagttcgaatgtacaaaacaaaaattgaaggcaatgtcaaatgttatacgatattttttttaagtttttgggtgggttttaatgagaatatatacaaagcatcaaaccaagtgatttgacgatatttgttttgttttctatctacggtttaacaatgttaacttaaaacatattactttttatttcctttcatcaaaatatgttcgaggttttttatccacaaacctaaaaattaatttgttactttttctagttatatatataggctgattgtttttctttaacacaagtttcccattggtgtgtaagttttgaaagtttttttatgagtgaatgggtgccgcacaaagtctagcacagtataattaattaatgcgtaaggaaatcaagaaaaataatggaaccttgaaaatggatttctaggttgttctctcctctttttcactttctatattcgtggaagaaaaagacaatggaaatgaaatgtgtgtggggttataatggatatcttacttgtaccatatagagtggtctctggaatgctattgggagatggtttctatcatggaaactggtcagtcaaaagatccaaaaaagcgtttccgaacttgttgtacctcaatatccacttgttctcgtacgaggaaaattcaaaattgagcaaggtttggcttaccaaatgaaggtactgtaa

SEQ ID NO: 42877 - DNA, 1280 bp, Arabidopsis thaliana landsberg
cgagaagacaaaaccgggaccgttttgctcgttggtcagctcttcaaaccttcggaattcttgttctgactcagataagtattaacctggttatggtttagtgaatggttttggcaaagttatcacaggttctccgaaaccatatttcagttgaaaccgagattgttagaaattaaattagatctgttagtaaactttaattgatctccatatctctgtttttttctattcatttcgttcggtttgattttcgattatcatttttgtactcgtggattatacatttaaacacccaaattgtatgttcctgatcattacccaccatttcctgtcctaatctccgaaatgaacaccactactcactgactcgagtttcgatgtgtttagatagatagtactattagtactagattattgagtctagtcacaaacagaacaagaacccaatacggttcatgtaaaggttaaccggtcaaactatatacacaagtaacaacatttgggagagactttagttaaagcgagcatttccacttcacagctcagaccaacaacatacatgcatgtgttacaactgaatatacatcaatcaatctttggagttaagctttggtctgaagaatataactacgagcacgagctgagcaaaagatacctaacactccaaaatcgaagctaataaacgcacttaagcagaatatccaaatagatatcggtccttccaccaattcgttttgatatatttcctcttgtgatgcatcaatgtttgccgggtcacacttgcttccgggagtttccacacacagttccggatttccggccaacgcccctggaaacttcccgagcccttctttctcggtaatgataccagagaaacagttgtgcgataggttcagtagggttagtcctgggggagctgagatgtttccaatgacttgacctgacagagagttgtgtgaaagatctaaggcctttaaccttggcagcttctctagacgtggaagctgaccttcaaggaagttgtaggtcaagttcaagttctcaatattcctctggctgaacaaagcttctgggatctctccatgtaatagattgtcagaaagatcgatcccaaccatagacaatagattgtagctgaaacttaattcatttttagcaaccacagctgctgatattttgatctctacttttcctggtggctcaacaaatccttcaccttcaccggtctgaaaatctttgaagcgtgtgctgtttaagtcatcggtctgggtttgaatcca

SEQ ID NO: 42878 - DNA, 808 bp, Arabidopsis thaliana landsberg
ttttaaaaggatcaaatgtttcttcttagacatgccaagactcaatatccaaccctagtatagttgatttctgattttggtatggtcataacatattattaaattacatgtttaaaaacccagatacagtatagtgtttttttgttctccctatataagtgttgatagaaaatttcttcattgtaataatattaactcttaattaaaaaccaactaaggagccgaatgggacctaaacgaataaacagaaaaatgttaacctttttttttttttttttaaatgtggttcttaaaagttaaaagggatttaaagcttttatgtaatttgagtgttgatcttgaaacttcgtctatgcagtatagtggtagcctgatgatatgccagtatgggtcttcatagtggtagcctgatgatatgcaagtatgagcccattcttttcgacacagcagaaatgagtctagggcctctagacccaatatatttagtcgtaattggtaaaagatatgttgtctacaatacaacagagcgtctctaaaatgggatataaagtgcttaaagattctgatatgcacatctcaatattgaaaatgaaagaactcgtaaaacaagatgcattgtcccaaagagaataaaaaaagagttgatactttattaaattttttgcgcttaaatgataatgttatgaaatttaaggaggtacgatacgaccagcccacgtgaagacatgcatgtatttgagagaaatacttgttaatcaactacttattttaattaatcaaacagaatagtttatgttctcttagtccc

SEQ ID NO: 42879 - DNA, 822 bp, Arabidopsis thaliana landsberg
gtttcaaactttcaattatgtttacatgtcgttacattggtgctgcatcgaaaattttgttattgacatacaaaagacaatgagactaagtttcctccgagaaagacatcgtagcctctccgtgtacttgatcagccagtccaatcaacgttaagagtaagatacaagactcgtcttcaatgttggatacaattggagatcatgcaaattaggtttacatagtgaaacagcagattgttctgtagaatttttgtgaaacaggggtcttaaacactatactgtaccctatagtgaatgatacataaaatatgttattgcaatctttaacataacacaaatactcacatctatgtatgtataaactgacgtggttgaaaatgttgactatatctagtttatagtcgtaacttcatctacttagtttcacctggaaggtgacaaaggaagagaattcgaaacctcatgtgtttaagaaataaacatataagcatgtgacgcaacttctgaatatatgtgtatgtataatatatatgtaatatctcgtccaatgtatcattgaagcaacaaactaaatatttcaaatagagaaaaacctgaaaattaacgaggggctataggagaaagagacagaacaatcagcaattttagttgatctcgatgaagagacttgcctgaggatgcaaacctgcgtcttttagtgacattgactctttgtctcttccatacactgtccttgggaagttcgcgattaagctgtactcttctgtaactaagagtccaagtgaatcaacgttatcgtacaatgtctggatcttggtttcg

SEQ ID NO: 42880 - DNA, 518 bp, Arabidopsis thaliana landsberg
accgaacgaaacaccagtttacttcattctccaatcttgttcatgttttccaaaatgcgattcctgagcacttggagttggaggggtttctctccataaggatttatctatattatcgtccttagtttttatggacttttgttcaatatctgtagtttgtataatctatttatttgtttaagtgtccatttttctcttctaattttacatcatcaattttatatagtatagattgattattgtttgttcttttactggttttcgattccaatctagctcgaatccgtaaaatcttggctacagtgtaaaccaaactacagtattttaattctgtcatcttacgaatcgggacgggaagctagaatgtgattgaaatccatctaaagaagataaaaataatcatactacgcaagggtttatagatcacatgtacttgttataacttaaaagtctgaatctaaactttagattccattggaattttcgtttaacatataatttttttggttcgggtgaac

SEQ ID NO: 42881 - DNA, 599 bp, Arabidopsis thaliana landsberg
attcactacacgaacttacacatataatatgatatggtagttctttgacttatgtcttaccctacctacttaacacataatctacgaaatctcaaatgatatcttctcttgctaccagttcgatatttccgtgtgtctaacgacgttgctatacaaattactaaactataagtcttgctctattgatgcaaatataatagaagtgatttatgtttgacaaaatgtatgttgctttggagtaaaatttgggatattatacatgcacaatgcatcaatacatatgtattggtgcgggttgcctttgaactttggagtaaatgaaaacatgtatctgtgtgggccgaatctactgggccggtatatggttcattttgttgaccagagccgaggaggttaaatgtacagtatagagatgccatattttcctcttgtgcaattccgggttataatccctttttggagatttcggtttacttttgtgtttgttcaaggggatctggtttaagttggaattgaataaccggaaagaggtaaaaaaaaaaatttaccgatcagaaaaacaacatgccggttccagaaaaaaaaaaaaaaaaaacttt

SEQ ID NO: 42882 - DNA, 637 bp, Arabidopsis thaliana landsberg
tttattgtgccgtgaatggatttggttgaattgtgttagaagattttattacgtaaactgaaaatgaacatgacctgcttcatatactcaaacttttacgaattaataaaagcccattatgaaaaaggcccaatatgaaccggcccgttttcacaaagtcgttttttttttgtcaaaggtcggtttaaaggactaaaaaataaataagaaaaaccctctcggctttctcgcatcaaatttccgtttttgctaccgtcgtctctggtcagactcagaggtatgaaccaactttcctctctgatttagcttctctttgtttctcataaagatggatttttaacaattgggttgttgattaggttatgggttttttctcaggaaacacggagcttgagcaactgacaagactgtttcgtgtttggggctttcgaagagagtaacgagattcgcgggtttcgtcaattcctggtaaacttacgatcccagtttcgatttttttctactgaaacctgttgattttctttgcttctttcactgagtatgctctagtatccccttatgaggtgactaggaagcttgatactttgactgttaggtgtttgtttaaattcccaagagagcacttgatacttggagt

SEQ ID NO: 42883 - DNA, 1125 bp, Arabidopsis thaliana landsberg
ccttataattgtttaccatatggaatcgtcaggataagttgttgtttcttcgagataatttttattttaaattatttcgtctttgtttttacgtacttcaagcgtgtacgttgatcttttgattcgtaatagtagacttaaaaatagtacttattcatttgtgagctattttctttcgatttggataaccacccaaaattttaatatatcttgttgttgaccaaataattaaaatgaaattaacttagtttttctgaaaatacaagagaataaattttttaaaacaattgttataaatcaatttgttttgtttcaacccgctcggaaacctttaacttctaaccatatatttgaagaacctaattaaattcctatatttaaccatttattgcatcagtttgattggcaatggaagaaataattcaacctcctacgcttcaaattttgctaccaatcacatcaaatttcttttctttttttcggtgtgattttgatgtatgaattttgttttaaaaatgtgtcatatcagcaatggtggtgtttgatataaatgaaaaagcagggcaaagtatcgtccgttggatcatatacgttggcatatccacaacgtggcataacattattgggtagataagattttttacattatcactaaaaattgacaaaaaataagaaaatatttcttttttatttttctgaataaaaaaaaagaaacacttggttcacctaccggctctagtaggtaacgaggagacccattattgggagtaaccaaatttggaataatttacgttttccagatttataagtgtttatatatttatgtatcttttaaggttgaagacttggttaccacttaccatgatgggaaagggcacaaaagtattttgttgtgtgactgaagatagcaagaaaatcatttctaaattcttcttttttaatcattttcatatgtttcactttctttattccaacactaacctatgattaatttcttctctttttcttttcacgtcgaccagttttcaatatagtatgtaaactttcttagtcagattttacatacgtattaagaaaagtcgttataacttctattatactttgcacaaaaaataacttctgata

SEQ ID NO: 42884 - DNA, 136 bp, Arabidopsis thaliana landsberg
ctctggtccgcctgatatgattaatactaaccgtgtcttgcgcaaagtggttcgtatcagctcgggagaagttggttcgatggtctcgttctttgcgcgctaaagctaaaaccgatgatctggagcgtactcgcaa

SEQ ID NO: 42885 - DNA, 712 bp, Arabidopsis thaliana landsberg
aaattaaaaatgcagcaaaatctagagattttatgattactaaaaaaatttgagttcaagttattagagttcgacaaatgttttttgattcacttttcaaaaataaagtgatttacgatatcataaagattgaaaattgaaaattttgtcctttgatcgaagtcaaagttttcaacatccatgattcaaaaaaaaaaatctttcttaaatgcttcaaatattggtttatgttttcaatggttcaaaaattgttggcggcttgttttaacaattaaacttattttcttctgattgctccattcaaaacaaaagcaattgagcgaatgaaagagcatgaaacttttgagttaacattcaagctaccttatctcaacaactataatttttgcttagtttatcttatgacatttctttaaatgagaaatgtaaacccttgaccaaattttaaaaacaaatgtaagactcacttatttaatataccaagttactaatatttatgctccacggcatttattcgtttcttagcacgagttggttttaaatatgaacttaatacaatcagttatcgaaaatgtattattatatttaccaaacatatattataggattatcccaaacacccatgcgtttctatttctagcagccatccttattttattctatcaataatatatctattcgcttttagcttcgatggaggaatctataacag

SEQ ID NO: 42886 - DNA, 486 bp, Arabidopsis thaliana landsberg
atgcgtcttgcagatggtaggttaattttagcaattttgagtcaaagcattgtctgaattttgtgtatcgagatttactggttaatggttctttatgaacatatgtggcaggaccatcattgcctctggataaataactgtgttggttatgcaaactataaggctttcttcattcttgtgttttatgcaaccgtggcttccatctactctacagtacgtaaatcccaattctcaatttctgaatcttctttttttttggtgagactctcctcttatgtgtatgaatgttattttaggtgttgctggtttgctgtgcattcaagaacggagattcctatgcgggaaatgttccgctcaaaactttcattgtaagtttgggttactggaaagtcttcctttactcttaacctttagcattctaagcaattttcataaatctcaaaagaagggctgcactctctcaaaaacttttctacttgtctatag

SEQ ID NO: 42887 - DNA, 540 bp, Arabidopsis thaliana landsberg
agtgtcatacttctgcagcataagaacagtcgaagaataaatgttagcgagattcatccatcaaattacagagaagacacgacgaaggagtagtcatgccccatcgaatcattttgtctctagtgagaagtctatgatgagactttagcccaagcaatgaaagcatgctttaagaatccttcctggaaatcacacagattcaaaccgatccatctttgtgccaggaggatgaagatgtgcataattttttttggaatattaaggggcctaagttttagcagcagagaaaatatttgatgcatggatatcatcaccttccaaaggtaaacatcatcctttacatcctcctgtaagttaacagtagaataggaaggaagacattctttaagcaactgaataatgggactgcgacttcgagaatttgtaagccactattgtctctttctcaatgcatccgcaaccacaacagaacgagggagaagagaaattcttagtcataaatcttcaggttagctcgacaagtatgatcccaaagaaatc

SEQ ID NO: 42888 - DNA, 210 bp, Arabidopsis thaliana landsberg
ttaaattatattcatattcaaaaatgtataaaaaactatcctaaaaagatatttttttggatacacgggacatatgtatacataccaatgaatataagctacgttaagatagttgggaatatgaaccaaattaaaccatttagatttaattgtaatgcatatgattagtttcataaacggatgtgtgatatgagtatatgcatatattaa

SEQ ID NO: 42889 - DNA, 386 bp, Arabidopsis thaliana landsberg
tactcattcgtgtacattatttctttcattatgaagttatgtcaaccagaaattatgttacagcaatgaagacctttcatttcaggtaactgatatggaaatacggaaaaaaatactagtaatattaggacagaaaaattggttttgccataaccggaaagatatccaaaacagtcttcactttaaaagcaaaccagccgaacataaaaaagattcgtctggtgctgtattattattcttcaacttgttctttgtttgtctttcgcctatcgagttcctaacttctagggtctaccttcattcatgtgtctatccaaatctatctgggaactaaaaatcatcacttgttatactcaacagttgcacaatcccatccccatttttac

SEQ ID NO: 42890 - DNA, 491 bp, Arabidopsis thaliana landsberg
ccccccccccccctcccccctcctccccccccccctccccctcggcccccccccccccccctccccccccccttcccctcccccctccccccctcccccttcccccccccccccccccccccccctcttgaagtctccccccccccccgcccccaaaaaaaaccccccccccccccccccccccccccccccccccccccccccccccccccccccctcccccctcccccccccccccccccccccccccctccccccctccccccccccccccccccccccccccccccttctcccccccccccccccccccccccccccctccccccccccccccccccccccctccccccccccccccccaaccccccccccccaccccccccacacccccccccacccccaccccccacccccccccaccccccccctccccccccccaaccccccccccccccccccctccccccccccccacccaccctcccccc

SEQ ID NO: 42891 - DNA, 682 bp, Arabidopsis thaliana landsberg
gttggttcaataaggagtatttatgagtggccgaagttgagatattttcgattcattttcatgtattattcgattagattccaaagttacataattactatattattatatgctttaatttgattgtttattaagatttatttcttaattctgtataatcaaaatatttcaacttttaaaagttaaaatgaactacctagctcattgtggttaggaatataattttaatccatgaatgaaatagataaactgaggtggcctattttgatacctttttttttttgtcaacctgttttgatacccttatgcatgggggtggaaaattatttttatctgaaatatgctaatttgtttcatcaactattttcttgatgccatttcaatatttttttaatggtcatgtcaacgaataaacgaatcacaggatgatcggtcaagaggtgcacgggacaaagaagaactcgaccgttcaatttcactttctctagctgacaacacgaagcgcccacatggtatttctatctactttcatgaattaaagtatttgttagcaaaaaaaattgaagttggttaaaaacgttatttctattgcattagagaatgaattttaattatgaaataaatcgtgcagggtatggttggtctatggataacaaccgagatttttcaaggccttttcacg

SEQ ID NO: 42892 - DNA, 643 bp, Arabidopsis thaliana landsberg
acgagtctacaaatgtaattgtaattcttttttgcctttattaactcaaactccgaatcattggtgtagcttgttacagtcgaaattgttctattagttgatattagtactgtattaaagacgagattagttagtagttgtaattaattttatcgcgcagtcaaaattatcggggtgaaaaaaactttttgtatggttggaattgaatgtgatcagtaagagataaggaaacataataaatgaacgagagtgaactgcgaagatgatctcctttattcagagaccgtagcagcggcctattactgagtatgtgtgtgcactctgcttcaattctcttgtcttgagtcggtccatttttatctctatgtttctctcttttatttaatgtgttttttgtcactttatttccatatcttcttacacctgttttttataacagctttttaacgtacatggcatgcactgattcacacatatatgtggagtatttggatgcttcacgtgtatatatatagtggtcaattatgtaaaaagattaattcaaacggctctagtttaaagcacgtctaacaaagtggtatgatttattatcctaagcacaaaaagatggtgccatttgtctgtatatatataactatatctt

SEQ ID NO: 42893 - DNA, 348 bp, Arabidopsis thaliana landsberg
  unsure (1)..(348): unsure at all n locations
gttcgttgtcgcccattttaacatataaaatgagtaatatttatagcaccaaaattagtctttttaaggattaaaatttattttctacgggtactattgctagttgctacgtttaaaccataatctgattgagtctgatcaaatcggtatggttcatcgtgattgtagaaaccttgtgcttgctcaaatacaaggactggtacaattgcgcaatgttttgtttaagttttttttttttaatcttcaactaactttctttaaccacctactctaataaaaatatataaaatgaatgttttgatcgtgggtcgaccttatttacattaaatcaccaaaaaaganatatta

SEQ ID NO: 42894 - DNA, 813 bp, Arabidopsis thaliana landsberg
atgaagtctttgaacaatgtccccctaggtttttacttatcagatccgatccttgttttggtttagttatctatgtgtatcttttaatcacactatcctcggctcggctagactgattgccacacctattttgctttagtccttggaaactttctgattgcttttggttaattttcaagactctgaattacgtattgcttaagggttactgattttcatcctctgactcagtcttgtgtgcatttaacactctttgcatctgatcacttgttggtttcattagatcttgccgatatcaaattataaaacatttgagtaaatcttgttgttgttgcatcaagcagttatcaggaaaagtggtgaacatgaagcttccttcatacgaggaggtcacagtaaatggtgaaaggaagtcgttggtaactttcttaacttggtttacatgatggttagagcaagtcgtttagagtgggttttactttttcagttgcataatattttcatgttgggattgaaataaaagtataatcacatgtatacaaaaaccaaacagtataacacgtcaaatcacattagaataattaattaaattttatcgataaaaatcaccaaaataccaataaattccgcactccgtctcttccagtctcagtcagtcgctattctctcatcgacgtttcattgccctaatttgaagattggcctctgtagcaaggtatgatgttgctctcagtctcaaaataaacaatctctctgcttcaatttcgagtggaactgtttggtttgggaaattgatttgctttgctttgcgtt

SEQ ID NO: 42895 - DNA, 560 bp, Arabidopsis thaliana landsberg
tctaaagacaacaggagtctctcaaccattggtgccaacgctatgactactgttctttttccaagagagtttacaaccatgtggccaatcacttcaatcaatggctcaaatgctaacttacttggctttgagaaactattgacctctgttttgggtccgaaagctcaggagaaaggttcctttaaggtgttaaaagcgaaagtcgctgctcaaacctttatgaagattggttttagcatagaaaagaagctcaaggaagcagatgttgaaggtttaagctttccagagtggcgaacaaagcctgagacaatgagaatgcattttgaggttcttgctaaagttgatggtgagaatgttatcccggagaacgtaatgcgagttgatccaatcccactggaggacacgatagcgtaaaatgtgattactggaaatgtaaccatgtcgaaacttccaatcattgagtctccttcaagcccttttaccttgtaaatcatgttctatgagaaaaagtttcaaacttttgatctcgcctttgtttactttactaatcaccatattgc

SEQ ID NO: 42896 - DNA, 916 bp, Arabidopsis thaliana landsberg
cacaccatttcaatgtaatggcaaggccaaattaattatttgtattacatcattttcacttattacaaaatgaatgagcaccacaccattcacagaatcaattagcacatttttaatcccaaaaaaactgggatcaaaaattttataaaaaaggtgaaaaaaagaggattgagtttgagttagcaagcacttccaccggttgtaacacaatggttaagtgcagaaaaccaagaacgtttcccttcaacctgcgacgttgatcgcctgaatcctacaccggatcttgaatatgatccaccaattaaccggcttcgaggttcatcaacatctgagccaccaaggcagagacttggaggaaaccggcggcagctaagagaccgaaacgctgatgatctagcggattgtggagttcgagaacccgttcttgacacaaccggtttacaactgttagtgggggtagttaggagagctgtgtctaagacatcagaggagcaagtgcagaaggacaaggagatgcttgttcttgatgatgttgatgttcttgttgttgccgttgtatggggaagtttggtgaaagatacaatgccattgcgacagagaggacacgggacagagcctggtgtgacgtttgaggtctttgacgatgttatgcttgtggtgcttaggtataatgcacagtttgtgcagaactcatgagcacatcctgttatgtcacacacaacaatcaattcaatgttttaagcaaagatcattttcggtagtgaaagtggtacattaccatctgctgccacagtgcattttctttccaaacaaacggcacaagggtcacgacatggagtcagacaatcgttttctcgccagccgcattctctgaaattcacaaacgaaaaaagaccaatcagccacagagatcatg

SEQ ID NO: 42897 - DNA, 558 bp, Arabidopsis thaliana landsberg
cactgcaaatttccacattttagagacaaagattgcataaagtaatgattgattataaaacatgattggtaaaatgattgaacctttgcaacaagagatcttgagcaacctctcaacgagtttacggtcaataagattatcatctacagctaaaacatgaagctcttcatcatgaccatgatgaagatgatgatcataagccaccacatccattaaagacgaacaagaacctcctgaactgttcatgatctcctttgttccttaaatgtcaagtaactgataaagaaaacaacttgacaataagcgagactgactctagcattaatataaagaccttgcagacattgcttttagttctccatcttcaacaaaaataaatcaaaaagacaaaacacaaacaatgaagaagaaagtgacagactcagaagtgtatatgcatgaatcatgtgaatctctggtgatggtatttatgatggtttctttgattttttaggtgggtgaagaattttccattatgatttaccaactatatataattctgcagaataatttttaaaa

SEQ ID NO: 42898 - DNA, 2238 bp, Arabidopsis thaliana landsberg
ttccaattttatccctattctttaaacttatttattgatgatatggagggggtatcagttatcaaaatagtacaagatgaagaatcgaatggtatggctcaaagcaaataagacacatttctttgtgacccttcgagcaatttctacgtcaagagaacatattcctctctttacttaaagcatgctaaagtatagtcacaaagaaataagaatctctcccaactttttctcttatcatcaaataattttcagcacccactatttttccataatcttcgtttaatttttcttctttaatctactttgcacctatcatgtcaatctataagtatatatattttacatatgctgcaaatatacctccacaaaaaaacaaaagaataaacattctttttatatccccattaaaatcaaaatatttgtatcattttttttattagctatctcaaaattatactataagaacaaaccttgattccaaaactcacacacacaatcaaccactttccttttttcattcgtctcaatttctctcatgacgagtagtagtggaagcctcaaactagagatccacactgatgacaagacgccgggaaagtggagcgtaccgctcggcgatgatgttttccgaaggttcttgagcgggggaggaggctcggagatggctgtgttcggtgaggggtctctttttagcccgtttttgttcgggaagtactttgatccgtcagacgcctttccgttgtgggaatttgaagctgaggttttgctggcgagccttaggagcttaggacagtgtagagtcgattggtctcagacggatcaagcttatgtccttaaatccgatatccccggtacgtacgtctttcttacaccacaattctcttatttattttcattcggaaacgtttatttctgctttagtaaaaaataaaaatacaatagatcgaactttaaaaaagaaaactaaatcttcgttcaaatgatttgttatacatcataacgatcaaaactgaatatgtgaactgatgaatggttgatatagtacaaatatgaacagaacctaagtttctttaaaagtgaacgtgaaccaatctcaaaacgtaactcattcaaatttaggatttcatttgtcaattttactttaaatatcaaaatgatcgaaccacaacttgaattggacactagttataatgatggtaacgagaaagatgaaatggttcgcaaaattttcaaataataatgtatcttttaaaatggtataaaataaggaaaaaaaaaactgattaaatttttggtacttgtatattagtggtggggaaaatacagtgcaggtgtacgtggacattaacggaagagtgatggagattagtggccaatggaacagcaacaagaaagcggcgaccaacagtgactggagaagcggccggtggtgggaacatggctatgtccgccgtctcgagctccctagcgatgccgacgccaaatactctgaagctttcctctctaacaacgacgattactctttcttagagatccgaatccctaagataaattctaagaacaagttttaatctgatcatgtcgccttgacgagttttaactttagattcttttcgtaattttgttttctttagttaactattattatagatatgaaattctgtggtagagacacaatggatgaatgatatgttatatatacatactataaaatatatcaaatataacatatcgattataaacaaatgatttattgatattacacacttttatgcaggttttttagtgtatatatattaggaaattgcactgatttcactagtgaagattaattcagactcaaaaatgtgtgttttcgaatgtaatatcagactcaatagggtcattgtctggcgtgtggttttggggaatattatcatctcccatgaattgtttcgtgggcttcaaaccaatgtcatgttaaaagaaagaaaaaagttaaggccatgtaataataaattcttaccaaaaagacatgagaaagacttatgatcatgtgatttatgtcaaatagaactttcatagatgctctattaagacgactaggattgaataaaaattggacgaagtgggtgatttggtgtatctataggctatagtctgtagcatataaaataatgattagtggccaatggaactgcagctaatacgactagagaagcgaccggtggtgctacgtccatggtctcgagcaccccg

SEQ ID NO: 42899 - DNA, 642 bp, Arabidopsis thaliana landsberg
  unsure (1)..(642): unsure at all n locations
gcctacaatgcagaactaaatatagtctagtgcaaacagcatcagaggtctctaatcacagatttgattgataaataaatgagcttcacttgcacctttttctttccacattcttaatttcttactaaaagcaaactcttcacaagttaattcgtggtctccttggcaattactttagaggcccacaggtgtattatctgtctaacgctgaatctgatggaagagatgatcactgtgaaaggcttgggtttggaagattgcacgagtatgattcagaaggaagatgttggaagtaccttagctctgtctttgaaaagaacagtgtagaagagctggcgttgccttcagaagatgaacttgaagacatagactactatccaagcttgccatttgcagctcttttctcagcttttaaggtagataaaatgccttataatgaacaatgtaaccactacgactcatttttagatgattgaaacacttatatggcctgtgcggngtttatgttgttttggggttaggcaagaggcttgaagatgacatgcctgctatgttactgttctgaaggagacaacattcctgaagcatttcttctagctgaggcttcatctaagcttatgggtctgactccctgacaagtca

SEQ ID NO: 42900 - DNA, 570 bp, Arabidopsis thaliana landsberg
gctattcgaccaatttgggtgtttgtaaacttaactttgatttgttcatctccaaggttctctcaaaatgaacgtcagacttattgggcactcttgttttcttgtagctccaagtttaatggaagcattaactacttcaagggttgtgccagttcaggtcccctgtagaaagctctcttcactttttgctaatttttcttgccttgagttaaggagatatccttgtagaggtcttgtctccattatgaaccatcccaaattgcttcgtccagtgactgcttctgtgcagcctcacgagttgtcgactttggggcatgaaggcaacattgttccttctaaaggtaactaattctaattacttcagaatctgttgaatttagattttagggaataacctgagctgcttggtactaggaggtatgaaggaagagttctaagagttaaattacaaactgttttaagcttttgaattgtttatagattgctgagtttctttctacttttggttgttggttttctgaattgctagaaattcttgatctttggagaagtgttgaagcggaatgtttc

SEQ ID NO: 42901 - DNA, 515 bp, Arabidopsis thaliana landsberg
  unsure (1)..(515): unsure at all n locations
ggcgctcccgtcgacgtggtctcgccccaccggcacacgcacgtcctcggccggttcaccatttttacggccgacgacgccaaggcggcggtggacgccgcgctgtgggcggcggtgccgtggcgggagctgccgttctccgcgcgggcgtcggtgctgctgcgcgcggccgacctgctgtccggcccctggcgggacacgctcaacgcggccaccatgctcgggcagtccaagacggtcgtccaggccgagatcgacgccgcctgcgagctggccgacttctggcggttcaacgtgcacttcgcccggcgcatcctggccgagcagcccgaatccgcccccggggtgtggaacaggatggaccaccgcccgctcgagggcttcgtctacgcgagcaccccgttcaacttcaccgcgatcgccggcaacctgccgaccgcgcccgcgctgatggngaacacggtgatctggaagccgtcgccgacccagacgctggccgtctggtacacgatgcg

SEQ ID NO: 42902 - DNA, 561 bp, Arabidopsis thaliana landsberg
cgcatatatatctactgttatgaaatctaatctactttactatatgaaaaaaacatacacatttgccggagctttctaaagacttctcagcttcttctccggtattatcatccctagaccggtcaattttggttacttaagttgcaagaaatctccgtgtaacccaaatttcataaatgcgtagtgggatttactcttcttcttttttggtttcatatttggtgtttgcctttcgcgtaaaataccaacatatagcaaagagcgtttagacgtcaaatgtgtttgttttatttgtgtagagtatacatacttttttaagaaaagaaaaaagaagttatgaaagcttgttcttttttgttaaagattatgaaagcttgtttaaatcctaatcacatctcgtactaaataaagaactatatgtgtgtgggtaatattatccaatctctttaaatttaaaccacttgtctcatctcatatgcaaaacgtgtatcttgtaagaacacacgctcttctaatatagaaatagatcgcgtaacaagtggacttgaaaagctatagttt

SEQ ID NO: 42903 - DNA, 974 bp, Arabidopsis thaliana landsberg
gcaaaggaacaaagcacaaaaaaaaaagcaacaaagaaacataataaatgcaagaaattcccagaaaaatggggcttcttctcttcttctctctaattctcccactttccacacaaaacccactagacaaaatctactactgtggtaacactccaatctcaaacccatctgaactcataacctgcagatctggaaaactctacttcaaaacctcaactggtctcttccatgtctccggaacagaggaagtgaaattaagagctagggtgtctatggaagtcgaaggtcacataccagatttatgcatcgcttgtgagagaccaaatggtaactgtggtgttgctctaagatgtctttgtcatcctaaagaatgcagttaagtcttgagctaattctgactttcatttaatgaagattataaacatatctctctgtttatagatgtttttgctctgtttctttgtagagaacaaagttatcaactttggaaccaagtctcgagctttatctggtgacatacaacagcttcttccacttttgttgttattggctatctgcttttgatttgtaaaattatttgatacttatggctagtctttaaaacaaacatatgtaattcagcttttgggatttgtgtttagtgttgtttcaatgttgttgcctgtaaatgagtgtacatctctttttctcctaggctggattatgatttatgtactttttgttagacggttttttcagacaatgacaaaaaccaaactgaattagtttctagagtgaacagctaggatagtaaaagagagatactttttaggtagaagctgtataggagtgtaccaagtgtagaagcgaaagagtttgttttgatccctaaaggaggtagctttgtttctaagggagtgttcatgctaggaaaagattatgagataacgctaagattttggtaaatccagtccattgtttgcaaatcggtaggc

SEQ ID NO: 42904 - DNA, 781 bp, Arabidopsis thaliana landsberg
  unsure (1)..(781): unsure at all n locations
aaaattcaaaaacaattagttcaaatttcttctgtcaaaaataaaataaaatggattcattttatagcatactttatagtttatactagagtcaatccaacggttggtattgtcgatagattaacattccaaattctgaccgtcatcgtcaccaacctccacgtctatgtgaagatgattcaatgtcgttgagtggtagtagttaaatcttcaaaaccccggagaattatatatatgggtttcgttcagcaaacctaactaaactcagaaccagaatttatatttnnnnnnnnnnnnnnnnnnnnnnnnnnnnnnatcctgagcagcagcaaccaatctcctctgtttccagagaggtatacgtctcctttcattgtctacttcgtcgttttgtttcctgttcgattaaacggtgtgagagagttttcatttgaagtatacgtctcctttcatctgaagcttaattctctagtaaattcgtacttcttgacttgccacattaggaatgttccttttgagatcaactttggcttttagctgacaaatttctggaaaaattctgaaatttgctatgttggaatcttagagattgtatttaagagtcatatattcactttttggggactcgcttcaattctgagaagaaatttagaggctttntacggattttagccttcagcctcacagttatctttagcatganatttttagaccctaatgctgggtcaattgggttggtggttcaaggattggggggtccttatggtttttttttttgggg

SEQ ID NO: 42905 - DNA, 1026 bp, Arabidopsis thaliana landsberg
gcaagcactgactcactactcaacaatcaacataggtttttggtgactgaaacatagccggaaagcgaaacttgggaactacaatgtaccttattcaacaagatagagacgtgcatttgaacccatctctaacaagcccgtttattgcgtccctgagcctatgataatcctcaggtttgttgtaaacttgaaaagaaatacgcacatatcccgtgatcggatcaatctctccatccccgggtggcctaaagtagattgggatttcaattctgaacttttctcttaaaaacgttctaagcttcaaaacatccgactcactcgacactcctaaacacactggcaacccaaccatgatcatactcgcacacatctcagggggacaaccgagctgagtcccccaagacttaaccaacatttgacccatctcaacaacagactcatgattcctcttcttaataccatcaatcccgccttcaaaccgatttacaaactccaatatcgaaggaaccaccaactgagcactataatctctagttccaacccacgaactctcaaccgccaaaccgttcccatactcattcgaaacaacgggatgatgcaaatccgcaacaccaccattactcgatttcctacaatacaagaaagcaacagaaggcggtgcgaaaaaccacttatgaagattactagtatagaaatcagcaccaatctccttcatatcaacatcaacacaacctatcccatgagcagcatcaacaaaaacttggtcaacaccttctcttctacaaatcttcacaagctctttaataggaatcacaacacttggcatagaagtcacatgatcaatcaaagctaacctaactctcctaccattcgctttaccagactctaaaccaatcctaaaccggtcaataatctcatccgccgaaataaccggaaaaggtaactgtacctcgatgacgtgtccaccggagcgtgtaacatacgcttcaacagatttcttacagagccataagcgtaatgaagcat

SEQ ID NO: 42906 - DNA, 1022 bp, Arabidopsis thaliana landsberg
ttgacctctctccactttggtttgtttattcatatttttccaaacattttataaaaacaccttggtggtaaccttaatagaccgatataatcgggaaaggaaaacaaacctaactatttaaaatttttctttaacaaaaagtattgaaactgacctgttttagttggaacaatatgcctcgcgtgaatatcggtccagacaacaacgctcaaatagagatcactactctacaatcacaaagcaaatcaagaaagctaaagaaaatcaaaatggctagtggaagtgagcgtgtggtggttgtcggagtagatgattcagcccatagctaccatgcactcgagacggctcttgatctctttttcatacctttcaaggccaacccacgattcaaacttgtcgtcctttacgctcgaccaacagcgaccttcttcctcggtgttgctggcccgggaacggtcgatattataccaatggtggaagaagatttaaacaagaccgcggacttggttaagaagaagtgcgccgaagtgtgctcggctaagtccgttgagatctcgtctttggaggtgattgaaggagatccgagaaacataatgttggaagccgtggagagacatcatgcatgtgttcttgtccttggtagccatggttatggagctgacgtcaagaggatgtttttgtggagcgtcaagtgtgcgtaactatttagctcattaagcacattcctccgttctgatcatcaagaagcctaaggataaacctacttctaccaataaacagctatgaggaacaagacgacgtgattttcgtatatgttaccattctgttttcttaagtaagaccctatctatcgaacattgggtttactctttttccccacatcttccattttaacgttaatagcttagctctaatgtatatactcattgtatatattcactatattaaatcgcctcttctttggggtattaaaactcctttacttttttctggagtatatttgcataaaaaatgaaagtttt

SEQ ID NO: 42907 - DNA, 429 bp, Arabidopsis thaliana landsberg
  unsure (1)..(429): unsure at all n locations
acttctagttatagataaagtaattacagtaatgatgaagtcatttaccaaaagaaagcacatgtatacacaatggaccatatatgtaatgtctcgctaacaattctgtacacatctctcaaaagtcctcttttgtcatttggattctgcagctttaaacaactctcgccattgctgtggatcacttcctggaccatccccctgaaaccacatttctcaaacatataaaaaaatggcaaccaaatctttgaaacattttcaatgatcaactaaagctttgaatctccaggacaccccttaagacattgtttcttgatcagactacatttccactttgttcaaatttcaaggaaactgtttgtggtacctttactgaattgatctcnnnnnnnnnnnnnnnnnnnnnnnnnnnnnnaagtgcctgtatac

SEQ ID NO: 42908 - DNA, 593 bp, Arabidopsis thaliana landsberg
tatcatattcaatagaatactaaaatgaaatctctccaactaagtgtcacattattagtttattaattttctaaatttgtttgcaaaacgaataagaataatactaattaagactaaatttattgttatagactgatatgtctctttgccaaaaaaaagactgatatgtctaaaagtggctttaacagatttctgaaataatactgcatagagtgccactttatcacctttttaaaacgatatttgattcttaaactgcaaatatacaacaaataattaaatgtatatataattggtggtgacagcattaaagataaaacaaagttgatcttatttttatcagtgaaaagtgaaaaccagtgcggaatattaccatgttaaagcatatgtatcgaataaacaaacatattttaataagataaaatgtcatcaaaaaatatactatgttttttcgttgaaaaaaattcaattttgtatctggtaaaagaaatgactaatttttttttttgaattctaataaatgataattgatttggctgatttagacacaacgttaagtcataaaataaaatagtcataggatccgggaccgg

SEQ ID NO: 42909 - DNA, 936 bp, Arabidopsis thaliana landsberg
gggtaagccaagagttatatattagtatctaaggtttggataaagaacagtactgttaaataccaaaaatgtaaagatgatgaaagaataaaaatcattttacagtgtgaaaaaaatcagtttatcattaggtgagttatcaacctgaaattagattaccatgttctcgatcgtgtgataaatatctatcttcatattggatgatggagcgatagaagtgaaaagtcaaagaggataataaatgaaccgtatacgacgacttgtgttgtgttgcttccaacaagagaggggacagtgaagttcgagtttgttcccaatgcgaaagcactccattccttgatatggcttctctttctttacctcgtaccttttgccacacttctctctctctctctctctctcttccctaggtcgatcttatcttgtcttgtctgaatatttcataatataatgatacaagagattttgcttgtaacatacgaatgcgtatattatttgaaaattcaaacttaggaacatgttactgaagggaagctttgctcgactatatatgtaaatgttttcttatatatatttcaaaatcatatatatatatatatatatatatatatattaatgtaaattttttagtactttgtaatttagatagttaaatgaacttggaaaactctattagactatacacttggtaattagacacatttggtttgaaaatatttattaaaatatgcatatactaaacaacaaagcatgcatatgtacatatgtatatacacttttatatacgtcattgtgttcatatatatacattcgaagattcacggaaatcacaagaactaatctcttctctcttgtcccatattgcaccatctccttcagaaaaaaataaaaagagtttataactcatgatgacgtcatcccatcagagcaacacca

SEQ ID NO: 42910 - DNA, 774 bp, Arabidopsis thaliana landsberg
  unsure (1)..(774): unsure at all n locations
agatacagcaataacatagactaacaaaaaaagatcaaaagtttgaaaccaacatatctcaactaatattctttttcgacaaaactgatcacatcacctgcgtcattttcctttgttcagtattctattccccttttcttttgaatcaaaggtcatatactcgtgtggctcatatatttgataaaagtttaagaagaaagaaagggagtattttgatgataaaaatacatgaattttggttcaaataagagctacaaagtttgataatatacatgaacactgattaaatttgattaatgaattcatgtgtctatgttaatttgaattttgcttcacatacattaacaaaagtagtaacagaagatctacatatctgttggatgtgagaaaacagtaaaagaaaaggcaggaatgaacaacttgattgaaataattggatggtaccaactttgtatcaaaacttaaagtaatcataatgcgaaactaaaaatagtgaaacataaacaattctaataagttaccaccacaaacctcatcaatactttacaaatgcatcatcaccttgaaatgatcatcatattcacagtaacaaatatataagccaaattttttaaacaggatctatctgtatattaaaaaaaaggcttagttcaacatcgaggtaaacacatatagagaaaaagtaaggttgtttgtattattagaaaaacatatagtaatgtagttntattagtatcaataataataagaaagcaatgggacaaagactaaaaa

SEQ ID NO: 42911 - DNA, 860 bp, Arabidopsis thaliana landsberg
aagtttttaagaaactgtgtagagttatattctgctccaactaaagctgttgactcaaatggtcttgagtttcctatcaaacatctcaacatagttgatcctctaaaatacagcaacaacctcggcaaaagtgttacacaaggtactctattgataaaagttatacaaccaatatagcagttgtcaaatattaattattttaaaaacattttgttaggaaatgtccaacgaataagacatgcttttacacttggagctcgaaagctaagagatgttctttcactacctggtgacaccatgggatggagattggagaagttctttcgtaactctttggagagaaatggtaagggacaaaggcaagatgtgaatgatcccgttactgctttcggtactggaagatcagaattatctgaacttagtggagatttcgatagttcctttggaagacttgtgtatgggcaaatgtatcatgggcatagcttacctggaacatttcagcatggctatatcccggttagttctcacctgaatggttgggatattgttcgtcaccttgtgacttaccgaaagaacgagttccatcttagaagtctcaatgtatcaacctctatgcagccttttcctttgcattctttacctaatggctgtcaaaacatgagaaagacgagaggaaccggcacttatattcctgacatggtatgcgattaacccctttgacggacattttggcttaaaaattaacttattgctgcaagcttctgaattgcttctcaatggttgttgcagagtcaacaggtatactctgacaggttcagagaatcaggtactggaaccttatcaacgaatcatttagaagc

SEQ ID NO: 42912 - DNA, 684 bp, Arabidopsis thaliana landsberg
tttccgcaagaacgtgcatttttcactcgagagcgtgcgtccggtatgtacacactctcttcttacttcatggcccacgttctcggatcgctctccatggagctcgttcttccggcatcattcttgacgttcacttattggatggtctatctacgccccgggatagtcccattcctcctcaccctctccgtgcttttactatacgttttagcgtcacaaggacttggacttgcccttggtgcagcgatcatggacgctaaaaaagcgtctacaatcgtgaccgtgacaatgctagcgtttgtcttaaccggtggttactacgtcaacaaagtgccatccggaatggtgtggatgaaatacgtttccacgacgttttattgttaccgtcttttagtggcgatccaatacgggagtggggaagagatattgcgaatgcttggatgtgattcaaagggtaagcaaggagcgaatgcggcgacatcggctggatgtcgatttgtggaggaggaagtgatcggagatgttgggatgtggacgagcgttggtgttttgtttttgatgttttttgggtatagagtattggcatatctagctttgagacgtatcaaacattaaataaagagagggagagggggagaaagttaaataaaaatgagtgggtaaatttaatttttagggttctag

SEQ ID NO: 42913 - DNA, 610 bp, Arabidopsis thaliana landsberg
gtcgaataaacccggcgttactggcatcgactggtccagcgccgcgaagccgcctggaaccgcacatgtgttccttagcctatatagatgggaaatattgaatttataacgtaaagtacgtaacccatctatagttaatcacgtacgtaaacacggcttaaccagatttcaattacctgccagccaaagtggggtccatggatgggtcgggcagtccggttccttgaaagttcgtgacccggtccacataattaccacaagacgcgatcccaaccgtgtgcgcccccaaaagagctacggaatcaaaaacattcattcctttgttgccgaaaaaacttaacatgccttcgacggatatgaatggtggagggacggatctcattggcgtcttcaggattcgacacaaagccatcgcgacgtccggtggggaccacgtagcttggtcctccacctaagaacacggcgtcacgtgtggcgagcgtgactatatcggagcacgagaccgtagagggacattgagcttcgagtgccgtcttgatctcgtcgatcagctcgaaccctctcacgctaaagtttgggccggcgtttttttccgatagttgagacgtcg

SEQ ID NO: 42914 - DNA, 454 bp, Arabidopsis thaliana landsberg
ggactcgaactaaaaaaagttgatgttctgttccaaaaatcataggatgtataaccttatagatcgtaaattagcaattgatgataattaattaacaacaatgaacaaacgatctttagagtaacaaaaatagcaatatgataagaagtaaatctaacgtaaaccttaaacagtggttaaattatgaattaatatatccaaatacttattagttatcccgtcggtctagttgatgataagtgaatatatttaaatcttcccactgagctttatagtattagaatctgtttttatcccattaactattttatggtcaaccagcgtcgacggataagcattttgtgaatcaaactaatacatttaagtagctctggtcaaccgaaactcatctaatgaccgttattacgtcctctatccgcaaattgcattgcatgggcgtcaggtgctttctctt

SEQ ID NO: 42915 - DNA, 606 bp, Arabidopsis thaliana landsberg
aaattagttttttttaattaatactaagtaagagtaatggtatttcaaaatttgattgatttgatcatttagttttgtagtctatttaggattaaaaacaaattcgttcgttagcaactggctgatttgactatgcttaaaacaattttcagatgaaccattgcgttagctgaataatctattattggaatcaaaattctagtcaatgtgtaatatatggcccaacagaactaaaataagaacgggttggggatagtgatggtaaaatggtttgtgttttggaccattaacaacttggtatacacacacacacgtatcgaatttaagttacagatcttgataccaacttttttatttccttgttatcaatagtgattcgtaccgaacaatccatatgaagaaagccccgtcaaaaagtggaggaaaagaaaagaagaataaatatcgtcttcttttatgtatttgggagtttatgaccatacattacttgagtcaattcctttttttgactcgattccaaaaaaaaaatcgtgtgaaatgtacaaaaaccttacctcgtggtcgtggataaataaacaatatctacatacatatttaactattaca

SEQ ID NO: 42916 - DNA, 701 bp, Arabidopsis thaliana landsberg
gggtctgacattgtttgtgttagattccctacgcgtcacatgcgtccttctcggcttttgtgcttcactctttttttttttgggtaaagataataaaaataacaattattatcgttcctgccaactactagtccactacatttttaagatgtaactttgaaaatgaatttggccgaccattctttatttcttttagaaaataatgtacaagtgtttccgtttggtgacctaattctaaatcatttgttagccctaacaactagaaatttcaacacgaaatagtgaaataggttgatgtacggtcaggattataagtctgatgatgtgggcacgaaagcaggtaattatttctctgtctgagcagaatctattgctagatttattacaacgaacttgtcttattaccctcacgagtctcgtctctttcacaattcaatggcttatttttaagtgtgtttttttatccatcgtgtaattttttttttgagttgtttaaataaaaatttgtatgatgaaaaatgttcactagcaaaatacttgaccctgaagtatcctaaatttttctggttcatactcaaatgttaggcttactttgttttctttggtcacctaaaaaaaagtggaaaaatcagcctaattatttgtgccaactttaatgattgggctgcatctctttcttatgagcccattatatgggccca

SEQ ID NO: 42917 - DNA, 644 bp, Arabidopsis thaliana landsberg
ttttagtatcgcattagtctattttcaccacaccttcttgtgaccatgtcttatttatatggtcatgtcttagttcgttctctgatgtgattatcttctttgaccaacctctctttacattggttttatgaacaaacaacatcgcaatcccttggatatagtcaaggccattatcataaaagattgagctctgttatttgtacccttgtctaaatgctgtgatatggattagtcaagtaaattctagttatctcttttaataggagtgttacattatgttataatgtttaaaggccttcattatcgctgttgatgacatgttatctagatttaatttgtttaatgactctcattagcgagacaatgataatcttttatttgcatataagctgaagaactaaagttggtggtgcaatttccgcaggttcttctgtcgatatgctcattgctgacggatccaaatcttacgatccttggttctgaaaagcgcacattacaagcagccagtcaagtagagtcccaggtcaatcctggatcaaagtatgcaatgggatgataacaagcaataatatccaccaccagtacattgcgtattaaacaggagaaataagaaagaaagaaaaaaactgcagtttggactttta

SEQ ID NO: 42918 - DNA, 835 bp, Arabidopsis thaliana landsberg
ttttgtgcatttctggtgtagacgaactgatgaacttgtggatgggccaaatgctttacatataactcccatggctttagatagatgggaagcaaggttagaagatcttttccgtggtcgtcctttcgatatgcttgatgctgctctcgctgatacagttgctagataccctgtcgatattcaggtcagccttgctctgtcttatcttacttcctcatttcattacatgagttaagagttgcattcagtccattgcaataaaccttataaaactttggtctaatgtttatttatgttgcagccatttcgagacatgatcgaaggaatgagaatggacttgaagaaatcgagataccagaacttcgatgatctatacctttactgctactacgtcgctggaaccgtcggattgatgagcgttccggttatgggaatcgatcctaagtcgaaagcaacaaccgaaagtgtttacaacgctgccttggcccttggtatagccaatcagcttactaacatactcagagacgtaggcgaagagtgagtctttttatatattttaaatagagctttggtttcttgatttcacatatctcacttaaaccggtttcttgatttcacatgcttcttttaaaccggtttcttgattcacatatctctcttaaattggttttgttccactatcagtgcgagaagaggaagggtttatctgcctcaggatgaattggctcaggctggtctttcagatgaagacatattcgccggaaaagtaactgataaatggagaacttcatgaaaatgcagcttaacgagcaagaatgtcttcgacgagctgaga

SEQ ID NO: 42919 - DNA, 709 bp, Arabidopsis thaliana landsberg
aacttgtactaccaagaaactaaagaagtatatagtacgtagttttgtcaatattctagagtgtgttgtatccacaaactcaatagaaggccaaaccaattacttgtttggtcaaaaagtcgaagacttgtgaaagagttggcacttgacatggaaaaaaaatctaactttgataaaagcaggaacaaataaaagacacaaagtgggaaaatggccaatcgaagaaaaggaaagacaagtgaagcagtgtcatgatcattacagtgaaagaatcaaagaatcattcatgttttcttttaagtttttgacacttggaagttggaacaacaaaacgttcgttggtgttttcaaacgccgccatgcatcttcggatttcaagcatctatctcccggagatgatcttttcattatattttatctttgtaatttaaaacctatgttatgaaattatttggtacatttttttgtttaagtgaaattatttggtacatgctgatgttacttccacaactttatccaatttctgaattagatttctttcgttttgttttatactcatgaaaatacacatttgaatactcgaaattattttaagcataacccacatccaacatgtgatgggacctatagtgatatgagataatacactcattgttaattaatttcaagttaaaagctatgaaacttaatgtggtattagagtatttag

SEQ ID NO: 42920 - DNA, 1023 bp, Arabidopsis thaliana landsberg
  unsure (1)..(1023): unsure at all n locations
actcctccaggccaggaccaaggctttttatacgttatcgttttaaaggtgtcttaatccatttttaggttaatttcagtaatacataggtttacaaactctcaaaactgttttctagtacttgtgccgccgatctcttagaaaacaaaatataaaatctttgattacattagatgagaatctatgagaccaagatcttatcaaataaaatgcctctcttttggagcgaagctcaatgatcggccagtggaaagcctagtatctcttcccctcgaatttttttaccattcatcgaaaggtatgtgccaatataataagaacatttacagtttctattcgtttcaattaatttcaatattttacatatgatgttcacaaaattttgtctacttgatgttttattggatattctccaattgacttttatctcatgttctattaattttttatttttaattgtcatattttgttgtgtgtgttttagtcggatccttgaaatttataaatagctataggatataggtcccagatttagatctcatggttaaagaatacacaagtaccttcaaactccattcatacatgtatttcttgattttaatgtttgattatttctttctggatatgtttcatatataacttaaaattttatgtaaattaattataataattctggtatcaattattcatcaaaaatgattttgttctcaaatgtcttcgaaaactttatgaaaataaatttccatactaacatttgaaataatcttattaattattgatattggtttaagatatcattacctttattccttatacactgactttttatttttatttttaaaattaaaaaataaatgataattaattatgcattnttatatttttgacacaaaatacattccctatctgctcaccaattacaatcaataattnttataattaatgttttttggagtttagaatattattctttgtgaaaaaaagacacaaaaaatatcattcttctactcgtgaanattaaat

SEQ ID NO: 42921 - DNA, 541 bp, Arabidopsis thaliana landsberg
aggccgcgcaattcacactccatgcataccgtttatctttttgatttgtaggtggaggaaatgttggagcagaaagtgagaccttacatccaagactcaagcatggctgttcttccacaacccatcttgttaaagtcacagaagaaagctcaaaaggtatcaattgaattggttacaagaataagcctacttgatatcattctctcttacacactaaataaggttccaaattagatcatacaagaagctctttgcctgaaaatagaacctaagatcacatgttgatttatatgtttattacacagggaagccggcaaaggaagtggtggttcttctaacctgccaagtgtgtcgaaacgaatctatataaaatggattttgaattgagtttttttgtgcttctttgatgaaaatatgctttgatatgaatcttgatgggtgtcaaatatgattacacttcaaaatcagtggtaatgttttaaaagaaatgttgtttttgcagacacttggcagattcgttgtgtaccgccacgtgtatacc

SEQ ID NO: 42922 - DNA, 764 bp, Arabidopsis thaliana landsberg
tgttttagtttgccctatcgattacgcctaatatcatcatgtttctaccgaaaaacattgatttagcccaattggaagaactcgcttgcctctcgtcacctcctcttactcttgaggtactttatttaatgaacactagaagagctaatttgttgcaaactcttttcttgacacttttcatatgcatgctatgcacgatttcagatagaagaaaactccattggaggcgaaataaaagccattacagcttattttagtagcaatgtggtttagttgcgaaatctttctacataaggaaacagaggaactgactcttgtcattcattatctgttcgactgttcctacgtttttataatttgtaagagatgttttttgaacaactagaggatttgattcccacttatgaacttccaacttttattatgaagaaaagttaataagttgatattaagctactcaatattaccaaatcccaaatacaagcgattcatggactgactcggaccggtttaatccaaaccggtcgagaatcgagtgttagttaataccgagaatttcgatttcccgtagaatcgaatcgaaccccgctttatcttctcggactatcagaggcgttgaacgagttgactctttaactcacgagtcacacaacatgacgagatcgatgaagctcaagaaacgatcgcgcttgaagaaaagtaaatagaagctgcccagaatctgtgcgcctttctccaatttttgaacttttctgatgaaaaaa

SEQ ID NO: 42923 - DNA, 770 bp, Arabidopsis thaliana landsberg
ttattaagccggatgtcgcgtgacggaactctccttgtatttgctatcaagggaaagaaagaggaacatctttgccatagtttagtttgcactctctattggcagctggactttccagctattcgaatgtggccttctacacctgcttcccttctatttgacatacttatcatgtggtaagctaacccatccgtcaacgaggaagtacaccacatatagtaagtatatatattagactatctagatttaagtactatggtgtacgaatttgatataagtacatatagacaaaagatattttggtcacttatcgatgttcttcatccttttgttaaagattttatgtaaataacttataaaatatattgttattgttttccaaaacaaataaactagttgacacatacttcttaagttcattgttaatttatataatacaacaacctaaacccatggtgatgattacctttagatcactaaaacttttattaaaaattttgcctaattttcagtagattccatcagagaaacagcttttctacaaaaaaatttcaccaccaaatctcttttctttaaaacttatcaccacaaacacttgtttttttactaaacttttttaaatattggaaaatcttacaatatttttaaaagttaaattttgcttatttcacgtcaatttatatgtctctttacaaaaataacaatatttttgcatcaacaattttttcgagtcaattaaataatatggtttacaattattggaaaagcta

SEQ ID NO: 42924 - DNA, 670 bp, Arabidopsis thaliana landsberg
agcctggtatccgaatcatagtctcccggagatccacgatccacctccgatcaagcttcttgacacttcctccgagacttacatcctcgatttcatccataaaaacataccttgtctcagaaaaaccatccaagatttagtctcatcatcatcatcttccggaggtggtagtagtcatgtcgccggcttgattcttgatttcttctgcgttggtttgatcgacatcggccgtgaggtaaaccttccttcctatatcttcatgacttccaactttggtttcttaggggttctacagtatctcccggaacgacaacgtttgactccgtcggagttcgatgagagctccggcgaggaagagttacatattccggcgtttgtgaaccgtgttcccgccaaggttctgccgccaggtgtgttcgataaactctcttacgggtctctggtcaaaatcggcgagcgattacatgaagccaagggtattttggttaattcatttacccaagtggagccttatgctgctgaacatttttctcaaggacgagattaccctcacgtgtatcctgttgggccggttctcaacttaacgggccgtacaaatccgggtctagcttcggcccaatataaagagatgatgaagtggcttgacgagcaaccagactcgtcggttttg

SEQ ID NO: 42925 - DNA, 737 bp, Arabidopsis thaliana landsberg
cggataacattaaatctttgattaagtctacttatcgttaatagagttatcctaaatcacttttgaatatcaatccaacccttagccgatcgagctcataaataaggattgctttcgaagatcaaaggcagctggagcataaataagttatggtgcgcttgtgatttctttcttatatattcatcataaaggaaaataagttatgaaaattgctcttgtttaacgaacacatctctgattacaattcatattctccgatcacaattagttgtttatttttattgttataatattaatgtctcttttggaaacaaattaaatctcaaaaccaagacgaaaagcctactaaaaaaaaagaaaaaaaagaattaaaagaaaaaaattaaggaactaaaccaagtcagcttctggactgaggccataggtcatgtacttgagcagatttgcaccctcagattgacgacaaaaatcatacatcaagtaagtcaagagatttgtgccctcagattgacgacagtaatcatagtgtttaggccacaagtcaccttgaacattgttccgcaagtcaccgtatgggtttccggcaaaagatgtgcccttcctccacgtgtcccaaagctgaacataatcctgagctttctctagtaggaacaaagatcggtccaagtgattggtagatttccagagtgggtatttctcatctgcttcacgttgcaaatcttccaccttccatttaa

SEQ ID NO: 42926 - DNA, 657 bp, Arabidopsis thaliana landsberg
aacccacgctcgttggttccctgagaaacccaactttcccggagacaaaactctaaattggtcggagaatcggatttcttcattggaagagagatgggaaataaacagaaaaggagaaaacgtccggctgtagtatacggccgaagaagaatccttccaagaagaacagaccgtggcacagtttagaatgtctctggcgtcgtttaggttgtggaatacagtgttgagaagctccggaagaaactctgaccacgacgaagaaggtagagccattatttacgagggtacagagaaaccggagcttatggaaaaaaagaagagaactgttcttatatagccagtagaaacttgggatccaaggaaccgtggggagcaagtttgactaattaccatactcggcaacttgtgcgtttactttaagctaaaaccaatcgaaagattccaaaatccataaacaagcccattaatattttaagatccaataagtttcatgattcacatagactttcaccagtaagtagaaactggtcaaagtaaaacaaagcctgccaaatttaatctaaagccgattcactaaatccattaatatcacacaatcttatggaaaaccattaaaatcgtcgccactaaaagcagaagagctttaggccattttta

SEQ ID NO: 42927 - DNA, 549 bp, Arabidopsis thaliana landsberg
ctctccgttcagaaatggtaatggtaagacggattttgctgtatagattcataccaacgccatgcaaactatataaatgtgaattttaaacaaattagtaagttaataattatgaacatgattttgtatgtataattattttaaaatattcaaacagtaaacgcaggtcaattgtaaaaaaatatccagatgtaatagacaatttgattcagtttacgattcacttttaagaacatagaatagtactagtagaaacattaatcaacaacaaaaaatacaaaacatttatcatgaacttgaattataatcgaaagaatcaaaccaaacgaaccgaatggaatggaaaggatcttcactagctagaaccaatttgaaatctcggtttcaactgaaataaagttatacagaacatgtggattttgccaaaaagacattaaccaaacgtaagtagacttatcttccattccaccaaaccataaacgggttaatagtcatctgagtccgaatagatcccgacaaggtcccgaggataaagatctgacaacgaca

SEQ ID NO: 42928 - DNA, 834 bp, Arabidopsis thaliana landsberg
  unsure (1)..(834): unsure at all n locations
tccgaacttgggcatggcaaatctagcaactaacactcgtctcctccttttcctgatatatgacattttagcactggaaatctcatttgtagctgtagtttctcttatattagcgcaattaggtgatcctgcactatatcagagtttcgcaagggtggccatggcattagtgtgtttggctatatatttcatgagcttagcattctttgtcgccatggttattgcatagcattctttgtcgccatggttattgcagctgggaatgtaatatggcttagtttcctctttattattttaattttacccttcgtaggtgtgatggttacaatgtttttccctcacttcgtcctacatattcctcgcactcctgctatgtttagcaagtttttagtttctcatgtgggtatagtcgatgacgacgatgatagattaatagtcccaatggcctttatgaagaagaacttgagaacaagtagaagaaaggctagagtgtgggaaggaggaagaagaatcaaagtggcaaagtgtctgatcaagaagtagtggtcctctgtgtgagaaagagggtttaagttttatgcaacgttagaccgttactcttgccgttttataatcagaacattgagtgattgattgtattgtagcggattcacatttctagggtttccttatcaatgaaaattacattcacaaatctccttaatccccttctaatctcttctcttggttaaagatcaagactttacaattaccgatttccctttgtctcatgatcgtctagctttngagtttgattcttcggggtcgtcttaagcgaatagttcaggaagttta

SEQ ID NO: 42929 - DNA, 687 bp, Arabidopsis thaliana landsberg
gattacttgtagtctccacctgtaaatggatcttggttgatagtaggcggttcttcatcagattcagacttagtaagatcttcctcatcactgttattgtataaatacgtttgctcgacatcatctacaatggttttgaaaacaataacttatcacaaattttcagaatgaaaaaatcattaatgtttaaattatacttgccttcagaatattatgtctatattgcatcatcaaattcttcctctaagttccgatactttggatgacttgatttagattttgaagttgtctttccaattatttgatcattgttaacagaaaatgataataatcaaagatggacatatttttgttttccaaattaatgtaaatgtttgtcaataaaatctataaaccaacctttttctgctgctgataaaatataaattctatcgttttccatttgctgagttctaatggttctcattttgcttcagtagtctttgaaaacaaaagaaggagaggtattaattcgtggtggcatggtatgtatttgtgaattgccaataggaataatattttcagcatctgcatgttatattaaatacatgtatataagaaatcgttgaatgtgtgcacaaaatataaataaacatatataggatgatatattcgcatttatcataatgatctgatttataattttat

SEQ ID NO: 42930 - DNA, 851 bp, Arabidopsis thaliana landsberg
tactggcatttggatcgttcttgtcaacctatgtcatatatgtcgattgaaaattcacatatgattcttttctttaaacagaaactgagtgaaaaactaatcacaaacatggaactgatgactacctttgtcttcagcatgcaggaaaaatcatagaaagcaccatagacatcagccattgtctttgtacgatcaatgactttagcagtaagacctaaacaatagatagttgatcagcgatattagccttcagataataaggctagctactacacgttctcaagctcgttgataataaaagataacgggttttcctttctcataaatagaacttagggattggcctacataatttctaaggcttaacatcttacctcgcctcagtttcacaacgcctctgaatacttgttcattgttatagcataatgcaagtgttccaatcgccatgatctaatcaagaaaatacacccaggcaaagcaatattaacttctaaggcattctatattagtgcagacgtagttaaagaggagaatacctaattccatatgaagaggaaaacaatataaacagttctcaatgtgaagtttaaagacttaacaattatgtgatatttcgttctctaacctgagggatggcacagaaccgaaatatggaaggatcacgcaaggaaaccatgtatttcaggcaatcttcaatatgcatcaacgcattggtaaccatttcatttaagcactgtacggatttgtttgtgttctcctcgtttttaaatcctacattacaatttacaaatcaccaaaaaggcactgtcagaaaatagtcaatatgggtaacatcagacctaagatgagag

SEQ ID NO: 42931 - DNA, 239 bp, Arabidopsis thaliana landsberg
tccttgctacctgtccagcgcggggtgagcgcaggcctttcacagccaggcgcggtgcgtgtgtccgcgggcgatgacactgccgacctggaagcgggcgcctcgaccggtgcgccagggagccgcgcactggggacacgccgtcggcatggtctcgacccatgagccgtccggtcgctgcacgaggcggatcatcagtcctccaggtaggtgcgggagaccggcatgggctgatccgc

SEQ ID NO: 42932 - DNA, 212 bp, Arabidopsis thaliana landsberg
catggtgacttatcacttaatttgctgtttcttcttacaatcgtttgtgtaatatactttgtaaccatctatataatcttgtctactttagtcttgagtttcagtattaaggaaccctgttatgtctggtttttgtaaattaattgcgagtgatgatgacacgtggaagagcataaacgatatgtgtcttcttcagagcacatcaaatcaat

SEQ ID NO: 42933 - DNA, 598 bp, Arabidopsis thaliana landsberg
aaaaaaaacaaacaaagaagatgagttacaagttactgacctttatatatacaacaatattccttattagtacgtaaaaaagaataatactgtattttgttaaaacaaattacaatgacaaaagaaaattcacaaaaacgtacttatactcagtttattctaacatatcacgatattttttcgattccattatttctgtttgccatatcgttccagcaactttgagcatacaaaatttaaatgctagaaacaattgaaatttatctcatactattttagattttccaacccaacctaattaaagactattaatcttgaaaagtaaactaacttataacgatacatatatacaccaaacgaacaatttacgaagtcgaagtatgttgcatctttctcagtagtcagtactctacttgttgtgcaaaggatttggacctgtggggatagatcgtttctcttcttcttcctcgtcgccgtccgtctttctccgaaatctagacgatcttcgtctaactttattaaaatttgacatctccgtgatcacaaccttgtgatgattcttgtagtatagtgatcgagcaacgctcaaattacgatt

SEQ ID NO: 42934 - DNA, 686 bp, Arabidopsis thaliana landsberg
aatagaattttataaagaaaaacatagatcaatcgttagctatctaaaatttagaaaataacatgtgtggtctatatttaaagtatagagagcccccaatccttttgtttatcaagtaaactggcgaaatttgttagtatttaacattcgatgaacttaatccctatccttaaaatgcgggattaaattccagttttcgtaaaaacccaaacatagtggcaaggtgaaaatacccaaagttttcatatcatttatagcgcaattgaacatttcttattctacatattggatcaataagattctgcactttcaaattagtgatgatcaaaagaacgctacattacacataagtaggtatcgtccctttaacaactcgtaaaaaggggacatctacaagactactagctagtaaaaactgagaaaataagctatatttgatcatgaaacaaagtgccatgcaagtactaatgtttgggctaaacttattagatcatggaaacaagtcccaccagaccacttagacatgataaattgataagcttttcttactctacccgatgaatcttgttcttgtcttacataaatttaccaaaggtttcttatactcgtaaactttatacattaattttttggtatagagtgaaagttaaaacaccgacacggtatggtataaaccaataatacga

SEQ ID NO: 42935 - DNA, 462 bp, Arabidopsis thaliana landsberg
tacaacagcactctgggctggacactatataaacaagtctctctatcttcttctctacattatcacaaactcgtttgctcttttcatcagttactaaatcataagcggctctcaagttctttagggttttgagttttctcaatctcctacctgattaaggtttgtttctcatagcttttagagagatttgttcttttgttatcgttgtagatctgagattatgttgttttttgatcagctgattaatctggcgtttgttggttcgttttcaggttaatttcttatcttggatcaataacaagagaattctaactccggattgtaatcaatattcctctacatgtaagtctctaatcatgaacgtgttattatgtttttcaattatcaatttttaaggtttgattattagcaatttgttcttccattacatagatctgataatgacatatctggatttgttgg

SEQ ID NO: 42936 - DNA, 742 bp, Arabidopsis thaliana landsberg
gtaaaaatgttgcatagcttgactccgaaaactaatgagagcatgtaaattcttctatatatgtctatataatttgggtaggtaacaatcttttttcctttatatatcaccgtttgatgaatacattgtattctcttctctttgatgaggagaagatgagaattacttctctttttgtcaaaacatttgaagatacaaatacattgaaaaaacaaaaaattaacaaacaaaaaaataaatctgatatatatattgataaacagcaattaagtagcattcttttagaactaaactccaaatctggtgtaaaagacaaagtatgaaagtcttgaacaaccactagactgaaaaaatcgagttaattaatattaatgaattagcatgttcctatctattaagatacaaatagattaaaatagttgacagcttacttttgttgttaaatcgactcgcacgattgtccaagttctgactgacttgcgtaataatctatgcaaataaaaacaaatcggttgtgacattctttatacaaattagtttgtttagtgttatatactgccgtataaagaaccccttagcagagatgagagatcaaaaccaaataaattaaaaagtaaatttattgaaatatgatgaatccaagtttaaatctgatggatctggaggagctaacatcgaatgcaaagcagatacaagaagacgtattggaagagatactaacacttaatgccaacactgaata

SEQ ID NO: 42937 - DNA, 827 bp, Arabidopsis thaliana landsberg
agaagccatccacagcccaataagaaagaagtaaagtgaaccaaatcgttggttttaacctctgaaacgatgaacagaagaaagtgcaaaaagaagaagaagatatgagttctcgaattttatcctccgattcggtaatcttcttacgtttctctgtacttactggagataaaaaaaatcgaaaattctcatcttttaagtcaattttgttactttctttcgaaagtttggtgattgttttgatgtgataacgcaggacgacgttgatgaagaaaacccgaaaactcacgagaatggtccaattggaggaaagactcaaaatttagggcaaagcaagggaggtgacagtgataatgttgtaaagactaatacttgtttcgtgtgtgatgggaaagacaattgggttttggtatgttacggagaggaatgtactatagctattcatcagagttgtgcatctgatgaacctgatttcgatgaatttggaaatttctattgtccttattgttggtataagcgtgtagttgtcaagtgtttggagttagggaagaagcttatgctgactgacaagtctaggaagggatgtagagagagtttaggaggagtagatgtgggtttaatgatggagaaagaagctggaggtgttgagaatgtagtggaggttaatgtttctggagcaagtggtatggttagtgggaagagaagggaaggcgatggattaaacaataaatggatagtgaccgtgaagagtcagaaaatgcagaaagtttttgttgtaactcattctcgggaaaattataaggctgataatattgattcggaaaaag

SEQ ID NO: 42938 - DNA, 544 bp, Arabidopsis thaliana landsberg
atagaaccgcaggggcgccattgaaaagctgataagtatatgaaatgatattgcaacatgataactcaaatcatcgaaatctagttccaaactcttattcaaggcacatacataaaaaccgttccttttcaatcgggttttttgctatagctaagcctaatttgattctgatattcttcagctaagaatgcataacttttaagtgttaaagatcaaatctttttaccctatgaacaccgcgaaatccccaacctttacgaggatcaactccatgaggttgaagctcaggcctttctgtaacattttcttcaaaatcttcttctacaccttcatcgataggaccagtagagaacaacgacttagagcctctctcagcacttattgctacacatcaaagtaacacaagaagaaacaaatgatagtcttctgagaaaaaggcagaatatttaggtgatacgaaagaagaattacctaaaggagatattgaagaggatctgagaaccttggagactctaatggcgagtgagttcattctgggacgact

SEQ ID NO: 42939 - DNA, 136 bp, Arabidopsis thaliana landsberg
ggcgggctttctcttgcctgtcgtgcgccgcccacgcctctgtcactgcggcgtctagatggtgaggggaggcctgaagatgggatgagcggagaccactgaatgtgctaggcaaagctgtctataggctgatgca

SEQ ID NO: 42940 - DNA, 535 bp, Arabidopsis thaliana landsberg
gaaaaaaaaaatctggactgtgagtaaattccatccatgtgagagttattattgttttccaattcatcttcctacgaaatttcgaagaaatataataaattgcgttctcttctttaacacatgattcaaatattcacagcgtagttaataattgaataaaccacaagttaaaataaaataaccttttaatcggttgccgtgtagagcccttgacagtcatcgtttcgtttggataaaatcgcaaacttctacgaaatttccaagggcatttccgtaatttcgtagaaaacggtgaccaaaagaaattaacacgaggaggctgaagtctatgtctatcccattgaccttcaccaatatataaagaagcaaaacccaaagcttaaaagaatcttaaaaccaaaaacaaagtttcatttcttcttcttcttgaaatggcgacgagcaagtgctactatccacggccaagccaccgtttcttaccactgaccaacacgtcaccgccttttccgatttcgagctagacgaatgggatctt

SEQ ID NO: 42941 - DNA, 944 bp, Arabidopsis thaliana landsberg
actagagaattgttacaaccttcatgttcacgaggatcttgtttctttttgttgaaccaacacatcaaaatgggtcactgtccactcagcagggggttgtctattgctaacatatatatctgtaacaacattgatcgatgtccacattcgctttgctggtttggttcccgggtactcctgtctacaaagacagattagtttaatgctaagtccaagtcttaagatatgtgcacataatcattataacctggtagaagtagagacggcttgatagagctccattgacctcccaagttcttgaatcaccaatccaaccatttccttgcttaattctcgggataaaattggctgtttggtcctgtggtgggtttataatgttgtagagaacattatagagacaaagaagtaaactaaaattggattctacaaactttaaaagactatttataaaccaagtctcagtaacttcttgtacacgcaactcgtaatggtatgacgtatgaacacaatgattctcatgcttcatgagctcgtttcgtatagaatcgcaaaataaaacgacgcaagtaactactgatcgtcgagcaatacctgcgaggatcatgcaagagagatcggcgcaatctgctagtctagggttttccattgaaggagctttgttcttaacgttatttcagagatgacaaacttctgatacgaatcttcatccctctgtctactaacgctgagacatatctctatgccgcgcagttttgaacggaggaagaataactctccggttggagaagcatatcaagcaacagtgaaatcgcgtgcattgaaggagcaaacttaatagcgcgtgaagttgaaggaatggtttatgctgcgtgagtggagaaattcgcgcgtgatttattgcagataacaggtaagatgtctcattctggaaaatcagaatgatt

SEQ ID NO: 42942 - DNA, 551 bp, Arabidopsis thaliana landsberg
tatattacctcgttatatgtttcttctcttctttttcttttctcttaggagaattgattaactgtataaatattcagataagtggtggaccattgaacataatatacgtatccaaacatgttattcaggattgttgcatgtaataaaactatatagttgagagaaagataaaccgtccccacatacatttttttgtcttaaatttttcctttatataaccgataatagttatctatcgaatttagattctcacctagagcaaacaaaaatacgtttgtttttgaacgatcgaatgttttggccaaatattcgatctagttacgaaaaaatccaatggttgtgtaaattttatgaccatcaatcagtagtgattaaatatatcaatggaaatatttgtatttttatgtgaaaatgatattttatatttaaataagacaactttctcttagataatcaagttttctcagccaaaattcaaactaattaattacaaaatatatatacgatgggtatgtgaatttgtgagtatcaattcaagtgatcatgaaatc

SEQ ID NO: 42943 - DNA, 388 bp, Arabidopsis thaliana landsberg
  unsure (1)..(388): unsure at all n locations
actaccgcacgcggcgcgttctccgggatgtattgcttttctactgagctctgacccttgagcagccagatcagatggccgacctgctcgtaccagttcttcctcgctgaccgcgcgctggggcgaagacagcatggcaacggccgcaaggcnnnnnnnnnnnnnnnnnnnnnnnnnnnnnnnnnnnnnnnnnnnnnnnncggcgagttgcgcaacaaagggcttgagtcccttgatggcgtcatcgctgttctggatctgctcgcgccaattcggcagatgcttgtcagcgtaggcctgaagatccagcggttcgacgaaattgatgtaggccttgccaaaggatttgacgaggatcttgctggccttgagcaggccctgcaccgac

SEQ ID NO: 42944 - DNA, 447 bp, Arabidopsis thaliana landsberg
ctgactttttatcatctgtttttcggtttatctttttcaatatttttacaccattttgaataagaaccaagtgtggcttctattattccttttaaaatccgacgtggcaaaaccaaggggaggtgagaaaatctttaaaacgccactagaaaggggaatcaaaaagagcgtgaaaaagatctcaaaatgcccactttcttcacaaacatgtggctctcctatgtctacatgtctctctctctattctgacgtgtgattgtctctcttcctctctcccttctaatgcactatctatcgtcattaataccaacctcaagccccttgctttctcttcatgctctttttttctttcctccgatcttcatagagaaaaaaaacagaggaaaccatttattagaccttcatatctctagaagtttcataagtagttatgtctaaatctagaga

SEQ ID NO: 42945 - DNA, 546 bp, Arabidopsis thaliana landsberg
  unsure (1)..(546): unsure at all n locations
aaaacaatctcaccaacaggctgatttcgaatatcaccctctcactgggcgtgactgcctatcaggctggagaaacaacagacagcttcctgaaccgcgctgaccaggcgctttacctgtcgaaagccaagggtcgcaaccgtgtcaccacgctgaccgaagaactggcagcggcatagcaaacgcttatcctgtttagtcaaacagccagtagcaggatagcaacggaaaaccagcataagcctttccggcattcccttcataagcggcagcgaataacgcgggcgcagtcatcgctgtgcttatttgctacgcaaccactcatcaagctgctttaaccgcactggcgnnnnnnnnnnnnnnnnnnnnnnnnnnnnnnnnnnnnnnnnnnnnnnnnnnnnnnnnnnnnnnncgcgcaataacggtgccagtttcgctgcttccccgcgcgcaatattccggaatagctcaggatgataaatcccgacaccgggcaaagtgagcgtatgcctacccgcttcctgtaccaggccatcagacagggca

SEQ ID NO: 42946 - DNA, 530 bp, Arabidopsis thaliana landsberg
atgctccgctcccacgccgaagcggaagacgcggtgcaggaaacctggctgcgctgtaacggcatcaatgccgaagaagtcgagagtgcgcgcgcctggctgacgcgcacactgacgcgcctgtgcctggaccgtctcaaatcggcgcaggcgcagcgcgaagtctatgtcgggccctggctgccggagccgctggtggagacagcggggctgcacgccgatgatgccggcgccgccaccgaactggccagcgatctgtcctacgcctttctgctggcgctggagcgcctgagtccggcggaacgcgcggccttcctcctgcacgatgtattcgacatggattacagcggcatcgccagcgcgctggagcgtagcgaggcgtcctgtcgtcagctggccgcgcgggcgcgcgagcgcgttcgccaggaacgtccgcgtttcaccgccaccaccgagcagcgcatgcggctgacgcagatgttcctgctgacggcgcgaaccggcaatgtcgaagcgttgagccggatgct

SEQ ID NO: 42947 - DNA, 474 bp, Arabidopsis thaliana landsberg
agatcttgtggctgctgatatgtaaagtgacagctcttgtaatgggtttgtttttggatacctattactaaagaatgtcagagttattcttatggttaagagtttttaatttgaaatcttaatgttaatcaatcacttgtgtggtaatgaaaatgtggagttttataatgtgattaaagaagagaaagattatgcctttccattggatatgaagaaaaggaagaaactttgcaaagcgatgcgatcccttattccttctttattctcttacacgaagtctttgtctggtaatcatcacgaggaaaagagacaaaacccatttcccggacaaaagcatcatcttaaaatgacgattatgtccattcacattctcttaacttagggatattcaagtaaagtaatcatgattagtgggataaactaatgtaaacaaaggaatcttcaccaagcacacagccacttgataaggacttg

SEQ ID NO: 42948 - DNA, 178 bp, Arabidopsis thaliana landsberg
agcacaaattccatacatatttttttatagaggaaataaacaacaccatcatctgtgttgtgaagaatcctcacttgctacttgggcttaaaatcctggtttgcttgatactttcataccgcaaatggatggtctggtcaacacatacaccaatttgtgctgtggagatgaccatgga

SEQ ID NO: 42949 - DNA, 546 bp, Arabidopsis thaliana landsberg
  unsure (1)..(546): unsure at all n locations
ataaaggagacgctgtttctctattctgctattattgtttatatcattctttttccaacgagtttatagaattacaggtaaaaaattatcgcaagtttcttaatgatgtcatcaataattcaatttcatgggtttataatgtcaaaaatctcaaaatcacatgataatggtcatgtataccaatcttgaacttgaaatattttcacattatgtgcttttataaagtttaattttgaagcttaattagatcttttatcaaacgaataaattccaatcttgttccataggagaaactttattcatctatcacatgcattatatacccttgtctatatctttatgatcatttgctactagtttcttttgtatatatattgtgggttgattagtaaaatactagatactgaaaccagaacttttggcaaacaaaacatagaacattgaagtagcatccggagagaggagattgttggtgggcttcttcaatcttggcaataggaaggacgcatagtnnttcaggtatcgagttntacgaaaggataatcg

SEQ ID NO: 42950 - DNA, 632 bp, Arabidopsis thaliana landsberg
  unsure (1)..(632): unsure at all n locations
tgaagcgnnnnnnnnnnnnnnnnnnnnnnnnnnnnnnnnnnnnnnnnnnnnnnnnnnnnnnnnnnnnnnnnnnnnnnnnnnnnnnnnnnnnnnnnnnnnnnnnnnnnnnnnnnnnnnnnnnnnnnnnnnnnnnnnnnnnnnnnnnnnnnnnnnnnnnnnnnnnnnnnnnnnnnnnnnnnnnnnnnnnnnnnnnnnnnnnnnnnnnnnnnnnnnnnnnnnnnnnnnnnnnnnnnnnnnnnnnnnnnnnnnnnnnnnnnnnnnnnnnnnnnnnnnnnnnnnnnnnnnnnnnnnnnnnnnnctggcgcgcggtctccagcaccgtggtcatcgccgggctgtgggattcgagctgctcggcctggctggcctgggcgccctccagggccttcaggcgtgcggtgagctggcgcacctccaactgcttggccgcggccaggcgcagctgctcggggctgcagggcttgaccaggtagtcggcggcgccggcctgcatggcgttcacggcggtgtccacggcggaatgcgcggtgacgatcaccacgcgcatccagggcgcctgcaggcgcatctgggccagcacgtccaggccgttgtccttcgccaggcgcaggtcgaggaagcacaggtcgaag

SEQ ID NO: 42951 - DNA, 570 bp, Arabidopsis thaliana landsberg
aaaaattctctccggaagaaagcccaaacaccccggaaaaagttttatagcattgtaaggttcaggttgggctttaaaatataagctcaaaatttttacgggtcagactccaatatatactgattttgcaggcttcgtgttgttcctggcccagctagtccgatggacatacctagctgtagataaagtgattttagggtttttgtgtcgttgaagaagataaagaaaatcacgattttgccctttattaaagggaaatataaaataaaaaataaatgtaattacctaaaatctgtaacactataaccaacatgactttggctactttctcgcagtatttactatatatttttatattttggatagtttttcctgctaatattgtatatcggataaatccaaaccaaactgaacacgatccaaatccgacccaaatattagaaataatcgaacgtgtattattaacctaaacctgaaaactcgaatcgaatccaaatgtagttggtatagcaaagcaaacagttatgattcaattttcaaaatttgtgaaattataaattatcgagttgt

SEQ ID NO: 42952 - DNA, 613 bp, Arabidopsis thaliana landsberg
agcttgtgccctgcacatcagggggcttgcaaccatgggcgctgctgcgccccattgctgacaatatatgaaccatacgtgtgtgcacatgctgcgttgcctcgatgactcaaggatgcgaggcaaaatcagtgacgggctgtttttgcgattgtgtgcgaagctatctcctggatcgcagcgtgtgcctagctgtcatggttgtgttttgctcaatcataaacgagcagcaccgtgaccgcaagatctatgcccctctgcggccctggcggcgttgctgcttcgcttggcagcacgaccgcggtctcccctatttgggcgcagtacgttattttaaggaagaaggactatcaaatgcagtaggctcttgatagtctgtctagttaagggcgctgctccctggctttctttcaaaacgtgtagtcctctcctccgctctcattcccggccctgcatgtctacttgctgcagcagcgtcctccaccattccctgagactgactgacactctgcttgctgctgcgcccgctcgcgccctgcctgctgcgtcccgtcctccgcacagtttgagaaggacgacgacgccaacttccacatggacatgatcgcgggtc

SEQ ID NO: 42953 - DNA, 674 bp, Arabidopsis thaliana landsberg
  unsure (1)..(674): unsure at all n locations
tttttttcttttggattagaagaaatgtaagatatgtaataatacaaaacaaatcatgtgatataaacgttactcagagaaatgctcatccttatcatgcagccatactatagtgactctatgctctcctttaggttgcacaacaaaatctgctctgttgctactacctgcaaagattttaccataaaacaacgtcattaaccaagcaaaattgtctgagagtagtagcccacaactgaataaaaactacataaaagagaagaaaaatatcatcggagatttttaatattcattcgaaaattaatatcagagttgcacaatatattaatgggatatggaagagaaagaaaaggagatcaatgtgcaaaaacacaacaaagagtgatgtgaatatataaacaaaatttacatcacaaattcacaataacaacgagaaaagaagaagaagcagcaaactaacataacatggaaaatcaagaaggaaacaagacatactagaagccgccatgttttgatgagaagaacgtgactactcttttttctatactcagcagtttgttgttctatattttaagagaaagtttgtaaaaccagtgatggtgaaaatatgtgacgaataatgtgtatttatacacccaaaaaagcanacacatgatgtgagagagagaatattc

SEQ ID NO: 42954 - DNA, 696 bp, Arabidopsis thaliana landsberg
  unsure (1)..(696): unsure at all n locations
agaataaaataagagattgagaagagaagcaaaatacatatgtgaaacactaaatacaaaacacttttttattgtcaaagaaacagaactactaccctatagggaatggttctcattagatcccattgcacgtgtaatagtgcaaaactataataatagtaatataaataaattaaattaacaacaattagtgatttgtgctaatgttggcactgcatcactcactacccatacataaaatccgcagaacttaatcttaagaaatactgtatatttttcctctgtacgtagatgaatcttgattgttttcgtcaccgtcaatccgtcatccagctgccggaaacggtgatgatgttaagatggatcgtttttaggaaatatgaaatccatgttggttccgaccccgccgctaccaaacataacatcagccatgtcaacgacagcaagaccgtagtcaacagaatgaccagtggtgacggatgagattggaatggtacttggagtggcagaggatgcggttggagcggttgaagttgtagcaaggtgtgtgagccacggtatgtgacccgnaaggtgaaaggatcggtcgttaaagcgttggacttgtttcttggccgggcaattgtatagcttttggtgggtgcacctatagtacgccctgcaaaataagaattaataatcttacatctatatgat

SEQ ID NO: 42955 - DNA, 563 bp, Arabidopsis thaliana landsberg
atcgggaagcgaaggtcatcaaacggccacttggactccgatgagaaaatttcaagtgggctgcttgttggcttttagtataatattgaccacaaattatttatatgctttttagttataatatgcagatattgtatctatataatactccatgaatagtatacatatgagtgtgtttctttttgttaaatatccaaggaagagtgcataatcattttggaaccatttatgtttaaataataaaatttatgatatatatactgtatcaaaataactatgtgttattagagaaaatgaagatatagtcattaagttaggtaatttaatatgtacaatattttaagaatatcatgtcattttataaatttatattattttaaaccaaactaaattgctttagtttctgttgaaactgcgtactatttaaactgcgtactatttaaatttgtttttctaaaaacttctttgatcgaattagctttcccgaggttctagtaccattctaaaaattgtgtactagaatctacaaatagcatattaaactttaaattttcttgaactag

SEQ ID NO: 42956 - DNA, 655 bp, Arabidopsis thaliana landsberg
actttgatcctgcacgttctttggtaacctcttgtcttttctcagtttcctctctttcttgctctctatccactggttttttgtcacgtaggcttttaaagaacaatccttcattcctgtctacttgaatcttctcctcaaactcagccaacttattatcgttctcctcgatctctaatctgttcaatcccgcagattcctcaaaagcttgcatcttgctttcgatattctccagtatctgctcaatcacccggaaagaaaaacaatatcagcttatctatcgttctgttcctgcaatatcatcgagcaaatcacaatatctgaaagcttctgagttcacttgatctagagagtaaagacaattcataaggatcaaactgcatcagagaattaaggtaagccattgaaacaagacattctactgttctaaaactgtattgtgcacaggttaagactatttccatatgatacgagatttcaaaatgttatcgttttcaactgatacatacccttgtgctagcttcgtcaaggtctttcatggcgtcttctccaaccttgtcaaactccgcattggcttcttcagcaaacttggtgagatactctgatctctcgtccaagaaatccgtcaaacggaccttcgatgtctgaatctcta

SEQ ID NO: 42957 - DNA, 702 bp, Arabidopsis thaliana landsberg
taccggagttttccaaagccaaatcatgggatttagttttctcaagttatacgaacttggaccgaatagcctagtaaatatataatattaataaactaaacacaaatttaatatctttgggggataagaattatctagatgacttgcatactttgcatggagcactatatatagaagaatgttaacacatgatcctaccgacattaatgtttactaatcagaaaatcaaaaggacaattggaaaagattaatagcaaatgggttctttaatgtcaggatgggactctcgagtaagggatcccaaatcaggtaactaatatcatcatgtatattatattttggattaatattcatgcatgtatgagattatattgtatgtttgattatacaatagaaactaaaagatgatttttaacataaattcagtgagaaggtgcaagtcgctcacaagagaagaaatcgacactttttggaaaacgaagaagaagaatgaagaagaagaacatgttcaagccttttccaagttggtaactcaggttaaaaccaaactttaaatttatttatttcttatttcccaaggaaagagacaatatttctactatcagtgatcttagtgaaaatcagagttcgactttaaaatttaccaaaaattattaaaatgatctaaaaaaggctttgaaattgtttgcaggaaggtgcaca

SEQ ID NO: 42958 - DNA, 668 bp, Arabidopsis thaliana landsberg
agagtttggatcaaagaactaaaacatccactcttgattcatggatgatgaaaagttgtggaaagttgtgttgaaagattccatcttcgaaacgactcatttgtcttcaaaacctgttttcacacgaagcttctcaacaaaaacttcttcttcttcttcaaaacccgttttcacaagaagtttctcaactaaacccacttcgtattcttcatcagagcccatctttagacgaagtttctctgcaaaacccatttcttcgaaatctccgtttctgtctagaagcggttccacaaaataccctgttgatacatcgtctacttccaagtgttccatctctcggagcttgtctcagaaaggagcttcggtgacccgaaagtgtcgtaatatggccaaggaacacaagtctcggctttacatcatgaaacgttgcgttctgatgctcgtttgttggcacaaacatgcctgtgattcgtgaagaaagatgcataattaggttatttaattgcagattcactctttttttcttttcattttttacccatctgatcatttttttcttttagtcttctgaattactgaaatactccctccatcttaattaaatgaatctttgtttatttatttatttacaagtgatgtttcacattttaaaacaaatggaagaaaaa

SEQ ID NO: 42959 - DNA, 516 bp, Arabidopsis thaliana landsberg
tgcggattagtggatgacccgtggatggttctcgagaagcttccaaacttgaagattcttcaactgtttgaaggatcatttgtaggtagtaagctttgttgttccaagaatggttttcctcaactgcattctttgacattgtcacagcttgagaatctagaggagtggactgtagaagacggtgccatgatgcgtcttgtcaccgtggagctaaagtgttgtaacaaactgaagtcagttcctgaaggaacgagattcctaaaaaatctacaagaagtagagattgggaacatgacaaaggcatttaaggacaagctaatctctggtggtgaagatttctacaaggttcaacatgtgccttgtgttgtttttgagaactgtgaactttaagaatttgggtgttacaggtgtatatgatcttgttaaagatttttcccttttaggttaaaaacataaaagtttgatattcggtgtagtcttctaaataagacgttctttgtttcaattttaaattct

SEQ ID NO: 42960 - DNA, 569 bp, Arabidopsis thaliana landsberg
atattaaaatctctgatcatcaactgtgataacattggtgcaatctatccactttcgaatccaatttttcatctttgaatgaactatgttgtcattgattttttattttatcagaggtacttgtatgaggtggtttatgtctttacagaagatcagcttgattttgctttaaccaagtcgcgacccactctagggacatttgttttttaggtctagctagggccaagttcatttcttcatagtaacaatattagaagaaccgtacctattgaaatcattagattatatgtttacttgttctaatacactaatcacatatcccatgtagatgtaacatcagtgtatttatgctttggattttttaatcatgaatataggagtcactcattttcttacatatagtaaatatcctttggtacaaattattaataaattaatttctaaacatatctgttcagaatttgaacatatttggataatgtttccagtttaaaaatctgtgattcttatgttcccagtatttaaaatgtgttggcaacaaaatcaacagcagagtcacaactttgtct

SEQ ID NO: 42961 - DNA, 146 bp, Arabidopsis thaliana landsberg
atttttgcgatcgctcaggacaccctttatggctgctagaatgtctttcttagttcacgatccctacaactaatactaactgcaatcatagaattagtaaatcgggtctgccccaaatggctttggactaacgtgatgaacttata

SEQ ID NO: 42962 - DNA, 428 bp, Arabidopsis thaliana landsberg
ctagaccgcgggccatgcctgcaggcacgccgcggcacacgacgacttcccgctccccttcacgtccttggcataccagtacacggtccggccgctcgcggtcgcgaggacgtagcccgctgatgttttctccacgagcagttccgtcttcgccgggatcatcgggccgccgcccgccgtcgacgccgacgccgaccccgacgccgacggtgacgcggacatcgaagaactcgccccgtacgcggcgcccgcgaccgggccggtggtgccgcatgcggcgacggagagcacactcagcggaagcagcgcgatcagcgcccgccggatcgtacgcatcaggtcgtccccaatctcgtcgcaccagttttcaacaggcgacgatacggagggacggcggcggatgtgagccgtttcgggttatggatcgc

SEQ ID NO: 42963 - DNA, 644 bp, Arabidopsis thaliana landsberg
aagaagttccttcgctgcagcctgcgctttgcctccttgagttcataagaggcgacacagggctcacagctaggtgagttcctgaatttgatatcccattttgaggtttctcttttgataaccggtaggcctctgactgtcctttgattaaatgcaatccagcagctacacttcgatcaccctgactacacgcggactttgacaaatttgtagtctccagatgggctttaatcttggatattatgatttcatgaattgtgggtcgaagtttttggctgcaagcgaacacaaaatcataactaagaaaagttcacaatttctaagccggaatgtgctaatttccatcaagtggaaaactactgtgctgcatcggttatccatttatctttaaattcaagaatgataaaggttcagtcccaaaaattacacatatacatttagtatctagtgatgacatgggtgacaagttaactaaagaaatgaggccatctgctagcgatctaacactaacagatattaaaggagttattaatctataactatatccagctgtgaaacagaaacagtagcatttataaaaccatttaaaaaaatgaaaataattagaaagccaaccatgtgatagcaccagcagctccaacttt

SEQ ID NO: 42964 - DNA, 707 bp, Arabidopsis thaliana landsberg
tgaagttatgcatgtcaataacagcttgcactgcatctccaatagccgtaggacagtacaatgcatatcgaggaacgagatcagccacaaggcgcttaacgctagtacaacctgcaagtataagcaactaactaaatcattactccaacaaacttcaatctaaggcttctattcttttaacaaaaattactctaggaggtgtccaaagattagaatcataatgctagagctaatgaatctgtaaccctaatattcacttaattcagttaagaagtattctttctcatacaaagttatctaaaaccacaaaactcaatttcaggaaaaaaaaaaaaaatgagctcaatcaactccggaaaatggcagattctcaatcatccaattgatagaactaaatcgagctaagaatgagagaaaataaacctctggaagcggagatgagggagcgatacgcttgctcaagattcgcagagcggccgccaccatctttctgagcaacacaagatttaagacgcttatagcagtcatgcactcttcgaatctcttctctgttcctacttctcgtttgaatttcctcctgagatggaggcgacggtgtcaccggagccgggaacgagcttaccaccgtagaaggggattgggattctagttgcggtggtggcggaaggtgaaattcagggattgactcatacagacgacgctttttg

SEQ ID NO: 42965 - DNA, 766 bp, Arabidopsis thaliana landsberg
aatattcaaaagaacaagattcgtaataacacaaaaagttttagatgaaaagaggattataacgtgaagtcttggttatataatgaaagttgtcgagtgtaaatccatcattaattaatggtgctcgagcgtttcgtttgtgtaaatgcaatgtatcttgtttatgcttttcttttgagtacgtggacatatatgcatgcgttacgtaaaacttctgattgacttttcttcaaggtttatactacataggaagttccgaaaaggccaaaatttgctccttgttgaggtgtgaaccgaacctaaatttatcaactcgaaaaacgaatcgaatttgaataatagaattggtttctggtcttttgtttgataatttgtagaaactttaaaaaactagattcccattactttatcttgaatgataaaaaaaaaaaaaccattgtagaaatttacaaacattcaagggcttaagctaattacttgtgaaactcaatcactatgtcgcaataaaattgtctcgtgctttacttgggaaatgtttactacagtctacatatacatatatgaatatagaaacaaaggaaattcttctatgttcgatgttcatgatgtatagcattcatataaatgttaaacatcagtttatggcctgagttaaataacgcgtgaaatcttgttggcttataaacataattgagttgaaggagaaaaaatggtaacagactgctttccaatgcattgtttgggattgcgtggtttctattattct

SEQ ID NO: 42966 - DNA, 799 bp, Arabidopsis thaliana landsberg
gaatcctgaattccacattcatcaacgacagaaacatgaaattaggtgggaattgagaatctaactagagacttaccttagggtcatgaataaagctatgaccagacctcgcgttcggtggcaactctccggtacaagacacctttaaacactctataatcgtctgcaaaaatcacgaaatagccacaaacttttcaattacggaggcgaagaaatgggagtgaactgaggagaagagaaaaggtttaaagaactttacagtttttccggctccgttagcgccgacgattagggttaaaggtctgaagaaagtaacaacgttcttattttctgggtcgaagcttcttatacccttgatcaacattttatcgaccgtactcatcttttaccttcagcgattacagatatgaaaaagtggaggtgataagttacggagaaaattttggtgacacaggaaggttaaacccataaacgagaagggttttgcgggaaaatcatgaaaactcgacaatggaagaagaaggaactggaaattggaaaaagaagacgaattgaatcgcgagagaccggtttataaacagaatcgaattgaaccggtgtagtattcgattgagaacctccggtcgtatacagtttcttccttttggggttagattagaagcgtactaaaatattttgagtattttgaaaacaactacaatttcagggacttatcttttatttaatacaaaatagaaccaatgcaatcaaaagtcaaaacctttgccaaccgatctacactatcgctatttccttaaac

SEQ ID NO: 42967 - DNA, 2360 bp, Arabidopsis thaliana landsberg
tttttataaaatgattgagagcgttggagaaatccgagaatttgtgcacaaatagatgagtgaggttctttgtacaaatgggtttgatttgggctggagcttgggctttagctcgaaactgaaaacaaatagctatttcattgtgtgaatataaaagatgttatgcattagaaccgatatatcaccaaatacgatttgcttaattttatactgcataatccgatccctatcttaaaggaaaaaagattacacgaaccacgtaattttgaggtgtccctttcaggggaaatttgacgtcgggtgaccttcaatatatcggtttcatgattgatctctaatgttgtgtggatacgaatattttcaacatgcaaaaacttttatacgtgcgttttggactatcaagctattaatctgtttttaccggactgtcaatccaaagatttacggcggtgaaagacgtcacttcatacgtgtcctgcgttcgaacatcctggatacccaaatttttgacatttttaaacaaacaaaaacgtatagatagagaggaaaaacaaattcaatcgatctttataaaacaacaagagactatacatatggttcattgatgtgtcacttaaaaggacacatcaagtttttttttaaaagcctaaaggacacatcaagttaggcaaaataattgaagatagctagataaaataaatatttctaatggttgtttctttttctcataatcaattttttcatatgaaaccaagaaacgtatacagaaaaagaaaatactccttatcctttgatcttcagctgtctctgtatttggaaattgagagttcatatcttggcccatgtaataaaacaaacaaaacaaaatgcatttcatgattttcttacaaaaaactaaaatatcagccctagaaatgttttcattgtaatggttagaagaattgttaagtaatactttttcatataattggacaatattttttgtcaaatcaaatatcagccctagaaatataaaaaatgagttccccctaacgacgacttcttttctttatacagtcatttgtcttggtcacaagccacgtagaagttagtgatgtacatcgattattcaattttgtttgttacgaaaaatctcaaaaccggaagaaatattttcttgtggtcatgaaaatttcaaaagactatcgtaatgactaatgaagcagccacagccatatgtaaataacttgtattaatttttcaagattctaacaaaattatcataattttcgttgacactaaacctcatatattacatataatcagttgttatcaaaaatctgtaagagaatatcaagaatatataaaatctgattatgtagtacatacattctgctagtagcattgttatattagctagacaattatgacctaacaaagatttgttattttaaatttgaagtggaggctcgtgtagagtgtatgacactgaaaccaaatataataatcaaataacaccacgtcggttcgaacccaaggctagaatcaattcaagacaattggtcgcctcgtcatcaaaggatcgatcctgttaaagaacaacatccacaattattaccacgtcgggcggttccgtacaaaaaacgtggcaccaaatgggccccaatatgggcccggacaagttgatagaatatccactgcacgttaagtataatccttcggtatatgcgaatatgccatttccctccatattgacctctaaacttacgtaactacccttcttatgttttccaaaacttctgaggtaatgtgtgtgggccaagatgagaactcgttgtgttgactaaaatgcccttatcacaccaactttgtgtagttccatgattttgagaagtttcagagtcgtcagagttgaagaacggcgtggcacgtgggcggccatgcccatgagtgttggtttggatggcgttttgcagctcccagtacatcatgcgatgatcacatcctaccatatccatattctaaaagtaacttatatatattcatcaaaacttttagggataatatttttccaatttgaattccaattgttttataacagacgtacatcaaagttttttctttgataaagacctcttacatcaaagttcaaactaaatatttagattatttgtccgccactgataatttgtgaatgatcaggtatttttactattggaaacgtattcaatggacacacttaatttaaatgattaattgatgttttcattgttaaaatgtgatttactctaagccacttttgatcacgaaaaaaacttttcataaattttagcaaaaactaagaaatatacttatatgaaaatagtattaacacaatggct

SEQ ID NO: 42968 - DNA, 1142 bp, Arabidopsis thaliana landsberg
  unsure (1)..(1142): unsure at all n locations
atatcttgctcgacggcttcttctttggttcctctcttgtctcctggtgtctgtaacataagcctaatcattgagagtcttatgaaaattggagagtctggtttggccaagaaggtacttcgtnnnnnnnnnnnnnnnnnnnnnnnnnnntggaacttgatgattggtggttatgttagaaatgtccagtatgaagaagctctgaaagctcttaagaatatgcttagttttactgatattaaaccgaataagttcagttttgcttcctctttagctgcttgtgcccgtcttggagatctgcaccatgcgaagtgggtgcactctctgatgattgatagtgggattgagcttaatgcaatattgtcttctgcacttgttgatgtgtatgcaaagtgtggagatataggaacttcgagggaggttttctatagtgttaaacggaacgatgtgtcgatttggaacgcgatgatcacgggttttgctactcatgggctagccacagaagcaatcagagtgttttcagagatggaagcggaacatgtttcaccagattctataacattcctcgggcttttaacaacgtgtagccattgcggtttgcttgaagaagggaaagagtactttggtctaatgagtcgccgcttttctatacagccaaagttagagcactatggtgctatggttgatctgctaggccgagcaggaagagtaaaagaagcgtacgagttgatcgaatcaatgccgatagagccagatgtagtgatatggaggtctcttcttagttcctctagaacttataagaatcctgagctaggagaaatcgcgatacagaatctttcaaaagcaaagagcggagactatgtgttgctttcgaacatatatagctccacgaagaaatgggagagcgctcaaaaggtcagagagttgatgagtaaggaaggaatccgtaaagcgaaaggaaagagttggttggaatttggagggatgatacatcggtttaaggcaggagatacatctcatatagaaacaaaagctatatacaaagtattagaaggtttgatacagaaaactaagtctcaaggatttgtgtctgacacggatttggtgttgatggatgtctctgaagaagagaaagaatagaa

SEQ ID NO: 42969 - DNA, 1099 bp, Arabidopsis thaliana landsberg
ttaagacaaatctctatatatatgtatttcttcaatggaaaaagaaaagttcagaagagtaccacgatcttggttattgaacccgtgaatctagaagaataaaagaaaagacatcaaagctgaaacttcacaaggataaaaggagcgttgttgtacccaatgagccactagtgagtaatattttccaatatttatataacatagacaaaaagagaaagtaaatagtactagaatttttgtaaaacaatgataattctgaaatgttaacgtaacacgtataaccgaacttctgtccacttggtaaaccatatagtcatatacagtgaatctttatagtactgaaatgcgtcaaaaaaaggaaaataagaaaggaaaaaacaaagaagcagagggaaggggtcgatgtttcggaccacaaatcgaaaccaagaaaattgtcgtaaccaagcggggactctccaactgtctcaactgactcacatgctctcctaatacttcatgcgtttctcaacttctacattttaagttttaatttctaacattctttgaactttgagatctagatgagtttcaattttacaattttccatttttttgggagatcattagtccattacatataatacttattattgcacccatgtatatatttaactcacccaaagtcaagaatatatacggattataactggatgtttgtatgttttcaaaaccaaatattcatgtatcttatcgattaaaatattaacatattctaactaattaagtactcacgttaccatctttgtgagttggtatcgtacgtggtccatttctttaaaagagttatcatttttttttggatttatagctaaaagtttctatcaacaaatttttataaaaaaagctaaaagttttcatttaaatcagcaagatgtgcagctgaaagttagataaattatgcaacaagataacttttaatctttttgatataattaaatagctccaagttgcaggagtagcctaccaaaattaaatttgcaaattaacttcctgcgttcagctatcccagagaggctattatattcactcacatgggtttgtcgtattctatgcgtcc

SEQ ID NO: 42970 - DNA, 515 bp, Arabidopsis thaliana landsberg
cgagtggtcttacgtcggataaatcacattcaacatcgtttccaagcagatctagttatgagatttcaatcaaacaggagtcacaaggaactgcacaagacctgattcaaaagaatacgcttcctctactaattctactaaaaatcaaactattcagtcaagtaaacaaagtggaagaacggtggagtgtacccgtccattgtggaatcgacaactggtttggcacatgaaaggtctaagcttttctctgttacttccataaatcgccgctttacctatagaatacttggcaaccacttgcttcaacattatatctgcaaccacctacagaaaaattcagtcactaggaataatagtgctcataaagacgttctatgttctatgatctagctaactgctaaaactaaattaaaccggaggtcactagtcaataaggatagtagctttgtcacaaaagtatgctttcttttagtgtccattccattactgcatcccaacatattgaagacttctta

SEQ ID NO: 42971 - DNA, 793 bp, Arabidopsis thaliana landsberg
agcccaagacactaatcatcgaatcatggcctcatctttcaaactttagctttgaaaagaaaagtaaaattctgtatatgtgagggaatatcattatgatgttcccgagtctctagtccgttttcacctttgcagtagatttttaatagacaataggcatagactatttagctgagaaccagacaccaatgttcttggaacattgtttttacctatatacgccataaacaaaacaaaaaacaaaacgttggcaaatctattatttaactaaaaaacatgaaagttttttgtgttaaaagaaaatacttacaagaatgtccaaaaccatgttgagaacgaacgttaaccaaaactgtatatacttaacagtactccgcaatctccatctccatctccgccgttttctgttttttcaggcaataatttaattaaatcaattactcgtaatgaataaatgttttgaccaaccatcaatgagagataggggacttacgaggacaggagctaagggatatttaagcaaggagatattgcaaaatatcaccaacgaatgtttgttttagcaaatgaacttttgattgcgaaaagcgtaatgagaaccatcactagtacacccagtgatctcaaccaaaagacgtgacacaatgtacctctgcacatacacatcattaataattatgagctagctaatagtaaagactgaagaaacatacacggaggttttaaaagtggccacagtagatgaagaagacggttaaaaagatagctccaattcccaaaccgaaggcaccag

SEQ ID NO: 42972 - DNA, 840 bp, Arabidopsis thaliana landsberg
tgaagaaaagttgggaagggaagtaaatgatgatttggaatgtatgagctctgccaattatgagaaggtggcatgatgagtccaaattaatggagaaaaatttgatatgtaaactttgatttctacattgagatgatgatatatgcacggtgcactttatcactttcttccggcatatgtcataaccctcagaagcttaacattaaaaagtcaatcttctttcctttccttttattttttttcattcttaaagatcttttgtttgttttgttgatggcgtgctatttgagtatttttgtttacaacttgtttacttctacgctattatcatttgtatactgtgttcaatcaatcttgtaaactaagcaaaacaaaacaaagagtggtcaaatattgactcgaaagtgataagacaagcatcggccgttggggagtttttcaaagtgttttgagtttttaggaatgtcggaaaatgccatgcaactagacaaagtcttggaagacgtaaccgaagggctcgacgagctcgaacggtcaaactttgtcattagcaacatcttcccaacattattctcgataatctcggatggcttctatattttgacgtgttcttcaattttcaaccctctattcgggtatatttgtgttattatattatgtacacattaatactagattcgagatatcggtttatacatccatttcattattaagaaagttctaaatttgtgttaaaaaaaaaagtctaaattttttaacacaccaaaaaggattttaacaaaaattgttttttaaatatacttttaacttatacgtacgtttctaaaaatttatatttta

SEQ ID NO: 42973 - DNA, 748 bp, Arabidopsis thaliana landsberg
tgtttgtaatattgtatatactcacattgattatatttgtgtttagcaagtctctcttgtgtatatatattggggatcgttgaatggaataaatcaatcacttctataaacctttatattttcaataagctggagccttattggtaatttatctgaatattcaaaatataatcattagctactttatggaattgatttcttcttaaatttactataattaatctccttaaatcacgaaaaaaataaaatttgtttctttaaatagctgtaaagtcaactaactgagatttataaagtcaaactattccttctgttattaccttcctctcaaagtctcaacctttgcctgtaaataaccagagagagacaaagctcacaaaacagaggagaatctctaaacagttaaaaataaacaaaagtcaaaaacctactggtcaaattcaatgcaactgagtctaatactgaagcttattcacatcccaagccactctcataactccaaaccttgaattcgcctctgtgaaagtcctcccaacatcatctgatccataagggatcatctttttgttcccatcatatgactcactaagctccattacatcaactacacatatctgtcttgtctccaggcttaaaccgtaccattcaccgtctgttctcaacaccattcctttcccgatctcgtctcctctctcgtccataagcctcacttgttgcccttgttttatcccttcttctgatgatgacg

SEQ ID NO: 42974 - DNA, 199 bp, Arabidopsis thaliana landsberg
cactgtccgctgcagttcaagaggccatctgggtgcgaagtggtatggaagaaatcggcgatccgcagacaggtccaattctgattctggaagacaaccagagagcaatcgcaatcgtcaacaatcctgagtcccacgacaagaccaagcacattgccattcgccatcactatgtgcgagactctgatgaagctggaga

SEQ ID NO: 42975 - DNA, 885 bp, Arabidopsis thaliana landsberg
  unsure (1)..(885): unsure at all n locations
tttataataataatcaaaccgtattagttttagttgggtttattggtgtagttatgtaataattaacctcaaaatcccaatttggtggtagtgattttgtgatcagtttaatctctggtgtaaatgatcacaaacggaaaagaaataataatccatatagagcttttaagttatcacggactttagttgaacatttggatagatgtatgatgtatcccttttgttttttaggatgaccccatctctgtataatagacgcaataatacatttatattttggaaatttggaatgaatgatagaagagttttgttattttcttatcatttattaatcacattattttatatttacaatctacaaacacactatcttatggaaatattcgtttgatacaaacaacatttaatgaaaacaacaacttatttcgtacgaaatgtttatcgtatagttgactattgtgatatcttaaattgtagaaatattcaacgcttcacaatttttaaattcctctagaattgtgatttgtgagctatggttcgatgtaaagagaagaagaaaaaaaacctgaacgatttatgagatagccattttcaattcaaaaatattttgttctaaacacatgagttagcattcgcttggaacaatcttatcttctgaggtttgtttgactaaaaagatgactaatgttttgacgcttgtttcgcacggccaatagaccgactcctttcaatttcaattgtcagcangaactgacacattaatatataatttattttctatatgtttactttctgtttgcgatctctatgtttacttgtcaccatctatcatattattactggttaagaaaacttatttattatcgacttaatgtaccttatagt

SEQ ID NO: 42976 - DNA, 513 bp, Arabidopsis thaliana landsberg
gcaataacagatagattcatcagattgcaaggagattacaagactattgttcaaagcttaaatccttggattgcaccgatatttgcttcagatgaaaatgcttgttgttctgagtggaacgcagcaatggaaaagcttacgggatggtcaaaacacgaggtgattgggaaaatgctacccggtgaagtctttggagtcttttgtaaagtgaaatgccaagattcgctcacaaagttcttgatctctctgtaccaaggaattgctggtgataatgttcccgagagttcactggttgagttctttaataaggaagggaagtacatagaagcatccttaaccgcgaacaagagtacaaacatcgaaggaaaagttataagatgtttcttcttcttgcagattatcaataaagaatcggggttgagctgcccagaactgaaagagagcgctcaaagcctcaacgaattaacttacgtaagacaagaaatcaagaatcctctcaacggtatccgattt

SEQ ID NO: 42977 - DNA, 873 bp, Arabidopsis thaliana landsberg
atggtgccttttatgcaaagactgtggaacggggcaaagggatctttaacaaaaacaaaccaacgaccgtaaattttttggatacgtggtcctcacctcaacctcagccacatctactaatttgtactctatttagtgtttttttgtatactgtattatactaaagtcattcctagggatttgccatcgtaaacaataaaattgttttgggaacttgaggacatagtatttgatacaagcggtttggaacaaaagatgaaaacaaacactttgtaaattcaatcttattggctagagcttacgtgttaatttgggttgaatttttatgaacccaattatgtgttattggcaaatgtggattccaaatatcaatccatatattaagcatgtttagataatcaacttcgatgggttcactagttagatgggtcaactttcataatcaactttcacaagttttagtttttttttttttttaatatatatttctatatgtattgtgtaatgtgtaaactacacctttccccctttcgtgtagtattcaagtccttttcttcttatgtgatatgtgacaacaaacttttagtattctcatttggattattggatttggtagtcccaaaactgaagaaaatcataatcagaaattaatgagtactgttcgtgcatgaattgggtttcgccttcttcacgtgctttagagtatttaagggaaataacaattggaaactaaataaacaaccaccacagaaaaaatgttcagtatcatttgggatccggggtatacaatttgaagaccccacaacgctcagatcagaaagggctctgaaagaaattaagttttggaaacaactacattacataaagtaatat

SEQ ID NO: 42978 - DNA, 727 bp, Arabidopsis thaliana landsberg
ctcatataaactcatgcccacagtattaatggtatgtatatacttagagaatgacaagttaaaacatgtatagagaaatccaaatacaacatgtataatcgattgcaacatgtacgtatattcatggctacctcacatgcataaagttttatgtatttcttgtataaatctagctacagttaatagttatacttaagaataaatagcctatgcatacacacttaaatccaaaaagaagtttaacctctctaatgtatgtttagtatactattatttctccttagaatattggaacttgacttgtagttaattagtttgggctaaccgttggccatcattggtcataacattatgtttaaatggattccaatttatagtcagagagccttggttctgtcttctgacagtatccttatgagctgtaagaaaataaaggggtaaacgtaaacattcctcttttcaccagttcgcgtgcattttagaaattcttgatgcctaattaaaaattacaaagcaacaaactcgctgatttttaaaaatagaatccaaaagtagatccaatatcgcatgcatgtccaaaagcattttattcaagcataatgaaggaaattgcatcgtaattcatacataaattattcaacggtatgaaaatgtagatagaatcatagaaaagcaaaacatgtgtgtatatatgtatcacagtagaaaaaattaatttgaataaatc

SEQ ID NO: 42979 - DNA, 327 bp, Arabidopsis thaliana landsberg
tccgcgagggcgctgtgctcgacgacctccgtcaggtgcaggccactgagggtgacctccagctgtaggttctcggtgcgggagcggttgacggcgaagacggtgaccgagccgttctcggcgcgcacggaggtggcgtgcaggaggtcggcctcgccgtacttcgcggtgtcgtacgtcggggagtccacgcggacgtcgaggacctcgccgtggtcgtacttcgaggcctgggagaaggggaagaaggtggtctgtcgccagggcggacctccctgatgggtcatgatcggggcgatgacgtggccacgctgtgcgtgacaggcc

SEQ ID NO: 42980 - DNA, 748 bp, Arabidopsis thaliana landsberg
tacaaaaagaacgttatcagatggaaaataatcaaggttgttttggaacctgagaatatggtctagaacgaggtacttgtgacagatggggagctgctttggtggtctcatgatgtccagagtgcttcttctcactgtcttttctcgaaccatgagcatcaagttccaatggagcatctctcaaagactgacgtgagtttttctcagtgtcagtaccatctctaacatccaaatccttcttactcagaactcgttcagcttcaggtttgccatctcttcttgatctcttggggctaaagacaaaaacataaatgattagttgtacaactgtgataagctaccaaaatcaactaattgtgcctatcagtaaaattgaccatcttcagaaaaatctccactgttcgagagtgaatgtgaccaaattagagtagacagatcaacataggatgattcaaaaaacaatcacttcaacactaaattcagctttcatttcgatttctagacaaaagacactatgagcttcctcgttgttcaaaaccgaattttatttgcttcaaagttataatagaagatgaagatagagcaggaatctccagaagaagaagacctgggttcgcgatcgattctagaacggtgacgtttagggtctgaatctctgctttctcgcctcgtcgacatgtttctcttcccgaagaaattttagggctttgctcttttttcttcccacgcctgcctgcaacattttatc

SEQ ID NO: 42981 - DNA, 595 bp, Arabidopsis thaliana landsberg
ggagactcaaacccgttagctgtcataagattttcattattgatcattgagaacgagggaatgtaatgtgtattgcgctttaagatgaatttgatggaagtctttgtatatatgctaaagaccaataattcacattccctatcaaagggaacaattcagaaaaattagttttgttttttctttaacggacgaggacataagcactaaaagtcatgtgttttgatgatttatttattttgacattctaattggttttactatgtagacttttctattgtcattagaggctgtagaggttaccatttttgggccaacaatggcattttaaatataattagactaggatatccctgtgctaattatttaaatatatttttttaaaatttgtaataccaaaaaataaatctataaaaacaaaatccaaaaaaagaaattatcggttttttttataatttaaagttgcttcttaagcagaattattttaacatctacatgtgtttatttgttcaactcgatttggctgttcagtatttagtaatatctctcttttggatatcaccattcaaactagaattgggtaaataaatctacccga

SEQ ID NO: 42982 - DNA, 736 bp, Arabidopsis thaliana landsberg
tgatatgtacgaagttaggtgatatatatagagatgtccatagatcataatgcttttaaatgtactcgatagctgtcttctcttaaactgaattacgacctctctatacttctggtcctatccgtgagtcatgtgctctctctgtctttagtcataatatgattttgaattggctctgcaccattcaagatcatggcccattatggttctctgcacctgattctgtttccataataattccatttacctacaaggctatacatataatttattagtataataaccatattatgagaagattaattatactgttcatacggcaattaagatatcgatgcgaaaagattcgtgatctttatagagtttatattccgccgttgctagctaatcatgtttattttgtttctctagtacttaacgcgtttgtcaatttattaaattcgattagctaaaaaaaggatttgactcaatttcatctttagagacttacaaaccaatttatacaaatcaattttttatagatgttacattttttcgttcacattaatgacaggttttcttctttctatgacttaaatccacctaactccaaaattaaatccccaattcatgttaaagaagtgaatttcaacgcttcgaaaagttaataaaagacaatgaagaacatacatgaaacatgcttagcgcctagcggacgagcctcttaattagaaccaagtccttagaaaattacaaa

SEQ ID NO: 42983 - DNA, 904 bp, Arabidopsis thaliana landsberg
  unsure (1)..(904): unsure at all n locations
tcgactctagaggatcccctcggcggttacaattgagctcgaaccgtccccgagggagccatctgagacggccagccatagggtaaaaatggactatcacacggctcaacgaggtttttaggatttcgactacattgccttggaaagattcagatggcttgtcgtaaaagtaaagtgtgggaatgtgagtagttgtaccaacttgatcccactcggctaagggaaacctaccgctccacgttggttcggccggtactatagtgtaagattttctaaaagttatgggagccataacacaaaccccctttctttttctcttctctttttgaagttcgtgctaaagtaatgtttatatagtacacagaatcatatggattcaacgaatttttcttgctgttagtcaaaattcaaaaatgtttttctcgtggtttagtttgtttccttcgaagcagcttaattagtggaagtgagaataaggtttagttttgttggttgtatatgatcacgcgtattacccttcttctctattttgttcacattgtggatgaatatatatttccacgaaaaaatgaaaaaaaacgaggtaagaacatataacataaaattcatatcactattagggaatgtgttatacttttttatgcaagtatattccaaagtataaattctaaactaaatccttaagtatatatcataaactctaaaaagaaatggtaaatccaaaatactaacttcatagcattaaattcaaaagcccacatcgccagttttgattatatcttctgaatttaagttgagtttatttttataaagtcatcttgaagaaaaaaaatgtggatgatgtattttacacntgtacacagtaattttagttgttacaaactaacaaaaaggagataacaat

SEQ ID NO: 42984 - DNA, 612 bp, Arabidopsis thaliana landsberg
aacacggactgccgtccgtatcatagagcgttaccgttgaaccaacttctgcgttaccgttaaatctcggggtcgttacattggtcacgttatccgtgcttgacgttcctgcatcgctggctgccgccaggtctggtgttgatggcgctgacggaggtgtctgatcaaccaggtaggtttcgccgctggtataaccagtggtctgctcattccctactgcgtcaataattcccgttccggaattatttaaatccagccgcagggtcccatcacctgttacattatttattgtagcatttgctactgttgaacttatcggcgtaacggatacgccagaggtagatatactgccggttgttgtggtcgtaaagtcattgaaatctatgcctgttaccggttcactgaaggtgatctgaaagtccagcacattttctttgatcgggcttggatctgtccgaacaatggaaactacagacggcggcgtatgatcgaactcgtaggtttctcctgaagtaaagggtaaactgcttacagccggatataaacctgtgctgttggcaaagtcaagccgcaaatcaccgtcacctgttatactgttaacggtaactgtat

SEQ ID NO: 42985 - DNA, 544 bp, Arabidopsis thaliana landsberg
ctctgctcgtggcattaactaatcttcaaatttgtaaaacaaacaatgaagatgggactggattcatttctagtacaatgaggcttggtgctgatgcaattgtcttctcacgttctcgaggaatcaatggaaataagtgagtcatttcacaatatctttatgttatctactcttggtttacgcgttttcgatcttaactgtgtttcttatcactgtttcagtccgacacagagcattggtatgctatcatatacgtttctttacgagacaagaaaatgtgaagcaattgtccccacggtagagtcgtagagataaaattacttcttatgcaaattgctcttcttctcaaaacattaagtctaaaactctttttcttttctctgcttaggttgattatgagttggtagataacaaatggaaggagatagtttataactccacaaatgagtggcttgataatttagagactatattgaggtggtcgccttatctatcccaacaagatttattggaccaggtttggtgtatatacttttcttaatca

SEQ ID NO: 42986 - DNA, 774 bp, Arabidopsis thaliana landsberg
caatcaagctaggaaaactctatgctgcttctgctatgtatggctatttccttagaagagtagaccaaagataccaacttgagagaaccatgaacacacttccgaaacgccctgagaaaaccagagaacggttcgaagaaccttcgcctccttatccgttatgggacccggattccttgatcaggattcaaccagaggaatatgatcccgatgaatacgcgatacaaagaaatgaagatgagtcatcttcttatggattgagatcatatgttacgtatttggactcggatacgcttcagagatatgccacgatacggtctaaagaagccatgactctgattgagaagcagactcaggcgctctttgggcgaccggatataaggatacttgaggatggaaagctcgatacttctaacgacgaggttctgtctctgagtgtctctggacttgcaatgttggttttggaagctgtggcttttgggtctttcttatgggattcagagagctacgttgaatccaaataccatttcctcaaggcttgagtttagtcctccttgacatttgtacctttttgagagtagtgaatgtaaatgttaaatctctcatgtcaaattggtagcaactcctattcgtaaaatgtaataaactacacttcaaaacattagactcaaatcaagcatattagctcgagattcaaatctttacgtatacacttcaaaacactctgtttatgttcaaaaggagagtaaattgtttcccatttttttttttact

SEQ ID NO: 42987 - DNA, 591 bp, Arabidopsis thaliana landsberg
  unsure (1)..(591): unsure at all n locations
aagcgagattgatggtgatagtgttgctagttgatggagatttttttttaaagtaattctcagaaaactgatgaaagggtaaaaacgacgtcacaccaaactcttcgtgtttaagaaacaacatcgttaattaggccacacccatttcagcgtaatgtagaaacatgttcaagctataagcaacctagctatagtacattaaccagtttgtccattaaaaaaagctatagtacaaccagtatatgataacaaacccacaatatttaatcaagctagtaatgtttcttgagccatacgcaacctagatatagtacacccagtcattcattatgcatttcagcgatttggtttgctcacacgatacattcaataattattgtcattcattatgcattggtgattaattacccgaaagttgatgagagaaaatgagcaaaggaaccttaaacataccgagatcgaaccaactattagagataagtatttcacaaaataaaatgattctacgataaaacttgccaaactacatgatatttacccgtagatggatcaaacgagaggtttggtttcttttttcttttgntaacatgc

SEQ ID NO: 42988 - DNA, 883 bp, Arabidopsis thaliana landsberg
agtggacacgaatgtaggtagcaaggaagatagtaaagatttaaggcacgatagatcagtggaggttaaagcaaataaggaagaatccatgaagatagagcgtgacgaagttcaaagaatcgacaaaggttcatcaaaacaagtgatagattctgcttatagcatggatatagatgttcaaaagggaagtggagagtcagtgaaatacaagaaagtcgaaaagaaggaaggaaataaagaagagaatcaagatgcaatcaatactagctcaaagcaagaaggaaaagataagaagaagaagaagaaagagtctaaaaatagcaatatgaagaaaaaagaagaagataaaaaagagtacgtaaacaatgaattgaagaaacaagaagataataaaaaagagacgacaaagtccgaaaacagtaaattaaaggaagaaaataaagataacaaagagaagaaagagtctgaagatagtgcatcaaagaatagagagaagaaagaatacgaggagaaaaaatcgaagacaaaagaagaggcgaaaaaggagaagaaaaaatctcaagataagaaaagagaggaaaaagactctgaagaacgtaaatctaagaaggaaaaagaagaatctagagaccttaaagctaagaaaaaggaagaagaaacaaaggagaagaaagaatcagaaaaccataaatcgaagaagaaagaagataaaaaagagcatgaggacaataaatcgatgaagaaggaagaagataaaaaagaaaagaagaaacatgaagagagtaaatcaaggaaaaaagaagaggataagacagacatggagaaacttgaagatcaaaactcgaaccaaaagaaagaaagacaagatgagaagaagtcccca

SEQ ID NO: 42989 - DNA, 509 bp, Arabidopsis thaliana landsberg
  unsure (1)..(509): unsure at all n locations
aacggctgcatttaggaggagtgctatcttgttgagtgctgcaatgtgtttggcttgtgttttcctgccgtattgtagtttcaatgtacacccattgatgatgtgcatgccatccggttctaagagctgccccaggtgggtgatgcccaggtggaagaggggctgcaggaatgagcatgggacgtgaacgtgtttctctgcgttcgttgggttcaggcgtgcaagtgattttacaatgtccttctgttgtgnnnnnnnnnnnnnnnnnnnnnnnnnnnnnnnnagttggctgccattaatcaggaggagctgtctgattctcaggcaatatttcagctgctgcgtactagtcgtggtagcgtggcagccaccaaacaggtccagctgtttgttcatgagggcctgagtgatgtctcccatttttccttggtccagcagggattccgtgaggagggctgcatttcttctggcatattccgtcatcatggagggggcagtctaagccaaag

SEQ ID NO: 42990 - DNA, 627 bp, Arabidopsis thaliana landsberg
tctgtttgatgctctgtttcgttagctcaaagttttctttttaccagttgaaacttgaaatctgaggcttttttggggatcagatatgatgatgatgtgtacgacagaatctggatacctcgcaactttggctattgtagagagatcaatacctcactccccgtgacctcagacaataatagttatagtctttcaagtttggtgatgagcacagcgatgactccaataaacacaacaagacccatcacaatgactttggaaaacagtgatccaaatgtcaggtactttgtctacatgcacttcgcagaggttgaagatcttagtctcaaaccgaaccagacaagagagttcgacatcagcattaacggagtgacagttgctgctggattcagccccaagtatcttcagacaaacacgttttttctaaaccctgagagccaatcgaaaattgcgttttcactcgttcgaaccccaaagtccactcttccgccaattgttaacgctctagagatctacgtcgcaaatagtttctcgcagtctctcactaaccaagaggatggtctgtgctagtataacatgactagcaaagttcaatcttttttctcagtatatgatcaatacagtcaa

SEQ ID NO: 42991 - DNA, 679 bp, Arabidopsis thaliana landsberg
atagctttactttcttaattatcttttttcttgggcaaacacctgttaattatctattctgttttttatctgataaattcacaaaaaaaagtctactagttagaaactgacacaattctcccgctgcatcttcgtttatctttgttagtcataaaaaggaaaattacaaagctgatcctctcatatgatatgatatcatttatctgaaggttttatcaaatagtcaataattacatttttgaaactttcaacgataatttacattttaaaaatgttactaaggctttagtaattacaatttgatgccaaaaaaagaagaaaacaaaaaatgttaccaagactatgaatgttattgttggctcatatatgtactgtactatataagcgagatgtccacacgtctatattcattgacttttaaagtcattggccaaaagcaacaaacaaaaatcatataaaaaaaattatttgcaattttaaacaaaaattaagtattattttgccgatcatgagctaattactaaagactcaggggccaaatatagacacaatttaattgacaattgtcagaaaaacaaaagacaactcaattcttctggtaaatcaatgattgaaaacaagaagaaataaatactggcgtctatttttttttgtcaataacaattgaattaaaaaaggg

SEQ ID NO: 42992 - DNA, 866 bp, Arabidopsis thaliana landsberg
cactgcggcttgatatgcaccaagatgaaaattccattggtcacaagattgcttttaattacgacaattagatcacaatttagttatgacgcttagtattgccgtcttaaactatttagtatctgtacgtcctaaaattagtgttgaaaaaaaaatctcaattcatatgcgtttttatttattttaaattagaaaccatatgtatgcctatcagtctatgcatgcatgagaagcgcgtagcgttgcaatacttgaatgtgaagatttgatcagaacaaaacaacactaaaatatgaagaattgatgagaacaacaaaaaaatagctgttgtttcttgtgtaaaaattcaccacatgtttcttttcgatcaaatacacatgtcacatgttttcatatttgacttttcgatcaacgtacaaatacttatgtacgtcagtacatgacgtgaatgaaaaactaaatgcattaacgcatcgtgtcaccgataaactactaatggaaacgtttttttttggttcactgatatgattggttaaaagaatattgtttactaaatgtggaatgcaaaaaaatttaaatactttctccaatgatattcatatatatccgcctagtgcagttaagttgttcgccattgtaatgatatgcatttttctatctttgtctaattttttgtatgagcaacgcatttgttgattacttcaatttcaacgtaactaagaagtaaacaaaagagtaaatttaaattttccatgttatacacgtaagaaatggtaccgcataagcatgggggctataaaaagataggctttatagtttgagagatagaaacattgaacaaaaaataatgagattagacaggccac

SEQ ID NO: 42993 - DNA, 830 bp, Arabidopsis thaliana landsberg
tattcttattaattactaaactgctcctatgcaattgtaacatgtgaacgtttcacatagcttctagaagatcaccatctaaaacatggaggaagaatgcaactgggtctctttttgaaggtttctccttaaacactactcccttgttaagttttgttgcatttgaatgcgacgtgatgcagatagattcacatctagatttgaggctagaagtaataacatttctattggtcaaacatcatagtaaataagccaccagttctttttcatgtttttctccaatttgtacctctttgaagttgtattgccatgtagggtgtgggtctgaagttggatgacgccttagcgttttggagagaagaatttacaaaaaaggtaatttgattcgctaaagtttctcgttctcctcaccctttttccatgtttttgtgtgtgctagcaaatttgaataactaagtaagtaatactgagctattagatgcatatttctctttccgtttttatcctcaggttggctctgagagatttgataaagagtatgcgtatgccattcgccataactatgggaaggaaggcaagagaacagtaagtacctaactgtcctttctaggccatttttttccagagttctcatctcttatttatgtcattgaaagtggcaatgatcagcttctgataccaaattcacattgcaatttcaggattataccccttatgcttgttcaaagatcatcatatctgctcctggtgctggggatcatcacggctgcccttatcgacatttcaggtcagttttctcagcaaaaatatgttctctttccctgaaagaa

SEQ ID NO: 42994 - DNA, 1179 bp, Arabidopsis thaliana landsberg
gaaactcagaaatgcatgaacggtcttgtgatggttgatatagggtgcttctgaggaagaattaaactcacagattgaagcagcttgtactctagttgaaaagcttatcactgaaaatgctgatctagttgaaaaggtaaggtgtactactatagatcttactgagttatttgttgtgggctgattgaaaatctcactggttgttaccactacattgtcaggtgaacgaattgtgtattaagctaaaccaatcacagcatgcttcccctgagagcctagcaattgaagtagagaaatctgaatccttagaagaaatacccatacacgacgagttgattagaattgataactctagggacatggatactgcatcaataaagagaaacttttcagaaggtgaaatagaagaaacggtgccgctctctctgaacgcgaatggggaagtagacgtggaatcacaggttgcagtagctggagaagacgaaataaatgctggtgtgccactggcgaacgctccacttatcggtgctccattcaggctcgtctcgtttgtagcaagatacgtgagtggtgcgagatttgacggcaaagaaatagtttttgtaaaactcaacaatacattggaggcagagaaaatgcatcatcaaatctatatgtctccctctctcttttataatttgaagggacctgagaatcattgattagctttgcacaatatttagagtacacaaatgtatattgtaattttttgataggataacttggtgatgacaatgatgttgattactgttgttttgttctccatctttttcagaaaatcttgaaagttgaaacataaatcttaagcatctgagcaaagacaagactgatgtatgcaacaaactcaattatgtcttacataagctggtccagtttattttttcttcaaagtaggaccgtaaaagtgaagccataaatcaaacataacatcattaaaagcctaactagattctaaagcccacgattagcccagctttgtttagggtttttgtgtatcttcaattggtgtgttggtgtatactctcatatttccctttgccgcagagaaagaaaaaaaataacccttgtcgccatttgaaactatgacgacgaaaatctataatcttccaagggttttgatagaccagatttttttaggtt

SEQ ID NO: 42995 - DNA, 901 bp, Arabidopsis thaliana landsberg
gcatgactttatttttggatatatctaatacaccactaaatatgttgacctttatctacaccacagttcgtctaggccaagtgtggatccaaaatctatccttagaaggtcaaaatccagtcctcgccaaagtaacaggcgagaacaaccaaccagaaagtgagtattgttgttatattgatggttgtgctttctagttgttacgttttgtgtttttgctgcctttttatattgtaattagctcacaatctaccatttatcattctggaaaatgagtaaatgagaatacaatattggaaatatggcatatactctttagttttacactggggttattggctaagcttaatttatcttggggttctacaggtcaactgagccaggtgtggttccaggaactattctgagcgagtcaaaaaacagctcaatcaaaagcaacagccatgggaaactaaccagaaagtgagtagtgttgttataagtgtgacagcacttatccgatgtatatatggtctagtgctagtctgctagattgtcgacttccttgctgtctgtcaaacttatattagttctcagtctatcttttgtcattttgaaagggatttgcggctgcacaaacttgtttttgaggatgatatactgccagatgggactgaagtaggttatttcgttgctggagaggttagatctgcatgataattgtcttttctccagcccctttttgaaacttttccttcgccaaccattttgttcattgtgcaaaaaatgcttgtcggctataagaagggatttgggatacattgttcttgttgcacaaagtggtaagctctctttaatgtcaattagctttcctggcattaaagtatatagggggtttgaatcagcctattaatgtttatgg

SEQ ID NO: 42996 - DNA, 582 bp, Arabidopsis thaliana landsberg
tcaactttccaagtattcagccaatttttatgggtagggtccaatctcatcatgcaactgtgaaataccgtttaggtgtatacaattctgcatcaatttctacacaagttcgaatcttggttcatagaattacacataacccctgtcaattccacttgcattttttttgttttggatacagagcatttttgtacggataagaatccaggcaaacaacaaagagtaatcacaaaaactcagtgcatagaaagattaagaaaatgcttgaaactgaagggagattagagagaaatattacagtgtcagtggccgattaagtggaggaacagaacgaaattcgaagacgaggttcggtttttttctgcaagcaaaaatatcttgcgtttaaaggttgaagaaaacgaaaacagagacttaaactggtgatttgtttttgaaaaataaaaaaaaagaataaagaagaggcagaggaataaaggttagtcttgtcggaatatacagaaccaaaatcactcgattctctgaagtcttaacctcgtattttggttacgctctcagaatcacattcgtgtccgcgttccc

SEQ ID NO: 42997 - DNA, 588 bp, Arabidopsis thaliana landsberg
aaacaatctcctaatgtggacataaactacagttacaacaacccatcatttaatgaattaattgcacttggttaaacatcttctatccaatactatgtatgcattcatcttcatatcactcagaccctttgtccataaccaaatctgaatttaatccttagaaatttagattggtctcccattgacgatcttcaattcgaacgtcaaagtgtgaagcgtttgacatctaactatctaagcaccaaggtgttaaatggctagtatgtgatgtaatgtacatcctcataagattagctttttctttcaagtgagatccgataaagaaagagattgcttgctaaagtcgcataaagattggtcaaaatgatttagtactttaaccgaaacaagagagaaagagatttggtaatatatgttgaaagcaaatatatgtttagctggatgccaaatatttctgtgtttgatgtcaataatgaatgctctgtctatgtagaatgttaaaattcatttcttgatagcatgccacaagttatgttcgatctttaagattttttcttaatcttctataagggtcattcgttcttgatg

SEQ ID NO: 42998 - DNA, 1001 bp, Arabidopsis thaliana landsberg
  unsure (1)..(1001): unsure at all n locations
tgtttactccttgctcgtattttttattttatttttactgaaaaacctttattgaatgtcacacattatattataaacataaaccgacgagaatgaataagggacatgagtcggtggaaacgaattccccagaaactaaaccggctggattgtgtctcgtggaaacgaaaaccaaactaaatcagtacttctatcaaacttcttcttttcgtctaatgaaatccgaggaccgaaggttcataggtggaattgacaaattcttaaaggcaacaacagtagtaactataaaaacaagttcaaagaaaagaaaatatagaacactaaaatcatcaataagaagaaggaatatttatgtattcacaatacttcctgagctatctttccacaaacccaacagttatattcacagagaataaaagaagaaacaaagacatcaaccatatcgcaatggagcgatgatgataatcttccaacaatatttttaatcaaagtggtagtgagagttctcatcaacgattgttaccttcttcatgagttcaagactctttcagatggcggaaatatagaactctttaggcattgtacccatgattgactctcgtttctccccgttcttgaagagcagaactaccggcacagcctttatctcgtactcttcagccaccggcaagtcattgtctgcattaaggagatagcagtttagttttccagcatagtcccctgctatttcgtctattatcctgtggaccatccgacatggaccgcaccaactcgtgtagaattctactaacaccggggtttcgctttttagaactgagtcttcccatgatcgttgtgtaacttcagctgctgctcatagagaaaatgagacgtgatggaggatttcaaaactcatatattctaataatcgaaccaacaagacaatctcaaagaactggaagtagtgtcctatgtaactganaatgttgaaatacttcaacatgacaacctaagcatctcat

SEQ ID NO: 42999 - DNA, 659 bp, Arabidopsis thaliana landsberg
caaacgtcatgttgtctacgtacgtccacatgcaaattgagatttatattgctgttggaagttggaacctaaaacagatggttcataatacgatggtatatatgttcacctaatttagttttaaactaatctgtgtgacaaacctgaacacaaatagaaaattaaactaaaattgcaatccgatccatatatgaaacattataaaccacaaacctaggctcaaacaagaaatgatgtttataccaatatattactgcaaataatgtgtgattagacgattcaaagcatattaatacggtgattgtatatgtatatgtataggtagtaaagttgtcacgagaaaacggacaaaagaggatgctacttgcttagctcgtggatgaaatcaggaagctacaagaacgtggcgggaatgacgtcaccttaaacagataatttattttttaacttgttgtttgagattccgatagaagatgatggtattaaaatatttaaacagataatatatttggatattctatgaaacttggacattggaacgtgtgccataggatgggctttgtgctctcttcgaattaattattagaagctgagaaccatatttccatccaaaattaaaacggtaaaaagttatataaatattaactaattcaaatttt

SEQ ID NO: 43000 - DNA, 544 bp, Arabidopsis thaliana landsberg
accctttttgatatttcacgacattgaagttgtaaaaaaaaaatatgaagtagttggttgcatgatctgaataacgtgttatcatcatcatatatagtatatgagattgtattttcgaattaaagaaaatagaaagagaatttgtctctttggaaaaatgattcaaagggttctttggaggtcaagatgatcttcattttggtttatgaactattttcagactctaaaatgtgcgttttaaatttaagtttttcagttgcatcatttaggcttagctttactaaacctctaaagtacataaatatgcaaaactattaaagcgttattaaaatttactattttattaaatcttatacaagtttattgaaactaaacaaattaaagaaacataattccatattctttttaactagcttggtcgtattgataatttttaaacttggtcgaaaacggtttagtgtaaacatctaatagtttttccttaaataatactggaataaacttaaattctgaaaggtatatgatttaactccacatgtgatta

SEQ ID NO: 43001 - DNA, 2552 bp, Arabidopsis thaliana landsberg
  unsure (1)..(2552): unsure at all n locations
ctcaagagaaacatgttttgcagcaaggttcaattcttggtaacttggaagagattggtgtattgaagaggtgcaacataaatgtggaatgttgcgaaagcgatctggaagagaaagacgnnnnnnnnnnnnnnnnnnnnnnnnnnnnnngcgctgggagaggatacttaacacagatgctagcagattgctatgggatcaaaaaagtgtatctagttgagaggaaatcttacaagcttaaggttggttaagcttgctagtttgtgttcattctgttatttttagtaatctatcttgtttttcagtccacatttgttttatcgcatataggctgataggtcattgaggcaaaaggagagcttagtattagagcgtatgagaatcgatagtaaggttcccgtaaatctagaaccttttcttgtttacttgttccaggttatgtattaatgatggaaaaaaccttgtgtgttttcagttgaggatttgaaccttaacgcggttgaatctttgcacggtgttccatatgtgcccgtagggaaacatctctgtggtcctgcaacaggtcactacatgattatgtctttgctccttcactattagattcccacttcattaatagcatctggttttgctaattgatgttcattcttatgtgtcgataatagatttgaccttaagatgttgtttatccagacaagatggtgatagcccagtacttagaggtctcgctattccaacttgtcgccatcatctttcccaatgtaaaagctacataagtaaactcccagtcactgtgacttctttgatctatcagattattatataactctctatttaatcaagaatatggttatgtgtctctcagataaagaatatatccttagcctggggatttccaaggacgagttccatatcatgacttcgttcactagctgggcagtagatgatgatcacggttccaagcttcccggtgttgatgacattgaccttcttgattcaaagtaacattttcttggatttaaagatgataaagaagttactgcatataagttgtttcatatttgattgttcttctgatgcagtgcaaaggaggaggaagaaggagaagtaagagatgcttctttgatcagcgtggaggaagttgtgaagaaaatgaaacccatggaaagagctgttttaggattcaaatgcaaacagatcatcgatgcagggaggatgaagtgggttaagaaacatggattaaattcaaagctagtgaagtatatcccggcaagcatctcgccggaaaatactttactgatcgccggaaaacccaatccttctattgcttgatgttgtattcttgttggttatttaatactcggtaggtgaaaactagaagagatactacacatggtgtatacgacagcaattttgcttgttaagtcacaacttcattagctcattctctgtctttggtcaaatccactgtttagtattcaaaaccaattttctcacattctattacacatacatgaatctcttctgcgtcgattttccacgtaattaaggataaagatcctatggagactgcaacgtcattacacacgtacgtacggatcagttttgttccgttcacacttcacactcagtcaaatagtcaaacccctccacaaccttctataaatactcgaatcacttaccaccaacaattcatcaaaaactcgacaatggaaactcccaaaggcactatcatcttcaccaccgttggtcgaactcactacggcttcgacgtcttctctctcaacatcgccacctccgtcgaacgccgtttaacagacggcgtttccgttaacttcaacgctcaattcgtcaacgataaaagcgatgatgtcgtctttgtttcggaaagaaacggatccgccaggatttacaaaacccgatccggaatttctaagcccgagcagattcccggagctccagagagctacttccacgaccgtcctatcatcactcaaaacaacagactctatttcatctctgctcacgagcaacctgatcgttatttcaagaattggtctgcgctttacaccgtggagctcaacagcgcaaagagagaagttacacgtgtcactccaccagacaccgccgactttagtccggcggtttctcaatctggagatttcttagccgttgcttcttatggaactcgctcttggggtggtgagtttcacgagatcaacactgatattactgttttcaaagcatcaataccagagacaagagtggttatctgcgagcgtggtggatggccgacttggtccggcgattcaactgttttcttccaccaccaagcagacgacggttggtggagcatcttccgggtagatataccggagaatttcacggaatataccgatttcccaatcacaccaatccgagtcactccatctggactccattgcttcactcctgcagctttccgcgacgggaaacgaatcgccttagcaactcgccgtcgcggcggtaaccaccgtcacatcgagatttacgaaccttgaaaacaaaacgtt

SEQ ID NO: 43002 - DNA, 425 bp, Arabidopsis thaliana landsberg
cgatatactttagttctaccttcgatatcaaatctaatgcattcagtcaatgaggcctacttttttcagatcgtcttcttaacatatgcatactgtcttggtccgctggaccaatgctgatgttctcaagcacaactgtcgaagctcttttatagatttagatttcatctccgagaccgactttgattagctaaatctcgtacgttccttcatattccttccttttatcttttccatatattttcgtgattctctctggacgttctgatgttcggttcggatatttttaaatttcagattaggatccgattcaaattcgagtttatccgaaatttccaaataccaaaaaaaaaattgtatctaaatctacggtaactcctccaaaatttttataaaatttgaatattttcaaatctttggttagc

SEQ ID NO: 43003 - DNA, 814 bp, Arabidopsis thaliana landsberg
aaaacttattgcttgaaaaacttagaatcatatcgccgattatttgtagttcgtaattatgtattttatgcatatggtaggattcattgcaagagcgctaaagttattcaaaatgtggaatcatgaaacaacgcccctaatcgcagcagtcatgttgacaaaagaaaaataacatgttactaatatgttaagacttttgagcactcgtttttgtatagtcaatataaacgaatataaaacatgttgaaattcgacaaaacaaaaacagattgtaaaacacatatctttgaatttgttcacttaatcatgcagccttccttagcaaaaaaaaaatcatgcagcctttgaattggatatatatcctcgtataaaataggatttagatacaaaagttgatcttgaatacatcaacttaattagctaggttattggagagcatataacatgattaagccttcattatttattgccaaaaataatatataacctcccattttttcccttcgtttcaaattcataaccaaaacaatcatttgtgacaaaagaatcatatttttttttccatcaaattgtataggattagaaagaccaggaaaaaaaaatgagaagaagaaatcatgttctatcatctatgagactatttatgaccaatatagcgaaagaaaaaaaaagacagtatatacaagaacccaagaacctcttctgtcattggagaggaaatgaccctaacatgtgcgatattactatattgaaaatttaaaagagaactttttatacataaaagtttaaaattacttgtagaaaaagacataaa

SEQ ID NO: 43004 - DNA, 439 bp, Arabidopsis thaliana landsberg
  unsure (1)..(439): unsure at all n locations
ctgaacatcaagaaacgtaatggaaatgcacctcctcctccattgggtcttccttagggaaagtcaaaagatgtgagcagtcttctcttctacacacctcattgtttctgcannnnnnnnnnnnnnnnnnnnnnnnnngttcacttcttgtattatggtggctattgacttttagattatcttgtgatattgctacctatatggatttatgaattttgcatatnnnnnnnnnnnnnnnnnnnnnnnnnnnnattatcttgctgatatgttttcctttgatgaactctctctagaaatagaaatcatcatcaaaaaatttaatctttataaaatgaaaacgcttgacctgacaaaaggtaggagcatcttcatcggcaaaagatatgctggcatgatatctcttaaatatattaatttattaattgtaactatttattta

SEQ ID NO: 43005 - DNA, 937 bp, Arabidopsis thaliana landsberg
  unsure (1)..(937): unsure at all n locations
cgtgaaaagtataagaagcagtggtaacataaatgcagcaatatttggagacttcatacccattttctccttagttgcgtttttttttcattgcaagtttgtgatatatatatagaagacgcctaacctcatatttttggtttccctattaggtttcttgtaaaccagcttttagttttatttcaaagtttcacgtgtgaatgcggattctaaattacctacaagcctacaagattcctttttattgatttacaaatttgaattttaagagataagtgcattgtccgttgggttggaaaaattcaaatacgacttctttgccgtttcatattagtcgaagaagaatatattaagtggagtcgactattagtgtaggttgacttagaaagaagaaagtaacaacgacttgacactttattttcagtgtcacttgatatcgtttgattttagatgaaccgcagatgactttgacttatgttgaaagcaaataacaaagactcagctcgcactttgccactatcaatgatcgttgaattggtcatcaagcttttttctgtttttctttttagcttcgcttcttatagttactgtgaatatagcatattgcgagtgcggtttagactttagtgcttaattttgtattagtagaattatactaaaaaaaaatctcttctaatccttgatggtgttctatggatttcctaacaaacaaacaaaaaaaatagaaaagtagagctctctaaagctcaaaacccaatatctatgctctcctttaatctcttctactcctctacacttaatgaaagcggcaagcagattccacgatcccaagtcgagaggaaaaagtgataagtataagggcatcttaattgtggtatgtgagagagtatctgaagggtaaaaatttatacaatatagaaaagcntgagagaaaatg

SEQ ID NO: 43006 - DNA, 774 bp, Arabidopsis thaliana landsberg
tgcaatctgacacacaaacataaaatatatcattgatataaaaatgtcacacaataccatacaattcttatatatttatacaatacaactactagtatggttaacctaacaaaaacggcattgttattcacatttagctcatccttttcaaccaaaccttacgtacagtagaaacaatattctgctatttctagatacttattgggtcagtattttgagcattctgacccaaaaaacaagtaacaatagatttgttatttaagaaaatagaaaggtagatgatgagtgtcaagcataaattatatgcatgtcaatggaccaatgatggcaacaggcaagagttgcgacttaagagatgatttttcaacaccactttatatatttttatacaaatgcataaaagtaaatttgaccataatttcataaacataatggtagttagtagttatgatataaaagtgtctatcttaaattcagaaattaaaaccttacccatgataatttttctacccctaattttacttttaatcatagtcatggcttgcccaattaattctttgacaatgacatcccactaaaccctaaagaaaacaaattgatttggtatatgcctacactttcttatgtccttgacattatgcattcttcaaaaatgttacaaaaacatgtggtcaaagtcaattaatcacacatagaattgtataagaatcacactatgttggtgaacttataccaacatatgatgcaatgaaatcaaagtattctatgatagaa

SEQ ID NO: 43007 - DNA, 1090 bp, Arabidopsis thaliana landsberg
ttcttctccatcatcatcatcatcatcttcttcgcttcttcttcttcttccgtgaagaaggtcaaaaaacacaccaccgcttaaccccaattaccaaaaaatggcaaagcttcaaaatttctcaaattaaacaatctctttacttattcttcttcttcgaaatcgccgccggcttatgctgtttccgatcgttgtctcttctccggtgtatctccggtggtatcttccacgacgaattcataattactatgaagagtaactccaaggtcaacatcaacaacaacggagataatcataatcaaacgaagaataatggtactaatggctttttgcccaattcgttaaaattcatctctacttgcatcagaactgcttcctccggtgttcgctcagctagcgcctccgtcgctgcttccctctcttctgattctcacgagcttaaagatcaggttttgacctcaattttgattttccccaattcgtgattctctattttggaatttgggggtttttgattcattttccaattgggtttatgtgattttgatcagattaggaaaaagtgtgagtcttttttatcgagataggtttgacttgttgtgatccttgtgtttggtgaagcaggtgttgtggtcttcatttgatagattgcacacaagtgaatcatctttcaagaacgttctattactaggttatacaaacgggtttcaagttcttgatatcgatgattcaaatgatgttaccgaattcgtgtcgaggcgggatgatccggttacatttttacagatgcagccattacctgctaaatgtgatggagttgaagggtttagatcatcacatcctatacttttagctgttgctgatgaagctaaaggttcaggtcctattgttactagtagagatggatctgttagaaatggttatgaggatcctcttgcactctctcccacggttgtgcgattttattcgcttagatcgcataactatgttcatgttttgaggtttagatctactgtttatatggttagatgcagtcctcggattgtcgctgttgacctcagcccccaggttagctttttgtgtgcttatc

SEQ ID NO: 43008 - DNA, 826 bp, Arabidopsis thaliana landsberg
  unsure (1)..(826): unsure at all n locations
ttatctggcctttcagtattagttctaacattggcacccttgttattagtagaggcgacagtgggggtcagttaccaatttagaatctggaacatcaagtttcatgtcttccgtaggttcagcatcaactgtaatcattccttcatcacgatcagaggaagtttgggaagcgggcaagacagataccacattgtcactgtctccagaaactccaactgccaacacatcagagtttttgtnnnnnnnnnnnnnnnnnnnnnnnnnnnnnnnnnntagttctttttccacgttcattgaggtttctgagagatgctcagatggcctatcctccagttttgatatggtctcagaaccaggcacctctagcactttgtccagctccgttttggtcaagtaatcatgatcgactgctccacttccatcgccagccaaattcaaattgttagcctcaccctcatctatcctgtcattgttctcctcaacaactttagtatcaggattggctggaatttccctatgttctcctggggatatgatctcacgttcttgtgcagcttggtcctgctccatcacattattagcatgatgatgtggtgactgattttcttcagagtgtttgttatcaggattgactggaaattcttcatggtctccagaggctatcatgtcatgttcttctgcagctttttcctgcaccatcagaatatcagcatgatgatgaggtgatcctgtgtcctccgagagtttggattcaggtatgttggccgtttcttcctggacttctgcagtatctctgtcaacctcgacggcatctccgtcatccttc

SEQ ID NO: 43009 - DNA, 535 bp, Arabidopsis thaliana landsberg
tctagatatggataataggtaaaacgtattttgaacaatagcagacttgttaaagaaaatctttcacacgacaatacttgatagaaaatcatcattttttagacatttctttattttcgagaatgctttaagtatttctgttccttaactgtaagcttcagctctcaataagtgacgaacaaacaatcggattaaataaacttggattatattaatggccatcaacacaaaaacacaagtgatgtttcttacaaaagttgcaagctaatgttgagatcggctgaggaaagggttatacacactggctaaaacttaaaccccagaagccaacattgaacactattgatattgatttcatacaaatataatgagttttcgggggagttaaacaaaccaaactacttggggtgaaattaatctatagaaaaaacgaaccagagagccagttggtattcgtaacgacggagcattccaagaatcttacaagaaggcttctcaagctgcgccttctggggcggacaggctccatggttac

SEQ ID NO: 43010 - DNA, 534 bp, Arabidopsis thaliana landsberg
gagaaagacgccaatatgaattataatggacatagcaggaatgcatcatctttcacaaatgtagatacgttaccttgcctctggtgatctggtattcgttattgttgagcccggtaacagctgaattgctgcaacagagcaaacacaaacacacttcataattgaacaactatgttcctaaccataaaatctatttcaaaactcatgtatagcagaagcacatgatgaaaagagtgtgtgtgcgcttttggtatgtgtagtcattttacctgaatcttgcaatttccctcaacggtccaccaattccacatcctacatccagtacctactcagaaacataatggcaatgagcatctgatggcgatggcgaagggtccattttcaagtgttcggttaaggtttaacaaaccttttgtcctggttggatgccaagctgaagagcaagaaagtgctcgtgtcgcttaatactctctcgaagcgattctcctttccatctacaaacccaaaattcatgtcaatcaatacatatataac

SEQ ID NO: 43011 - DNA, 1923 bp, Arabidopsis thaliana landsberg
  unsure (1)..(1923): unsure at all n locations
ctggatgtaaaagctaaacctatgacaatcatttcactttaactacggtttcatcaaacacacggggaggtgaagcaataacgttaattcccggcttaattaacagaaacaatctcattactgtagcaatttgcgagattataacgcccaattaacactgactagcaattgatactcccaaattcatcaaaaaccatgtgaaattaagttcctcaagctaaatttatatgtctaattagtactataccgtggctttgttgacaagaaatacagcatcctgcatannnnnnnnnnnnnnnnnnnnnnnnnncatgatccgccgaatccgattcatcggaaacttgatcttagcatcttccgcgcctccatcgtcctcttctcgatttttactcgtcttcgtcggaattcctacactctttccgttacctctcttgctcacgacgccgttacttttcttcgcctcatcgcctcttattgcttcttccacagagtcactgctcgatgattctgagatctcgtaaatctccggcttcttcttcacaatgttaaccttgttcgacgtcttcttcgttctggaaccggagctgcgtttactccgaccactcgctttattgacgacgacatcgctcctcgccttcttcttcttgggtttctttgacgacaccattaattttttagaactacagtatgtttcaccctttttcctgaataaatcgatggatatttacatgggcttatttgtttgagccttttaggcccatttatcatatgatcaatttaaggaatggacatggtgatgttgaggaatgaagatgcatgacgactacttcaaaataaattattggacatgctttcactgtttcgcatacacctcgtaaaacattgtatagtttatggagaaataaataaattagggtaaatgtacttgggataagataatgtttttatacaagcatccaaaatacattatcttgttcccgacataatgtaaagaaattttagggattagataaggaagaatgggtaatgttggagtatgagacagaagaggtgtccgcaagctggaaccaccacgtgttatcaacaacacgtgtgagtctccatgaactctctctgcaatatttaaacgtggcctagctcgtgttctttcaatctccaattattactctattaataagagaagacgagttttgctttcgatactgtctttcaactattccgacacaaccaaagcttctggaaacgttgtcgtttgttatcaataatggctgttgtagaagaaccgatactttcaagattggatcgtattgatttcatggtgaggaagttagaggagatgaaaggaagctcgcctagaagctcgagcccatcgactccatctagtgggactcagccatcgtcaatggatctgtcgtcaccgaggagcatagggaaggtacactgccgttcgatggaacaagtcagggaggagactgagcggaaaggaactttgctagagagacttaataatgtagaggagcaagtgcttaagctgtgttcacagtttgaggaagaagttgaagaagagaggaagagagaagataagacggataaggaaaagaagaccccgaagaagaagaagggattgaggaagctggttgataaagttgttggatcttcttctcccactaatatccattccaagagctggcgttgttgagtcattgtagtactttattacatcatcatgtatacttcaacgtaccacgtttaaatgaaagcttctcttcttttttctttgttgaagcgctagtggaaaaaaatatctttaggtctctcactctcttgtttgatcgtttgtttgttgagggttttttgttgtccagtatgcactttttaagtgaaaacaacaatgaacttttcagtgtacttttctattttttc

SEQ ID NO: 43012 - DNA, 293 bp, Arabidopsis thaliana landsberg
caaaaagaaaaaaaaagaaaaaaaaaaaaaaaaaaaaaaaaaagaaaaaaaaaaaaaaaaaacaaaaaaaccacaaaaaaaaaaaaaaaaaaaaaaaaaaacaaaaaaaaaaaaaaaaaaaaaagaaaaaaaaaaaaaaaaaaaaaaaaaaaaaaaaaaaaaacacaaaaaaaaaaaaagaaaaaaaaacaaaaaaaaaaaaaaaaaaaaaaaaaaacaaataaaacaaaaaaaaaaaacaaaattacaaaaaaaaaaaaaaaagaaaagaaaataaagtaaattaaaaaaaa

SEQ ID NO: 43013 - DNA, 355 bp, Arabidopsis thaliana landsberg
aacttactctcagtagaacttattcacaagatgaatttttttggtttaaggtattctggagctacatgctggggcaatcaacagcattgggagcaaatcccatcttgaaatcggtaattccttatgttttattacacatactaatagagaaagtctggtaatataccgtgctttatctgagctcttgaggaagctgagagtagtcctattttttttgggtttgatcgttggactaagttctttttcttgtgttctttcaaagatacaagggatatcgatgaagcgagaagaaacaccgtgatcaagaaaattcaggaatctgctaacacgatagctaaaaaacgaaaagtgaagc

SEQ ID NO: 43014 - DNA, 600 bp, Arabidopsis thaliana landsberg
ttagatttgggtaacaatcacctttatggaatgcttcctaagcttcccccaagtctaagaactctatttctctgtttcaacagccttgcaggacgtatatcgcccttgcataggctaaaacagcttgtgtcattagatgtgagccagaacagattctcaggcaccgttggccatgaaatcctaacattccctgagattgcacgcatcaatgtgtcttttaaccagttcatatccatagaggttattaaagttacaggatcacgcctgcgcatgcttgatgctgaaggaaaccatttacaggggcaccttccgctgaacctggcaacttatgaaaacctaaaggatatcaatctacggagcaacatgttctctggcgatattcctaggatttatgggaaaagactggagaattcatggagaagcttatacttggagaacaactacctgtcaggtacacttcctgaggagtttcaaaaaattaccaaacagatcagaggaaacctatcgaacaactgtctgcaatgtcccaagaatgttcaaatctgcccaggaaccccaaaaacccaaatcacaatgcacccaatgcaatgctggggagct

SEQ ID NO: 43015 - DNA, 636 bp, Arabidopsis thaliana landsberg
aaaactgtttacctgcccttgacaatctttgctggtagcaaccagagggagttctgcaagttctgacccataaaccctaaagattcccactgaaacaatcacttcgctgcacaagaaacaaaaaaaggacaacattaaaaagatgaaacatgcgtcacagaaaataaattagagtgaaaaagaagaagaatcttactccacagccaacatagtgcagtacatgccactaaaatcttgggcctttgtttgccttctgttccacacacaaaagttgttcatcagcacaaagaataatccactcgactgattgaagatacaaaattgcttacccatacaccatggctggtatcaaatctcccttggtcccagattcactgataggatcaaaccgttcctatagcatacaattgttagaagggacaaaccagcagaaaggacagaagagtttgaaatgtggtcttgacttacatgaagaatggaaagtgcctttgcaagcaatattttggtatcatctgaagaggtcaacttcccactaaggaccctccatcttatgtcaggagtggttttataatctggacagttttcttcattaggttgttccttcttccttaaaaaattcagaatattgttacttag

SEQ ID NO: 43016 - DNA, 666 bp, Arabidopsis thaliana landsberg
ttcttataggaacgtggtttggcaaacaaagtgtggaggtaacagaagcaaattcttatattattgtgtcacatagattctgtggatgtgtatgctgaagcagaacttgcaagtaggttcttaattgtcaatttgtggtcatgtgtaggaagaaagaggttctgcagtctctatggcaagcaaaatggttgagtcaatgaaatttgtcccagcccaagtaatattcttctgcattcattcaaaaactctatgctgttggatttcatcttcttttatgttcttaacattttcattatcttgtcttaggctcgcatttatgaaggaaaggaaccaattcaattcttcgtgattatgcaaagctttatcgttttcaaggtatggagaaaaataagttcgttatgcagttttgttttatcatccatgctctcttagtctcttatatgagtatataacaatatctgctgtttttgttttctgatggaaccgatctgttgatttttcacagggtggtattagcagtggatacaagaaatacatagccgaaaaagaagttgatgatgatacatacaatgagaatggtgttgctctattccgaattcaagggtctggtccggaaaatatgcaagctatacaagttgacccggtatatgtcaattttcacatttc

SEQ ID NO: 43017 - DNA, 715 bp, Arabidopsis thaliana landsberg
  unsure (1)..(715): unsure at all n locations
taaagagttgttaagaaggagatctctctttctttttgtgtggctttagaagttttccaataccctaaggtgagtggtcaaaatcaccagattgtgtttttttccaattctagcaaaacatgcatacatataacacgatcacgtttagacatgattaggatagttgttatttttttgaatatgataactgatgaggatagtttgtggagttttacgactaattatacagttagacgacgagcttgaaaatctggatggtttcgtctcttagtttgtgtgattgtgtagaacttcagttcatttctaatattttattataaaaagaaagaaagcagtttcattggatccaaatagtttcgtagttttactatgttccgagtccaacaagttaaatcactcccgagaaagtctagagtgctgaaaaagtcctcttgcctaactcttttgcataatgacaaaacgtaagctctgacaaatagagtaatctatgttatggttttgtctaattatgtaatgtttatatattcgtttgtggttttgagatgtttaaaggccaaccgaaacaacatgttctattacatctcgtcaaccaaattatatttctttcacatgcaccctaattctagattactatttaattgtgattttcgtcttgttagaagaacaaagtataatacgattttattaaagaanaaaactataagttttacctttt

SEQ ID NO: 43018 - DNA, 670 bp, Arabidopsis thaliana landsberg
aaaccaatatattgtcaagtttattattgataaaccgaagtgtgtatgaccccaaccgaaccaaactagtattattattagacactctcatacttaaaacaaaaacacttttgactcatcaccctctgtgatctagacagttgtctttatcatcatcgcccataagatgtggaagagtgtttcaatatttataacactctattatattctagacacaatcaatatcatcctgttggacacgatcgttacactttttatttatttaaaactagtgattggtcctatgcgaagccaattctatcgtttgaatatttgaccattcatatttttattcattagttctctttttttcaaaaaaccatttacttctgtcacaagaaaccattccaccaaaaaagatgaatcgtcggagcagaagataattatggttgtatatttattaaacaaacatcagatttatttcatggtggtttatattataattttcataaattagaagatatgattcaaagaaaggagagtcgaaacagaggaattgtaaattagatctttgaatattttgtctctttgaatctttaaaaccaaaaacctgggaaattatgaaattaccacaaaacatgccaaggtactttacaaaaacaacagcaaaatttgctacacattctgcaat

SEQ ID NO: 43019 - DNA, 469 bp, Arabidopsis thaliana landsberg
actcagctgccctggggaattgcagtagttggcaatgatgtatatgttaccaccgatttcacttcggcaggttgcaatatcataaaacttacttactccggcgggacctataccgcgtcaactttcaggcacggctcatattattccgcgctggcagccgacccgaacgacagcaacagtttatatacagcacaatacgatgctgtaaacgataaatatgcagtttataaacacaacattacgggcggcgacagcacattaatttatgataaccttgccagccgtgctggtaattcgtaccctacggggctggccgtatcgccggtgaatggtgatgtgtatgtaacgaatgattttaaccaggatggcagctatccttctgacaagggcggcatcattaagctgacaaaagcttcttcgtattcaagttcggtattaactgccgacaactacgcgaccgcgctggcct

SEQ ID NO: 43020 - DNA, 783 bp, Arabidopsis thaliana landsberg
acgaaattactctacatacgtcttcttttaaaaccctattcaaagttaccatttttatgcacatcatcatcttcattgcagattcgttggagaaatggactctctcgcaaccgatccagctttcattgattcggatgtatacctcaggttaggacttattattgagggcaaacgattgaaaaagccaccgactgttctctcacgcctctcttcttctctggagagatctctgttactcaatcatgatgacaagattctgcttggatcgccagactctgttaccgtgtttgacgggagatctccccctgagatcagtattgcacactacttggatcgcattttcaagtactcttgctgcagtccctcctgcttcgtcattgcgcatatctacattgatcactttctccataagacccgagcccttctcaaaccccttaatgtccaccgccttatcattacaactgtcatgttagctgctaaagtcttcgatgataggtatgttactcactaaacctggtatcaaattcaacacgcaaataagtcttcaatcatagattcattgatctctggtgttgtgcaggtatttcaacaatgcatactacgcaagagtgggaggtgtgactacgagagagttaaacagattggagatggagttgttgtttacccttgacttcaagcttcaggtagatcctcagacgtttcacacacactgttgtcagttagaaaagcagaacagcgacggcttccagatcgagtggcccataaaagaagcatgccgagcca

SEQ ID NO: 43021 - DNA, 668 bp, Arabidopsis thaliana landsberg
tttgtagctatgtctctgcagtccggtcttgttagccctatcatctatcgtaatcgcatttctagattctaaagacgcttcatcaacctgaggaactgatgatggagctgtattcactgtattcacagtgccctgcacaaagattttcagtattttagggtcaagaaattgcataatcggcattttcagaaacgaaatgactaaagacaggttcttgaggatatatgattttaaaaacgcaccatatcgagttgacttgcatcttggttcttggcatcagaagtaacaacagaggtttctgtttcgtgtggtgccactgccactgtggttatgttaacacccagagggttgctgatggtatcaataccagcctccataccgtttaattgagaatctttggattctacagcattagcttgatccttgatcaaagttcttgatatctttgatctattgtcctgatccccgttcgacatagctggcctctttctatacaacaaatacacttgttcacaaaacgatgcacacaactgaaaaccccggaaagaggaagattaatttaaccactcacctactaaagctttgatctgccggcagaatagagctgcgcttgtttgaaaacaaaacaccacgaagcactttgtgcatgtttcatgtgtggcatagtt

SEQ ID NO: 43022 - DNA, 466 bp, Arabidopsis thaliana landsberg
cgcattcacatacattcacataattcaatccaaagtttgaaactttatcttcttaatagtctaaaaatcaaaactttcgtgatttgggaatttacctgacctaataaactaacagcataagaatcaaacccagaagaagagaagaaaggtaaccaatgttcagcccaacaccaagctgcgtgatagcttccatgtacaaacaccaatggtggattctctctttcggatttagattttctctgctcgattacctccatttttagaccagagggcagcttgtggaaaagccggttttgcccctttttgagttcgtatggaatcgttgttcttggggaattggtgagagctgctatgggcttaatcgtcattttgaaagaggataggcatgggaacgaggcaagtgaagaagacgccatcatcgctattcgttaagctcagagctgttctgacttctgaaaagagctct

SEQ ID NO: 43023 - DNA, 508 bp, Arabidopsis thaliana landsberg
  unsure (1)..(508): unsure at all n locations
tagaaactattagactatacatttttttactatggaaaggtttttattgttatctacgactcacatattttctacagaccacgtaaaattcacatgctaatttgacattatttgactgattttttcatctcaaaatatttttaaactaagaatcatgcatcaaaagtcatggtaatctttggatatttacttcgagaagaactagaagtattttatttagctttgntatattatataaagattctaagaaagattaaggaggtcatgtcggggagtgggttgagttgtattaagtaaacgcctctctcatatttttaatgacattttttaaaatgtttaatgctttaatttaaattgttccttaaaacttaaaagaactataactttgacctaaactacaaactaatatttttatcattttgttgtgattttttggctatacatcaattctatcgagaacacataaaactagtatcaaaacataccacattttatcaatttgttgtta

SEQ ID NO: 43024 - DNA, 1063 bp, Arabidopsis thaliana landsberg
gacgatccagctgtccgtggttcacacgtgtttagtactgttgatgatgaaagtaagccatttcgtttcttgtgtttatggtgtctctttactttttagttatatgttatgtttgctttgtggatataagctttaatcattaatatattcttagaatcacttatacactgggagttactttgcagtctgactatattactttgcttgactatttattctgcacttacaaatacataagattttcagtttctatatgggtattggtctgcatcctttttccttgactctagttgcatgggactttgtgagttaaccgcagtttttgtttagtatgattctctgtactagtgtcttttggtggagaaattagtatgacgcttctttatgtaattcttgtattgatctgcatctcgcgattttcttacatgaaattagattggggatgtgctcattgtttcttttctgatactgtatctccaatttttgataatcttgactcctttccagtatctatgaaggagatgacagctaaaacaaaagagaagaaaaaaaatggaaaaggtagaagactaaggaagaagtttcaagtttctgattcagattctgatgaaacttcggctagagctgatgaatctagcaatgaggattctgtagaagtacttaacaatggtaatgagcccaagatcgcgaaggtccattcttcagagagtcctctgccttcaagggttacgaggtcgaaggcaagaaaatcgactttggaaagtggtgagcctgccaagtgtgagaagacatttgaagcaaaaattaatactcacaagactctggataataggtaagtaagtttcacccactacagaccaaattttaaccttttataaatctattatgtttaacatgccagggaggataaaccattggatgatgctaaactgtctcccgtccagaaagactgtgaaattctttcgaagaaaaaaagaaacaaggaaaggtctaaagagtcagctataattattgactcagatgacggagaggggaaaaatatgcctgaaagtctcagaatgag

SEQ ID NO: 43025 - DNA, 1525 bp, Arabidopsis thaliana landsberg
  unsure (1)..(1525): unsure at all n locations
ttaagtaggcttcttttgtttaaattttaatacaacacatggttttgttccagtattagtgtcacttaccgggtaaaccggtgaagatctcaaactgctcgtaagcctgcctgacaaacatctctgaccctgagacagttatggctccactttcttctgcttccctcaacagtctggtgattctcggagtgtataccgcatcaaagaccagtgcatagtgcttcaatgcatcctgggggaaacaaagacaagctagcttactaatttgtcttatagatttaagatttcaacaaagtttgcatgcgataagctggcttttggtatttcaataacagaaaaaggatagaacagttccttcattacctatagaaaacaaaaggatgagctgttacaaggagagcttaccttagaaattggagtctcctcaacatttggttgcatacccatagatgtggtgtttgccaaaaccatgccatcttctgggtgatagttatctaaatctgtcagagataacgctttgcctcctattgcttctgcgagttctagtgctcgttctttagaaacacaacatcaggaacaaaacaaatcatatcatcagttactacatctaacattataaccaataaaagacgaggagaagaagagtattgtcaaggtcgagcatgaccggtaatagaataatctaaggtgttcacaaagcgaaatttccaattaaggacatgtattttaccgtaagttcgattagcaattacaactttggcccccttttcttttgcaccataagcaagagccttgcctgctccaccagcaccaataaccaccactgttttactggccaatggcgaagaagaagaaggtacactgcttggatcacctgaacctgaaaaaacaaacagaggagaaggctccatgactaaaaccgaaacttctccaaatggagcaaaaagctgtgaacatagacttacttcgtaggccatcctcaatagcagaaatggaaccaatacaatctgtgttgtaacccaacaactttccgtcactttttttccttagtatagtgttcacagctcctatagactgtatgatattaaaagtaaacattcaggttgaagcaggatggctatttatgctatctgatagtgattggggttgcgaannnnnnnnnnnnnnnnnnnnnnnaaatcagacctttgccaatggatcaacttcatcacaacattgcaatgcagcttctttgtgcggaattgtacagctgcaggtaaaaaagatttacatcattcaccccaaatttttctatgcctagcaaaccttaacaaataaaaataaaatctgtatgattctgttcactactctagagaaaaaacaatttttgtcaccgttatagcatacctgaatccagcgaaatcagaggatgagtatgcttgaagaaagcttacaagattatcaactaacaggtggacatatcctccattaaaatcaactgatttgaaagcttgatatatgaacaataggtgatttgctgtggctg

SEQ ID NO: 43026 - DNA, 560 bp, Arabidopsis thaliana landsberg
ctggctattgaggatatattgtccggcggtaggcgtatcctttcagcttagtatgttcatgagcgtggatttgcctgaacctgaaggccccatcagcgcaacgtattcattaggatttatctgaaggttaatgcctttgagcacaggcaactcatttttccccaggaaatagcttttgcggatgtcattcaggtgaataataggatccatattgtgacatataataatttaatattcatcaaagataacacatcacataggatattggagggaattggggcaaagggcttaaaattctttcgggaataatcaactgtaagtcagcagcaatactatcaactaactataaaatcatgaagctgtgtgcttacaataaatctctgtatattttatcacgattatccgactaatgtgggctgaagtgcgttcctattgattttcccgtttaccaccccggtctctacgactgtagaggccggggttatgaaactcttatcacaattgggtttaaccttaacgggtaaatttagtctgacacaatgatatttatcactaaaaca

SEQ ID NO: 43027 - DNA, 242 bp, Arabidopsis thaliana landsberg
atggagatcttcagagtccggtttcttgtagataagcttggtatgaagaatagtattcatatcattgaaacagcttcaacgatattcttgcctttgtttaacatcacacagctcgccctgcatattttcaaaatgcaaaattagacaaagaaactgcaaatcttacaaagatcatgtctaatgcaaaatattttacctttttgcatttgcagtattagtaatctcagctctagctggaactc

SEQ ID NO: 43028 - DNA, 677 bp, Arabidopsis thaliana landsberg
cacagatattggatagcgttggccacacatatatttgtatcctgaatatttccaaaacattacactgcaattgactataagttctcgataggattgtctatttaagatatctggacaaaacaatattggtaagggtggataacggataatttgaattttgaaaataattacacaacattctcaaacaaatacaggacgattgggtaacatgacgagttggtggaaaattctaccagttaaaacatagaatggaccatcaaagtctggatatgtggtttaagtatttgaaattcaagacattcaaatatgtctgtgaacggctacatgtgctggtcataccggtgcgggttctttctggaccttcatcaaccgtatttaggtcaccattcaaacaattagatgagtttttgtcattgtgtgcattagtgagtttttacttaatttaaaataaaataatgtatgctttatgagagggttcatacatatccaatatttttacgtattaaataaatgatgtaaaatactctatttttttatttttttaaaacaaaagaaaaaaaacaaaaataacaaaagatcatataattttatttgagaaaaatatattatttgggtttttattgtactcgctatgtattgatagacttgtttcgtcgattttgtaccaattagctaat

SEQ ID NO: 43029 - DNA, 1029 bp, Arabidopsis thaliana landsberg
gaggttgggttaaagggatttattatgggagatatgataaggccctccatgggtcaaaaaatttcgaaggaacttccctggtcggcatcggcaagcaatgccgcgaaaggtttcttacatttttctttcttttcacatttggtttgtgaacttgacaagtccacagtttccccataaggctgattaaatgtttgttatgttttaggtggcataatcatttgaatccgactattataaaatctccatggactagagaagaggagttaattctcgttcaagcacaaagagaaaacggcaacaagtgggcagagattgccaagctattgcctggaaggtttgtccttaaaccttagaaaacattgttgtggatttaactaaccttcttgttctggtcatgaaaactcacaggacggagaataatattaagaaccattggaattgctcagttaagaaaagactagagcagtttcctagtaacctcttctctggtgtggtctatggttctagacctagttctggttttgaatacaactttttcaatcaaagaaacacgatggtcgagagttgcattacatcacaaatcaaggaagctgcaaagagtcctcagagggatttcttggatttaactttaggactgaattggaggagcatgccttcatccacaagctctcttataggagaagaatcagtctcatcatcagtagactcagattgttcaagactcaatggtaaggctgaaatattatcttattggatacgttcacatgttaacaagtctttatgtaaaagtttcagcgtgtttagaaactccagagaacagcaacaacgatactgtgtgcgtaaaggaagtgagggagatgaaagagagacttagaatggctgcgaggactttcgacacaccctccattatctccaaaacaagctcaccagcttcaggtttgaaacggctcagacaaagatacgatacaccgtttccaacagatgctcgaagtcacatgtcaagtgaggaagatcactcagtttcagctt

SEQ ID NO: 43030 - DNA, 635 bp, Arabidopsis thaliana landsberg
atggcagatttttcaatgcctccagctcaaccagtggctcttcctccttcttctactcctacctcaacgcctgcaacagcaaaaccaacatccgccccatcctcgtctcatcctccactcaagagtcccatggctggtactttctatagatctcctggacccggtgaacccccttttgtaaaggtacgaaagaaaggaaacttataacctgcaaaatatttgttattggttgaagttgaatcaaagtcttgaaaattctctctatcgagatatgaacagttattacatttgaaatggatgtgggtttgttttctgtttgcaatttgcaggttggagataaggtacagaagggtcaaattgtttgtattatcgaagctatgaaactgatgaacgagattgaggtctgatattcttctttataacattgtgataacttacacttggaaatttgcgaatttgaggtttcagagtctttaacttgtgaaatcgtgtcttgaaaacaggctgcgaagtcaggaaccatcatggaactactggctgaagatggaaaaccagtcagcgttgacacggtaccgatctctctcttcgttttttatttttttcaccagttctttcaaaatcttttgaacttaatg

SEQ ID NO: 43031 - DNA, 144 bp, Arabidopsis thaliana landsberg
tgtcggagttgaatcttcagagagaaacattagagaggggtgttcatcttccacatctcaaggagacacccaaaaagaaaaaccaaacctttgaagaacgaaaagggttattaaaaaagcaacaaactttgagagtaacaaagg

SEQ ID NO: 43032 - DNA, 702 bp, Arabidopsis thaliana landsberg
tactcttttgtaattgcttaccaaactcggattcgaaattcaacatagccaacaaacttaaacataaaagctcattgttcaatcaaattaataagctaatcatatcagaactcttttttcaacaagctatattaatattagattaccaaaatcagaataaaccaactctttttatatgaaataaagattccgcaatatttgcttatacgatgttgaccaaaagaatgtacatatgaacaagaacaatcaaaccatcgggaaaagaaaaaaatatataaataaatattcttgatttcttaggatcttattcgttttgccatgtgcttccaaattttcgattcgatgtatgttggaaaaattactcgaacctcatgtgaacgcgatcaatttaggaagtatttattaaaacatcaattagactgatggagtgatggtttttccttccagtttctgttaatagttttaacattcacataaaaaaaatttattttctctttacattcatagaagaagctttctttattttcttacaaggtttgaaatagttcaaaatctaatgtgaaaaagagggacattagtcattattcgaattacttgccatataagattttttaaaaataaaatcgaaaggatatgagatagtcggacatccaattgacgatgacgtgagcagatatgtagattcagattctttcaatcttt

SEQ ID NO: 43033 - DNA, 673 bp, Arabidopsis thaliana landsberg
ctatacatacaatggagatattaacgcaactatagattgttcaaattctttagcaaatgttttcctgtgttttcacttgtctgctctcatggttcctgttttgagtctgttgcaactcctaacaagatcgatactccgctgcatgaattttggcgatatatagtcttttcgttgtttatttagttggaagagttaattggttagttgagcttgcaagcatattttccattatccttctagttcagatattcaatttcgctttttctctgtgcttctcaggtatgtgtcaaacattaatttattttgagtgtaggtacctgtggtgactgcaacaattcctgttgatcgtagctgccaatacaatgaagggtcattcccgtttttcagaggtttatcagattctgttacgtaagtccctgctcaattaatcttttgaaaatcaatataactataattttttgcatatctagtgtaaaagagcacttcatttaaaaccatgtcttttggatgatatgcagagtgatgaatggtataaatgctccaaaagtagttgaatgttttggttctgatggccaaaaatataagcaacttgcgaaatctggcaatgatgacctcagacaagatgctgtaagagtttcggaaggttttacttgcaatgtctataaatatgata

SEQ ID NO: 43034 - DNA, 656 bp, Arabidopsis thaliana landsberg
cgtagataactattaatatcccatcagatattgtcaggacaaacagaaaactattataccatatagttgactggatgttttctgcagatgaggatgagactactgaagaaactactgaatcgctagacagccaatccacaagatacataaaaggatgtctcctgagcacatgtgggacttcccttacagtattccttcttcgtgaaacttcccccttatataaggtaacccaagaatctcatagaccatcttatgttagttacatataaatcgtgtcacagggcatcatactgaaggacctattatataatgttttgctactgacaaaggaattggtccaattggtaattctacctccttggtccagtttcaaccaatttttttttttctagtacaaatgaaattgtgaaacagaaactatgaataaattctttagctctactatgtgtctagactgtagttataaacataattctattatttttcttggcatcttctcatagtcttattttgctatgctacaactgttacagattactgaagttgcaagcaccgttgtaagatctgatgaagaagctaggaatggagacattcgtgagagcagagaatatggaaaagctttatttttgtcagccaaagattttgtgagtgggaat

SEQ ID NO: 43035 - DNA, 1547 bp, Arabidopsis thaliana landsberg
tctatatgattttggcaaggtttcaggacgcattataaaggaatacataacctgcaccgacctcattgcaacaaaattagcttgctgaccataatcactaccaaatcacattggagagaatacgtatggtacacaaaaatgtctttcaacgtctatactatctccattactaactagaacaggaagaaaagagaagaatctcaaatacctgagcacatgcaagagaaaaaagtaacgaatctccatgtctccaatggctaccccaaagatggaacttgttctttgacttagcggaattataagccgcctattaataagagaaaaaatcagactccgaaaaaaacatctgtgtggtgatattactctgtacgacagacaatactatgaccattagatgtacctggcctaatctagccaagaggtatagagcaagtgtgcgacgctggttggaatcatctaaagccaagatagacaaacccgcaactgaacctgctaagactctgctccacccttaatcaaagtcataataaggaatatacttttcaagcactatgcacaaagtaaaaagtagaagcattataagaaaagagatacaacaatcgaaatattaggcaacacaaataaataaaataaacttacgaattcaatggcgtctctttctttctccacttcctcaaacagcatctaagggcatgatacgagccagtaaagccaccaaaaagtagaccaatacgacatgcttcctccctaactatcaaatctttctctgaaacaagttgctgcaaccattgttcatgtgtgagtgaatcgcatatacaatgataagtcaataacacattggccatagtttcaaaacaaccgtatcaaatggaatactaaagcagagactcgtaagactctaaatctccagaaattgccacaaaaacaaattccaattcatcaattcctcaccttaagatcgagaagagacgaataagactgtcccctagcgagcttaaaagcgcgaagaagaatcccgatcccaactctaacaccataagagagaagaaagctctgacataaattcccaatggcattggcgacgcaagaaacgtcagcgtgatcacacaattccgcgtgagatccacgcgccgcagagcgttgtctacgctgaagctccgccatggcatcgcgtagcctctcctccgcttctcgaagccggcgctcagcctccgagctgtcttgagataaaggagaaatcggtggaggcgaagaagaacgatctaaatccggcttggagaacgaagaaggcatcgtcaattaaaaggaattgaaatcggaaagcttctcaagctcgtttgcttaaaggaaatgaaatgatgcaatcagagaaaaatgttgggagcagtgaggaagaagccgatggggatatgctatgacacgtcatttctttatgatttttgatttgtttcttattttcttttttgggaaataatccaaaagatttttttttagcataaagcagaaagtgtgtataagggcctgactagtttaaacgcagcgaggcg

SEQ ID NO: 43036 - DNA, 693 bp, Arabidopsis thaliana landsberg
tttaagttttacgacttattccacgctttttactgtttccatgtaagttaatattcgatgaaccaatgagatacggacaagtggaaaactatagtgattggttggttctaaacttctaaaatgcttttgttctgtcattctgtggaccgactcgtgcaacttctttcccataaaaataaaaataaaaataattattctaactattttcaaaaacctatattactttttatgatatgaaaatcttcgtcgatctcatctcttcctctccttttagtcgagactcttcctgcaaagccgttaaaaagtattaaccagtttgcactacctttagttaaatgttaagtaacgctgctttgaaactaggcattgccttgcagaattgatgtccatttggcgttaaagtcaataccaaagtcactaacgtccatcaatctattaatgtgtgtatggtacactgataaagcaaaactcttcgtttaccttgataatgcgtttactattgaaaagttgatgagaactagatacgtctccaaatcattatagtggtggtatatcaatgcgtttttgttctagatcatttccactcaaataacacctttagcaaatgccatcgacttttggctaacgccgaaaacaaattcttctttgtaagcatccaacacgcataggctattttttatggatattatataa

SEQ ID NO: 43037 - DNA, 728 bp, Arabidopsis thaliana landsberg
ctccgtgaatgacgccaaagaaactctcatatttggagaagcttgagaacttaaatggttttaggagccctaaagataggcattgaagatgaatcaaaagacatgtgaacaactaaaatgatacaattgaagaagccatataagtgtgtatatttaggcaaaagaatgaaacaattagcaattaactattatcttccttccagttttgtttcttggacagagaagtaaaacaacatgttacccccacatcaattctcaataattttgttttgataaaaacaaatcatttactataaaataaaataaaaaattcagttactaattcattttattgtataaaaatcatattgagaaaataaaaacaaactacaaacagcagccacatttgactacttaattaacagttaattagtaatatgtttgagtactatgcagaatatgtaaactaaaaaagaaatgtcatcataattttttctttttgtgtgtgtgcacatgaagtcgtttgctccgataagaaaaaaattgagtagcaaagatacgattttcttttaatttttgtaaaaatccaaaaacaaatccaaaataattttaattggacgattattatccgttatttttatattagaataaaaataccccaactaattatttgtgattttaaaatacttcataaattaataatttgtggaattaaactcgtaattatttatatacaaaatatattaaaa

SEQ ID NO: 43038 - DNA, 121 bp, Arabidopsis thaliana landsberg
ttggggagatttgattcattcgattcaaaatcaaatgtccgagttacctgggcctctggaccgctagaacccctaacccgcacggtgttggctgtttcactgaaacccttgccttcggttc

SEQ ID NO: 43039 - DNA, 612 bp, Arabidopsis thaliana landsberg
  unsure (1)..(612): unsure at all n locations
gctatacactgtacagtttttggaaattaatagaaagccaccgtaattatgcgaacttttctttaaatatagtgatgtgatgtccatgtggctacattcaacgcacaataatgctgtcacttcaatattttggaagaaccctaaaattattagtatctattacccgcatgtttaattttaatcaactgttggttaatagtgacttaatatcaaatatgcgtcgaaggctagctagtattttctcaagagttttgttctttattatgtcggattttgggacatatataaatagatttaagggttgtcatttatcactcacaaggtaaatagaaagtaaaccatagaagtaagaaagtatcagcctcaaacaaattaattgtttcttcttgtttacgagttttctagttttgtccgtatagtaacacaaaaatagtattatgcttaaatgatgactacaaaaatacgtgacactcgtcacaagttttgttttctataattagttataggtatatgcttaaatttttacttcgtatcatagtcatagacctatacataacagntggttattatggagtcagactaatagtacctaaatctataatatataatcta

SEQ ID NO: 43040 - DNA, 634 bp, Arabidopsis thaliana landsberg
ttagatgttttgcttagggttccgttgttgtcagacttgaattcatggtgtcactgggatcttaggtatgctccacagtttggtcctcttatgggctgtttaaatgagattaattcaacagatctgttgtgtctagtgacaagggatggtaagattatcagagcagatccttctgcaacagcagattcattcttagaggctgctcttcaaggatctgcttaccgtactgctgcacagttgttgtcattgatatcattgaatggaagaacacatctaccattttcccttctaaaatgctatgcaaaacgtgcatttgaagtttttttttataactattccgaggagattgagctaaatgataggaattctcttgtgcaaatgcatgggccagaaaagctcagcacttcttttgacaaagtgatagttgtaggagagaaaactaaagtggctaaacgtgactatgctgcctctaagtttcttcttgattgtctgggctatctacctggggagtttcgcagtttagttgttgatatcttgctaccaggactacgttctgttgttaaagatgctcctacaagagttttgtctgcatgcgagcaaacagagcaacgcatcatgctgcatgatgccggat

SEQ ID NO: 43041 - DNA, 215 bp, Arabidopsis thaliana landsberg
  unsure (1)..(215): unsure at all n locations
cccccccccccccnnccccncccaccccccccccccctcctattgctccccccccccccccccccccccttttctgcccccaccccccccccccccctcccctccccccccccccctcccgntcctctctctccccgggtgtttggcgccccccacaccccaaccncccctcccccccccccccccccctccctctcccctccctcccccccccc

SEQ ID NO: 43042 - DNA, 988 bp, Arabidopsis thaliana landsberg
tgcttgtctgtaattgaggtatgtgtctttttgtagaagcaaagtctctagttgccatagctacggaagaagaaaataaaagagcattaaaatgtatgaaatatttgccttgatgaatcatttaacttctatagataaatataacattcaagatgtagcagtcacatgtttttttttcttttcaaactctatcttctagctagcaattgaaatagtctattgtaactacttcacctaccattgagttgatgaaatagaaaaaaaaaaagtttttatactatatttgagctactgaatctatactttataatggacaactattctaggtgtcagcaaaatgagataagagtagaaaaaaagcaaacatgaaataatttaatgctatggtaaaagaaattggctccttttttcttataacatgtgaggtcatacattatataaaagaattattgaattcctatttatgggcggcggttttacatactttattccgtttgtgtaacgaaagtattgaaaatattttgcaataatataatactcacatcatgcaagcacggaaacaaagcatgtgatggtggaaaaagattcaaagatttgtacagtgtgtattaaaaccaacctctatgtagccaagtctttcaggatctaactcttccataatcaaagctgcatattcctctgcttgttcctttaatcttgatagcttatttgcagatgcactcaacattattatctaacatattcaaagaaaatacaaaaaagcaataacgataagaaggatttttttcttcaaaaaatgttaagtaaaacatctctattgtatcttgtgtcaccgtcaaatattagattatattaaaacaagttgattattagtcaaaactaattaaacaataacatatttcagcatagttacagataagaaactaaacgaacatgggtttaactaaaataatgacaagaaaattcgtattttggttctttgatattt

SEQ ID NO: 43043 - DNA, 1176 bp, Arabidopsis thaliana landsberg
acgcctacactacaatcacttagtttttgatgttgtttttttttttatactttagacttagagtgttgattaaagcatttctacaatcaaactcatatattttgtttgttcaagtttatattaaaacatatcttaggactttaattattgattaaacaaaccaaagcaacaaatagaccgaaagacgaccaatcattgttcggctactaatcaaatttgttttttttacatttttaaacacttggtcctaaacgactcttatatatatatatatataaagagatcaatacaatatagtcgtgatcagagtaatatccatctctggaatagcatttccccacccaaattcagaaacaaaactacaaaagtgtatcagcccacaagggttcctcagtcacaacaacaacaagttattctttggttacttgtggtatacgtaagtataattgattagatggtggtgatgctgacgcaagaaatgagtggcggtggtggtccaaaggcggaagagggtcagctgtttgtggcggtggccgtgaagggtttgatcggagacaaattaggcggtgcaggaagtcgtcgtgccgtacggtgggctgtcgataatcttttaccgaaggctgataaatttgtgatgatccacgtcatccctaccattacttctattcctactcccagtaagtctctctcaatcattcacatttttcttgttattgttattaaaaaactaatgtagatgatataaagataaaatgaagtaaaccaaaagacagaaaggaaataataattacgagttttttttttttttttttcacaccaaatatatagaacatgaaggaagaaaatgtgaaaagtaagtttcacaaatcttacaaattatgttcgtatgataatcaaatgattaagtaattactttttcgtagtttgattttaatgaggtgaaaatgttacgttttttgtatgttaaaaagtaaattagctaattcgacttatcaaaatttttgtttgacatcttttaaatacttaatttatcattgtaatttaaagatattttgatattaatgtttacgagaatgtgggttgttacagccggagatagattgccggtggaagaagtggaggagagtgtggtggaaatgtatgtaagagacgtgaaaaaagaatatgaaacagtct

SEQ ID NO: 43044 - DNA, 518 bp, Arabidopsis thaliana landsberg
aaagtacggtgcacaaactgtttcaactgccgtggtggctgttttaatctgcacagggacgattttttctgaatgactggtgtttcttgatgttgtgatgccaacagcgacaaccatgagaacgagcaaggctgtgataaccccagcaatgatgcatttcttctttttcagttcaccatcaacccccatttttttgtctggtggattcagtttcaagagaacaaaagaaaagaatttagttggaagggcttaagagccccttgtgactctgttttggttagaagatatgagagagaagagtggacttaacaaaatataatgaagaaacaaagtgctattgttaggatttatgtagaacatgaggctgtgaattataaggcatcatgtcagattttctgtcattagagttttgttttcccaacaagtcaaggttttagctctctgaccaatataacaaggttggtgtctttacctctaaaaatagtaactattgttagatcttagataccaaccagtaa

SEQ ID NO: 43045 - DNA, 825 bp, Arabidopsis thaliana landsberg
gggaacaaactgatcacatcttatttcaaatgtggatgttcagtttctggaagaggggtttttaatgggatgtcacatcgaaatgtcatcacttggccagctgtgatttcgggtctgatacagaatgagttacacgaagatggtctaagattgtttagtttaatgcgtagaggattggtccatcctaactcagtaacttatttgagtgctctagctgcttgttctggttcacagcggatagtggaggggcaacagattcatgcccttttgtggaaatatgggattgaatcagaattgtgcattgagagtgcgctaatggatatgtactctaaatgtggaagcattgaagatgcgtggacgattttcgagtccacgacggaagttgatgaagtttccatgactgtgatattagttggtttagcacaaaatgggtcagaggaagaagctatacagttcttcattagaatgcttcaagctggagtagagattgatgcaaatgtagtctcagctgttcttggagtttcgtttatcgataattctttgggtctaggcaagcaactgcattctttggttatcaaacgaaaattctccggtaacacctttgtcaacaatggactcattaacatgtactcaaaatgtggaagatctgaccgactcacaaactgtctttagacgaatgccgaagaggaactatgtttcatggaactcgatgattgcagcatttgctcgccatggtcatggattagctgcctttgaactatacgaagaaatgactacgctagaagtgaagcctacagatgttacctttctatcactacttcatgc

SEQ ID NO: 43046 - DNA, 723 bp, Arabidopsis thaliana landsberg
cttaaaatttgtatccttatttacaaccaatacattactgaaaatttctaaataacatatcaacaagtaatttcaaaaccttgttttgtcaatttaatatttttatttttacaaaaaaaaatctgaaacatgcaaagaagcacaagtaaagtacaagtggaaatgtatgaaaataggaatcataaaactaattttttaatttaatgataggaatctgaaaaaagcaaaattttatcacatcccgaataaagaggaaaatgcaaaatatgtctccttttctcactatgacaggttgtttcttaaagaagcaacggaatttaacattatagcaaacattaactatcaccagctatcatgcgcccacctctccaccgtgctctccatcatcatcattccatatataaatcattcacttgtagaatcttcttctctttcacactaaaattcatcgatgacggatcctcccagacccgacccgtttcctgttacccgactcgattccgacgccggtgctctcttcgtcctccaatcaaaaggttaaacccatatatttatgatatagattaatcaatctccaattttggaattttaactgatttgagaattaattctcaggcgagtggtggcacgccggatttcatctaacgacggcgattgttggtccgacgatattgacattaccatatgcgtttagaggattaggatggtggttaggggttgttt

SEQ ID NO: 43047 - DNA, 391 bp, Arabidopsis thaliana landsberg
cacagcgtgcgttggcgcttcgactgatccagaagaccggggtcaggaagcggcatatcgtccagcccatcgagaagacccttctccacccgggctccgaggagcggaaccggatctacgagctggagtccaagaagaggtgccctgaggtcatcgagaacgcgctggccaacgccggccctgacggcgcaggacatcgacgccatcatctacgtgtcctgcaccggcttcatgatgccgtcgctgaccgcctggctcatcaacacgatgggcttccggtacgacacccggcagctccccatcgcgcagctgggctgcgccgcgggcggcgccgcgatcaaccgcgctttcgacttctgcgaggcgcacccggactccaacgtcctgatcg

SEQ ID NO: 43048 - DNA, 501 bp, Arabidopsis thaliana landsberg
ggatgttaacttttaaattatatcttatattaaatttctatttaagtaattttaaagagacaatgagaggatttcttgacaaacgttacatttaaatcattaaaaaccctttttaaaacagaaacattccctcaagatcatgaaaacacttattttaaaatagagaaagattagtagtattgttcaagacttctagtcaatgtgaaagaatagaaaaatcaaaaacctgatgctagaaattaactaaatcattatagtaaactagtaatgaaagaactaatggtgtgggcaacggcgggagaagtaactaattgggattaacgtacattgtagaacgcaccctcatgtcacatctatacatgtcgctcttctagtcatcttctctgattctatcacatgtcaattatggcatacatcaattactagtaactaacaaataatacactttagaaaccattaaatgcatgggatgggcagaccatattctgtcgtaacggaaac

SEQ ID NO: 43049 - DNA, 450 bp, Arabidopsis thaliana landsberg
  unsure (1)..(450): unsure at all n locations
ataatcatatatttatggtttgtcacacttatattctctgtcaccaaatatttatgtgtatgtatgtatataaaccgacaatgcataacggatatgaaaaattagtattagatcaccattatttacgaaaaacccatctacaattacgtatttacgtagtgcaaggatagatttttttcattatgtttaaggatatatattnnagnnnccacatatatttattaattgttgaatagataaacagctgttagctgatgtaatcatacaactaatttggatgatccttacatcgcatcctttgactaaacccttttttacgtcgcatcaaattaatttggatgatgcttcttttacttgaagaccaaagcaacgcaaaccattagagtacaattataggttaacaatccagattgaatcctatacctttctaccttagtttttcaagtaggc

SEQ ID NO: 43050 - DNA, 500 bp, Arabidopsis thaliana landsberg
atttaatcctagcacatatttagatacaaatatacaattattttgcatcagctttcatacaacatttgtgtgcgaaattaaaattgaagaatatataagaaaaaataattaacttcgaaacgatgcatgtaacattctgtttgtcaacaatatgcataatacaaatttaaaattgcatggtgatacaacgactatacctataacaaatcactagtttacatgtgataacctactatatagatgttacattgtcaccttgattttttttttttttgagttacatatcttgatactgtctaacccaaaaatattgataacagtttgtttctttcacaaaaatggttttaagatatcaatatacaattttcgattttctatattcttgaataactaactttatcatttaattagataatcgaacctcttaaattaaaattcatataaattttcttaacaaatttttttacaaaattaggttgatcaaaatttacatgtctacg

SEQ ID NO: 43051 - DNA, 694 bp, Arabidopsis thaliana landsberg
aggggttattaaatcattgattttaaaattcttgtcaaaaactttgtaatattggttcattgatttctcaagaccagttgaattccagttttttttgccaatgattctcattatattctcatcatataaaaagtttgacaattttgaatgtagttttaaggtaaattatacaaaaaagatttggacgtcttagcatgcaagcgtacttttaccaaacaaaaagaagagtttccaaacgtttcgcttctggttccatgtaagtatgtaacctaaggggacaattcaagtatttttttctatttattgtcgttttgtaaacagagttttaatgaccaattgggctttgtgtcctttatattgtcagggccggctttgcagagacataaactagaattgctccagaacaacatcttcttctacaccaccacaagctgcctcttgtcttttgttataagtataagatttctgttgttgtattataggaaaattcccaattggttatgccgacttggatttgatttttgccgagcaaatgactgtgatttttattccaaccaaatagacatatatccgtgcatgtcccatatcccctaggatttgatgctgttgaggagtagaaacacaaccgttagatcttcgatccccgcacaggcgtcatatcgtctacaatggttctttttgtcaaaaaattagg

SEQ ID NO: 43052 - DNA, 1150 bp, Arabidopsis thaliana landsberg
gggggcacttaaatagggaataaactcatgcctacccaatatgctataaaccttaataaattgaatacgaagagctttttaggaaccaccggcattatacacctttctcttgaggaaaaaaagctgagataaaccttcccttggatccacaaacatggactcttgtataagcaatgctgagttcttttttctcttcctcactcactactagttcttgctagggaatgttctagctagctaacgtaacgtacttacgacatagatataaaaaatacccatcaaaaaaaaaaaaatagatttgtctatgcaaaatactgggtattctcttttacaattgtaaagtgcggatgcagcggagagtaaattttggagaaacttgaattttcaatcgaagcactagaatgttttttttatcaatgtgtcacggcgacaaaatagtttatttatttggaatatgcataagttaatgtgtgccccccaaaaaaaaatgcattagttaatgtaaaacaagaacaatattacctagttttattccacaaatatatgatatggcaacgaacttttcgataatattgaatgatgattaaagacaaaagtaacacgtaaacttgctcatagttttgggaaattgtatgttaatgaatgcaaaatatcatagatgtatgactcaagattaaaagtacatcacgtgtacatacatattacataaaagggtattaatcagcatattcacagatagattttgtctatattgacttcaatttcttaaaatcaacgtcaaattagacgtcagtgtaataataagaaaatggagagtgagaatcctgtgggctaaaacatatatgtatgatatgatattgagcatattgttgactagtttaatatagagaaattgtattaattaattaagtcgagaaagtaaatatctcgaagatttttatggattacatgacgattaagaagataaagcgcaattaagtataaactaaacagagattatggtataaaaaaggagtttagagagaagactttggaggctaagtggcgcatgggacccccaccccccaagcaaatacacgaacggggcaaccaaacaaagggacgggtcgtaatattatttttgtcacttgtgtgaatttgcgattatctg

SEQ ID NO: 43053 - DNA, 449 bp, Arabidopsis thaliana landsberg
taatctgcgtaactaaatcaacaaaaattttactattttagtatttacaaacaaaacccaagaattagcttacatattagctcaaactggaaaaggatccctcttttgttttctgattattattacacttcaaccgcactaatgttgaaagcaatcgaaagctgaccaaccataaccttaagacctttagcttcccaaaactcttccttgcaacccttaaacgcagtcgtatcataagtattaaccatttcgtagttattggtcgtcgaagttcgtttatagaaaccgaaccacttagcttgcatgtaaccgtttctcctccacggtggcacgtggatccctacgtgcttcatcgaccgtctcatctcatggcacatgattctcacgagcagtttcagttcctctgaagttcccacgaagacgcgtggcacttggcttagtattgagag

SEQ ID NO: 43054 - DNA, 782 bp, Arabidopsis thaliana landsberg
tgttcaatttacaggaccataaatccagttcctcgttatcatttctttgggtccaattataagatttgatgactctaaaataaacttgttttcaatgctttaggtatatggctacggtggtgttagtatggtagtcgaggtcttaacagacaaaattaatcgatcagtggcagctattagatcggttgttaaggattatgggggaaaaatggctgattcaggatctgtcatgttcaagtttaaaagagttagggtagtgaatataaaggtcaccgaagctgacaaagatcagctccttattattgctttagatgctggagcagaggatgttattgaacccccaacttatgaagatgatactgatgaagacagggaagagaggtatataaccaatataatgtctttccgcatttcttttcttcttgtcagtattacatttattattttctgttgctggtgaatcctaagttagggaagatagagatagtcgactcacttattcaaatgcgttagaaatttctttcaagattgaattgaaaaagtaatcaagcgactgaaggtagacctagtgtattttcttctcataaacagctaaattgcaataaaagtttcacaccaaacgatttgaaataagaaatccatcttgccaatctaagacgagatgatacctaggtgactcataactattatgctctttttttgtttcatcagcttcttgtctctatatctgttcaggtactacaaaattgtaacttttaatgagaactacctaacaatattat

SEQ ID NO: 43055 - DNA, 517 bp, Arabidopsis thaliana landsberg
gagagcagatccccttcaaacatacaactgttgatatattcagcattgtcaaaggaactggccgtagaaaaaatctcatgcgttcaaatcctactgataagtcttcagaagcagagaatgctgctggtttgagggtaaagaagatcaagaggacaccggaggacgagaaagagtcaatggttctggttgagaaactaaggaaagaaataagagaagccgttcgtaacaaatcgatggaggacatcagagaaaaccaattcgatccaaaacttttggctgcctttagagctgctgtggcaggacctaaaactggtgaagcacctagaagaagttctgctctggctgtgaaggcaaagaagttgatgctgcagaaaggaaaagtcagagagaatctgacgaagaaaatttatgcagatttaaatgggaagcgaaaaagtgcatggcaccgggactgtgaagttgagttttggaagcatcggtgcatacaaggtagaaagcctgaaaaaattgaaactct

SEQ ID NO: 43056 - DNA, 2358 bp, Arabidopsis thaliana landsberg
tcttttttttcatggttttgatcaggtgctttctttacaagctttataagtgttctagaaagcgaaactgaaaaaaaaaaaaagaagcgaaactgaaaaaatcatttacagtttttttttgattcgatgatatttaggtttgattttcaattttgattcaataatcttagttattatttaatcttttatcaaactttttggttacagttttccccacctttacaaaataacaatattaatcaccacttaaccagagatacaatttataccggttaaaccagaagctgcaagctgctgttacagtatcgatcggttctaaaccacctcttctaatccaattgctacgtaacaatcaaatcgtgagggcgtcattaacatgatctacatgttaaacggaaccatgatctcattaatcaccctagccgtggtatgagatggcgggttataaacagcgagaaaatacgccggcaactttcctttgctcttctcgatgggcaaaatccagttagaatcccggaggctttccatcagagccgcagcttcgtccttggctacattgttcgacacgtagccaccgatctgtctcacggctacgtaagttggtttcgtagaccgaacgtggagatcatcggcctgaggtgggttctgttggttcttcttcgggaggtagagtgagaccgtgtagactgatcttccaggcgttgcttgtgcgatcaccggagctgtcatgttcatcttcacgttgctcttgttatctccttctatgtacctatttaatctataaacccaaaaacgtagtcaacttcagtttataatataaagaaaccgaaagaacaccaagtcttatatattcgatttattcatttaccgtcggaaaccggttttggtggcttgagtcatggatagggaggggataggactagtagatatccatagggcagcgtcgtacatgcggatctcaaagccgtatccggcctctaccaatttataggtggggcactcgtagtggtcacatgtccccggacgaaacccattagatggattccatggtgcgggagcctgagcatatgatccaaccacgactaggctgacgcatagcgatagctttaagatgtttaaaccggtttccatgattgaatagacttaaatgaaaaacaaaaaaaaaaaaaagaagaagagagttaattgaatatcgtagatccgaattggtaatgttttgtgcaagtatttatagttgcatttttgggcaatgagatgataataatagagtacaagttattaatatctttgacttgttaaagttagtagtacaagtttgacctctaataattgggttcagttggcaagacaattatgaaatgctttgaggtattagatgtggattttgataaatgtttgccaagtttagcagagatatatgcctaaataaaagttaatttcttatggataatatattaattagtcagcaaaattgatagcctaacaaaaattaggacttctatttttaaaaaggcacagtattaattgtgtgagtaaatattgaacagtttttaaaaacaattaagcaacctaaattcaactacataatggtaaaaaaggataaatgttttttttaatagagaaaatcattgtttttttttgataaatatgataagatgaaacataattaccgatgtgtcgatgtcttactaaatgtttctaattttgtataataaaatagcatagatcgatataagatataatgtggacttgtcgaaggagatgagagcagccgctgatatggggaccattggatttgtctgaaaacagtaacagaagatgtcactcaactcaagtgatgaagatattttgttgggacttgtaagttgtgagagaatcaatttcactaaagaacctaggttaggatgtaaactcgcacatatttgatgtttcagtttccactgcaaacaaacttgttctgtgcggaccacttaactatttggactgatttacttatagggattagttggcgatcggatatctgatgctaattgtaaaagtcaagataatcatctcttcgtaggaaactgcaaattgtgccgctctactgaattaccaaaagtttagaaactagatagtaaacacctaatttcattaaagacattttgtatttctcagttcacttttacaaatctacaaactgaaaatgaatttgacagaaaacgcaagataagtaaaagaaattgacacaatatgcatatttagctatgtcccaagtattacatatacacgtcaaatagccttcgtagttcatacaacagacactctcctaaaattgctactatcgatcaaataatgtctcaatatatgcatcttgac

SEQ ID NO: 43057 - DNA, 786 bp, Arabidopsis thaliana landsberg
tttcccttctctttagtgaatgtacctcattatatcgaaatgtcgcagtagaaccactatgacgttgtgtttcaatggcgttgttatatattgcagattgaagcatccggtggctatggtttggagataaattaaactgactttcaaggttgaaactttgagggaccaattgttattttcaaagatgtttcgttccagtaagacaattcttgtttcaacttggtttatatctttcatctaaaacatttccggctgctcttgagtcatggatgttcgaccatgaaaacttgtcagtaaaacaacaaaattgtggtctttttttcttttttcaaccttggctgcaaatcgatactggtctttgaggaggctatatcttgagaaggttttaatcgaacaacatctcatctcactctccctttacacgtcattgcgtctaaaaagggttttgttcttctgtctctgttgttttgataatcagctttgtcttccttaataattgtggaaacgcagcgtataaacacattccaaatctgttagagacacaatttgaagtcttgtaccacatattggtaattttgggtagataggaatcgattatccaacttgagaatcgggaccgatccctgcaaattgatgtcgtcacgtaacacttggcattttcggtgaggaccatggtcgggaaaagtaaatgccgattccaaacccaaattgcgaaattcaaagcaaagatgttataggattggattcgtacaacgttagcgcgtttttcacttacattgtaaaaga

SEQ ID NO: 43058 - DNA, 851 bp, Arabidopsis thaliana landsberg
tgtgttttctttatcagacggcaattccgattctaataggaacaaaattcgatgactttgttctgctcccacccaatcttcagtggaccatcgtcactcaggtaataccaatcatacaacttaatcataccacgttaccaattaagacccttttcatattttacgttttcatgatgatttagacatttcgatttattgtgataattcatttctataaaaaaatagttaatttggttctatatgatttattaggcaagagcatatgcgaaggtgatgaatgcgtcattgttcttctcaagtgcgacacacaacataaatgtgaacaagatcttcaaattcattttggctagactttttaatttgccttggaagattgacagaaatttgaccttaggtgaacccattatcgactacgattcctaatttagtctactttaattatttatcatttttgtacataattttttttttttaaaaaaagaggtgaacgaatatcgtcgataaaaaaaaatataattgaaagaaaatagcgttggttttgtgtgcattttcatgttgatagtcatatgcttggatgttcttgtttttcttggacagaaaaattgaattttaaaaacaaatagttgatatagtcagtgtttacaagattcgaaggtactatacaatttcaagagggctcgacccaaagtttaacactaatgagtcaagactcgagtaaaaaaaaaactcaaaactgattgtgtagtatatataaaactcaaattctcaaaagtatacaattctaatgcatagatacaatatatcgaccgttgcattttataagtaaaagacaaaactcctctcgtgttttt

SEQ ID NO: 43059 - DNA, 716 bp, Arabidopsis thaliana landsberg
  unsure (1)..(716): unsure at all n locations
tcttcaatcgaagactgttaatgataattaatcgaaaatttgaatcagtttttaagtttctaaatttctttttttatgaactattaaattaagtgatattttacaaattttttaaataattttctaattttaaaatatcgtaacggttgattcacgtatttaactcgatatctgccatctgttgtatacgttaaaagaaacaatattataaagtaatagttattcgaactcgtatgaatacaatattagatatccgagatgcaaacaggttggataggtaattcaacatagtggctgctaaggttatgcggcatctctccgagcttcgtcatgccaagcttcgttcccccgaactttatcttatttcataaaaattgatctagatctaaggctttttttcactagactaaatatatgacagttttgcatagattatttgtgtgcataagttttacccaacaatctgtttaatatatgagtaggtaagtttttttaatattttcaaactaggtagccaaaaataaaatgactatattatctnnattatncccttatctagataaaatataaacatattttaaatattaaataatttattaaactccttatgttgacaaaaaagtatttaattcaagttttataagtctatgtaatttggtttattccgtgtttttttttgtttttttcgtttccttctattccttgtttatgtaatt

SEQ ID NO: 43060 - DNA, 495 bp, Arabidopsis thaliana landsberg
ctcgcatctctctctctaggaatttggaagtggtaattgaaaacaaagggaccacaccacaaaaaaacaaaaaaaaatgcctcatggaactcttgaagttgttcttgtcagcgccaaaggtctcgaggacgcagattttctgagtaagctttcgatcatttttccccctaatcatctaacttttttcagaaatccttagaacccatttgagtttcgttgatgggtattgtccaaaatgtgttgaaaatctgcgaatgtatatatgtacgtgtttaaatgttttgacttttcggatcaaagatttacaatctgtgaatgttgttgactagaacgatctgagaattctgtgtgtgtaacatatgagaattcatcttatgaatcggattttgattcacaactgatattagtatagatcttaaaatattttttaatcggttttatggaagtttgatcatagattcacattcgttttataatgatatagccttaattgat

SEQ ID NO: 43061 - DNA, 626 bp, Arabidopsis thaliana landsberg
tcattgtacaagaaattctaatgaaactcatagtgtataaacatttagtcgagttacaaagaaacaaagttatttatggttacttctttccttaaaaggaaaagaaaatggttacgagaggaaccacgtgaagatcacgtagagaggttggtcaaacatagaaattcagttggaagtaaatttaatttttaacgctccaccgactctcggagacagctgcctctgactcagcgcctcatgttgacttggcagtctattattaatattgtcgacttttttttttttgttggactataaaagcgatattttgtgtcctatttttattttttttgacaaagtgatatactatttacatttaagattaattatttttattattcaaagtagtagttatatatttcaatttaattcaatctgaaattcatctcaattttctatccacgaaagaaagacatgaaaatcaactgaagtatggtttctgtttttatatactttttaagaattttttatgctactagaagaaatctagaatattgtatatatttttggatgaaaatttaaaataatctttagaatgcgaaattagaaaataactacacaataacattatatctctaatttttttt

SEQ ID NO: 43062 - DNA, 356 bp, Arabidopsis thaliana landsberg
taacatccaatatgtatgtcaatgctcacataaggtgtcagttttaaaatgcccattctctaatctgtgtcagatgccatatcagttgactatagataatatatgaagaggattaacatggaaactaaaaaaagcagcctaagcagtatacctgtattaagtatgtaaaggtcattatagaatacttcatcatccgaatcagaagatttcccacagccgccaaatatgaaaagacgtttgtcaacaagcgctgcactatgagcctctctaacccttggtccttcccctctaatatccggacgtatccaagtgtgtgaatctaccacacacaaaaaaagagaagcaaacccaaaaac

SEQ ID NO: 43063 - DNA, 807 bp, Arabidopsis thaliana landsberg
  unsure (1)..(807): unsure at all n locations
gatttgcacataaccaaataaagaaaaagataatccagaataaacaaatgatgaattagaactctctagttcccttgcactgttgcacatatatctcttaaagtatatgataagtataataatatatagttatattgttatattaataagattatttattaaataatcttattatttataagattatttaatatatatatatatgagaattcaaattaaatattttcatttgttttctttagtcattttaaattttatcaaaaatgttggtgaaattacattaaattatgatattttatgtatctatttgattgatattgttgacttaactatattcacttaattttgatattattgatatatatacaaattatatccacttaatttttatatatcaataacattgttaatacaataaaataataataatcataaattttttattatttatttataatgtaaaatacaagacaagtttatgttaattttcttctatccctttttactaataaaagtatatttatttattgtagaaatacaaaacatttttattcacataattataactaatatatatatatataaattatataactaccaatcatgtttttatttatatatctaaaaagttacatgtacaactacacttaatatacttaatgctaacgtaaaaattctacatgtacatccaaaacatatagagcaaaataactaatatatataaatatatatatatatatgtataactatcaatcatgtnnttatttatatatctaanaagttacatgtacagctacacttaatata

SEQ ID NO: 43064 - DNA, 860 bp, Arabidopsis thaliana landsberg
ccaatggaatctacattgaacttataacattgtagctccaaagggcttggaactctttgaaatggggagagaagtttaatctggtgatggctgtgactcgggtaatcacatcgtcatcgggtatatccgcagcggagcttaaggttttgtttctctttcgctaactcggtttcgctttaattcaagaagatgataagataagttgtaacttttcggtttgtgtttgcattgcaacaggaacaagagaccgatgaaaacagtggaagtttgcagctttacgaacggctaagtttctcatacccggcactcctaatgcctcttatacacgaaagagataccgtaagcataaaaaccgaaacaaagcgacactcaaaaaaaccgtatgctgataagacttgaccaaataatgtgtttttttgccttgacagtatcttgcttggtcattgaagagaagtaaggcagtgaatgggtgtaaaacagtggtgggagtgatcgggaaaggacacatgaatggtgtcatctacgcgttggtgtcagactctggggatctccggtttagagatttggtgggaagaggagattcatataatggtggtactggtactacatcgaacggttggattcaaaaggttttaaagagcctcgtaagagacacaattatagggttcttgctatgggagttatatgaacagtatctgatgatgaatcaaaacctttcatgatataactaaaataacaagttgttgcatatttaaaaaggaaactggaaaaagaatctaaatgagtacaatatgtatgtatatgattcttcttcctctagatttttgtgaggcaactacaaagtcttatatgaaattgat

SEQ ID NO: 43065 - DNA, 331 bp, Arabidopsis thaliana landsberg
gtcgggctcattgcgttgcgctggtccggattgttcactttcacccacccgatgccggcctccaccttcacttccacggtctgccagcgattgtcgtacttgctcatgtcggttcctgtcgttcgtttccagtgcgattcggtgcgcagcgatcctgctgcgaacggcttcatttaatatcaggctacctgatattgcaagcggcacgaacgccggtgtaaacccggagcggaaagccgaggacacgatggaatcggggaacggtcaagccactggcgacgacaaggcgcaacggaagcaggctgcacgggcccacgcgggcccgcgcgat

SEQ ID NO: 43066 - DNA, 399 bp, Arabidopsis thaliana landsberg
atcttttaaaactaatcatgaccaattgtctttatactactttggtgaaatgtttggatttaattctggtgatattttgctacctttatatatacaagttttggcccaagatctgccttcatatatctgggctaatgatatacagtactttattagataacttgtttgtgctgtgcgaagagaaaattttacattttgaaaattcgttccaagtcgttaatacatggtagttcattagtgattgattgaaatttcattagtgattgattgtattattggcttatatctatatacttttctaagtataagttttttaattgccatttttcatattcatatatgcgttatttaccaacttgattatcagaacacctatgtacacatgtaatatattgaacg

SEQ ID NO: 43067 - DNA, 543 bp, Arabidopsis thaliana landsberg
tcatgccgtgacaacatctctcattataaggtttacactacacttaacgttaatggtaaaagtttcaatagtaagtttactactaatatacaaaaaataaaaagcatagtgctaataaccacactaactaagtacaaaagatcattaacggaaaataccaaactgaaccttaattcgatttagtgtgtttaaaagtttagaaataacgtttttagtaacatttttatgattggtaattgctaagaccgtaaatctcattaccccattgatataaatttaaaaattaagattgttttaattatcataaaaaggttttaacagttttatatatagaactaaagttttgaccaaaaaccatttgtcattgaaaagtattatttcacatacagaactgttaaccatctttttatgccaaggaatgtgtctggagaggtaaagtagaacaccgagacaagagcccgtattgtctcttctttatgtattttattcgtgaagttcaatgttggaatatgctcatttctagaattaaagtaccaattcatt

SEQ ID NO: 43068 - DNA, 841 bp, Arabidopsis thaliana landsberg
aaacttttcttttttgttggatctatatatattagtcagagttaaggatgcaaatagtcgatggattaggacacaaacctcatgtttataatgctaaatatagcatattcataacttcatttgactatcaaataagaggaatcgatacacttttttatttttataataagattcctaatacacttgttagatacttaagtatatcttagtccggaatcaacatgttactaatatcgataagtgacacaatttagatatttattttgtttggtgtgtattaaatggaacatcatccttatcttagatacaccaagcatgcatccccaataagaacacgcatagtccaagttgagagacaagcaggggaaaaagagttttgcaatacaagttaccaatcagctaagtaagatactttattttgtttttgtaggaccattgataagcaacaaaatattacaatattttcgtgttctaaacatcaataatagtaataaaaaaagatatttatttgagaaagaaaaaaggaagatatttattaaattgattgatatgaaaatagaaggaatgagcaggtttttggattgcatgtggataagattttgaaggatgaagattggagttggtggaagactcatccttttcaccaccaccatgaaaccagacaaacccaaaactaaaatgaattatttttttaaaaaacattaaattataaataagtatgaatgttttaatttcttttggggggcgacgagtttggttgatatgagtgtcgcattttgtcccacaactgtaccatttgcatgccatcatcatcttttgttcaactcttttttttgttagc

SEQ ID NO: 43069 - DNA, 836 bp, Arabidopsis thaliana landsberg
ctggattggtatatttgccttacttgattttatttaatcaagatatattcaattttagttttttattcttaatttcaaaattatgtggctaggatcatgcagctcccataatcgagaccaggaattaataaattatcccttccaacaagataccaaactcgtgtccgcataggtgcaaagaaaacaaatgttggcctatgataagatatatgacttttacaaaaacatgtaactatatcttccaaaaaatgaactttatttcagcattaaaacacacaaaatcatattttgaagaagattcaaaatctcaaatcacgattttaagagttcatttccgagatttcttgataatatatgtagcatgccattgaccacgaatagatactttgtttctttgttatgactctccaatttggcataggtcgaaagagaaaattcatccaccttaaggtaagatttattgatcagtttaatgatttatgcatattggcgtaaaattcatgtatctttataggttaatttggaacctataccaaaatatcaaccattcctgaatttattaattacctatattatggatcaattactcaaattcatgtaccttcgttacctttcttttaaaccacctaattggattgattttaaggttcttaccaaataataagaatcaagtaaaccaaaattaaagtggaaatgggaattcctctcgggtcattgaccttggaattcccgtggtagccaattttgccaccagcctgccaaccccttgaaatcctccacccccaacctgacctttccaccaaattaaagccggaattccaaagtttccaccacca

SEQ ID NO: 43070 - DNA, 718 bp, Arabidopsis thaliana landsberg
tcatcaagagtttattataatttgacgaaaagtaatatttaagatgaactgatgaagtattcattttgtccccatcaaatgatagaagagtagtaaacagagaaaactgaatagtcatttcgaaagtgttcatgcaatttcccgataatagtttggagttgttgaatctcataaaggaagagtgctcagtgaatgcttaaaatgagagaatgggctaaataaggcccgttgagaaaatggacgatgttaaatatgttggttagcgtttcgagtctgcggggacccataggtactcatgtgggtagttagaacaaaatattgtcagaaaagcacatggcttcggttattctgtatcactcgtgattactgttactactacgtgcacgtcattcttcttttttgttttctttttgtcacaacatgctatttgcagtatagtatagttaatttattattattattctgatggctgattttttattctttcaagtcagttggattttttcccgcaaaatgcttcatattttttttgtctacaaaccacgtatagaaaatctattagatatgcagatttgctggccaaaataacctgtcaacaaactacattatgtttttttttttgcttcgtttcttttttttcatggattttctcatatgtaatctcttatacatttgcaaattaatcaaagagaaaaagacgctaatgttattacaatgt

SEQ ID NO: 43071 - DNA, 636 bp, Arabidopsis thaliana landsberg
agcctatgatgattaggagctttgttgaactatccttttaactgatttaattaaggtaaacaatgtgtatatatatacacatacatatatataacaaaattcgtattttgttgtgagagattgtacttatggaacaagcttgggacgacattaacgttttgtgggtggcatcattaccaacagaacgacgtacgcctattggcgatggaagcaagtgaagccttcatcatcataattcataaactgcttccaaagtttatctttcacgtttctgcaaaataaaaatatattgcacgtttaatatctcactctatcttgacgtcaaattgtaaattatatacgaacaagacatgtttatgaattaaaaaatagttttctaaaatttccaagacatttcaatgttttgaaaattttagctgctgaattttgaatgatttttgtgaggatatttcgatgttttaattgatttggatgaagatattacctccaaaatcacttattttaacacttataatgttaaaattctttttaatgcaaaatcatttgtattccaaacgtaccatctaaattcatattcagttgtcgacaaaaaaaaaaaaaaaattcatattcagtttgggcccaaacgaacaacat

SEQ ID NO: 43072 - DNA, 564 bp, Arabidopsis thaliana landsberg
actaatcctttggcagctggcttggtgccaaaatctcatatctctactctttgcatattccgaatccgacatcaaacacaatgccaaaagatgattttttcaatattaaaatttatatggtggtaacgtagagaacagaaaaatatatatcgagttacgttggtcctcttagcttaatatggaccgaccgtatcttcttccttgctggttccgatcttgattcttctatgttgtactacctactatggtcaaactttttgatatatgtgtaaaagtatgtattagtagattataccataacataattctcccaacgaaaaatgccgtttaatactttactaaaacattatactggctaaactaattaaactaatctttgtaatttagctgaataaccagtaatttttctttcaaactgtgaaattatagaaacttaagtagtggaaacaaactgcgacagtaaaattatatcagtagactcggtgaccataaagatttatgtgaatccacaaaaacgtaaaaggagactggggctcgtatatccacaagatttatataagtctt

SEQ ID NO: 43073 - DNA, 513 bp, Arabidopsis thaliana landsberg
ctatcagtcagctactttttttttatttctggtcaaattgtgtttttagcggcacacttaaaatgtgaatataaaagccattgcccttgatcttgacgacactctggtcgacacctctggaatactggcccccaaggcctgccaagaggccttctcgcatctgattgctaacgggcttaaacttgatttggcggcctgcgagcaattgcgactcgactggattaaaagtatgtcccaccgagatgtcttcgagagactggctcaacagtatggcaacgaacaaacccgccaagtcgtaccacaggcgatcagcctgttttatgagcctcacctgccatctcacctaccccttctcgaaggggctgcggcaaagctcgagtacctgaataataaataccctgtctattaggttaccgccggagctgaaatagctcaaatgggcaagatccacgcgctgggaattaaaaatgattttcgcaaaattcttgtggtcgatagcctgacaaaaaaaag

SEQ ID NO: 43074 - DNA, 979 bp, Arabidopsis thaliana landsberg
tctcatctgttaaaagacaactcctagttaacaggcacttgtcttgtccttcagttgaagatacacatacaagatctgatatcttccaagaaccatccatttgaaatttcgattttcatagagtttatgcaaatgtggatttgggttttcagatttaaacaggtcacagaaaatttaacttggggtaaattttcaaaaaaagcataatggataattaaagtttagattggcccactgcatttatcaggcccactaattaaatgtttgttgcttttctgctttttgacattttacaccggcaacctttgtcggagaacggttaagtagctgggataactcaggcggcgtcgcggttaggtagagtagaagaaactacaagcaagagagagcgattcactgaaggtaaccacgtcttaaacaaaatgaaccgaactataaccgtttggttagaagatttaaaacggaatgatccggtttgattttttggtttcagattctgcgggtactggcgccaaatcataattcgtggttccggtcaaagtcacggcgaaacagccatggctgatcctcaatccggttccaatgttttcagtttacggatagtttcaatcgattattacatggcttctccaatccctggttataatatttgctacagtagcttccaaggtaaggcaaaattctctctttatactttctaaagcttccgcctttttgaatccaatggttgacttcagaaattttgactagagtaatgctccagtttcgttagatgttaaagggcaagtttttgacttgttactaattgatttgttgctgggaatttaaggtggtgaggtaaatgaagtccctgttataaggatatatggctctacacctgctggtcagaagacttgcttgcacattcatcgtgtaagagttttaattttactttcttgttttaaggaaaaaaaaagttgtttgcttgttgctaagattg

SEQ ID NO: 43075 - DNA, 149 bp, Arabidopsis thaliana landsberg
gctccgggaacgagaaacatggaatttagattcagccaaaattttttgaaaaaaaatcagagagattaacaacggggtatccagcaccattgtgcgggggcatgtagtatctgaactggttcaagttattagctaaaccagcaagatca

SEQ ID NO: 43076 - DNA, 643 bp, Arabidopsis thaliana landsberg
cggtgaagacgcgcctgtatcgcgcgcgccgcctgctgcgcagctcattgcagggctcgcttgctgccagcatgagcgaagccttcccgttcatgggcgtgcgctgtgcgcgtgtcaccgacgcggtgatggcgcggctggaaagcgagcaggcgggctgatcgcggcaaacgaggtcagacgcatggaagcgtgccgttgccaagcaactcgattttccggcagacgggcgaacacgccttccggctgcagggcggcgagttttgccgtcgtgttgcggtagaaggcttgcttctgcatcacgccgcccgccttccggcaggcgtgcgtggccaagggatcaatgctcgcgcttgggcccggtcaaccgaatctcgtacagcttcggccagcatttgccggtgacgtagaggcgatcatgcttggcgtcgtaggcgatgccgttgagtacatcgttgaccgggtcggcgagggtgttgggcttgggcacgagtccggccagatcgatccagcccaccaccttgccgttggccggatcgatccgcgccaaacgggtggtcagccccacgttggcgtagaactggcccttaacccactcccagtcgttgatgtattccaccggtttgccgtcggcggtgacgtc

SEQ ID NO: 43077 - DNA, 451 bp, Arabidopsis thaliana landsberg
ccttctagataactttctcgttatgctatttttttaaataacctatccaaaaaattgttgttagtgtttattttattaattctgttttgtttttcaactatttaatccgatcttatgtgcataaatatccgtcggagttaatttagagttaaagaaatagattagcgtgtgagctcatctctcttaaatctctccgctctaaataagtttgttggaattatcctccgcgtttttgttaaatcgattcgttccgcgaccttatccattttcttcatctctttctctctaacttcgattttcctttttctcgcgcgagaaaatttctggattttgtctgcgaatcacgaatattccagcgtttcttcgtcccgcattggcgtaggatttttgtcgtgtttccgggattcgaagaacagtttaaagagtgaagaagagtcgagaggtgtttcgg

SEQ ID NO: 43078 - DNA, 165 bp, Arabidopsis thaliana landsberg
tactatgtactgcttggtttgataaatcactattactctacagttgctgaaactgcattttgttctactggttaaggtgctgagagtaagaaaatcagttcatgggttcgatcattccttgcaaaatatttgatttctgttttcttcaacaaggctttcttttgt

SEQ ID NO: 43079 - DNA, 475 bp, Arabidopsis thaliana landsberg
  unsure (1)..(475): unsure at all n locations
agtccattctttttttttttttacctaacattgatattggaaacttataactttgataatggattgcaactaactcgaggtaattatcagttgttaaaaaattcactttatgggttatgacttatatgagattacagtatctttgaatcctccgactccaatttcaactatagttcaccactaatgtaaatgttttaaatgaaaagaaaactggtacgatgctataaaagaaaaggagcggaagaaagtgaaaaccaaaccctagtttcggtgtcaagttcgttgttaattatttgaaagtgtattagtaaaagtagaaagaaacaaagtggagaagcgaatcaaaagtaaataactatatatcgccaccaccgtaacgagagaagttaaatggaaaagccattcgatggataactatagtaggagagacgaataaaactggctcagagatgagaaaccccntcaggagtaaacc

SEQ ID NO: 43080 - DNA, 716 bp, Arabidopsis thaliana landsberg
actcacctgaaatctggagaagagactataggccaagaccaggagtcaatgtgacgtggccacctgctccactcttccactattgtggacattccggtgctttcgacattgtcttccctgactggagcttttggggctggtactataatcgatttatggttgcatacaaacccatcaatctgtataaaaatacgaaaaccgttatacagttataaagaaaactcttgtttggattttaaaagtttggttcgaatatctatgtgctcacacccctaattatggttaggccggagattaacataaaggagtggaataaacagtcggagttgataagtgaagggataaagaaggtgaagtgggaagagagagagccttacgcatattggaaggggaatcctggagttgccatggtcagaagagacctcatgcattgtcatgaccctatggttcatctctatcgccaggtttctttatatttatatctctttaccgtgatctcttttatgataatgatctagaagattctagtaacttgatgagttgatgacaatgttaattgtaggattggagcagagagggcaggattgggtataggacatcaaacctagaggatcaatgcacccacaggttttatatgaatctttttgctggtctcgagttatttgatgaattaaattttaatattagtaataagggcttatttttatttttggata

SEQ ID NO: 43081 - DNA, 438 bp, Arabidopsis thaliana landsberg
acggcactgttcgatgttgtcgacaatgccggaaaaaacgcagacccagaatcccgacagtatatccatatgatttgacaaagcaaagcacgacctgcaactatgacctcaccttcccgtctatctgcctccaagacgttgcccgcggacagtacaaagccagccagtgaccgcgttaccttgttgcgtgtggatgaagcttcggaaacgcagcgcattgataactacctggcaaaaatgctcaaaggtgtgcccaaaagccatgtctatcgcattctgcgtagcggggaagtcagggtcaataaaaaaagggtgagtgccgaataccgcttgcaactggatgatgaagtccgggtgccgccgatccggattgcagaaagcgcacccaggccaggcttgcccgaggttaaagcacggctggcggaatgtgtgatttat

SEQ ID NO: 43082 - DNA, 475 bp, Arabidopsis thaliana landsberg
  unsure (1)..(475): unsure at all n locations
tcatatttccaccttacctaaatactaaaccaaaacaatcttttcaactatatattttttctangtacttaactaaaatatcataaacaaataccatacgcagcgttttgaagcatacgtcgcatttctctttaatcgttaatttcctgatttaggcttcaccaattttttttttttccctgataaaaattttagcttcaccaccaccattgttcgtttgggttttttgaacattgatgaatcgttgcttctgagatctcgacgaagataaaaagctcttcggctacttcagggaaatttcaatttcgatttctgtatcaccaatctccttgcgaatgaggttttgtaaaccctaaatccagttttgaacctctttctctcttccctagtagctctctttctctatccactaattctagcattttgcatcagtattcctctctgcgttcatttctggtttgatgtatgtgattgc

SEQ ID NO: 43083 - DNA, 517 bp, Arabidopsis thaliana landsberg
aggtatcagatcacggctttaatcttcgctggaacaatatgagctatgtagaactgagatttttgtggatcgacaacactctaactgatttaaagaacgaaaaagggagatcgatggtccattaaacgctaaggagagaagacgatgggtttaggtttatagttgtatgttcacatgagggaaaatgcgttttaaatacaagacctcgacatttaacacaaaacgcagagtttaacaaaacataatcgaataagagtagaggaaagcctctacttcgttcatagtctttttgttcctttagccacttttctttagtaacttcctcaagtatctctccatggccttagcctttctccctccagacctcatcctctttctcatacatgctaaaggaacacttaacctatcaaattgaaccaacatgacctattcaaatcattggctgatcacgttgccgctagtcgatgcttagagcatcctatctacgatgctttgtctttggagaaacaggacgaac

SEQ ID NO: 43084 - DNA, 455 bp, Arabidopsis thaliana landsberg
taaattaatgcataaacctcaatttgtatgtgctcttcaaaaagtttatttgttaaacttattaccaaattaagagcaagtaatgacgtaagtaattaaatctgcaaatagttttcattaagcgctatgaacaataattagatagtgaagactaaaatggcgacggacctgggtggatatggtcggagtggccgcctctagcgttgatcgacgggaggaaaaagcagatcacagtcgaaattaggagactttggaagaatctgagcttgctcatctctaatgaaacacagatctctccttctcggtctcacttccttgctgattgattcgttaaagcaataccgggatttctgatttccaccattgttgggataggtgaaaggtacaatggggagggaaggaagaagggacattagagagtcagagatcgttgaccaaaacttgggctttagaca

SEQ ID NO: 43085 - DNA, 755 bp, Arabidopsis thaliana landsberg
attcctggttatagttggatagaaatcaacaaaagaactcatttgtttgtttctggcgatgtaaatcatcccgagtcttcacatatctattctttgctaaattcgcttctcggagagctgaggctagaaggatatattccacagccttaccttccattgcacccagagtcatcgagaaaagtatatccggtttcaagattcattgagaaagaaatgagagatccagacaaagtatagaaaaccaagtatatatctcttttagacaagtttaaacattgggttaaatttatagaaaggaaaaaacgggtagaaaatttttcaagcgtggcctgcgcttgtctgttctcgtgttgaagcagttgcagagatgtaataagcaacagcaaagaggccgtgaacgaaacagaggatccctcctatggacagaacccgatggtgtgatatcccacagttttttctcgatcttgagtttgccatcgtccctactatcaacatcgaaaatgcaatcgccaatatgatcctgagacaaacaaaaagggatcttaatcaaatctctcggtagatttacagttgttctgtttatgtcgtgttttgacttaccacgtgaatatcagagaagccacagcgagctgtttattggcagaggatttttcaaggtcttgtcttgaggcaacacagagacacccaccaagaaaattagccgttacatgggctaacaccaaaaggatgcacgcagataaaccgtactgaaggcg

SEQ ID NO: 43086 - DNA, 493 bp, Arabidopsis thaliana landsberg
  unsure (1)..(493): unsure at all n locations
ggtctcgcccagcgcttcacttgcccgtgtcgagaccgatgagatcgagcacgcggccaagattgtggtcgatcgcgtcttcgagcgtcttggtacgattgtagaaggcggggacgggtggngcgatgatcgcgcccatctcggtcagcgcctccatattgcgcagatggccaacatgcagcggcgtctcgcgcaccatcagcaccaggcgacgacgctctttgaggatcacatccgcggcgcgcgtcagcagcgtcgtcgtgacgcccgaggcgatctcggcgacgctgcgcaccgagcagggcgcgacgaccatgccgagcgtcttgaacgagccggaagagagcgaggccgccatgtcgccgatggcgtgggtttcatgcgccagggcgcgtacctcggcgaccttcatgtccgtctcgtaggctagcgtgacctcggctgatttgctcatgacgagatgtgtttcgaccggcatctcacgcanaagctg

SEQ ID NO: 43087 - DNA, 539 bp, Arabidopsis thaliana landsberg
tttctcagatttctttctcaataagtataaatctttttaatgcactaatcaagcaaagatcaaagaatagatgagagctactaaccagctgcgtcttgaagattctctgatagataattaattgcaattttcgagaagaagctgtcctcaatactcgcattcttcgtattcgatgtctcgattcttgctgtctcttttgcagccttgagttttccggagtagacgggctttgaacagagagtcggggaaatgcttgagcgtctatctaagccacttcgaatatcgttgaacccaattgtggaagtgaggattttggtctgagaaagtgatagcttagtgttcatatcttttgttttttttttgggtagaagaagagtttttgggagaaatttggttgcaggtttctctgttttaattttctaaggccagtaattgacgtctccaaagtatatatatatggccttgaatgcctgtattttattttgcctctatcttttattaaaaatatttctttctctttttatttaaaaagacctttt

SEQ ID NO: 43088 - DNA, 425 bp, Arabidopsis thaliana landsberg
ctttaccctgatctttgttagcttaagggtttcattatcaatttgatttgaggattagattcaaaggaattttttttttagctatggaaagaaatggtggtcactacactgataagacgagagtgttggatattaaaccattgcgtactctaagacctgtgtttcccagtggaaatcaagctccgccttttgtgtgtgctccttcttttggaccatttccttctgggttctcatcgttttatccgtttagttcgtctcaagcgaatcatcacacaccagatcttaaccaagctcagtatccaccgcaacatcagcatcctcagaatccaccaccggtatattagctgcagtcttctcagcatgcatctgagccttcgttggttactcctttaaggtcatttagatctcctgatgtgttttaatgg

SEQ ID NO: 43089 - DNA, 2183 bp, Arabidopsis thaliana landsberg
ctgtaaattttatttatccgcatatatacacatacctctgaatatattttttatttggattaaatactttattttaattagttgaaacaattatagaaataaaaggtatatttgtccatagaataatcaaatagttttagcaaaggtgttttttcccctgtgcattactcaatcataaattctacaaaaatttatagtcaatgagatccataagaatacagacaaattctgaattggttagaaatatgtttttttttagataacttaactaacaaaatcgaaagtcttatgaattcaaagatattatttagttaccaataattattttacttttgatttttttttgttgaattaatcattaatgacaaatggacctacgaagaatgccatcaagggtccttattaacaagtaccaacaaatcaacaataggctcgtactcctttctaatttttcggcacttttttgtcaacaatatttcagcatttatatacatggttttataattaaaagacaaattattatttgtatcgtaggcctcctactacaccgaaaattaccggaaaaaaaaaacataatgtacatatctcaaaagacaaaaaataaaataaaaaagtactgcacaaacttcaatttcaaagtagtaactttcattcaagcatataatttttctgtaagatgcttcataactaacttttaatcattttcattaccattaagcaaaagtataatataaaatcccataattcatatacataacaaaataacaatcttccatcaaataacttttatctatgatattaaaaaaaaagagaggccagatttgggggtggtctattcatactaaatgcaaaccatctatcgactaccagactgcattaaatgtaacaagtaacaacaaccaaaaaaaaagatgaaaattcaccacatcaacagtattggaccccactttcttcttaatttttcattcaattcttctcccaaccatctctttgctgtcttcataactatctcatttcttgttcgaatcaagaaatattttttcatttttgaaagcaaataaataaataaaaatctcattatcttgttagagataaaaagagaaacaaccaaaaagaaagaagaagaagtgtttgttctgtttcagtcattcaagttcatgagaatagaaacgagtccaagtttgttgttcatgcaaaattctcatgactctgttacactcctgaatttcttctacttatattccattcagtaacttttcttcttctatcagttcaacgttcacacactttttccatttcctcgacaaactcctttttttctctcatattttctcgaattctttttttttgtttctctcaaggaaaacataaatcctctgttttggtttaagagatggagatcgaagctagcagacaacaaaccaccgtaccggtttcggtcggcggtgggaattttccggttggtgggttaagtccgttgagtgaagctatatggagagagaaagctccaacggagttcgtcggagacgtgtcagcgaggcttacgtggcaagatctgacggtgatggtgactatgggagatggtgagactcaaaatgttcttgaaggtcttaccggttacgctgaaccgggatctctcacggctctcatgggcccttccggctccgggaaatctactatgctcgacgcattagctagccgcctcgctgctaacgcttttctctccggcaccgttcttcttaacggccgcaaaaccaaactctcctttggaacagctgtaagtattttatacacaacccttaagctacaatctttcaaacctacacatgcttttgcttaggtttcagtttacatgttgtcttggtatgacatataagaatgttcttggattttggatcttagctatacatagtgtgttggaaaagagaaaaaaaaaacaagggaatcttggttttttatatatttgactcatgtttaatgaatttggttattattatacaggcatatgtgacacaagatgataacttgattggtacgttaactgtgagagagacgatttggtattcagcgagagttcgtcttccggacaagatgttacggtcggagaagcgtgctcttgtggagaggacaataatagagatgggtcttcaggattgtgcagatactgttataggaaattggca

SEQ ID NO: 43090 - DNA, 480 bp, Arabidopsis thaliana landsberg
aagagattatttttgtaaagtttgttcaaacaaaatcatctttacaacttgattgtgttatagataaattaaaacaaaaaatgttgtcattcagcattttagatacaaatatacttttgtcttttggttgagtataattgatttaagtttacatcaacaatagaaccctgttttaagaacatggaatttaatgaaatatctcactgaaattttaagtcggtagtctaggaatctatactatatgagaaaggcaacgttaacaataaaataaaagaaaaagtatataggttgtcttttcagattataattatgtaatggcagttaggacaaaatgatatgggaggagtggggacaaataacaagtggttatgagttgtccatgtcagtttttttgattatacctatacttttaagggacttaatctcagtttatgccaaacggatttagctaattttaattaattactcaataataatccg

SEQ ID NO: 43091 - DNA, 663 bp, Arabidopsis thaliana landsberg
atgtttgattgatgatggtgacatcaccatactctttgtcttttttttttgttaccgaaaaattatttattttactggttttgcggtggttattgtgacggcaagcatttaaattgttcaccgtcggtttaaattcagacgtttttctcaaaatgggtatatactaatgtgaacatgtttctattttcactcttctgttggtacaaaacaaactagtttcctcgaaacgtattaacatatggttgaaaaaatgcatccatttttttatcctaccaaacatgttattatcttatctatattttttttgtttagtgcaaacgtcttcaaaagtctcaaaacattagttaattcattttgaagaggtcgtttaaaattgttgaattaactttgtttatagaaattcaaaacttatatttatctataatttttttttgaaaatttgaagttccatttaactgaataattgcgttaatggtggctaaaaatgatcttacatgtagataagaaggaaaaagactccatctccgctaaacttgaaaaatcgttaccacttgaaatatagcgattaattagctctctatctgcactttttaagcatgcattatctatctttcttttttagtttttgactagtccttaattatcttaatcgaataacaatcc

SEQ ID NO: 43092 - DNA, 103 bp, Arabidopsis thaliana landsberg
gatgttcaccgggcgcacgctgcgggggcacggtgtcccgccaccggacccggcggtaccggagtcgctgggcaaggtgtactccgtcgcgcaggggacgcac

SEQ ID NO: 43093 - DNA, 778 bp, Arabidopsis thaliana landsberg
aaagtttttgcgaatcacacccaaaactgaatgtgatccatgctactatctaaattgtctgtacatattatctcaaagtcacttggattgtagaattttccaatctcaaattatctcaaactgaatgcaggaactaaacattcttcctctatacaatcttcttcccctattctatcgccgtccttgatgtccagataatagctacaactaccgcttagacgctcgtctacctgcaatggagtaatacacacaagtgagaaactaaaaccacccaaaaacattatcaagttcaagtgacgtgaaatcatcaagacaattggcaaatgacgtgaaatctgaaacttcaaaaacgatcagtcttgaaaagtcgtaagcgagaacaagcaaaagcaagaaggctgagttctgatagatgagtttagaaaagtaggatcatacttgtatttctggtcctgcacaacggttgatccctttcaggtggagctttttcgacatagggagcaatcaaggtatccaattttaccaaccagagagcaatcgcagaagttgtttgaggcatcgaagggaagcaatttatgatttctcccattaaagtctgcccttgatcactacagtgccatagccattcttcattgattgccccaacaaagtcggcaatcaccttcataaattacacataatgttttatcaatttaagattcagttggaggacagtcaatttgaactaggaaaaggagcttattaatagaatgaaacctgcgtattttagacacagatg

SEQ ID NO: 43094 - DNA, 486 bp, Arabidopsis thaliana landsberg
aaccaatcctaaagcgatatcatatagcacacgaagattactatagtacaggtacaaccaacctacaaacactgacttgacggcatccacatcttcctctggcttataatcggtagtgtgttcaacattgcaaactcaacggtggcaactaaacactaagattgcggtcgtagcttaaagctaaggacgatattcaaacgagcataagttttttttttgtttgtttggaaaaacaaaggctatagacaactgataataacaaacttgcaagtatggcataaaggacaaagaaattgtgagatagcagtgaaacttttaaatgaggtaaggctacgaggggtactatttgaaatatattatatcataattttaaccattttttattttaaaaatccgaatttagacctggcatgctggaaaatgaaatagataacagtgaaatatgttacaccttattaacatgaaacagaaaaaatgcataactat

SEQ ID NO: 43095 - DNA, 566 bp, Arabidopsis thaliana landsberg
gaaacaaaatgaaaccatgatttccttctctcatattcttaatttagggtaaatatttagagacatttttttggattagttagatatatgtcgctctataaaaactatttgcatagtcggatagacttttaattgagggtatcaagttactgaaatatgtagatttaatctttaactaattcttttttaaaggcatccgaaaaagaagaaaataagaactctcagactaagataccaaatagcataacacctaaatataaaccaatcttaaatttaaatttaggtatattgttaaaaaacacaaaaaaatgaaccggaacgagctatttcttaggagtttattaattttcaatagatcttaccagctgatgttgctatttaaaaactattaactatgtccatttcaaattcaattcataaaagtgtaattgttataaaaaaaaaatcaatttatatgcttagctgaaaagatattcaactatttcattagacactaaatttttaacctctttcacaaaaacacactaaacttttaacttggcgctaacttagcccaaatcaaatca

SEQ ID NO: 43096 - DNA, 911 bp, Arabidopsis thaliana landsberg
tgcttctggatcctcagtctgaaatcacaagttagacagtttaaacttatcctgtttgcgcaagaatctatagcacatgagttcaatatcaacgggctttaaagatggttgaagatatcaatggctaaatcgcagtcacctacctggtttcttcttcttcctcgaagatctacttggtttatcatcggatggtgtaccaagtaaaagatggctatacttcgtcactacccgttctttctcatcaagcattcccaaaagctcataagcatcagccacggtctgcacaatgtgcttgtccggaggcttacggtcataactctccagatccttgaatagcttcataacccacataacaaaataaacacaagtttgaggtcaccacgaaataaagtaacttactagttcagttaagtatcaatgtgcaatgttttcttatttagttttcggtcagtgaagacaagggggaaaaagaaccttaacaagttcctgtaacatgttgttccggaaatatatgcgcatcatttgtaagcataattgccaaggcacagaatgcagatcgttcccaactttctttcgccagataacatgagcctcttctgctctacgatccatatctaacgcccgtatcaactgtccgtacgtccccatcgtgttcccttgtcccttacttaggatccactttatcacctacaaacgattaaacaggggaaaagaaataaacacctccccaagattctattctactttttcagttactatagcaatagacatatgttcttggatatttgattattcatggttcatgagtcccagaaaagagatagaacactcaggtgatagatacctggaccattcgatgccattgatgttccttttcaagactagctattactattttgagggaagcaatg

SEQ ID NO: 43097 - DNA, 544 bp, Arabidopsis thaliana landsberg
  unsure (1)..(544): unsure at all n locations
ttgacgagtagagatcggctcctcacacgctcggcccattgcatgcattgcgcgatgcgccgcctcgacgcgaacttgcggcgggtactgagtcggctcgggcaatgtcgatgctgccgtccctcctcggacagggatcggagtctcctgccgggacccgtcggacagcgcgttcgccaggccgaatccgagcgccgcgaccaacgcgagcgcgagagcgaccgtcgccatcgggtgccggatcaaccacaacaccaaccgcgccttcacagcggcggctgccaggtcccgatcagggtcctgagactggccagccacgcgccccagactccggtgacttccaagacgccgagcaggacgaggagcccgccgccgannnnnnnnnnnnnnnnnnnnnnccgccgggcgaagccgaataccttgaagacgcggctgatgccgagcgccgccagcaggaacgggatgccaaggccaaggctgtaggcaaacgataggaccgcaccgcgactggccgtcccggtggtcgtgcgagcgacagtacggc

SEQ ID NO: 43098 - DNA, 418 bp, Arabidopsis thaliana landsberg
atgtatgtcttttttgccaaaactgaaatccccacatgaaccaataataagaaaacataataacaacctgctaatttgcagcttagattccagtgtaagatatgaaaacgatactgaatataatagggaagaccaaaagaacgagaacaaactttagtctagggacttccagagaaacatgtgtaaaaatgcaagaacctcatctaaagcacacgcttatgctgactatcatactggagctcacgctttatcaccatcatatacaaatatcagatatgagactaatgtgcatgtatcaggattcgttcccttcttctaaacttctcaatttaggttgagagttgaagtctggcgggttaatgatgtaatggggatgaaagttaaacttgcctcaatttctagatatcactgacagtgc

SEQ ID NO: 43099 - DNA, 424 bp, Arabidopsis thaliana landsberg
aagaatggttcaaaattacagaaactctgtttatcctttgacctaaacttatagttcctgttactgtgtaatttggttatatgttgtagatcaacaaaatctttttacgtgagtaatatccaacatgattctaagagaatctaacatcaggctgtatgtgaattgctaccgaagcaactaaaacccaatactaagccaagcattcaaagaagatactgtgttgggatcttgtcaataagcttctttattcttagtgaaatcctagtgacaccaaattatattgagtgttctgttaaacaagatcctaaatttattaaagatcaaaattttacaagtcaaacaaaattttacaagtcaaacaaaatttctaaggagcacaacataacttaagacagcaactgataaaaaagacatgcgggtacct

SEQ ID NO: 43100 - DNA, 622 bp, Arabidopsis thaliana landsberg
ctataaattattactcgataaatcaataacttatataagttaataattttttggatttgagttgggaccattgtaatttgtttttgaaaattttatataaatatataatcccatcaattcttcaaaagtcatggaaaggttaaaatctggtctcatagcttcgttaatgattgtggtaatttattgaggaagattatgtttagggggtgctgcataatcacagtgtcaaatggtgggtgagttttctaaagataagttctttagaaaaacatgatttagtgacttgtattattattccgctagagtttaaattttgggtaaaaggcttgttattatatataaaaagcaatttttgaaacgcaaaaaatatacttcctctgttacaaactaaaaatatttaaaatttgacccatatatcaatcaatcacttaatatttatttatttttaaattaaaatataaattattattttataaattccacttaaccaataataaatcaatctacaagataaaaaataatctcaaaaaatatttcttatagtaaaaactgttcaaaaaatgattaacatcactgaatagaaactatttttattttattaaaacataattaataggagaaa

SEQ ID NO: 43101 - DNA, 592 bp, Arabidopsis thaliana landsberg
gcatttcacgtcataagatctcattttccatcaattctatttgcttttttttgtataattagagtatctccaacttatctctatttttatttttatattttaattttgtttttatttcactgtaattcatatttatttttatctcacaaatagatatctctactttttctaaaaacttttttgtaacaaatagagatctctatttttcaaaaactattagtgtaaaaataatttttttttaacttttttctctatatttaaatgaaaaaatagaaacaatcattagagatgctattaagattttgtaattttatggttatcaggttgtatattgttgttgcgtcgaaaacatataaacatgatatatatcataatatatgccttaaccaagcttttcagttgaactgtagatccctttcagggaccaatttaataaatatttataggccaatgacccaatagtaaaaatacgatggaaaaaagaaagacaaaccccatgaaatataaagagatctgaaattaaagtttgaaggtaattttattttatctcttagaaaattgtagaatcttcagaagtagaatcagtaaaagc

SEQ ID NO: 43102 - DNA, 817 bp, Arabidopsis thaliana landsberg
caatgttttacagagggtgaacgaaacacaaaaggcacaatacctcttcttgtcctttgttgagatgttttcctccagaaataccagcgtcaaagagcttcaccgcatctctaacggtatgaaaagtagccattcactcgtaaactttactaaacaaaaaagatttggttgtctcttaagaatacagacaaaggaagggacgaaataaaaacactgatccttttgtttgtcaatgggaagaagaactttaagaagtagcaatgccctgaagagaaagtaaagaaacatagttgtaccttaagaacactgtaatggaaggaggaaagagggcagcttcgtctctaatgtacaatcatgctcacgtgtcacgttcgtgcaagaaagaggtcacgggtacctctatactttttctttttttactttatctctgtcattgcacgtgaattgcctattctgaaccacatgacttcctagttaatcctacagcagcacagtgaaagttttagtcttttcaaacttagaacacgtttcaataaaagattgcctttttgatagttgatatatgtaaatttgcattaacattgtgataatatagacaaaatgagtagaataaacacttactaatcggaaaatggagaagagagacccgatcagcaacagccgcctgcaacaagggttaccaaattaggaaaactggggaagaagaggacttttagataattacgtttttgcctttgcgttaaatgtaaaaaaaaaggaaaaaaaaaagtagacgggccgaaattgaactaaattgagatctgaaaagtatgggctt

SEQ ID NO: 43103 - DNA, 615 bp, Arabidopsis thaliana landsberg
ggaaatggtttgggcaatagagacagacagacatgtgaacgtcactttctttttagctgtcctcttgggtcgggcatatctatattccctaccatttattcactatacccacctctttcatattcttccattctcaaattcaacatatttgaaaatttctcatttttcttggattttatgtatttctacacctccataaaatgaaaggataaatgaatttcaatgagaatctatagagaaaatgtatgcaaaattccaatgacagcttgcaaatatagccttttctttggtttgtctcttttaattattaggaagaacatttttacacatatatatgaaaataacatatctgaataacgtattttttgttaaaaggaattacggatcggtgagtctagtgactatatacatcgatattatcgactaacaatgagaggtattgatcatattgtgccttgtggtatttatccttccaagttgtaaccatatttatgtcctatgactacgaatgcaatgttccatagatagaagaaatttacatcacatacaaagtctctcttcaagtagagtcaacgataaacttattaagcacataatgcaaacaaatgtctgaat

SEQ ID NO: 43104 - DNA, 528 bp, Arabidopsis thaliana landsberg
tataacccagtagctaaaaaagatctcaaacttttggtttttattatcatcacaagaaccattattcaatcaaaggtcgtggttgtttttggtaaagactactacattacaaacattgtcaggccagtaaaatttcattcttctttctgatggaaatcacgggtttgactaagattaccattgagagttgcgtgatatatccttttgtcgctaagtcccaactccgatagaatcaagttaccctgcaagcaacaagaagaaaaccagagccaaaccttggtaagcaataacacaccccaaaagtatatatacagctctcgttttactgcagttaaatacctcggtggccattaatttccgaacattgctagcataaagtttgggatcgtctttctcttcttgggatgggtagtatacaggtaaccgtatgacttccaagtgatttacgaattgacagagaaggaataaaatgtggcgtgcctaaaaaacaagaaacatgactcttgtaacgctaccaatgaaaagctg

SEQ ID NO: 43105 - DNA, 368 bp, Arabidopsis thaliana landsberg
aagtttggagatttttgtttcagatacttttaataagtttacattttagaataaaattaagaaaatagttctttttaaacaaaagatcttttaagaatcttttttcctaaccatccttgtatgaaaacagagagggtcatgtcgaaatagagagtttaacaaaagtgaatgcttcaggtcctttttcgctgccttagtcttccaccaatgctatctggatttgattctagacccgctttcctcttagttctcgttactcgagctttgaccacaagggtctgactttccccaagtctcgtctccaaattcgagtcttgtcctgtcccttgttgaatttctgggagatcatcaccaatgtgggcacatga

SEQ ID NO: 43106 - DNA, 845 bp, Arabidopsis thaliana landsberg
aaagttttaattttcccgcaccaaccccacttttcttttgtatccgtccaataaccagaccaagtacccaacggcgtcgttttactttgaccacgtctaccccctatattatccaaacatttcaaatcgccccactagtttgtttttttcctaaactgttacgaaacatcacattataattgagtggttaaatgttaaaatataagctctgggtgaaatttaagttgactaaatattcaaggggtttaagcaagagtttatggaaagaagaagaaaaaaaaagtaatggaaaaaggataaagagcacagatcatcttctacatctctataaatacgctttctacattttcggatcgttgaacaacatctctctctctatacccattaaagtaatttagctcctcatagattctcgagaagaacacttccatggcgactaaagtatatatcgtgtatgtcaaagtttccatttttttattatattttttttgggtgattaaagttacgatttttttccaagctaatcgatgggtttcgctgtaaaaatcgtaactttttttctctctgattcacttcaatgacttgacttgatcagtgttgatcgaagaatttttctatggtttattgattttttatctgattttatgtaaatttacttactttgtgattgtttgattggtcttttgattaaagtttggatctttggtacttctgtttgtcaatatgagattgaatggattgtgatttagctacttggtggtgggtttgattccaattttgactttttaagttctttgacatttgtaggtactactctatgtatggtcatgttgagaaaatggctg

SEQ ID NO: 43107 - DNA, 912 bp, Arabidopsis thaliana landsberg
  unsure (1)..(912): unsure at all n locations
gtaagtaaagaaccaaaactttgagaagtataaaacagtttaaacaatagttggacacagaacatctcgtatataggtcaaaagaaacatattgagaggagacagagctgaaactaaagctgaattcatttgtttatttaccaaaaccaacaaaagcaaaacactcttacgtcatcctaaggctgtgaattgaatcatcaaactcaagaactgaaattttggcgtcgcgaaatgtcaatataatcgaatctcttcccttagaagaattaccacctcccataggaagaaccgcaattgactcaacattaccgtgcaacctacaatccaataccaagcacatcatcacttcaaagtcaaagtaccaaaattggagtaatttaggaggtagttgtcaacaaacacgtacctataatggcacacgagctcgagagaaacaccagagacaccatccataactccaccacgcttagcaagcttcggattcctcagctcttgagtattcccttcctcttgagccctaacgatgtacacctcaaggatatttgcggcggttataacgacgttgggcaaaggaccaatacctcgtttaggattaggccactcagcttcaatatcatcatgaccggaaacaatcggaatctgtagcgttgaatcggagagagagtgggtgatatagccggaagcacagttctcgacgccggtaggccaatgcatcatcttataggccgcgaaactcatcttctctaccggaatctgggattcagagattctaattctaaaaattgaaattgaactaagaagatngggaagtgagtgtgagagncatttanggtctcgattttgtgaacattaaaagatcagatccttaaacccacgggttttaattttaggttggcttttttttttaagggg

SEQ ID NO: 43108 - DNA, 949 bp, Arabidopsis thaliana landsberg
tcatgaagtggataaaggtgtgtaaatcttcaaggtcaagcgtatctcatttcgcaacacaaataaagccaaaagtatggaatgacaaaccttagtcaccacataatcgatggagggctcgaagctagccggtgttttcctcgtgatatcattaggaatctgatccaaggtatagccaacagacaacttggcagccattttagcaatgggagaccctgtagccttggaagcaagagcagaagatcttgagaccctagggttcatctctatgatcataacttcaccatcaaccgggttgacagcaaactgcacattagatccaccacactcaacaccaatctcccgtataatcgcaatggaataatccctaagccgctggtactctctatccgttagagtctgtgcaggtgccacagtgatggaatcaccagtgtgcacacccataggatcaatattctcaatggaacagataatgacaacattgtcagctaagtctctcatcacctcaagctcatattctttccaacccaacaaggatttctccacaagaacttgacttgtcgcactcgcagccaaacccgatttacatatagactcaaactcctctttgttatacgcaattccaccaccagtaccacctaaagtaaacgcaggacggataatcaaagggaactcaccaattttctcagcaatgtcaaaacactcatcaagagtggtcccaatccctgaaggtggagtctttagcccaatgttcttcatcgcatccttgaacaactcacgatcttcagctttcttaatcgcaccaagcttagctcctatcaattcaacaccgtatttctccaaaacaccactcttagcaagagcaaccgcgaagttcaatgcggtttgaccacccatggttggtaacaaagcgtcaggcctctctttctcaataacctgttcgacaagc

SEQ ID NO: 43109 - DNA, 727 bp, Arabidopsis thaliana landsberg
aggtccccttgaatccatggtgccaaaaatttcgccatccaaaattgggaaattccttttaaaaattccaaaattccaaaaagaagggcgaaatcgttttcaaaattcttccaacccaaaaaaatcatttgaattgagctgaaacctttgagtcacccaaaagatcgtcgtcgtcgttcttcaatactcgaattttgagggatttttttccccctttgattttcaggttttttgaaaaaaattaaaaaaacaaaaatttggaggtattgactgatatgatattcatgtttttctgtggcagagaaagcgacatcgtcacgtcaattatctgtgtctcacggatcttaacatacaccttcatgtacctaatcctaaccccttgcgtaacttatgtctttttggcccgtggaatgaattatatggacccaacaatactatagagattccataattgtgaatttataaacgcgttttctaaaaatacatacaaatcaaatcataaacttttgttcttagaaagaaaatcgagtaaaatttggaaaaattaaatatgaaagatatatttcattttacaaaaattcttgaaaaaaatatagatatgttaaactttattaaactgatcccatcaatatatgtgcagtctagttacatttattgagatgttatcatactaatactattattaattctaacacccaaaacatggaatcgctaatatcaaattttg

SEQ ID NO: 43110 - DNA, 707 bp, Arabidopsis thaliana landsberg
tatctaagggcaagactcctgattagaagaagaatttgagacaatgctcaacaactaacttagaggattgcttcttgaagtgaatacttgttcatataaagatcaattctaatgcgtcttaaactgaaaactcattgattacatcaccaattccttaatggaacaaagagagtaatacctccttgtaagtagttatcttcttggcttccaacttctgacaaactgtgtgaagttaaatcaaaatcagcaaaacagcaatactttcacttcaggcatgtttgagctaagagagatatatcactgacccataacactgaattgacgaagcccgcctccagaagttcttgattgccctttcttctctgatcttttaaacacaaattcaatacagacattttagctccaagtaaaaaaaccagagactttgtgagtaagaagaataattaacactgacccaatttcagaatcatcatcaacaatcaatttccttctcactggagttttctcaacgctcactgaaggatgttgcctctgcttctctggagtgacaaacaactccatctccatactcatccttctctacacaatttaccaattaacaaagttagctacacgaaattcaattcaattagttgttcatgtctaaaatccatcgttgactaaaaccgatgaatcaatagacacataatctaaaaaaccctaaattg

SEQ ID NO: 43111 - DNA, 508 bp, Arabidopsis thaliana landsberg
gttcatcatcaagaggactagcatccatcttaagtgatgctttttcatggataggctccctgagtgtcggatgacgctatttaagcatagttacaggcacttctcatctttacagccgtcgtccttggcgccatgggcttcaaggatcttgacgatctcgggatgaccttcgtcacctgcggcgcgcaccagggatacgccaccgcgcatcttgatattcggattggcacccttttccagcaggtacttgaccatctcttcgttaccatcgtaggcagcgtgggccagcgcggtgagcttggtcaccgggtgctgataatccaggttggcgccgtgctcgaccaacatcttgaccacagccagctgacccttgcttgcagcagacaacagcggagaccaggcgaagaaggtttgattgacattgaccgtgccggattcgatgtatttcttggcgaccgcgaccttaccggtggtcacggcatccatgaactcgacctgttcgtcgtcg

SEQ ID NO: 43112 - DNA, 516 bp, Arabidopsis thaliana landsberg
gatattgtcatatctggggtaaacaaacctttcataaccccttattttccaactgctaaaaatgctacaggcgttgccgtaattgtggtgccgggcggcggccatagtgagttgtggatcagccatgaagggtataacccggctaaatggttaaaggaacatggcattgccgcttttgtgttaaaatatcgtttggccaaggagccaaattctacttatacggttgataaagatgaactggccgatatgcaacgcgccattcgcctggtgcgaagccgggctaaagaatggagtattgatacggcaaaggttggcgtaatgggtttttcagcaggcggtgagctggccgcattggccggtatgcgatttacagctcctgatataaatgctgccgaccctattgaccgtgagagcgatcgtccaaattttcaggcattgatatatccgggtaatatcagccggctggaagtaacaaaaaggtcgcccccggcatttctggcagcgggttataaggac

SEQ ID NO: 43113 - DNA, 514 bp, Arabidopsis thaliana landsberg
gaaaaatcagaagcggagatgaatattattaccagtcatctgagaacggagagtcttcatatactgtagatactcctccatctcttcttcttcttcttcacttctcggatttcttcaattcaaacctaatcaatcaaatcagagaaatatatgaaatttttagaagttttgaatcagttcttcacacgaatttgaagatcggagaaaaatctttacgcgagctctcgctttctgagagatttcgaaatggtgacaaatttttgaaactagcgggagaacgataatagtagcatctagaagaagagggaagaaattacgatcgggtcgacccggtttagtgatatggactttataaagcccaattaaaaaaaacacgaaaaagcccattataattgttttaacccgtttacccgaacccgattcgggttccttttagcggtggagataagagaaaccgatttgagttcttcaggtgtcagtaaacatcatacaactttcagtcttgattcattac

SEQ ID NO: 43114 - DNA, 692 bp, Arabidopsis thaliana landsberg
cacattctttcttagtttaacaaagattttactatgaactcaaagacatatgaagtttcagccagcagtttaaactacttaaaactagttgaccgtagttgaggaaaagaaatattctaagacatgcaagattaagggaataaagcgattacccttgagaggcgagttgaaagagaaacagcgactcagaagtcagaactcgtacccactttgtccaagttagtccaagtttgtcagagctacgaacccaatccaaaaaccaaattacttggatcgaatagttcaaaaacgagattcaaccatttttataacattaatcctctaaaccaaaaaaagggagatatccaattccaataaggaaagaaactaaaatcccttctttggaattgacttttccaataaggaaagaaacttggacttgagattctgtttccttttttcttggtgaatagaccttccaaggctttttaggtccttttgtgttaaagagaggaacaggatgccaaacgttttcaaaaggggttgccaatttcttttttgatttttttttttttagtaaaggatacagatttttacagtaaacttaggaaatatttgtttaatttaatgaagataactgacgcttttatatatataatcttgcaacaaatgtgttcaagccatacccttacaaaacaagggaccaaatatta

SEQ ID NO: 43115 - DNA, 363 bp, Arabidopsis thaliana landsberg
caggaatgatctgatctctactctcatttctgtattttgaacttcactggttgcttttaggccctcttgttccagaacttcacaaaaaaaacgaattgggtggtcgtggcgatcgccacacttaataggagagtatcatctctacaaggtttcgaagatgaaaaaacagtaacttggtctctaatgtagcgtcatccttgctctttgttaaatgggttacatgaggcttctcgattaacgtccatactctattcagctcatacacatagtcagctcatcacaagagatgacaacgtacaagaatgttccttatactatatactatgaaaagtgttgtatataaaacaatatgggtgcattatg

SEQ ID NO: 43116 - DNA, 466 bp, Arabidopsis thaliana landsberg
ttaatacttaatattaccttaaaattaaaaagtaggaagtttaattttaaaggaaaaaaatgtggccagttttttagaaaattgcttttgttcatattaatagtatatgacattttatcatttttgttttttggagaatgtgtagaaaatgatgtataacacgcttttgggaactttgagtgtaagccaagtcttttaaccttttctcttattcttcgtcgaagctttttgacatgtttttatacccaattataattcgagaaaaagctaaataactttccgatataaacaaggaaaaaagaaaaatgtagaactatataatattctttttgtatgtattgaaatagaaattccaaaaacaacaacataagacgatgtaactcatcgagccacatgtattttgttgattcttaatcaaggaagcggtatatacactaatacctaacgctacgagtctacgacatgc

SEQ ID NO: 43117 - DNA, 373 bp, Arabidopsis thaliana landsberg
tgcttctgtattggatcttaaagtgtggataatcaaaatgatgcacttagctataacgtttaagaaagctggctatacttgtcttccacaccacatatttgactgcttctcaagaaagcgggctactttatcctctactacaccatcaaccttacaattttggcggcattgaccatatactttttgttcccataacagttaaatacaaaaagtaaaaaatgtacgaatcgttcgtcatatcacaggtttgcacaattgcttttctttccaattactcgtatgtatttattaaaaaaatgtcatagacttaaccaaaaggataaacatgttaataagatgcaagtatgactagctccgtgagagaacgcgaatt

SEQ ID NO: 43118 - DNA, 515 bp, Arabidopsis thaliana landsberg
aaactgaagattgtaaggatctagggagaatacttcatagttggttcacatggttttttcttttaaaatagtttcttataaaaagaagaaaggaaagaggaataaaagggcatcgaaaatggtgtgagaaagaataaattacacaagataagctaagcgtgacaaagacaatttctttggcacctatatatctctatttagtgagacccactttttaaagttaacaaaagtatatctgtcccgcgtatctttgttctattgcatcactcattacttgtcattacatcatcataagttatgattcacaacatcatgagattttcagtctagacctataatattgtgatatttggaaaaaatgaagtatatgtaaaatgcagttgatgtaagtttaagttacatactcttaaggattatatgtaaatttggacaaacaggaaaattggatactataaagaagcatattagaaaacaaaaatttaaaactttctaacaactttggtttacccaaaccg

SEQ ID NO: 43119 - DNA, 414 bp, Arabidopsis thaliana landsberg
ttgggaattttcatatcagtatccatatttccataatatcaatttcatccctcatcttttcagtcaacacttttcttcctgtaacttttgctaaaaacataatgtttgataaaatcatgatcttatttacaagagaatttgtttagctcatgaaatttgattaaaaaaccacaaaataaaaaagttgaattgaaaatcatgttctagttaaagaggaaaaaataatattttgtggtcttttatggatttgggaagaagatcttggtgacaaaaattaaaaaattacttggtggtaagccaaaaaaattaaaaaattcatggtttggcacttttttaattcaatgaaaagaatggccaatttcttaataataatttattttacttgggtttattaaaccttttggaaattatttt

SEQ ID NO: 43120 - DNA, 459 bp, Arabidopsis thaliana landsberg
ctttagagacaccaatgaaaagttagtttggtaatcctaaaaccgttattaactacaaaaatgcttttgtggaatcagaaagagtagtagtaccctgaaccggtatttgtagaatatataaccagctaaaccggctactgcgacaatagctagtatcaagagtgtgagccaccatgctgttttggatccatatctctctgtaacaaacaatcatcaatgtatattagatacgtggggtggaatttgagtactcttaaatcttgattgataatattttacctatacaagtatcttgatcgtttatgtaaagccggtcaccagaacaactgcatttgaatccaccccaggagttcttgcatctgcaaccgctacattgacataccgaacgctctttacattcgttaatatctgcaagagccaaatcagaaaacataattacattattgggtaaatgattat

SEQ ID NO: 43121 - DNA, 597 bp, Arabidopsis thaliana landsberg
aagacaaaacctccttatccaccgttagatttaaagttcatcatccaacggctagaagtctaatcccgctaataatttgaccgttgcgattatgcttttaatggctcctcctctcttctctatcccttaagcgctctctctcaaatctcaatcatccttcttctcatctagaaaccccttatcttggagtaatcagagagtttgaaaacaccagaaatcatggcgacaggaccagttgttcatcctcaaccagttagaggtttgtttctcccctctgatgaatctttgttttaactctaggatctgcataaaaactctcatctatgaatccttttatttagatgttatcaaagattacttacaaatctgttttccaaggatccaaatcttgataggttgctttttgttaaaatttatcaggtgatcccgtcgacctcaaaaacgcagcagcaaagaatcgtcgtgctcttggcgacattggaaacgtcgattctcttattggagtcgaaggaggaaagattaaccgccccattactcgtaactttcgtgctcagttgctagaaaacgcacaagttgcagccgccgctaacaaaaggc

SEQ ID NO: 43122 - DNA, 289 bp, Arabidopsis thaliana landsberg
gagtgattattttgaagaatttcgtgaactttccaatctttcggtataacatatctgtagtgattagaatcgtgatgcataatattcatgtgtaatgtgtttgctagacttatcaatgggttacatccatatccgtttgtagtgctttcctgccaaaatttatagctgagattatatctctagcattcaaaatttttgttgtaagaataatgggtattgtgtttggatagcatatgctgcggaacaacgatcaaaatattctattatcaaaaaaaattccaactgatac

SEQ ID NO: 43123 - DNA, 775 bp, Arabidopsis thaliana landsberg
  unsure (1)..(775): unsure at all n locations
gaaaattttattttctaatctcaaaacacctttaaaataattagaacatctttgaaatttattaaaatcccatctaatctaaaaaccccaccgaaacaaattaaaattcatactccaatacatttcccctcaaatctttcttgtacatgttttcatacaaagctctttggcgtcgggaaaatctttttctagccaacaccaatcttttttagttccagctgcgagacaacaccaacaatcatctttaaatgggtggatgcaattgttgtgaaaacacaatggtatatagattttgctcgatctccctatcgtgctacctacacatcgatctgaaacacataattcaaaattttaattactatggaaagaaaagaaagagacatttgatatatctgtgagaaaaatttatactaacattcatgcatggagaagaaggagagcatgattatgcagattatagctatatgcgatttcatgttttggctgtctcaaaggactttgttatgagtttttttcttgttttgtagaattgttctagtttgtaatacaaaacttaatcagtatatactatttatatatggatatagagaaattttaattaggaaagacctcactcgagagaatatacagctagaaatttcggtcgatttccaaatatcttattttcgattcatttcggatatatctagtttataaccatattctctaaattcgaaactggaagtactcgaattcacttgttgcanatattaaacatattccctaaaatcaaaac

SEQ ID NO: 43124 - DNA, 466 bp, Arabidopsis thaliana landsberg
atcatccatagactaaaagcaatttacaaagccgtgatatcaaggtaagaaaataaaattaaagggtttttaaaaataaaataatgtttaagcataccttcatacgaagaaacagtgaatagagggaccctcgaggcacgagccagagtaaaataaaaagtgtcgaccactaaaatatttcaaagggacccaaaaccagacccgaagcagccacaagaaatctgattgggacacgatccattgtccgtacagaattttatttctaaattaaagttttacccaaataaagatactgcacgcaactactacaaaccccattcttcttctctttattactccaagtttgcaataatctacccttcaagaatacatgttggcttcgtatcactcaccccctatttgagtattatttactcttccgaccaaactttttgtgttgtattattgcgaatttattatgatacta

SEQ ID NO: 43125 - DNA, 382 bp, Arabidopsis thaliana landsberg
cctggcagacgccgccggcgcggctcggcgacgacgatccgcatcttcgcgagccgatgctcgatgcggcgatccccgccaaccgtcggcgcatctacgcggtgcggccgatcgtcgaggcgatcgtcgaccgcgggtcggcgttcgaaatcggcgcggggttcggcgcgtcgctgcgcaccttcctggcgcggctcgacggccacgccgtcggcttgatgatcaacgacccgtcggtgatgggcggcgcgttgacgcgggcggcggcgcaaaagctctagcgcttcgtcgactgctgcgacatagttccacctgccggtcgtgcatttggtcgatcagcccggcgtgatgatcggccccgacgccgaacgcgccggcacgc

SEQ ID NO: 43126 - DNA, 684 bp, Arabidopsis thaliana landsberg
gttaacacactttatataaaaatcaagaaacttttttttttattatcactgtttttaaaaatcaacagattttatgtgaacttatgactgtctttgtcaaaaaaaattgatgtaaactttattttaaagtcggcaaacttttttaaaaaatcaacaaacttttttgtaactttaaaaacaaaatatatttttcttttaaacaaacagtgtattcgcatggaaaattatcctaattatacaaaatatataggaacggaggagaacacaatttaatggtcagatctagatctcgtcggtcatccacctttcagttttcacgagtgtgtcgaacgaacgatattaattaaaaactaatcaataaactgaataagtacaagttgcatggttaatgaagtaaatcaccgatttgaagtcattaaaccgaccgacacaatgaataaaaacgcgttcacggattttattccgtgttgatgggcagtgacactgacttctcccattaggcaactgtaattttttctcgtcactatttttcatagcaaatctaaaataagttgcaagaaattaatttgatatacaaaaaaaaagaaagataaacaccatgtgggggttgttgttaatggtggaattgaaaacgcattaagtggaaatctaaatacaaagatcatgaaaaatcttaataaatat

SEQ ID NO: 43127 - DNA, 1486 bp, Arabidopsis thaliana landsberg
  unsure (1)..(1486): unsure at all n locations
tttgttaataaattttaatttcaatagtttaactcttgttcaaattatctcaatcaaacattaaatgttaatgtcaaatagaaacatatttctccctattgttttttctatctttataaatgagattatatagtataattagcaaattacaggatgtttgtccataatggggagaaancaaataaaagtataaaaaacaattcctgatcaaattagttttttttgtaagttaaagtgtatacgtggcaaaccattatagctagctgggtttggaagaagtcagagacgccgtgtcgtttctcatctcgccggtcaacttttgagagagagaagaagaaaaatgcatttgagtgagaatgaaggtgtcgaaggtaacaccttcgtggtcactggaggtcttggcttcgtcggtgcagctctctgcttagagctcgttcgtcgtggtgctcgccaagttcgctcttttgacctccgtcactcttctccttggtccgatgatctcaaaaacagtggcgttcgctgcattcaaggttccaatttcatcgatccattaaaccctttttcaatttgatctgtaacttctgaatctcaagtttttagtgttagatcagttccggatttatatattgtgatgatgatgtcacaggtgatgtgactaagaaacaagatgtggataaggctttagatggagcagactgtgttttgcatcttgcttcttatggtatgtctgggaaggagatgcttcggtttggtcgttgtgatgaggttaacatcaacgggacttgtaatgtcttggaagctgcgtttaaacatgagattacaagaattgtgtatgttagcacttacaatgttgtgtttggtggtaaagagattctcaatggtaatgaaggtttgccttatttccctcttgatgatcatgttgatgcatatagtcgaactaaatcgattgcagaacagttggttctcaagagtaatggtcgaccttttaagtaagtctggttcttgattcttcaatacagcaaatgttcaggtttttatgcttatcagtggctgtgcttatgtaggaatggaggcaaactgatgtatacatgtgcgattcgtccagcggctatatatggacctggcgaagataggcatcttcctaggattgttactctaacaaagttgggtttggctctcttcaagatcggtgaaccgagtgtcaaatcagactggatttatgtcgaaaaccttgtcctagcaatcatcttggcaagtatgggactcttggatgacattcctggcagagaaggacaacctgttgctgctggtcaaccatattttgtctctgacggtaaatgcatctcttaaaccttaaaactagcttcctaaagcaagctgaagtattttgcattggcgatgttgtatgttacccagtgaatacctttgagtttctgcgtcctttactaaaaagattagactatgacctgcccaagtgtacaatctc

SEQ ID NO: 43128 - DNA, 106 bp, Arabidopsis thaliana landsberg
ttgtggacgcaggctttcatcgcctgcggctccccgcttcgccgagacagcggcatgacttcggagcaagtgaacctcgcaccggatcggcactaggggcgcgcat

SEQ ID NO: 43129 - DNA, 394 bp, Arabidopsis thaliana landsberg
aggcatacaacacagtgatttctagatatgatggctaacacggtgacaagatatcacatgtcgtactcgagaaaataaaaaaaatatgacagtcaggagtgagtgctatcactcctcctatagttcccggcgaaagctatttatattacatctgtactatttgcttattctagtgagtaatatgattaaacatcagtgcaactgatgaatcaaataggagagcactgcctttgcaagactgcaggtccaactaacggctaatcaaatgcggatcgagtaaaatacaaaacagggtactaataaaataagaattagtaaacccaataattactcacactgtgaggaactggatggatccaggataatagagacagccagataagaacctatctat

SEQ ID NO: 43130 - DNA, 629 bp, Arabidopsis thaliana landsberg
agcgtctttttttctttttttcttttcaagtatccattatatttctctctttagtgatagtctctgtaatgtgattggtcaagacacgtataatcacccacccggtactatgtaaaccggtatttcggcttaagaataaatctcttgagatattggttatgtataatttttcttgttacgaattggagtctttttgtcataaaatttgactcgacttaagcatagaagggaagttttccgtattagtaagtggtctcatattaatatgattgactgattaaaccgggattagttcattacaaggctaaggcatgccactctttcaggcccaatagattataccaaagtattacttgtgctactctaaaaaagcccattggcaaaggagtggtaaatggaaacattgtctgcattgtactatattggccaaaatatgaattcaagttttgataagagacacaacggttactaacttactagtgaaaacaactgtagtgatttctcgaatcatacactaatttgacctttccaaaataactgggtcgaacacaatggatagttctcaaagctttctccacactctttttggattattttacttttccaaacatcttaatcaacacatgagt

SEQ ID NO: 43131 - DNA, 509 bp, Arabidopsis thaliana landsberg
  unsure (1)..(509): unsure at all n locations
tctctttttaatgcacctctattgccctaacgttaatgggcctttattgggtttattattggccctttacctaaggtatactcaaaaagatttccttattgagtatatagattaggagtttaggacgtttaacaaaaaggagtagtagcttagtgagatttgacgtgagtaattcatttgattattcgtgggtcttggaggatttcattgaaagtaagtttattaataaggactagtactgtaaactttagaggcattgctcacacgggtgaggttatatatgcaaattacgatctggagtagttagttctatgcaatccgtcacgatcctaagacgaatactctaagagttgttgcgattgatgtaaacttcatcataccacccttacaagaacacatnaataacgttattntatttcacttctgttactctcgcaatgacacactnttgtctttngcttttgctttcttaaatataatacntttttttcttgtaaacgggaagaaat

SEQ ID NO: 43132 - DNA, 737 bp, Arabidopsis thaliana landsberg
tctaagatatgtgtgatactgttttttatgttttaaatttgcttgattggttttccgccaattaccagcaaacattatgttttgtaggcggttacggttgttagcttttaacaacaatcacgcaaatcattttatactgctacaaatctatatatttgtttgaactaaatattttgaaagcttttttccgccaaaatttaaaaattccttttatctacattagtcataataattcactaaaaataaataaaaaattgttttctcttgttaaacactatcataacagattcttaaatattatatacataatatatatatatatatatataaattaaatgaaaagatatttataactattaaaaatgttttgtatattcaaatgttgtaaatctcttaaaactttttaacaaatttgaagaaaattttttagaggaaataattatgggttctcaaaatatattatacatagtatgtatttttggtatattttatgtaaaacattgttgctactgctgtgaaagctgtgaaagagtcacaaatttttaatagttattaaaaaattatggtttgatggcatattatttaatttttatgctggttcagtgcaactatcctatattttatgatagaaaaacaaaaagaaatttccctatttttaaaaagaaaaatgtcggaaaaatcttgaactgtgaaaaaatgttgaaagaaatccccaactttggcttcaatggaatata

SEQ ID NO: 43133 - DNA, 441 bp, Arabidopsis thaliana landsberg
ctaagctccctcgagcactccgacatatcggaagagaagttttggggctgtgtgaccgggtgcgagacatcgacctgttcgatcttggcatctacctcgaggaccgggagaaccagccagcgcttgttcgcccagtgagccgggaactgatcgaggtgcgagaggagaaagcggcgcgggcgcggcaaaagcagatcgagaaggagaacaaagagaaagaagcgctgcagcggctggagaagggcaagctgagccatctagatatgttccgaaccaacgagtacagcgcgtgggacgaggaaggtattccgacacgggatgccgaggggggcgagatcaacaagagcaagacgaagaagctgcgcaaggactgggagcggcagaagaagctacacgaggcgtggctggggagccatatggggactaagagctgattgatag

SEQ ID NO: 43134 - DNA, 338 bp, Arabidopsis thaliana landsberg
gttttcttttgttacttacttatggaagaccccagttatttacaaacaaccctaagcacaaatttttatcatggttacttagttaaggaagaccccagggttcaatccatgtatttcttcgtcaaaatcaccgcggatacagaatgttttttacctgtttgtctttttctggaaccttacaatcagctggaagttcctgaaactttcgcttccggggtggacgcctttccatttcattacttgcattatcacttgggatcgataaggacgtagctgtcaacatagtaaggggcacagtcgagataacaggagaaattgattgcttaaggacttgagca

SEQ ID NO: 43135 - DNA, 322 bp, Arabidopsis thaliana landsberg
ttgcatgcttgtttcctgggattttctataaagatccttcttttgtcactatctctgctgaattatcatattgttctctttcttttatactggtgcatgtgggtctagctattgcgttgatatcttgtctcttcctgcgttgacttagactttttgtttagttttatggcaaagaatagcatcaccttctttgtgctgtatctcctgctgaatctgtagcaatttgattgttctaaatctcttgattttttgtgtgtgtgttgtctgttatagccagacaagagccacgaagagcacaaagtgagtttttttgcgggaagag

SEQ ID NO: 43136 - DNA, 727 bp, Arabidopsis thaliana landsberg
ggattcctccctctagtgcgcacagattggcgtgatcttgtcttgtagcgaatgtggcgttagcttcgacgtgactggttcatgggggaatccccgcctgacctgcggagatgagtgcgcaaaggcccgtatcaacaggcgcgcgcccgtgagcgttacgagtgggatgagtcctatcaggcccgagctaggggtacgcgcggagtctgctctaagtgcgaaaagccaattcacataagggccaccagtagggcgaatccggtatgccgcgattgccaaaaggctagccccacttacaagggcgcgattcctaccgcattcccccaggcacctaagttctgtgccgactgcggaattgactgcattcgcaagccgagccgttacgacggcaagcgctactgcctcaactgcgcccaggtaagggcagttcgccgagacgtagataagcgaaggcatcgccgcgctagggctaaggaccggcctagtgaacgctacaccttggccgaggtgcaagagctttcttgccatgtgtgcgggccttgcggcggactggtcgatcccaccctgtcgggactagacgaatggggtccaaccgtggatcacataattccgatctctaagggcggcacggatttgcggcataacgttcagctcgcccatagggtgtgcaacttgaggaaaggcgcccgaatctaaacaggagaatgggcgggtgaagggttatggc

SEQ ID NO: 43137 - DNA, 271 bp, Arabidopsis thaliana landsberg
tttttcttaactcttctttaatgatatgatgctttgaaatttaggttttatatgcgggtttactgattgcgagtggaggaacagatataagcatctggttactctttggttttgtggtatggttcactctctcatttgcaagatccactaatgaaatgcttttttttctctggattctgagaaatagtacttatgttttttctttttgggtgtttgtttttcttttgtaggctgctaatctgacatacgcggctggagaaacgcaccgttg

SEQ ID NO: 43138 - DNA, 523 bp, Arabidopsis thaliana landsberg
tcgatcacgtcacgcaccaacggctgctattgaagccataccctccagctcactcttgctccgtttgattctttcaccaccaacgtcaaatccgcctgtcgccgtcgccgtagcccaaatctctggcaccgccgtagctatctcagtaaccgtctccaccgcataatccgcatctttcgtcttttctgctcttcccacctttttgtaaccaaatttttaaaacttgaaactaacacatacaaatgtcgcaaaatagggaattaataaatgtgaaatgtaacaaaaatttaccaggattgtgcgaagcccgacagatctacccgcggtaatattgtggatattatcatccaaaaatacctatttacaaaaacagtttgcttattgtaatgatgatacaatagttttatcataagaaataattaaataaataagaatattactgttcggcgaggatcaacgttggctacacgaatgcaaatatccattgcggtcaacgaaggcttgagaacaaccgggtattcat

SEQ ID NO: 43139 - DNA, 606 bp, Arabidopsis thaliana landsberg
aaagactcgtttgtcaaaagagaggatctggctttggactcggtgaagcagtataaagttgtttgcccgaaggagcaaaacaagatcgaagtcatcaaggatcagattatggagcttggggatattgggcaaaccattatctttgtgaaaacaaaagcgtctgctcaaaaggtgcacaaagcccttgcggaaatgggatatgacgttaccagtgtccatggtaatctgactgaatcggacagggataagatagttaaagagtttaaagaatgccttactcaagtgctcattgctaccgatgtcattgcaagaggttttgaccaacagcgggtaaatattgtcctttgagccttttcctttcttctcgttttacctcaaagatgcttcgtagttaatacctcttgttggttatatacaatacttgcaggtgaatttggttgtcaattataatcttcccactaaatatgaaactggagagccagattatgaggtgtaccttcacagggttgggagagctggccggtttggtcgcaaaggtgaagtttgattcttctttttttctttctcaagtgttttcataagttcttatcagtttctgaactatgt

SEQ ID NO: 43140 - DNA, 167 bp, Arabidopsis thaliana landsberg
cggctgcgagatgggatctcatcggcaggtaacgagactggttctcttccgtaggagggctcgtggagaagaacctgatgtttcgaacagaagcatttccagacgactcgagatatgaaaatctcgaaagagaggtaagcgaatgagtcgtctgggtcttcttcttc

SEQ ID NO: 43141 - DNA, 594 bp, Arabidopsis thaliana landsberg
cgtgctttgccggacacttccgagaagctcgaccacctcctccgtcgtctctggtcaattcgccgtagtcgtctccggtcaagcagcccgttttaagaagaatatggagcaaaagactgaatctcagtgtaaaaaatgggagacgattgtgaaaacatcgtattcacaccatgatcatgttcgctactcagaggtatgtattaatcggtcctagttttaagaaatctcttaagaatctttgtctctttttggtatgtttggtttcaatagatttggatgacgttcaattgtgcaggggcttattgttgttcatcctactcgtcaacacaaattctgaaaaccggaatcgtttttactccatacagagtttccttttttccggtacataaatatctattagtacacatatatgtattttgtacatgagatcatgatgtcggataaatcccaattctgtgtcggaccggatcgggttaggtttgaaatagccacattattttcacacaatatcaacatcaatccggacagttttagaaattgggtttgatccaaacatttggtatgaaaaaaattggaatttcgttttaaatattt

SEQ ID NO: 43142 - DNA, 657 bp, Arabidopsis thaliana landsberg
ccttgtttaaacgtacgagcctgaatcgtctgatccctttgataaaccatattttccaatgcttcaatctcttggttttcataattcaatgtttcgtcaacactacgctgaagctgtttcagttccaagtcgatttttgctttttcacgctccaacgtctgaatcatctttactgtttcatctgcagcagttgatgaagcaatacgctcttgctcaagctcatgatacaaatcctgaatcgtttgctgttgattgctaacagtctcgcgtagtaattcacattcgttctcaatttggactctaggattagagaacatgtctaggtcgtccagctccggtatcgagaatcgtttctcggtctgtaattcgtcgtgtcttctcttcttcacagatcgaatccatgaaccaggggaggaagaacaacaatcgcatccacagtcgcaacatttgatcggagattccattcccaattccaagattctcctcacaccaaccacacatattatacagagaatcgcgaaaaattacaggaagagacctaaatcgcactaacccctaaatcatcggaagcttctcaggaaaaaaaaaaaaaaaaaaaatccagctgaagccaattctgcggaaacaacacagtaaaactcaatttcagaatctgga

SEQ ID NO: 43143 - DNA, 873 bp, Arabidopsis thaliana landsberg
cataagatgttcttttagttgaatgaatatatattccacacccacccgatacataatagttagtttgttattttatcattacttattagaagaaaaacaagattcaaattcccaggaacaattatgttaacaaattcgtataacactgtttatgcttagcagcttttgttggtaaggaaagaaccggcgaaaatgtattgatctccctaaatcggtcggagtcgaaaaaacaagtaccttgcaaatattatcgaattaacaaagcaaggaggcggcttattatctggaagttctaaaattttctagtgggataagaaatcaagtcaacagtctatttattaattatttgtatcaatcctacaaccgaattcaaatttaggaaatagatctttctgtatttctttaaaggaccacatgcaaacacaaaatcttcttatctgataatcgcacaatggaagtatttataggctgctggtatcaaaatgggctttgtaagatggctgtagtttatatatatgagcttttattattgacctagttatgggctccattatattctatatgggctttaattcttgaactagttatgggctcttttatataatgtttatatatgggcttctgttcttgaactagttatgggctccattatttattaatgtcaatctcaccaaaaacaatatatcagaatgtcaattataaaatatgttgcatttatgataagaggcttatatttcaatactaagagaccattttttgtatgaggaatgggaactgtggaaccattataaaacaaaaatgttcatattcaaaaaatacaaatggatgttaactttctggaagttttgatgagcgaccgggttgggggacact

SEQ ID NO: 43144 - DNA, 726 bp, Arabidopsis thaliana landsberg
ataatatagagatcaggtataataaatacttatatatatagcatcatcaactctcatacatatatggactctgctaatctccatcagcttcaagatcaattacagcttgtggggtcttcttcatcttcttcttccttagacaataactctgacccttcttgctatggagcttcatctgcccatcaatggagcccaggaggtatttctttgtaagtttcctcactcaatctctctcctctgatgtatcatatatttacatggccatgtatctattatatacatccatttaacacgtgtatgctactaggtttccgcagctatatgtgtgtgtttagaatattcttggtatcaagatgatatgaagaatttggaatctttcttcttctttttttccttcttttttggtttttgaaagataagttagtgaataagacaacaagatagaatttaagtggctgataaattattaaatgtctattacattatccttcatatatatagacatagtactctgattatgcattgattcgaaataaagaaatttcttgtgtggtctactggcaggagtagtgtgagcttgagtcacaattataacaatgagatgttaaacacaagagctcacaacatcaacaacaacaacacaagtgaatgtatgagtctttccagcatccacaatcactccttgatccaacaacaagactttcctttacaaaggcctcatgacca

SEQ ID NO: 43145 - DNA, 352 bp, Arabidopsis thaliana landsberg
  unsure (1)..(352): unsure at all n locations
aaataaacttcatattatgactatgcacattttaaattaaaacattttagtttgcttgtaaaattacagaattaacgcaggggttttaattgctgcttattgtctcattcagtcatttgccgaccaaccaacataaatctcaatataatgagttaatgacgtcatggtcatgngtagatggttttataataatacctaaaaaatctcaaatgatggtagtaattaaacacatatgacgcaaacgcagccattacaacgctatttcaaaacttatttaaacaattagtaatacttaccaaagcttttgaaagatactccgtaaacttgtcaaattctaattgtctaataactt

SEQ ID NO: 43146 - DNA, 640 bp, Arabidopsis thaliana landsberg
gataatgtttatcattggaagtttatcatgtcaaggttattaacctgattttaatataaaaaaaatatgttttcttatataaatacattgttattatggatgttctaaattcaataactactcgtcttttgctctttagtaaagtatgatttttctatctaagtctctccctagacagaaaatataaccacatcaaactagaattcatgaccatactcatgaaaaatataaatttggatcatgcacatgataagttgtgttagtttgcagtcgtgaaacgaatatcagaatctatgagcctatcaataaccttaacactgaagttgcgtccaatagaaaagttaaaaagacactaaaagccaaaccaaagaacatagagggattctaaaaaatagtataattagtgtaaaacaaaaatgtcatatgtgtagtgcttatgtaaaaaaaaaagtattcgaagaactaaggaaagcacgaaataaactatttttttttattaattagaaaaccatgtagaagaagagattagtgtagaacagaactgttagaatcacataagaggcacataaatcttgacaacatgcatccatgattggatttttcttatgaggatgcttgaatgccatttttacatgtcact

SEQ ID NO: 43147 - DNA, 1636 bp, Arabidopsis thaliana landsberg
aacattagcccgttttccgattctttttgcatctcgttatcatcatggctttcttgaggtgacgtaaattgaataatgaaaaagagagcctaagaaatgaattgggaaagacgagtttttttaggtccaaacataaacacctgcagaaataaagatgcataccaattttatacctttttctgttcccccactcactcataatctgccgaatttacagcctcactcgttgtaacaaaagaatcaaaatacacatacagtctcactgcttgtcagattttggggattgcatttgagatttgtataggaaagccccttgagatgtggctaaaaaatacaccgtaacgtacgatgtgaaaactatgtaagatagaaatatggagaaactggctatcaggatatatatatatatatatatatatatatatataaaaaatagtgtaaagagtcggatgtggcagtaagtctctcttcaaatgtaagtgtactgacattatatcaatcataggaatgagagcatcactttaaaaatggctcaaactgaataaaacttaagattagggtatggcatattgccggatatatagtagtcgtagacgaacgatatacctgtgctagtgtgtctgatttgttgaccaaaagcacaagacacctaaatacatgtcttcacccaaatttcaattttgtaaccttgtttttcacattaatatttctacaggcaaatcataactgcaattaattgacctaaagtagtaatttgaaaggtaaattaatgttaaagtaaacctaaaaaaagagtaatgtgaaaagctgacaataaaacaaggcttagtttaacgatcacagttgaaaactgccagctgcaaatcttgcttttgatgtgagcgttcacagagacagggtcgttgacttttgtaacagttgaaaattggagtatactattacattaacattatacctacaaaaatttgaacttaataataaaagatcaggtaacaactgttttaatagaacattatctcccttagttaattacttatgaaaaccaagattagtactttataatctccacctccgaagatgttttaaaaccctaattctaccgtaagaatctaaaaaaaagttatgatttgttgtactctctctgtgtggaattcaagatcttgagttggagaagaagtgcgtaccagtcatgaaagtgttaatgggagtaggataattaagtgaggcaggatcgatataatgatctgaagtggagccaacgactccattgttgcagctcacgtttgggcttgatgatgaggccgatgggcctgcggttatgagattcaacggctgagatccaccgcccgaggagcttctctcggccgggccttgatcgtagagaacacctttgaagacgtgaccgcctatactcacagctgttttatatgcatactcttcttcttcatcatctacggaactcacacgcacgcaccgaaaaactgccgacgagctaacttccggcggaaaattcccaacctccaaccctagagagaaaacatttaattaattattgttaatcacaagaaaaaatcgtaggagtattttcaacgtataatttgtttgtttgtttttatcttaactcaaattaataatt

SEQ ID NO: 43148 - DNA, 513 bp, Arabidopsis thaliana landsberg
taatataagacctttttccttaaaaagagagagacccccaagttctttttttctctctcaggcactacttacgagataactaaaaacagcaaatggtttcaaaagaagtagattttgaccatttcttttagccattattggtaatttttgttcttctttggtcgaatctttctttttctccgacgatgctcccctgtttatctttgtttctcctctcttttatgccttctccggtcctctcttttctctgctcagtgcctcttctcagcctcttcatcattaattgagtagaccaaatgatgctctcactctgaagaccttcctgcataagcagagcatctgttcccctgtttttctagctctaagctaagataatttctggtgcttctgaatatctagagatctctcttttctctttttctagcactaagctaagctcttttcaaactcatttgttcactctttaaacctcctcatggcaaaatgagtcaggccaagttggtattagattcc

SEQ ID NO: 43149 - DNA, 662 bp, Arabidopsis thaliana landsberg
  unsure (1)..(662): unsure at all n locations
aaacccgaccccccttgtcataagttataacttataacctatagttttcaaaaatatctattaaacccattaggcccactttctcatttcgctcatggtttatgattgactctacaattaaactggaattaaataaaatgtatcacgtccgttcccccgtacggttggtggacgccagttacccttcttaaatatcgtttaataatccctctcaattacgccactcacaggctaccggttcctcccgtttactttctcttaccatcagccatccgtaccaccgggttcaccggtcgatcctgtaatatcataaagctcgcgtccattgaaaaatctcctgtcttattgtgcttattgctcaatgcttttattccacgtgtctcatcacccaaagataaaaagggtaaaaacgacttctcgtagattctaagggcaatttatgaaattggaaaataccttatgaagaaagcagagcgtctgtagagatttctgtaacggggataaagtcgaaaaagtgaatatccattcacttgtcgccacgtaggaaaaaggctnttaattacgatgtaacttgactcactagattgccatccncttattttaggaagttgtattaagtggaaattactggagaatttgaccaaggacaaaaagcttaatag

SEQ ID NO: 43150 - DNA, 657 bp, Arabidopsis thaliana landsberg
caacctgctcgcgacccggctgcggctggcggccgaccgcaagcgcattccagcgatcgccgatgagcggatcgagcgtccgatcttcgtgatcggcttcgcccgcaccggcaccacgctgatccactccttgctggccgaggaccccaatgcccgcgcgccgctgtggtggcacacccatgatccctccccgccccccggcgaagtgccggtggtgcccgagcggatcgaatataccggcaaggagcttgaccggctggttgcccagacgccggggctgctgaccatgcatccctattgggacaagcgcggccactgcctgatcgaggacgaggagatcttcaccctcgatttccagaacgcctatccgaccctgctctaccgcatgcccgcgctggcaatgatcctcgacgccggcaatgcgcgcgaggcctatggcttccaccgccagttcctccagcatctccagtggaaccaggaaccgaagcattgggtggtcaagggcatctaccaccaattcgtgctggaggagctgttcgaggcctatcccgacgcgctctgcatctggccgcaccgggacccgatcgaagtgcatcccgtgaccatggggatcaccgcggtgctctatggcgcgatcaccaactggcagatggattt

SEQ ID NO: 43151 - DNA, 453 bp, Arabidopsis thaliana landsberg
cattagaagataacatagtttttattagcgttgtcactctgtgactttgtaaatatccaaattcaaatccaaatccggtaaacaatatattattgggaaaaaaaggagaatatgaatttgaggggatgggagaaggataaagttataatgcactcatggagaaaatttcaagaaaaatgtattgagacagccattgatgtatatagtcactactcactaagaaactggtttcattgggaaattaacttttcagtgttgacttttgatatcaaagtaaaccacttcaagatatggaagttggagtcaaccctccactaaaatttttatgaaaaatatcatcccttaagaaggccactgcacttttcaatctatgcgttccattgactgtgaatttaaactagtctacgtccgtacgtccacttgattctactctacttggtagttggagttgta

SEQ ID NO: 43152 - DNA, 487 bp, Arabidopsis thaliana landsberg
ttatcatctttgtttttggcacataatgtcgtttcctaattattcgatcaacttatccatttgattttgtattcaaataagtcgggagtaaccgccattttcatggaaaacacttatacttactaggcatatatagaaatttacttattatgaatttgttgaataaaagagacagactctcaaaggccaaatgtctcttataacaaaaaaacaagagggtgaacaaaaatgtttgtgagacaagaatcagattcttagcatacccaacaatcaatacatagtgtgacaatataataatatataactttgatacaatcgagtagctgcaggggaatcgttctttccttcaccttgcaaactttctaatttcgtccggttcaagccactgtttcattacgatcctccatattaattcaatcactctataaaagtggtgcatagaaacgtacacactacctagctcatacaataacgattctaatttaca

SEQ ID NO: 43153 - DNA, 586 bp, Arabidopsis thaliana landsberg
  unsure (1)..(586): unsure at all n locations
ttttaaaattttagagttcacaattcccttgcgtttgattacagcgtggaatacaaataatgcaaatgatatcttctcacggaggaatgtcaaaagatatttatatcactttagatataatattggatcaaaaaaatctcatgttaatctgttgatgcctaaagaaaaactgatcatgttaattacctttgcttaatgtcaacctcatgttaatttgaattaaaatatatttaaaatgtcaactttataaaaatgttggttactaatgcacatatcccaaaccttttttaaaaaatgtgaacattataaaaatgttggtatctaaaaagtagaaaaacaaggtgctttatgaaaagttgaaaataagaatggagttacccaatatataattaactaatcagaagtttaagacacagatgtaatgtagtaatctaatccaaccttattatctcctgcacatccaaacagaatccaagattacaatagctntatccaatgactgatagacacgtgtcanaaggtaccatcactgtcagctttccctctcgctccacctacatacttntgagtgagcgagaaaatgaga

SEQ ID NO: 43154 - DNA, 364 bp, Arabidopsis thaliana landsberg
tagttgaatattttagtttttgttagtctaagaagttcaatatcttattaacgaatgaccaaacgaactaaattaatactaccacacatttttatatgatattaatatacgtatatatacattcagtacttccattaccataccaagcttttctcttcttttcatcatcaagaatccaacctatccggttcataaaagccctaattttaaaataagatagagattatgaagactaagagcgtgaaactcttattcttcttcttctccgtctccctccttctcatcgccgtcgtcaccgccgccgaaggccattcacattgtggaccataatgtgaatgctcacacgaagacgaccatgaaaaca

SEQ ID NO: 43155 - DNA, 288 bp, Arabidopsis thaliana landsberg
  unsure (1)..(288): unsure at all n locations
gattcgacgtggtagttcggtgcttctttggtgatctgcacgtcatgtacatgcgactcgcgcatgccagccgaggtgatctgcacgaattccgccttggtgcgcatctcctcgatggtcgcgcagccgacataccccatggaggcgcgnnnnnnnnnnnnnnnnnnnnnnnnnnnnnnnnnnnnnnnnnnnnnntaaggcacgcgaccttcgatgccttccggcaccaacttgtcggcgttgccgttgttatcctggaagtatcggtcactggaacccttttccatg

SEQ ID NO: 43156 - DNA, 530 bp, Arabidopsis thaliana landsberg
tttgaattccgactttggatctctcaaaccgaactcaaagaacgatcggcgacggtggtcatttgattcagtttccgccggaaaaaccgccgtcgggagtgcatcaacttcaccgggaactgaatactccattaacggtgatcaagagttcgttgaagtcacaatcgatcttcaagacgatgacacaatcgttcttcgaagcgtcgagccagcaaccgccattaatgtcatcggagatatctccgacgacaacaccggaataatgactccggtttcgatttcgagatctccgacgatgaaacgaacttcatctaatcggttccgacaattctcacaagagcttaaagccgaagctgtggcgaaagcgaaacagttatctcaggagttgaaacgattctcatggtctcgttctttctcaggtaacttaaccactactagtaccgccgctaatcaaagcggcggtgctggtggtggtttggtgaactcggctttagaagcgcgagcgttgcgaaaacaacgtgctcagttag

SEQ ID NO: 43157 - DNA, 585 bp, Arabidopsis thaliana landsberg
ttgatggattgttttggaaatgatttgtgtgtttctgtcattttctgattttgaatgtgtcttggggtgttggggaatgcaagcgatgctttggataagctgacgttcttgagtgtaacagatccttctttgcttggcgatggtggagatcttaagattaggattaagcctgatcctgataacggcaccatcaccataacgtatgagagacttctcattttttgttttacttaagtattgaaaattgaatagaacaggtttacttagagaggtttgatgcgtatatgcagtgatactggtattggaatgacaaaggaagaacttattgattgccttggaactattgctcaaagtggtacttcgaaattcttgaaggctctaaaggttttttttccatctctttgaaaacctgttgctagcaaatctttgatgtcatgttttcggactcattgttttattgctctctttattcaggaaaacaaggaccttggtgctgacaacggtttgatcggacagtttggtgttgggttttactctgctttcttagttgctgagaaggtgaagactttcaacttttggttttta

SEQ ID NO: 43158 - DNA, 518 bp, Arabidopsis thaliana landsberg
aactaacattttgattcatatatatatatgaactctcttttttcatttaagaaaactaaaataaaacataattttaagtgacacataaacggcaaaaatgaagtttaatttgtaattatcatgatcacttatcgcaagagtttgacaaagcaccatctcacttttgcgagggctcaatcttttcacgtcgatcaccacgtttgtgaccgatgcagaatcattaacttagtgactatcctgcctcaatacctatgagatagtagccttccgatcgaattgtcacaccctgtaaaagttttccaataatttaatggaaatgtggtagccttccgagaagggttatttcacatataaaatttggacaaaaactactggtaagtaacctctttaaaacgctatacatacgagtggcacaaaattgtaaatcattacaaaagaaagtaatcacactgactaaaatattctttaaatataaatgtttgaattggtcctgtatatgaagtctaacaacaacttta

SEQ ID NO: 43159 - DNA, 725 bp, Arabidopsis thaliana landsberg
taaagttggtttttctttttggtttgctttgagagaaggctggttggttattcatggactaatggctcagtgtatatatatgagttttaataaaagtggtgacctttttgacatttgagtgcttgaagaaaaaggagaagatgctctgatggggttattcccatggatatccatatccattttttctttttgaagtgttgccttttgatgatgatgcttctcatgttctctcattattttgcttcattatgaagccattcaagtatgttttttttacccaccaaggttccaaggcatgtctgtctctactattgaagcattttacttttcatatgtttcatatgcgcctgagtacttgaatgcttttttttttcaagaaaaaggaaattaatcttggctttttttcttttggtttcaagataattaaaatgtagactggttattatggaagtggaagaattggaatataaactgataaattggcatatcctatttgaaggggttattccatgaatatccagaagttgaaaacggatcgttttgacaagaatatgatctctcttgatttatgcttttatgaagagccaaagttgaaagtcatcatttgactcattacaaaatcatccaattctcaactgctgccaaatctcatttcttactctgtttagctggttgtggagtgatttactctgtcctccaagtagatgttgttcacttccgttaga

SEQ ID NO: 43160 - DNA, 1225 bp, Arabidopsis thaliana landsberg
ctcctatatgttttatgtagggaacaatatctggtaatttctagtatctattatgaaatgccggagaaaaccattggcagctttattagtggtttcacttggatagatgacaattttgaaaaaatctatttgaacgtcatgcaataattggccttacaatgtgctcaaattttaactggtttgtttccaggtcattggagaatgtcatgcaagcaagatcagtgatgatgtgtctgcgaagtatagatctttgattacttctcaggataaagacttgtttctggatttttgccttcatatgcttttgtatcaaccatcttctcaagggtatggaatccattttgagcattgtttgaccgtcttttgttattatttcatctaataagagttgctcgaccttataattcagaggtggatcttctcctgggctttcagtttttcaagttaatcgtataatcggaaagcaagcattaaaaggggacacgcttacaagacgaaaggtctgtcatttaactccaatttgatctctttatgggttctatagctgccaagcaatacattcctcactaagaactaccattttctaaaaattaatcaatttcttaagcagttggggatcttgaatgtcattggaaacatggacctacctggtgaatctgtatatccattgtacattgctgcatcagtggataggtacgctttgtgtttttgccgcatgacatgctttgtttctatcacatgacatgaactactattttatcactaccttcgtgcactttgtatctactattcatgtctctgagagttggtatggatttgttggtgaaaattcattcaagtcaagaacctgtagctaagagaggggaagagcttctaaaaaagatagcttctggaacaaatttggatgatcccaagttgataaacagactgttcttactattcaatggtacgtaatcttcgtctttttccaacattgtgattatatttttagacactaaaatcatttatattctaagaatgatattaattaagctatttctagcatatagaatcaagtctatgccttctgctagcttaaatagatgaaaataagttatcttcggatacttgtggatgacattactagggctccccatttaggatgcagactattgcatatttgccatgtctgctgtggccacagattcatataaatcttgcgaggatctggagtgctgagggcgtc

SEQ ID NO: 43161 - DNA, 507 bp, Arabidopsis thaliana landsberg
gcacagacgcgcgccgccggcagtgacatactggcatcacggcgcgcggcaatcctccctgcatgcacgcccgaccccggctcaggccggggtctttttttgtgcctggcgttcgcgcgccgccgcgaccagcgccgcctcgatcgtcgcactgatcgaccgatcgccctgcagcacgcgcagcgcctcgtgcgcggctggggatagctctacggtgccgatccatccgccggcatcgcggagcgcctgctggcgcgctacgcgggaggcgtaggcgtcaatgcggatgttggggtcgcggcgggggcgagccatgacggttacgcgcggcccgggggcaggctgacgcgttggccgatgcgttcctcggcctgcacctcggcgatcagatcatcctgtaccggatcgcgcgcgccgccctcgcgcagatgggcggcgtacagtgccgtgagcagtcccgaaccgttgtcctctggcgcttcgcgaaaacagcaatgtcgatgccag

SEQ ID NO: 43162 - DNA, 779 bp, Arabidopsis thaliana landsberg
aaacggatatttctctacatgaccggtttaatgaaattcaagatgattgattttatatttgagttggaggagatgagagaaatttgtcgatccattgtcgttaaaggcatcagctgtttgcctagatcagattatttctcaccactaattactacaaaattcttatagaggtccatgaagagaataaggcagggatgaggtggtgaaaaagaagagaagagagatttatcatattgggattttgtcaagattaatgattcacacgatgattgttgatgatttaatctcttatatatcttaaaattttggttattttagtggttgttgattgttaaatttctcaaacatcgtactgttttgtatattttaatggttgttgatggtttagtttatcttttagacatcattgttttagttattttactgatggatggtttaatcttggttattttagtaattgttgacggtttattctctcaaacatcataataattttgttattttagtgattgttgaaggtttaatatctcacacatagtaatgtttctaattgatttggatgtgtagcacatcgatgtgtagtttatgctatggatgaatcactcgtgagttttaaaatataggtcatcatctctaagttttgcaacaattagagccttaactaaacatattaaagggttttgttcaaaaacctgtctaactcatctatttttgcaactttttcctccatcttccacaaatacttattacaagataaaattgtaaaaatgaatgtgttg

SEQ ID NO: 43163 - DNA, 397 bp, Arabidopsis thaliana landsberg
caactctattcacattacacttcagtgtattaactagattgatagaatttatcatctattaaatataaatagtttgacatttctaaattacgtgaaaattcattaataaaaaacatttataaaataaaagagtggaggtatttgtcacatattatatatttctataatatccaaacttataagaataaatatcgtataattgaatctcaaccgatctacaattttttttacaaaaattgcaaataataaaataaaataaaatttaataaggcctatgtttagaaaactcttttcttcaacatgattggctcatagccaccctcaattattactttaaaccaaaaataaaattccaatctttattagcaaaattaaaaacaagaccaaaacaaaaaaa

SEQ ID NO: 43164 - DNA, 493 bp, Arabidopsis thaliana landsberg
tcattactaggcctagggatgggcctaccggttttcgggttgggttcgcttcgggtttttgggtttatgggttttaggtttattaaaggtattatcattttgaaaccggaaataatttttttttttttatgggtttaccggtttttaaaaaagaaatatgggagaaggccaaaaaaaaaaaatttagaattccaatggcccaaacattaggatttaggggaggattttattaaattaaataccaaattttttaattccttaaatttcaccaaaatcatctaaaacctaattaaatctaaaataacgggaaattcctccttggaggccactaccttggtccatattccaccttttccaattaaggttcgaccaccaccgctttttttttaacaataaagtaggtggtggagcttcttctctttggtggctaaaagtatgtggggtccaaatccgattagtttttcatcgccaagtgccatgtattataatattt

SEQ ID NO: 43165 - DNA, 705 bp, Arabidopsis thaliana landsberg
ttttgaacgatttatagttataaaaacaattaaacaagagctaagaatgttagagaaaataataaaatagaagaaaaccaatcatcgtaatcaaaatactaaagtctaacgagagctatatcgcatgcaagttgacccacaaaaatataaccagaatctaactaattgataagactagttaaagtctagtggatggagtggctcgaggagtgacgtgggtttgttacgaactttccagaattatgattattattatttcctcaacaattatcattagaataaatgacaatatgccaaaaagcttggtcgctgaccccttcgtctgcaagatcatctgatcatgtttttaaatttaccttcaaaacatgactatattttttttacacgagatgactattacaaactttgattaaaatctatgtagtcagttatattgaagataagtaaacaacaattttttggtttacaaagtgaggttttgtctatgaatctcatgtttttctaacctgaacttgaacttttagtttgattttcacttgggagatggctatttacttaccatgagatatgcatgcatggatttcggcggaaaacattttttatttttgataccacaaaaaaaaaaaaaaaactaatcttagttatatgaatgaaatataaatagtatctcttacgtggtatattaggcattggtaaagttttttt

SEQ ID NO: 43166 - DNA, 458 bp, Arabidopsis thaliana landsberg
gcactaactacgattttaggttatatacttttcgacatatcatttgaattatagcataatattctcaaaacatgtaaaaacctcatgatagcaccaaatttgcagtatcatgcttgaggtgttgttgttattcgaaacaatcaaatccatggggaccaggcccaattggagcttgggctttttggtatatatatttgttggcctttggtgaatcttccttgatcttaacattttctctctatgcggttctctgttctcttgttaattacttgttgtttccgtaatgggcccaaacgcctttaaaagtcaaatttattgcttcagagttgaaaaaattcaaaaatcagattagtttgcacacaaatcatcgcgccgagaagcagaggttagttatgagtcttagttatggaagtcgaatttcaaatcttcattttccgggaaaacgcgagaacttttgt

SEQ ID NO: 43167 - DNA, 1181 bp, Arabidopsis thaliana landsberg
aagcgcctcgggaacgagccatggatttaaattttggagaatcgtaaggtggagcttgtgaattggagaaaaaggataaggatctttgtttgattgatgagacgatgaaagcgaaacagagcgagtttgagaagaaggggaaggagtttgatttggaactgaaggcagaggttgagaagaggaaaggagaagttgaacagttggagaagtttacgacgaggatggaatcggtggagaggttttctgatgagaagttgatggaacttggtgtgagagcaacagagcttgaattgaagatggaagaagtagagaagcatagagaacggattgtcgctggagataccgttgagaggtgagtttgagccattggtttcgttgttggctaattacatgggcttaagtgtgacaatgcctgtaaagggttcgactttatacctgaacgagaatgcagatgagatggttaagaaaaacacagccttggcgagaatggttccgtatttggatcctgcaaaggtggttttggatgctatagaagggtcttttaaggaatactggaagaaagatttaggagaagctgatgatagagtagttaatagttggattgttctgttagagaatctgataaagatgaatctgaaaatcacaccgcaggtgaaacaggaagcgactccacttgggattgcttggttaggcaaggctaaagccaatatgaagaatgaccccccgcatgtttttggttgtgcgttgtttctggctgcttacggtttgggctctctgactactcatggggtgctcttaacccttgtagagcggttccttttgtatgatcatgccccaaaactgtttcggcttctggggttagaagataaggtttctggtaaggcctgcttcttgtttttagactaagtatcagtagttgttgcccaaaaatctgtaacttcatgtgaattgctctgcaggtgcggttgaaacgctaaagaaaaaggaagagtatcttgcaacactgaaatttatctgtgaattccggttatacaagctttgtccaggaggaagaccaggagaacttttgcttgaattctttgattcctcagataaagctgccccagtgattgctgggactggaacttcatggaggcgcaagtaagctaatatctctctctctctctctctctctctctctc

SEQ ID NO: 43168 - DNA, 607 bp, Arabidopsis thaliana landsberg
  unsure (1)..(607): unsure at all n locations
tttcgttaacatcgctccatttctgaagaatgtcttttattctttccacttcatcggggacaacagctgttgcaactaccttagctccccccagtttttcagacgaggaatcaactactgacacagctctgggcccactacaccagcataagaaattcaaacaagaaatgatcataaaaccaatggataaataattgataagaccaaaactttcacacaaatttgaagtgaatacaaacaaaaaactatctggagagggtttgggcatttaacatgaagaatggcatggagatgagattttgcttaaagatgtagcaaagcactgtgatgctttcctgtctcactatgacagggagcaatataactgtgcagttttactatggcatcgaatttgtgacctcaccagaataacgaactggagaggtgtatctagatgcactctttttaatcgaccaaaatgaagtaagtcttgtaagaagtttctgttccagagttttcactcactgaatttaactcgggatgaggagatatcaactctacattattaatatttgcatccattcttgcncacattataagaaaatcgagaaggtgaatctagacgttt

SEQ ID NO: 43169 - DNA, 619 bp, Arabidopsis thaliana landsberg
ggtttcccatacaaaaaatgtcaaaataaccttgaaagtagtagctagctagatgttatccatcggatatattgacttctctattcattcaaacgtgaataacaagtttgacataaagggtttagcttaaaagcaggggttgtggagcccaaaagacactcaaattggtttgaatatcgtccagaaaaattaataatgtattaagtttgaaacttcaatatcgttacgtacactatggtctcaaaatctttaatgtgctagaatcaattttcggtggaatttaaatgtttttattctccaaaacgatcaccaaaatctttgaatgctaacattatcacataactttggtctatactttctgcaattttaaaatccatttctaaattcagctggaaaataaacaataaaaagtggtaaatataatgatctttttttagataccaactttagctgcttttgaaaaattaagtctagattattaattcatgcacgctagattattcccaccaaaattcacttctaataaaatccaaatgaattgttttaaacctcacctaacagtgtaatatatgtatgtacatgtcttaaaagattaccttgccaaggatggtccaagaaa

SEQ ID NO: 43170 - DNA, 412 bp, Arabidopsis thaliana landsberg
taagaactgttcctcatcgtgtggactgtttttcttatatggggctgacggatgaaactcgaagactattttttgaggctcttaggttcatacgagtgagcccagagattttatgattactccacgctggcattgtaagaaagaaatctgaataaatctgtgtatagtttgatcgacctatgaacttttttgttttgttttgttaatgataaatggtaattgcataaaacagaagtctctgttaaagactacacggctaagaaattgatacatatctttgtatataatcttaagcttataaaatcaatcttttcttctattttgagacaaatttctcttcttgcacaacgaaacaatatctcattatgtgatgctttttaagcttgttgtcatcccaggagattggtcctcc

SEQ ID NO: 43171 - DNA, 657 bp, Arabidopsis thaliana landsberg
cggaatttattgtattactattagccaactttctaaaagaaccggtttatgttgaaactggtaactacaaaagaacttgtttttaaatgttactttgatgatttttatttctctttcttgccaatgtttttctagtcttaaagaatgttttcttgttcatggtgacagaaaaagttaatttttgtttgtagcattttctatttatgcttccgtaaaccaattttcttttcgtcgtcgtcatgattcccataacccatgtttccgacttactcgtttcttactttcttccttaacaaatactctatctaaatacatgacttgccaaacacttacacacatatagtcatatacatacctaatattagtgtgttgtcttttcttattgttaaaaaatgaagataatggaaggtgtaaaggaaataacaaagaaaggagcaaagtttatggatggtcaagaaaaggactttgactctatcatatttgccactggttacaaaagcaacgtgcctacttggcttcaggtatgcatttgtatatgcaattcacatctatatataattccccactcagaattattcaaaaacaaaattaacatcaacggccttttctatgattattaaggaggtgattttttcacggacgatgggatgccgaaaa

SEQ ID NO: 43172 - DNA, 594 bp, Arabidopsis thaliana landsberg
gaaagagagagagaaggcagttttgttttccaaatgtcagcaattcttgcagctgccattggtggtgctgtaggagctcttgcattgattgctttgtttgtttttctcctttggttttgtgtctttcgtcgtaagaatctgtctagaacttctgagactggctcttctgatccatctactcaaggtaaatcacaaatcccatcaattctattcctctctctctctctctattgactttcttggatgatatcaaaatgatttagacttttttttcttttgttatatgtttgtgtgagttcagaaggaagaaatgttgcaattgagttgtcaatgagagaagctagaagatttgaaatggaggaacttgctcaagccaccaagagttttaccaataaaagtcttattggtattggcaaattcggcgaggtttacaaaggtttgcttcaagatggtgttcttgtagctatcaagaaaagacctggtttgcctactcaagaatttgttaacgaggtttctataataaatcttgttcaagtgtttgcttttagtcttcttagaccaagtgtattgattgacaggatatggtttatttct

SEQ ID NO: 43173 - DNA, 461 bp, Arabidopsis thaliana landsberg
gatccattatccagattttgttctttttaatggtattagtgattagtcatgtccactaggtattttatcaaattgatgtataataagtatatgttactttgtgctttgttttgaaagaggtatactatatctttaactatttattagtatatactatatatatatatatatatctatatatattcatttgaataatttaagattatttttttctaattcattgcgacgtctacaaaaaacataaaaggaaaattgtgtggagcaaataaaacaagaagtatgataaacttgtacaaaaataaaaactaatgactgacaatatgttacttttggagcattaaatgtgcaaaaaacgtttgaatgaaatgagagaaagctcatcttcttctaagtgcttgcatttctcttgtttatcttactagaaactgaatcaaaccattcaccaaaatatcatgagttat

SEQ ID NO: 43174 - DNA, 550 bp, Arabidopsis thaliana landsberg
cggatacgatgaaatgaatttagggtttgggcaagttttttctggtctatgtagcttccatccttttctgatatatctgtttgggtttttcggattctggtgatctctgtaacaaaatcgcttctctgtgtttttcaggctaattgagagtgtcccttgcgttagagtttgttactagcttttttcgtctgaaacatggcgaattttgccaaaccagagaacgcgttgaagcgtgctgatggtaagttacgaaatgttttcgttttaacatccatttggtcaaatggatgtggttagggtgtgtatgaattgagattgtgttaaacactttttttttgtgtgtgtagaattgatcaatgttggacagaaacaagatgctcttcaggcgcttcatgatctcattactttcaagagatacagagcttggcagaaaccgcttgagaagatcatgtttaagtatcttgatctttgtgttgacttgaagaggggtcgattcgctaaggatggattgattcagtttcgtattgtttgccaacatgtgaatgtcatg

SEQ ID NO: 43175 - DNA, 784 bp, Arabidopsis thaliana landsberg
agaatatgagatcattccatcaagcgaattagaacgaatataatttgctatccatagcgatagcatagtcaaatgccggttcgatatatatatttggattctaattgatatcttaccagtggttttggctccgatcttgagtgcttctgaacgacatttgtcgcacctcatacttaccgacatcaagattttctgctcatgaaaaattccaatattttacaaataataatactacaattctcttttcttcaaataaaaacaatactagctaataagttcatcctaaaaccttccgtatatatttttagacttttagtaccttggccattttggaacctcttgagagaaaatgaaaccttcttttcttccttttggtataagtgattgtaatttacgtgtgtaaatatataagtggtgctgtgcttgtctcattttcttatggcatatcgattaacacgcattaatatgcatattttatctgtactattatttgctacgaaatcgcagagtaattttcatgcaactgaactgcttcgtagttaagtcctttaatattagtagaaatgttagacgtttaagtggacaatataaggtattgcttgactcataagggttagatttggttaggtaaaggttagatttttgtcatgcacatctaaaaagtcagtataccgtgaggaccacgaccggtcctgaattatataaggcccgaaaggaaactagtaattcgtgatcctataaaaacaaaaactattaattcaaaaataaaattagcaaacttgaa

SEQ ID NO: 43176 - DNA, 793 bp, Arabidopsis thaliana landsberg
  unsure (1)..(793): unsure at all n locations
tggcattaagattagttctctacatctgttccttcttaagcttgtctaagtttacacaaaactcctatcatgcagcgtgctggactatttccaacatttgacctcctatctgggtattcccaagcacaccctgacacacgggtgtgtacccagatattaggtaagatatattttcttccttcgttattctcgccttcggtccttatgaatggatctgaaatcatggctcattaactttggcaggaacattttgttgaaaatgctaagctgtcttcaaactacttcatctctaatgttgaagacatgatggtaaagctcagctatgatgtagttttgttcagatatcagaaagagaatgttttcttaacacatatgttggtcttgattttcagaaagttgctgccattgttgatgaattacccctcggattgcaagagaagtatcttttcgtggtcaggtaatagcaaaaataacatattttcgtcttttcttgttttctgcatccaataagatttaaatatataccagcttagactgatctaatgttacttatgtgcagtccagttgatgtaaatgaccaaatttcaggtcagggacttgcacaggtgaaaaacttgaatctcttatcttttttattntgagatatcaataaaggtatctatgtctgcaaaaaaattgttcacttttactttttttttctttgtacattagtttgctcaaaaacttctcgaaggcaggcattgtgaggctccgggagatacttgcacctgacagagtgaangttccaaaacac

SEQ ID NO: 43177 - DNA, 645 bp, Arabidopsis thaliana landsberg
  unsure (1)..(645): unsure at all n locations
ttagtagaaacccatgcatgtatgtgcatcttgtagtgtataattacattatacatgttactaattaaagctgtatattaatttaatacttacatgttggtgcatcatattgttcctcgagggagtaccaaagtatggtagacttaaagcctgtaattgtgaaaattaattagagtgacaacaaaactaaatagtttttcacacaaaactaatctcacaaaatatagtcgttaaattaattaatgctatagaaatacataaacctcagctaactgtttcaatagaatacaatttacttatgttattcagttcttattatgattaaaaaaaaatcccaaataaaaaaggaagatagaacctccaataattccatacttgggttcacaaatgattatttgtgttgtagttgtgaggaagattcaaatgaatatttgtcttgaaataaatgaaataagaagcatggtagtttggaaaagacaagtcacctcaatttgactgtggaggaatctaatgtatccaatagcctccgacaagacagaggctgtgtcagtctgaaataaagggatcaatcaaccaaacagtgactaatactattcaattntgattcatagattagataatcttaaacaagtgattagtaaaggg

SEQ ID NO: 43178 - DNA, 621 bp, Arabidopsis thaliana landsberg
tcttccttctctgatcttcctcatccgcaggcttatcattcttcttgatctcaatcggatcaaaaatcctaatcccttcgaacagattaatatgacccgtcttaggctcctccgattcaacactctccacaacaacagcagtcgatttaacaacatccgccgccaccaccgcttcatccttacccttctctgcctccggagacgctcgtttgagaggcgccaagccacggacgttacgaagcacttcgagacgagattcagcatctcgttttctagcttcctcgcgtttgatctgctcttctctagcggcagcttcttcgtcctttcggactttttctcgattgtcgaagttgtaaacgttccacctcttctgtggaagaatattcaaaccaccgtgacctcccatggcttaatcttaccaaacaaaattagggttttcaaacgatgagattgaatcgaaccaagagatggatgagagaacttcgaagcgaattggaaaataaaaacttgatcggaataaaattgaattttggcagagaagttagagaaaatcgcctaattattgatatagttaactttgaggcccattgagcccattaagtgatattttaataattaaag

SEQ ID NO: 43179 - DNA, 1764 bp, Arabidopsis thaliana landsberg
  unsure (1)..(1764): unsure at all n locations
catgtctcgcttatgatcaatctggcacagcaagtgaaatgaaattaccaaatacatgaactctcagaattggttaaagaaaagaagaagtgcagaccaccaatacagcaaacataagaaaatgcagcggcaaggggtcaacattcctgctggacgagccggtaccaacggagggaactgtcttggaaccacctccaactcctgtgtaccgatgtgcaaggagaatgtattcaataaactaaaatcaaccgttgatggtttggtgatatatagtaagaggagtaagtacctgaacgagcacccggcaatgaggttggggttagtgtcacatctggggtcttttccgtcggtgagggtgcgggaggctgtgctgttggaccagtggccgctaattcacaaacactgttatgagtgaaacaatattataacgcataggatagaaaaatatagttaggtgggataccgttgcattgtgtgaggggaggcgtctgaatgttgcaggcattggggagctgcaaggcctgtgtgcggttaatgttaaggccgatgtttgggatcggactgttgacggctgagcagatgcactgcggcgaagatttgatgacagagtcgagccgagaacagcaaggctgtgagggagtggttgagtttccggtgatgtagctgaggcacggagagagagtggtcagtgtgctcacgcatgaactgctcggctgtgcttttgttacgctccatagagccgccacaagggctacaaatgtgattgcgtagcttcttctataccccataatttgagttattattgttcaactttggtgtttttgctttggtttaattataggaggaactgaccagaaaatgtcaaagaggcaggtctggttggatgacctactttacatggtttatatggcttttatttatcaaacatatctatgttctagatgcatcccaatatatacaacgccacgtagacatgaaccagtatactttttcagaactaattaaagattgtaattacttaagttacaaaattactaggagtataccaaactcagctactttctctttttatttggtttctctttgttaattaatgaaataaaaagaaaaattgtgtgttgataagagattgagagaaaggatattagttggaagttgttgaactccaatgcacccattttatcatatataaaactgaataattgtatatctatanagcatcgtcaccgaaagattaagcaggccaattaaaatggaaggcttaacattgatagtagtgatgatgtcaagctttatgttgggagggcaaggtcagcagataagcacgccatgcacctcctccatgatctctaccttcactccatgtctcaacttcatcaccggaagcagcggcggttccgtcactcccaccgccggctgctgcgactccttgaagacgttgaccaacactggcatgggctgtgcttgcctcatcctcactgctaacgtcccgctgcctactggcttcatcaatcggactctggcgcttgctctacctcgagcctgcaaaatgggcggtgtacctattcaatgtcaaggtttttaatctactatactcttttttatttattaatttctcattttttaacaccacgattgactcattgcttgatttacagctgcggggactcctctaccagctccaggtatacaatgaaaaccgctaactaactattatacataacaacaaagttttaggctagtggttcttaaagcgagcgcata

SEQ ID NO: 43180 - DNA, 657 bp, Arabidopsis thaliana landsberg
gtgaggggtacttcttccagaacattagagagagtcgatttcgaaccctagatccagatgaagcagatctcatcttcattccaatctcttgtcacaagatgcgaggcaaagtaagaatttacaagttttgattcactgagaatttgcaatttcatgaatttgatgattgaattgtgatgatctttgttgtgcagggaacatcatatgaaaatatgactgtgattgttcaaaactatgttgatggattgatagctaagtatccttattggaatagaactttaggagcagatcacttctttgttacatgtcatgatgttggtgttagagcatttgagggatctccgcttctgattaagaatactattagggttgtgtgctcacctagctacaatgttggtttcattcctcacaaagatgttgctttgcctcaagttcttcagccatttgctctccctgctggtggaaatgatgttgagaatcggtaaactaagtcctccctctttaattaggaactctggtagatcctggagttgtattgttggctcaatgttactaatactgttaaatggggggtgttacaggacgactcttggtttttgggctggtcatcgaaattctaagatacgggttatacttgctcatgtgtgggaaaacgac

SEQ ID NO: 43181 - DNA, 630 bp, Arabidopsis thaliana landsberg
aaaaacccaaaaaaccaaaaaaaaggaaaaaagaaaaaaaaaaaaaaaaagaagaaaaaaaaaaaaaaaaaaaaaaaaaaaaaaaaaaccaaaaaaaaaaaagaaaaaaaaaaaaaaaagaaaacaagaaagaaaaaaaaacaaagaaaagaaacagaaagacaaagaaaaaaaaacaaaaaaaaaaaaaaaaaacgaaaaaaaacaaaagaaaaaaaaaaaataaaaaacaaataaaaaagaacataaataaaataacaaaaaacaaaaaaaaaaaagaagaaataaaaaaaaataaaaaaaaaaaaacaaaaaagaaaaaaaaaacaacaaaaaaaaaacaaaactagagaaaaagaaaaaaaaaaaaaaaaaaaaaaaaacacaaacaaaaaaaaaaaaaaaacaaaaaaaaaaaaaaagaacaaaaagaagaaaaagacaaaaacaaaaaaaaacaacctaaaagaaaaaacgaaaaaaacaaaaaaaaaacaaaaacaaaaaaaaaaataataaaaaaaacaaaaacaaaacaaaaaaaacaaaaagaaaaaaaagacaaaagaaaagaaataaatacgaagagaaaaaaaaaaaaaaaaaaaagaaaaaaaaaaaaaaaaaaaa

SEQ ID NO: 43182 - DNA, 261 bp, Arabidopsis thaliana landsberg
  unsure (1)..(261): unsure at all n locations
atatggatcaccacacctaggcttcggttcatgcaacacctcctctcgaggtcatggtaaagggtctagactgagaggacgccacaactactcgcctggaggtnnnnnnnnnnnnnnnnnnnnnnnnnnnnnnnnnnnnnnnnnnnnnnnnnnnnnnnnnnnnnnnnnnnnnnnnnnnnnnnnnnnnnnnnnnnnnnnnnnnnnnnnnnnnnnnnnnnnnnnnnnnnnnnnnnnnnnnnnnnnnnnnnnnnnnnnnnnnnn

SEQ ID NO: 43183 - DNA, 619 bp, Arabidopsis thaliana landsberg
aatccgacaatcgcacttcgatacataacatgcatatgtttcgaaatttaatttgaaaaagaccgcttccataataaagctccgattaataatcgtttaatggctgaatagcattttgtaatgcaataatgcaaaatataagtaattcattattcaagtaattggatatatatatagttatttattttgcataaaagtttttaactattttatctatacataatatatattagcaattcaaaaagtaatatttataccattttctactatgacacttatacaagtttttgaataacttaataccattctttactatgaaactaataccattttagatttggaaacactttttagtaacaagacattacgagcatatcttcttctgaaaaattaatgtgccaaacgtattctatgtctagaaaaataaccgatagttggaccactactacaccacatatttgtatacatacacgactaaactccatatctcttgttgctcgatttatattttttcagaagaacattacattttagaagcccttttgtgcacccggccacccacctgtatgtgcctgctaaactttgaaaatttttctacgatattctcttaattatattt

SEQ ID NO: 43184 - DNA, 518 bp, Arabidopsis thaliana landsberg
acaggttatgagcccgattgtctatcaactcgggcgctggatactctttaatccagctcaattgattgcttccacccctgagtcctccgaccgaccgccgaatcgaatatggcgccgaatacacgacgtgtagccgattcgagccggcatcaccgagttgccggagggtttccgaatagcccgatagctacgtaggctcgaaggagcttagaacaagaggataatgatagcgatttggaggatgctaaggatcgcgcgtagcaggagttagcagattagatctagcgagatatgactgtatctccggcgccgtctattagctagccgtaggcctaagagacctatataaaccctatagacgatctagtaccgtaggatagccggaagcgtattgaatatactacacgcctactaaagaaggtcacgagcttgccgaaggtatctctgtagctaaccggagcttctaactaccgggtatagcgagaaaatatagttaatatacttaatattaatttccc

SEQ ID NO: 43185 - DNA, 658 bp, Arabidopsis thaliana landsberg
  unsure (1)..(658): unsure at all n locations
tgtagtgtgggctgcttgtagaaannnnnnnnnnnnnnnnnnnnnnnnnnnnnnnnatgagttgttgccacaagatagaagaagaagaaaagagacaagatcattgagttttggagatgcatgttgatcactttttcgtcgtatttttgaacttataagatgtactatatttatatatggttctaaaattttatcaatgtggaaaaaatcagatagatgttatttagtatagaaaggaatcctacgtagggaacatgtcaataatgagtacaatcatataattaagtaattcagatttgtttccaaattttggtgtaacgattattagtatgagaaaaataaagcaatgtaaaacatgaacaatggaaactaacaaatgttagagcaagataagctgcttcatttttatgaggaaaatttcaggatacaaattttctcagttgattttttcttcatccattacctttttcattgaagatttttttctttattagtagtattttcataacacattcctttaaatggttaagcatggaaagattgctattactgtaaaagcaaccaaaagtatcatgttgtaaatagctttttttcttccttcaataaggttttttaatagttagtaaatagtttttttttcttgtataaattttaatta

SEQ ID NO: 43186 - DNA, 1863 bp, Arabidopsis thaliana landsberg
  unsure (1)..(1863): unsure at all n locations
accctaatgacaaaaaacagagtgtaactatggtacgtgtgtgaagttattactagttcgggaagttttaattggtcaaaaggcgcaggaaggttcatcatttgttgttggaaagttgcattccttttcaaaagaaaaaaaagtaaggtttttatgaaaaagcctttcaagagaaaacaaattttggttatatcttatttatatggtttgacaactgaatcaaacatttaccaaggttgtatttgatcattattactaaaaataaaatcagctaaaaaaaaaccattactaggtctagttacagtgttacactgtattgtaaatcatttagtaataaaccaaacaaattactatcatcatttttaatttgtgtagtcattacatacatgcaaaattgtaaattaaattataaaatcatgccatactatactgctagatgaaaattgaattgtcatatcaaattaaaaattaatgtattttcatgaaaattggaaaaaaaaaactattaaattagaaaggcgaaattcaacgtgacgcatctatctatataggcttgggcttataatatatacaaaagcccagttaattattaatgggtcgaagtcgaaacttgaaagcaagcagtgtcatcgttctatttatcatcagcccaaaaaaggaagaaaaaacaaatcaattttatgttcgtttggtataatatcgattttaattttaaccaagtaaaccggataggaggagattcgtaaattgtaatcgataaaagagatctgtgtcaagtacgcgtgaggttctctcttctctgcaaacaaaaatcctggcgttgatagcgattggttaattgtcggtgaatcaacgtttttctgttacacatatcaatcaatcatcatcctcttcatactctcttcttcttcttcatcgtaatcattagcttcaattccgagttttctcttcgtcgccgttgtgctagagttttgtcagatctcgccgggaaattagcaatggcgttttagtctgtttacctgtgaagcttttgcgtaaacgctggattcttctcaaatctctctcacctgatctcttattagattgcgagtatgatttgtttctctccttcattatattcgggttgcttccacgatttcgttgcttgatttaggttttttttttgaatttgatagggatggcgctaaagcgagggctatctggagttaaccggattagaggannnnnnnnnnnnnnnnnnnnnnngcttgtgcttctcatatttttctgtgtttgggcacctctttgcttctttgttggccgaggagtgtacatcgattcctcaaatggtatgcatatattgcttatctttctatatactaattttcagattcatgtatagagattcagaaattctattaatgattgagaacattagaatagttttaccactctttagttttcagcctttactatctcaattttaagttactattagcttgatgtgacactgatgatattcagacaattgctatttttctagactggcaaaattggttctttgctattttactatcgagctttggtttcaacgattagtgtctatcgattttgtgttacatatataatttatctgcgaattgtccatctgatggagcttactttcattactgcagattattcaattgtttctgtgaagcaggtatgtcggcttaaactctatctacttgtatgttttgacagaagtaagaatgttgtttgattggactgttttttttgtgtgcagaatcttgactggagaagaacgtttagcaatgcaatctgtttagatctcttttctcgaaaagggtaagtttaaatctttgaaactttgcttcgatttat

SEQ ID NO: 43187 - DNA, 141 bp, Arabidopsis thaliana landsberg
cttgacacgtcgcacgatcctatgaatttttaaccttgaagaccatactctatcaaatccaaatactatctatgagcatatatttttatagatagtattcgactcttgggtggtactcaatctaatgttctccatatttaa

SEQ ID NO: 43188 - DNA, 540 bp, Arabidopsis thaliana landsberg
cattggttctggctaaacaccaattttaatccactaaattttaattttttttatcataaagccttatttttgtctaggtacagggatgtcaaaatttgtacccaattgccaatacagttgtaattaaattttaaatttgctcatcaatttatattttacttatacatccagattaaattaattttctatttttaatagaaataaattaatttacatgtatatataatataaaatggaagcatatcaaatattgagactcattgaccaaatttgttgaccataattatatgttcactaatataatatggaaggttgattatatgtgtttgtgtatataaacaaacaaacacacaagaccagaacaatcagatcttagtaaataacataatatttgaagaagaataaaaaggtaaatcgatttctaaacatacaaattcaagtttatatgaaatgtaagaaatttcttatgagaaaatacaactatttatatcaaatagtcaaatacaaaatattgagaaattgttaaatatattataacat

SEQ ID NO: 43189 - DNA, 1892 bp, Arabidopsis thaliana landsberg
gttccagaaagagtctataaactaattgctaaaccggggaaaaatttctgcttctaactctttagcgttgagtttataggccgacgaatcaggttaaaaattctctctttatcaaattatgaggcttggatctgtaattttgtgagcttttaagcttgcacaccaagtgcttgctaaaatgtccaagtgagctcttttaggaattcagtgaatcaaatgaagttttaggtgacaaaagtcaaaagattttaaatgccactgcttaatgagatcaatcagctcagctattttatatagattgagatctttcattcgtgaaaatggatgcaggtgtataggaagatcattttatagtcatgagtagaatcgtgaaacatccggctatcgctctgttggattccggcattacgtttaaagaagtccggcaaatccatgccaaactctatgtcgacgggacactcaaggatgaccatctcgtgggtcactttgtaaaggcagtggctttgagtgaccacaagtacttagattatgcgaatcagattcttgataggtctgaaaagcctacattgtttgctctcaattctatgattagagcacattgcaagagccctgttccagaaaaaagctttgatttttataggaggatactctcttcgggaaatgatcttaaaccggataattacactgtcaacttcttggttcaggcgtgtacggggttaaggatgcgtgagacagggcttcaagttcatggtatgactatcagacgtggttttgacaatgacccgcatgtccagactgggttgatttctttgtatgcggagcttggctgtctggattcttgtcataaggtttttaattctattccgtgcccggattttgtgtgtcggacagcgatggtcactgcctgtgcgagatgtggggatgtcgtttttgcgcggaagttgtttgaggggatgccggaaagagacccgattgcctggaacgcgatgatctctggctatgctcaggttggtgagtcaagagaagctctaaacgtgtttcacttgatgcagttggaaggtgtgaaagtcaatggggttgctatgatttctgttttatcggcttgcactcaattgggtgctttagaccaagggagatgggctcattcttacatagagagaaacaaaatcaaaatcactgtgaggcttgctactacgttggtcgacttgtatgcaaaatgtggtgacatggaaaaggctatggaagttttctggggtatggaagagaagaatgtgtatacatggagtagcgccctgaatgggttagccatgaatgggttcggggagaaatgtctcgagcttttctctcttatgaaacaagatggtgttactccaaacgctgtcacattcgtctctgttctcagaggttgtagtgtggttggttttgtagatgaagggcaaagacattttgattcgatgaggaatgagttcgggatagaacctcagctcgagcactatggctgcttggttgatttgtatgctcgtgcaggccgcttagaagacgcagtaagtatcatccagcaaatgcccatgaagcctcatgctgctgtttggagttctctgctccacgcatacagaatgtacaagaaccttgagcttggcgtgcttgcatctaaaaaaatgctcgagctagagaccgcaaatcacggagcttatgtcctcttatcaaacatatatgcagattcaaacgattgggacaatgttagtcacgttagacagtcaatgaaatctaaaggagtcagaaagcaaccagggtgcagtgtaatggaagtcaatggagaagtccatgaattctttgtaggagacaaatctcacccaaagtatacacaaatcgacgcggcttggaaagatatc

SEQ ID NO: 43190 - DNA, 589 bp, Arabidopsis thaliana landsberg
cagagagacatcacatttttgaagtatataagatcaggaggtgcatgaattatgttattaatattatacattgtgttcacttgagatataggatataatatttttagttagttagtgttgacatatagtttttaagtgttcgacatttggaacgtacgtagctagccaagccagctggaggacaaaaactagctagttggtgaaaatggatatctataattactttctagctagctaggtggctaaagacagatgcacttggaaccaaaacaaacaagatacccgacttgaagagaccacattttaaagcatacaagatcaagataggtgtttgagttgtgtctacgttcagacccaaagaaaattgaaagaaaacgatttctgacctaaccatctagcaagtgatatttaggatgctttgtaacttaaaagaatttgtgtaaatttttcttaagcattgtgatggtttaccaaattgattttgaatttggctaagttagaggcttttaccacactaatcatgaattagcctaattattagaggttcattatcttgaaaatatgtagatcgattgcatgatttctaaca

SEQ ID NO: 43191 - DNA, 445 bp, Arabidopsis thaliana landsberg
gaagagctaagtccttaataaattgaagtggaccagtctcctccttataaatttggcatgtggcctagacacagtttacgaatgaagagataaataggaatctctcatttgcctcctttatctttaagctcttatccttttgtctgctgcttctatgacccacatatgttggtcacttacaatcccccaatatttgctttggtgtaatgttgtgatttgaagtttgttctattcttcggagatagaccattttaaatttcatcattctctgtatagtaattatcattccttttgtctgtaggcaacaacagagtacgggaattacaaagaggaatacgaaggagacatgtattggagaagtgagtgcattgatgggggagatgtcatggtttaatgcaggtgtagagggttggtgttgggataggacttggtgtctgagttggtc

SEQ ID NO: 43192 - DNA, 491 bp, Arabidopsis thaliana landsberg
agatgaaagacttgatcaagaagaagccatcaatctcagaattaactggaattgaagaatcacgtcttggctctgttgcttctcatctccgtttgtatctcatgggttcagtggtgcctaacatcaaaggttgtcaggtcccatctcctgattcatcatcatcttctggcttttctgaaacagctgattcctcctcgagtgcatcatcaaaatctcttagagcacgccactgtgggactcaacagacatggacctatggtagcctcagccctagagcaagctccttcaaagaaaacacactgagaaatgcttctctacgtatctcctctagagataaatcaaagggacacagtgaaggccatttctcaatctttgataattcatccattacctctatccccaccaatgtagagggtttatccagtcagaaggagaagttgaagaagctactgagaattataatggaatcagacaaatatggctttgaagag

SEQ ID NO: 43193 - DNA, 667 bp, Arabidopsis thaliana landsberg
gtctcctgcactgggtcatcaatgcccatgtgcatcagccgccacacgtgctggcggttgcgtgcgcgcgccacaatcttcagatgcggatattgccggcgtaccacgcgcgccacgcgcaggctggactcggggtcgtcgctggccagcacgaacacctcggccttgtccgcctgcgccgcgcgcaacagttcgggccgcgcggggtcgccgtagaagatgtcgttccagttgccgaagcggcgcaccatgtccatctgttcgatggaatggtccagtgccacgaacggaatgccttcggcacgcaggatgcgccccaccacctgacccatgcggccgaagccggcgatgatcacccgcggggcacccgtgtcgatggtgtcgtaggcgcgttccggcttcttcgccttgtcgttgcccagcagcttggccagcagcgccaccagcaacggggtcaatgccatcgacaaggtaatcgccagcaccagcgctccggcctgccgcgcgccaatcagctgctgttcctgcgcctgcttgagcaccacgaaggcgaactcgccgccactggccagcagcaccgtcaagcgcagtgcattccgccgcttcaggccgcccagcatgcgccccagcggccacaagaacacacccttcattagcagtaacccaa

SEQ ID NO: 43194 - DNA, 534 bp, Arabidopsis thaliana landsberg
tgctcgagctatgtgctctaaagataggaacagttccatttgtacatcttatttggttcatatatgttttgttgttgtcaatttgattctctaattcatgtcttgaaactgatggtttcatcatttcaaagaacaaactgtattgtcaattattatttaattacaaatcacattcaactcaacgaagaaggaaaggtattaacgtattctgaatggagttaaatttacaaatatagtaaaaaccagagataaattgactacacacattaacataaactaaccaaaagacaataataaaaacagtgtcatcttgattcttgactactgggtcagtagtcaacacattcactataatttgtttttgtttagttgatgataagttattcttgatatactttttttctttctggtcaaagtactattattcctcatctagtatttattcacgttatgaagtcaaaatatacgaataagccgtaaagatcttacacttcttgctaatcagtaatcacattcataatatgagagcaccaa

SEQ ID NO: 43195 - DNA, 1426 bp, Arabidopsis thaliana landsberg
tgaagcgcacgagtcttatatcaattctgaccccaggatctaatataacgaaggatgtttgtgagaaactgatgcatatacgcatgatattgtgggtggtacatgccttaatgaccagtctttcacttacattttatcaattcacgagtcttatttttttagcaaacagtcacgagccgttttctttatattatgtatctcgatgtaacggcagaacataaaaaaaaaaaaataaacaatttacacattcaaaaacttatagagcaacagaaaaagttaaactctacagcccaaattaagtgggtaggataaaccttacagcttatctatagttcgtttaaacttttaaacgtcacttagtgataaaataaaagtatactgtgttgaggagtatcagtattaattttgcgttgtacgtatcataaacttcgatttgcgttgaaagaagaaattttttacgaccattatgaatcccgattgcatgatgcatacattagactttagaggattcgttgggggttgtttgcagaacaaatttaattattttcttgttctcacatcatacaattgtttttatgaacaaaaatacttttaataatatactacatgtgtacgttaagattaattaaagtgcataaaagttagtgacaaataataaagagttgaattggagaaaagaagctgaaattatgaagaagagacgttattgtggttggataatgacagaacttgttttaaatatttcacttaaaatctatcagaaccacttaattgtatatgtatatatatatatatatatattatatatacacatactgtgctttttttagaaaaaaaattatacacatagtactgtgcctattatatattgtggaatatggatactgttgttttactaaatcaaattttaatgtatatagtctctgtgtacttaaatttatttaaaaatcacaaatttcttttattttaacgattctactatcacatggttttagtcatcaaagtgaaaattgtgtatacgaagtagtatattaatgattgtgtttacacaacatcaattggtcgttaattataaaatacaccatcaacatcagattgaatttttattcattgtctaactcaactaaaagaatgtggaaacgttaaattttcaactccttaaaattattatgaaaactgttgcaccagtttgaaagttaccaattaaacatttcaagaagaactggcttaaattcctttattttcagccgattcctttattttgcttgtggctttttagcataaagtaagtttctactactaggactctaggagcatagtataatattcggagattaattgtgtatgttgggtcgataaggcagattcaagctcgtaaatcgcgtaagcttggggtacaactaaattgtcgcgaatggagtaaaaa

SEQ ID NO: 43196 - DNA, 463 bp, Arabidopsis thaliana landsberg
cagagttgtggaattaactccgtagacatcaattttttgcgtgtcaaaccccatattttgggtgagtggtgcaataacgtcaaccttagccacatggagtaccgtgtcttgaaacttccataccatgatatcctcccatagcggcgtaacgtacgttttcgataacctcatcaggaatctccattgatctgtgtctttaattccgaagttgaaatgtttagatcttatttttgagaatatgtttgttttgagccactgaaatccacgaacccacttcctttgtgccaaatttaacccgtaaatccaaaacgcagcgtatttaagtaatggatttgaaagtttttcaattcttttatcaactaatccacactatacaaaaaaacatctatctatgctttaatttttataacaaactttaattgtgacgaattgggtatttcatttcctagcttctaagaaattg

SEQ ID NO: 43197 - DNA, 789 bp, Arabidopsis thaliana landsberg
tccatattattacttgcgatactttatatgggaagtagaataattggatatgatattggaatttctttttggaaagtacatattgaaaatgtcattatcgtatgaagcagaacttaaagactggctgggatagttagtacttttgagaaatgggattatcgaatctttgaagataatctgatgttgtatgttccaaagagtctgtcgagttttgtatgtggaagctttcactgttgtaacactttgcaacacttgttctttataaaatggtaacacttatggggatatttaaaaaaacaaagatagcaacatgtttagcttttataaaaatgtattatttgaacgataccagggaatcaggatgctagatgcattatccggtcggtgaacgatcgtgacacccaagcaacaaatatacaagaccaaaattggccacgctctctcctctacccctccagctttacttgtccttatcacttccctttatcatctgaattaatttcatctcattgatgcttctctatgtataatgatccaacacaaataaatcaatcaaatcaaaccaaccgatcactttctcttttcattctaatcattccaagcatgattttaaaatgggcatttgttgtctctcataaaaggtaataggtattcgcctcttccactttcttcttagattgttgtagtataagtttaaacctacgactacgagtggataaaatggctttggtttgacttattaggtttaatcgagtacgacaagtgggcttgtgacacttgtccacccgt

SEQ ID NO: 43198 - DNA, 506 bp, Arabidopsis thaliana landsberg
aatatttaaacattgaaacttaaagctgtatccaacaccataaaatcaaaatccaatttataaaacatttgttaaaattaaatttcataagcagagaattaaatatttttagctaaaataagcgttttgctctaaacacaaacaattataccttgttagagatattaagaaaaacaaataaataaatactgattccatagcatttgttgtctgcaggttctctctttcccttaacctaaaaagccatttagactctttttctctctttcagatctctcttcttcttctgtttcttttgctcacgtagagcacaaacaagccaagaaccatctctgctctttctttcaccttcaggtatctctctcaattcttttgaatctcggatctagatctcaacaatctctcaagatccttcttggtttgtgtttttgattgttattagtattttgatctgaaacaatttttcttcgaattcttgatccttttgtgttattcttaatcatctt

SEQ ID NO: 43199 - DNA, 3170 bp, Arabidopsis thaliana landsberg
tgcagagttgtcagagtgtatttaaaaaaaaaaaaaaaagcacgttaggaggagtatcctttagactagagtaagggagtgggtgctttaaagaagcagagaagcgggagaagagtgtgcagcagcaacagccaacagaagaaaatggcaaaagagaaagatctggagaagcaaatcggcggttgcatggccggcttcttcaacatcttcgatcgccccagtctcctctctcctaataagcgtctctcttcctctccggtaacttgtctatctctctttccctcttctcctgttcctagagggatgcaatagaattgacttaccaacaaaacaacaatgtctgtgtttctccagagcgctgaatctgaatctgcctcgggtaggacgaatcagcagagtgtgtactctacccctgagctacgctctcctgcgccggctcaacaaggatcttcttcttcttcttcctctaggccttggaggttctctaaagaagctccgaggctctccctcgatagcagagccgtcgtggatgccaagggctgcctcaaacacagacagatccgagccgatgcggttgaggctgagaaccagcgcggctcacccagtgtgatcgcacggctcatgggattggagccatttccccaacagcctctccagagatctgcatccgagtccagggtcaccagagactacctatttgactttcacgatgacaagggagcagctcaagatccggctccaattaggaacgcccgagcccacccaacctcagtagtacgccgaaagagtttctttgattccggtgatttcttcccgagagtttccaaaatgagtggatttgacgctcccccgaccgatctggaaaccctcaagcagcttctcgaagctcttaggctcaaaggactcttgcactcgtcttcacacaaacatcagagcaggaatctcgtcttcgaccaccattctccgatcaaaccagtgaggcgggatcgcatttccccgagcgtcaataggaggagaccaagaccaacgctcaaggaacagaggagagtctcttcactcccttggcggagaccagaacctctccagacgaggattgaagaccagagtagcactctagctgaggaagaggtacctcattcattactcgacattttatctatcaaaaaggcagctaatgaaatacaaattctgtaagcagatgtggaaagtggatgtgtataacagacaaggcaaaaccttattggagagatgcgacaagctgctccacagcattgctgaaatggccgctgctgaggccggagactcacaaccgagccccgtctctgttcttgacgcctcaatttaccacgaggactcttctccgtcccccgtcctgaaacgcacccttgactttgctgatgctgaagaagacgaatcctggggtggctcaatattatcatcgtccgactctgaatatgtatacatctcggacatcctccgagcctcagattgccttccacaagagtccgacagcttctcctttctggaaaagcagcaatacctcaaaggaaaatgcgcctccagagccgcagctcaggaaagacgcctcatcttcgacgcagtgcaagagattgtggcgcggagaaggagcttgcccccgtggatgatggtgggagaggctgataataagatgcaagtgatctggtctgaatttcagaagataagagacaaaaagtcgtccacggaggaagatgaccttgtgggatacgtgtgcggggtcctcggaagagatttgtcggaggaccgatggcgagattttcaggtggagatgtcagaagcagttcttgacgtcgaacgcctcatattcaaagatctcatcggcgagaccatacgccagttggcttttcttaacaggtccgactcgctgcgtaggaggctgctcttttgatataaaactagactaaattctctgacccaagtctgaaactaaacccaacctacgacctataccatgtctaaccaaacatgcgagagtgatagttcttttgtgtgtttttttgtgtgaaatgtgtgatttatcaagtttgggacttggcgcctgttgtctaaaagactaaaaccatacactcttttttttgctctttctgaatcaaactgctgctcatttgtgtggtgtattcggactaataaagactttaaaagtgttatgggcttcaagtggaccgtttatctctaatcatagtctactccaacattcatctacttcagtagtggcccattcagacccaataaggcttttcggcattgacttatatgagcagagagagaaatatgcaaaagatgatcaatgaaaaacttgtgatttgtaattttcaaaaatatgcaaagaaaagcggatcatactccagtagtctttttctttgaaaaacagaatcatataataatatcttccaaacggtagaaagaaaacgagagaggtagacacaacacacacttttattttttttgaggtggaaaaaaaacgttaatgggggaacaaagccacgtgaaggtgggaagaacgcaccaattatagtataaggtgacaagtcagcagagaggtcacagtcgtggaccaatccacttccaacaccaccatagccgtcccttcgacactttggctgacaaatgttcaaaggcatattttatattgggaccaagattttgcttgggacaagctatgccccacgactctcccgctagtgctctctggtcgcttctcctctgcttctagagaccaaccatttccaccaactctgttttcagttcacacacctcattctgcaatgcccaccaccgcaccaatggagttgagaagagcccaacttctttcttcactctctgttcaaaactggactggtcaaaccatcatctctctttgaccctactcctacactcgagatttctaatgggtgcgcaatctccactgggccaccttttgtcaccagtctctctctctctctctcttttcttttttaatccttctccataacatttttatacctttctgattactattgctggctccattgaagaatgatcctaatcttgacgaaactgaaagtaactcgtgccaaagagatagtaagtagtaataaaaataaatggaccactccagatgattctatctgaagaagcagtgagtccctctc

SEQ ID NO: 43200 - DNA, 545 bp, Arabidopsis thaliana landsberg
tgctctgccatgtcctctaaagtggaccatgctatggctacaaagaacatgtagaagagcatccacccgaacccgaatacgagcacccggcgttgggggcggcgacgcttgaacacgcgcggggtcaacaggagttgattcactgtgtcccgatagggcgcagtagcgtccctgtacgcgcgggcggtgttcgtagtcacgggttcatttccttacaaggtagatgccgtaagccctacggctaggggtcctggctacggtcacgctgtaaccgagacgcttagcgtgcttcccgtagatgtgaagtgcgcggctatctgcctcacgcctactgctgtgcacctcaacggggttgtacctatcgtacttcatcgccgctgtagtctccaagtgctgagaaggatcttttcctctaccgccaactcgtatagttcgcgcactcgttcggccgtcaggctgcgaggtcggtccagcgcccaccatagggcgtagctgtagcagttctcaccccacacgtgatactcaccatgtagaaggcacccacg

SEQ ID NO: 43201 - DNA, 534 bp, Arabidopsis thaliana landsberg
tgctagtttgatacatacaccatggtctagttatgcaaaacgtgtaccattttgtttcaggttatggaacaattttttggcctcgtcaatacctttctacacattaaccgggacacttggaagagaagattagctgtgcgcacatacaaggtacgtctctgtatcagtctactagaggctttctgttttagagaaaatttgattccattcagtaagctctttataatccatatacttatatacatattcttaggatattccttttactccaagcgctggtgttattgagtggtttgatggcccaattccaattggcgaatttcttataggaaggttggtctagtagactatgttttacattaacactggtcgatcaatctctctttcaaatcgtgacagttcaaaactattttgttgtatatgaaatcacagctatggagtgagggtgctcactgtcgttatggcattggtaactggaaatacccaaatgacgagaacatatggcgagtgtaagcttgttcccttttacagttc

SEQ ID NO: 43202 - DNA, 455 bp, Arabidopsis thaliana landsberg
atagcccggcagagaagtggagaataaaactgaggaagaggtatcaatcatcaaagtttcttcccttacttgcttcgatctttacaactctgatcttcatcaatcagctgttttgctcaagcaggtctatttccatttatttttcttaaaactgattacagtatgaacattataacttccgtgaaaaacattattagctcggtcattatgtgttatatattcttgttccaggcatgtctcgatagtggatttttctatgtcataaaccatggtataagtgaggaactcaaggatgaggctttcgagcacagcaagaagttcttcgctcttcctttggaagagaagatgaaagtcttgagaaacgaaaagtttcgaggctatgcaccattccatgattctctcttagaccctgaaaaccaagtccgaggggtgtcatatcggggggggggtgctta

SEQ ID NO: 43203 - DNA, 813 bp, Arabidopsis thaliana landsberg
tcatcatgttaaaagttcttcattagatttaatttaaatattattggattcacgtatatatggttataatatttgattttatttgtgttatatgttttttaacaaaataccagtaaggaattctattaagtttgatcattcgttttcgatgtactagttgtaatattttttttaattgaccctatttaaacggagaagtagtattattaccaacaaagtcaggaaataatttcttttttcgctagttagtttaaaataaataacacagatatgattggaggaaaaggtactgaaattcaataaaaataaaataaaaaaattgaacatgttgaagtgttgacgctttgggtcccctcgaagaaactacacacaaacacaaatggctataagtaaagggtttgataatatgtttctgaaggaaaaaaacagacaacaaaaagaaaagaaaatccaaacaagaagaagaagacgaaaatcttctgatatttctgacaatggaggttcttttgaaattaccctcttcagagtctcctcttaaggataaatttggatctgttcaaatccatgaagctaataaggtaaataccaactctatatgtgcatatacaaaattatacatgtatatggaaataatttagatcacaaaaccagaaaactgaccgttcttattctttatcggtgtgtttatgcttaacggaattctggatcctggatgctcttcactctataatggctttctctttttcttttatcgaaatgggttaaaagaaaacctaaactttaccctgtcatttttttggaaacggaggattt

SEQ ID NO: 43204 - DNA, 529 bp, Arabidopsis thaliana landsberg
ccatgagctctaaagtagtagtataaattagtttctttgtatatggaagagctagcccatgtgtgagtatgtgatctttatgcatatatattatggattttctggattatgaataaacaaatatgtgtaagcatataagaaataagtaagcatcactttgtggtcacacgcatgggttgtctctggtccctttgcagtttccttttttcacatttgtggccatttgtagtcttcttatgtcacacttttacatatataatatacacacatatatgagtgtgtttgcactttcttaatattttaaggttatttaaagagaatataaattctttaatagaaaaaagtttggttacgatttgtgaacattatcccgagtggtgggtgctcttttagggctttgatcatcatgacgccatgcttactccattcattttatgtcttagaatttacatatcatattcattaattaaacttaactagatgagtgttgattgtgttgctgattttccttaaattttttttatatatt

SEQ ID NO: 43205 - DNA, 598 bp, Arabidopsis thaliana landsberg
aagatttagatagtatatgtaccgtgaatatgaagttgtaccctaaaccaataacttgcctaagaagatccattcgccgccaaataagtttcaagtaaccaggcgtcataaaccgattcggacctgagagttggtctgaatctgtggcgttgatcaaatagcaatgaggatgaacctttaggcactgatcatatgccttgatatccaagcaaaccgcgatcacatgcttcaataacctctccgtttctattccgactttaaaactctctcgaaacacatcgaatgtagagtttggttcggcccatgcttggtttaacgccgttatgatcaccgtgttatcttccatagccgcattcatcaatactctctctagttctgaaaccggctccttctttggttcctaaaaacatcgatacatttaagagagattaacatatcaacatgaccggtgtgtaatttttatcgtcttaatgtaataatgtcaagactagagagattagctttatttatagacaaattctctctttaggtacggaagattgtagattccagagattagtttgaaatggaatctgaaattttcatataaaccaaacga

SEQ ID NO: 43206 - DNA, 645 bp, Arabidopsis thaliana landsberg
aacctcccatatattacaatttgctttcatatagtatttcgttaggaaatttttcattcgtattcgtaataaagaaagaggtatgtcttaggcttcgcatttggtgatgggaccaacagaaaagagtctcgtaagtcacgtggcttcttctcctcaaggacggcaccgccctcttctcgtttttatttggattttatttgctaaaagcctaaaattattacactacataaaaagtagtatagtgttagtattagtaatgctattactatttttaacaaaataaaataaatttgcatattgttatagttatcctattactaaactcattataaggttttggaatcagatgatgaaaattctgggtctatgcttttcaagaccttttttagtagccttaaagacgtatttattcacctttgcattcaataaaaatcaacattagtcataggtaattttcttgatgtaagaaaataaacgatttactcaaaaacaaaaagaagtttaccatattttactatgtaaacttgtcactgctctaaaataaaaacacaaatcctctacaaaaaatactaaaacagagactgtcaccaataatctctgcaggaacatactccatttctaaaatgatgaaatctgttgcggtct

SEQ ID NO: 43207 - DNA, 799 bp, Arabidopsis thaliana landsberg
actgtcttttcataaaaccgtaagtgggcatgcaagaatatagcaatgcaattccttggttagcaatgcaagatatagattggtctggtatggtcaagaaaacctttggtgtcattttgtacattcatttgctgataaaatttacaattggagggaccatttaaaccgaagtagaccaaatattaaccatttgacattgaacgaaagtcttaaataggcaaattggttggttcaaccaaaaataccccaattctctgtctatatttttattttttagtgaataatatgattccattgattattttcatcggtattaactataaattaatttatttctggatattttactttaaatttacaccaaaaccctaataaagttttgggaaatggaaaaaataaaacaagaaagaagtatggcaaattggcaatcttaagttattagaaatgtttagttttcttttagaaatgttaagttagtagaaataatttaaaatattaaaataataatgtgtctttttctaggataagaaattccatatattcaactagtgatgcattaatgtgaaaaacaaattcaaacaccaaaatgcaatatgcaatctttatacgtgtacggtgaatcggtgatacaacgacatcatcaacacaaatcagtatattatgtattttgattgtattaatatcatattcttttaatatgagatgtcaactttataatagttacaccaaaaaaaaaaactttataatagagttttggggcttcacgaaatgtttattggcatgcatctctaaatttact

SEQ ID NO: 43208 - DNA, 508 bp, Arabidopsis thaliana landsberg
atggttttctccgtgggtaattcgtatttgtccctagctacagaaacctctagctgtatagctaaagtctaatacaagaaactcacagaaaaatccatcaataaatctcattcaaacttatgagttaaatataagtacatggtatatatattgttaactaaaatagacccaatttttatactattatatttagatttagtcatgtagcacataatatatcattagtataaaaaatgtaactaaaatttacattaaaaaaaggaaagatcgtggaatagtgctaataaattgataatttgaacactgttaataaccccagcggtggaacagacaaattaaacaacgaagagagagagaagagaatgtgacaagactggaggaggggtgtgtctgtgagggacaaaatggtgacagtcatgaggtggaccattggttggctgtgactcacccgcttctctctgcaatttccttattttggttttaaatgctttcatgtgattcattctct

SEQ ID NO: 43209 - DNA, 585 bp, Arabidopsis thaliana landsberg
aaaaaataaaaaataaaaaaaaaaaaaacaaaaaaaaaaaaaaaaaaaaaaaaaaaaataaaaaaaaatataaaaaataaaataaaaacaaaaaaaaaaaaaaaaaataaaaaaaaaaaaccataaaaaaaaacaaaaaataaaacattaaaaaaaaaaaaaaaaacagcaaaaaaaaaaaaaaaaacaaaaacataaaaaaaaaaaaaaaaaaaaacaataaaaaaaaaaaaaactaaaaataaaaaaaaaaaaatataataaaatataaaaaaacatacaaaatcaaaaaaaaaaaaaaaacaaataaaaaaataaaacaaaaaaaaaaaaaaaatataaatatacaaaaataaaaaataaaaaaaaaaactaaaaaaaaacaaacaaaaaaataataaaaaaaaataaaaatacataaaaaaaaacacaacataaaacaaaaacaaaaataaaataaaaaaaaaataataaaaaaaaaataaaaaaaaaaataaaaaaaataaaaaaaaaattaataaataaaaaaaaaaaacaaaaaaaatatataaactaataaaaaacaaatataaaaatataaaaaaa

SEQ ID NO: 43210 - DNA, 569 bp, Arabidopsis thaliana landsberg
ttattttagttttaactttttctaaacaaattttttaacgtgatatgttttccccaattttttaatttcttttatttttgcaaaatccaaaaatattcaaaacccctcaacttatagtatagtccaaagtccaaacccaaaacttacagtataatccaaggcatgtatatatatctttcttagagcagttttttattttttttttttacgaacacaatctttcttagagtttaaggggggtttcattctgtttttgcctatatgacaaatcttttgattcatatataatttatcaaataataattaattcatcaaaagcaaatatgaaaatatatgaagagacttttgtttttattagcgttagaaagaaaactttaggccaatatgaaaaattaattgtgttagctacgagattataaataacatcatcaacacagagttaagtgattattgcattgtcatcacacggtattccttgatagaatggttaacttgaggttaaaagaaactatctttgaggacaaagtaaaatggtaggaaattgcgtggaaatagaacttgattttaaa

SEQ ID NO: 43211 - DNA, 707 bp, Arabidopsis thaliana landsberg
tggtcagttatacgccgagtacgtcatgttttgatgatctcctgtcacatgcatgtctctttcttcctcaccattcatatctaaccaattaacttatgactatagactatatatgatttattcaagtgtgcgcatgcaattttaagaaacgaacttcacttatatgtatttttcttaattacaaatttagagatgaaaaagacacaatatttagactatgatattgattattgagtaaatagataaaatccatatataaatagtttaacaaagctgactatatatatttttaaattactatgattaataacatcgattggattagtattaaatgcttaaccgtattcatgcacatttcagtatttctgtttctcatgactgatgatatctaatcttatgtttgaaactagaaagtaaattaaagatcactaaagaatgcatgattaattttatcaaatgacatgtgaatctgtgatggggatatgtaatacgtccacgtggcataaaagtaggggtccatgcggtatagccgttgcccgttggaatggttaagcgcctaacggaattgcatgtgaagacttgcataatgcatatatacacacggaattcctggaaattaagaccgattccgattatgtcaccattcttccctttttacgtttttgtctaaaaaaaatattttctaatctttttgaaaaaatattttt

SEQ ID NO: 43212 - DNA, 1137 bp, Arabidopsis thaliana landsberg
aaattaacatccccaacattttattttgaacaagaaaccgaccaatttcttaaaacctttttttttatgttgtttggtagacaaactgcaagcaagactatggtcggatggtggaataaaagcgttgttaggaatggttagatgcggacatccagatgttcttgctcaggtggctcgcggaattgcaaactttgccaagtgcgagtcccgagcaaccactcaaggtaatgctcttttccagtattccttcaaggtcattcagcctttagagagagagagagattggtttttcttgcgtgggtttataatgtgaagagtgtatgaaggtgtgaagagtggaagatcactactaatagaagacggagctcttccgtggattgtacaacatgcgaacgatgaagctgcgccaatcaggcgacacatagagctggctttatgccatttggcccagcatggttagtgcgatccttgtctttgtctttgtggtctttttgatccttgttgtggttcatcatgttcatttgattgtttggtgggggcagaggtgaatgcaaaggagatgataagcggaggagcattgtgggagttggtgagaatatcaaaggaatgttcaagagaagacattcgaagtttggctcatcgtactctctcttcaagtcccgtcttccgttctgagatccgtcgcctcggcatccagttttgacttgttttatgttttgtatcatataatcatcatctctctcaacgagattcacacatcatcaccatctgtattctattttattcattttatagtaactatttcatttttctttgctttttcatttactcttgattataaaaagaattactagatcacgttgtgtgattcattcaacctcgaaataaaacaaagaaagattgctaagacttattatgcaacaacgtgtcaaaaacacagactgtctaatattttacaatttacatataagaaagttaaaaaaaaaatccctcgtgaacactaatctcttcccatggctaccaaacaatgtaagtaatttgtgataaaaactcaaagaagacccaaacagaattatgatgaaaatcgagggagtaaatgaagaaatcttacagagagatagatagatatttagcagc

SEQ ID NO: 43213 - DNA, 641 bp, Arabidopsis thaliana landsberg
ttaaaatagcaagaaagcccacatcaggaaaatgacatttcataacccaaaaaaaaaaatcatttcttgacacctactcttcttataaatcataggtcttcctcttccccaacaacacttctcacatttcataaaaagtgagacaaattaaagacagagagagatccaagaacatgaaccacacggtggatgatcagaacatggcttttatctctcaactgtaccctgatgtctacactcagatagtacaaccaggtttgtcctttttttgtaattagtttgttcgaaatttcatacctttttatttaaaagttcgacaaaacccaaaattcatggattttcttataaaaatacaagtgggttttgtttttagttttaatttgtccgaagttctttatcccctcacaaattttgtggaagaagttatatataagaattcaagtggattatgttatgtgcatgagtctttacacaaaagaaaaaaagttctcgactaatacgcataagcctagttaaaatcttggtatcatctacgtgcatgtgaagtgtgaacacacatcaagaacaatctaaactttatttaagatgtttctgcttttggtcagtaggagaagtgaagcagccgaagcggaggaggaaga

SEQ ID NO: 43214 - DNA, 272 bp, Arabidopsis thaliana landsberg
tctttctttcctttcttgcgcttgatcttttcaagcttcttctccttcatcaacttttcaataaactcatcgttctttttctcaaactctctcagaagtttcttaagctgctgcttgtcgtttgccagtttccttaaatctgcagcagtttgattttacttccaaacttgattcacagagaaataagcttccttatgtcattctccacgtcatcctcctcctcctctttcttcttgtccttcttcttctccttgagatcccagataatgcca

SEQ ID NO: 43215 - DNA, 709 bp, Arabidopsis thaliana landsberg
taaaatatatctcaagctcaaaagatggattggtaaatgggaaatatgtatcaacccatctcatctccaccgaacctggcagccaaaaaaagaagctcagatcaaattatttcatgtatatttccccaacttcttcttaaattaatgaaataatcatcctaaacaactcttaataaaccatctttgaagttatttacacttgctgaagaatatagattgtttattggatcttaatgtaccaaataagtggcgtgccaatccctcaagacatttcttcaaatcctcagcagcatacaaagtggaatccttgccagacccgttccagtcctcaggagagaaaacacaaaaaccttccatctgtaatagataaaaaacataatacacctgtcgagcaaaacagccaaagtaaaagaaaaacacagggacctcaagaatagaacacctgatggaaaaccggataatgagtagagtcaatagaatctcttcggtaaacatccccggttacaaggaaacgactatgacctttcctcaacagctcagcttggtgagcactcgtatgacatctcaaaacagtttgtgagtctacatagtacgtgtcattaagacttctgcttacatgatcagcagggactagcacatcatcaaagttctggtaccaaaaaccaataatgatcacattgaaaaccaagtgatacttctagaaagatgc

SEQ ID NO: 43216 - DNA, 635 bp, Arabidopsis thaliana landsberg
aggaaagctggtggaagccatcgccttttgttttgccaatgtgagaaatatttgctgtatgatttatagaaagaagactttggtatatatagtaatttttcaacttacatatttgtctctacttactattttttattaatcaactacaaattatatactcagatagttaggtgttatttgcggctgtcttttttattttcctttagtagcttatataggctgccttcatttgactttaaaagtttctttgattttaaaatgtaatagtatataacaatgacaaaaacatatcggttttaatacaacatgtaataacataagtagcacctaaaagctttggtctgatttgattattaatgaaatgcttgcaaattttataatatgatgtagtctgaaacaaaatgtgttgtaatgggttgcaagtcgtcaagttccctgtattttatccattctaaagtttgagcaaattatgaatttttatatatttaaacttttttttatcataaataacgctttgcagaactaggcaaatatatatatatatatatatgaattggagacaaattaatattgcttaaggtcacgataaaaaacaaatcaattaatgaaaaactgagggccccattctattttaa

SEQ ID NO: 43217 - DNA, 486 bp, Arabidopsis thaliana landsberg
tctatttcgttctgctccagtagaactcaaaaatatacttttaaccgttacatttcaatcgctagtattggggcctcacaagagacgaagggggtgcgggagcgcatgcatggcgaaatcgacggcggaacgaatgcggcagtggcgacagcgaaagcacgccgatggcctggtgaccgtgaccttgaccgtgccggtcggcgacaagcgcttcttccgcgaagtcgccgccgaggcttgccgacgcgcgacatcggaccatgtcgccgccgtcgatgccgtgggtgcgccacccgtgcatcggctgacacgtgcgcaagagcgtctggcgtaccgctgggcatcccgctcaggcctgaagaccgacgtctatcgttcggggatcaagctcggcggcctgctggcgatgaatatcgcgctggagatcaaccgtatggggtttccggtcgggcatctgctcggctccgaagagcagctgatggcgcg

SEQ ID NO: 43218 - DNA, 617 bp, Arabidopsis thaliana landsberg
ttttttaccatgtattcttctttctaattccgtatagtatagataaatacccataagtataaacaaacatgttgacgatagtatatatatataagaatttacatattagagagatgaccaaacttttgaaataattaacatttattactactcgttaaacaataataatatttactatttttctttttgaaattaagtgttgctgtatatcctaaattttattttaaaatgtcgttttacattttcaatataaaaacagttttttttttaattgattagttattacaaattttttttaattttttaaacaatttctacttacaaatattgttgattaatgtttttgttaaacttgattttagttttttataaattaaaaaattatgggtccttatctaatatatatatatatatatatatatatatatataattatctacatattatagagacgtccgacctttttgaattaaaaacatttattactactctttaaacagtaacaatatttacttttttttgttttaaaataagtgtttttgattatcctaattttattttaaaatgtttcaaattacattttcatataaaaacagtttttttaatagtatttcttt

SEQ ID NO: 43219 - DNA, 711 bp, Arabidopsis thaliana landsberg
  unsure (1)..(711): unsure at all n locations
ccggttagcgaattttatggagcagcgtagtactagtgcagtgtggtgcattccccaataattatattaaaaacattacttattatatactatagtttctcacttgtttagtagcatgtgtcaatcattaatttcctctagattctcaatttttggatttctaatgatttcctaacaaatattagatccgacgaaaccgaatggaaccaacacgcagtgacgaatccagatgaagtagcggacgaagttctcgccttgacagaaatgtaagtaccaaaatcttctcgtgatttttaactttatcattgaattaatatatactacatgtttgtgggggaaaagtcacaaaagtacaatattgggtatgcatcgtcctataagtgctaactaatattcatttacaatagtgttgtgacttttgtttcattctattgttgaatcaagatctatcctactaaagctgtcacatttatttctcccctaaccaacttaattcgttttttttgttactatattatacctcgtctataaatccccatgttcacactattataactatgacaaaaatagtgtatgcgcttaaattattcttactactgctgagatctactcccgtgaacaattggcattcattacttttctgtcaggattcttganaaataagacaatactattattttatgtttgagaacctaagttgttaatctttct

SEQ ID NO: 43220 - DNA, 770 bp, Arabidopsis thaliana landsberg
gtgtatgctttcattttccaatacccatgcgaccctggagggaatactaagatgatacttgcggattaactattaagtctgtctcaaacataagaagaggatccatggatgaattggtttcaatgaataaaactaacaagacagattacctttccttcgggaaggcctccttggcatcttcccttgaaaagtcctcctctgtactgcatctcaagaataggactccatctttttgatgaatctcgttcagcttcctaagaattaaaaatggaaaattttctctcagttggcatcgacttggacgatgtttttacagaaagactcttcatcatggttgcagactgaaccaaggagaaaactttgcctctatatgcattattgtttgaaaaagcagcccactagtaagaagatgattgatatctcaacctcataagctggtacattgctacttaccagcatagacgatgctcgagcggatagatttctttgctttgtaaaatcagcatatttctcagatagcagggtagatgcagtatcactagagtcttttgtcgagccattagggttgaaaaatgattcttctctggaatcagccttcctagagagttgactggcaacactgagattactgttcaatttcttcgaaggtctcacaccaacaggaaggttgacaattcccaggctaagcactgcagtgtctccagaatcagctcgccatttctgctcaatctgatatccctgatccatactccaatgtggcaataggctac

SEQ ID NO: 43221 - DNA, 528 bp, Arabidopsis thaliana landsberg
  unsure (1)..(528): unsure at all n locations
tgctcgttccatgtgccctaaagcaaactctatctgatataaccgttcgttgaaggagatggtcaagctcacaaagccttgtcttgtgttttactgttatctcaggtttttcagacactgacgtttgatctgatcttgtctgacgctctctcacagcttccaacaacgttaatccatggcaaataaataaaggaagcctcaaacattacaaatcatctttttcttattcaatactctgttgagattttacccattctttttgtcatggaatatgtggtttgacttcagattccattactcagctaattcactcaatcatttgcaagactacttccttctcatatctaacagcttggcaaatattattctgattatatccttattgtatatacgcaatagcagatgtaagagttacatatggattgacaaatgttgacgagcccctccaaaatcatatcactgagaaacanagagcaaaaaaagaaacacaattgaagaaagtaatttaccatttgactgcccctcttt

SEQ ID NO: 43222 - DNA, 1092 bp, Arabidopsis thaliana landsberg
ttataacaccaaatttttttttcccgtaattatatcaccaaatatgataaagaaacataacgttttaacataaaaccaaacacaagttttgaagttataattttaggtatcattgaagtaaaagtgttttcactttaaaataggatattcatatatagtgcgtaaaaaaagagagtaaacaacagggagatagagagacgaagagggatgtttccatatcaaattggttgcgagttgcgacaagtcttaatttgactatgcacggagataaaaaaagatgaagtgtctctattaagttcgcgttatagtacaaactcaattattcacatttttcatcttgagataaaccattcggaaccaagcataaccccaaatttaaatattagaaaaagtcaaaatgtcacattcgttcttgcttttttttcttaaatatattatcttttgctttttaattgtcaaatatatatatacttttgttgatgttgttgagcttgatgggatattaatattcctccactttgtcccctcctaacatccccaccaaaatttaacattttcctctcatatttattgtccactttacttacctcccaatataacgtatagtttttatgtaccatgactgataatgatatgtagaaatgaagaacccatatacatatcacatatttctaccaaaactaaatatacatatcacatataacatgactcatcaggcatctatctcaatatctcccgatctaaatcttttatttcctagtttgctgaaagtcttgcttacattaaggggaaaaagcctacttgttaatcatttgtttcacaaaagtctatatatacacctaaagtgtctacacttgaaaataattaagctaagcaaaactatagattgtggtcgtttttattttcagttgccgattttcttctcactaataaatagaatagaaaaaatccaatgatttaacaggcagagatcatctaaaaattcaaaaatgtaaattaatttgaatttattttccgacatttttagaagaaaaaaattgcatttttatggttaagtaagctagaaatgtttcaatgcgaattttaccacta

SEQ ID NO: 43223 - DNA, 180 bp, Arabidopsis thaliana landsberg
  unsure (1)..(180): unsure at all n locations
atactcaatcttatcagcgaataagagaatatgatcgcatcttaaattcttggggaggtctccagctttcaaggnnnnnnnnnnnnnnnnnnnnnnnnnnnnnnnnnnnnnnnnnnnnnnnnnnnncatacacaagcgtggtttaaagaatgtgacgagcgtagggcttcaggcaggaac

SEQ ID NO: 43224 - DNA, 647 bp, Arabidopsis thaliana landsberg
taatttaatataaatcagcaaataatagctacataattcaaacactttttaattcccaaagaaacttatctcaacagagcaaagttagggaaggtacaataagaactttgtaagatttgtgtccgtactcttacatgtcagcctagcattggtaaaagtcccatccctcgtgcacattattatttttctaattgagttttgataccaccaatgatcaagtcatcatcatcaagatctttaatttcggatgatccaatgatttagtaaattgttaatctcttaatcaatatttaaaaaggagagaggagtggatctttgattcctcttgtccccacacattgatacagccaactgttcaaggttgctacgaggccgaccctatttcaattttatattgtacttaagtaatcatataagacaaaaataaatctaacaagttttattacgaaaaatcgaaaatcataaataaatcaacttttgcagcctggtttacattattgttttcaactaaaaggatgcatgtataagttataaacaatttgaaaaatactaataataaatataagcaactaacacatttcaatacaaaattatgtttcattatacatatcattttatgatcttattgaaggtcatgtctctattct

SEQ ID NO: 43225 - DNA, 432 bp, Arabidopsis thaliana landsberg
tgggacgttcctaatattattcacaaagatatgaaccataagatgtggatataacaatcatgactttcatctcagaacaaataaacagataaccagagtgaaaaaagccaaattccatttcaaacctccactccccatcgcattgtctaacgcttggtgcctctctcagagcaggaagtggtacggagatgatgacattagtcagatcaaacatggacgaggcttcgtactcgaggctgacatatgtctcgtttccagagactgaaggccagcagtttactgcatcagacaaaagatttacatcaatgggacaaacatttacatgtaaacctgtcaaaaaacagacacgataaccttcacagccttacttgttagtggcaccatagactcgtctgctctttgcattctccacctgagaagaccaacaccatc

SEQ ID NO: 43226 - DNA, 737 bp, Arabidopsis thaliana landsberg
  unsure (1)..(737): unsure at all n locations
atcagcccaactcatgtttccataccaagtcgattacaaaagcgttcttattgggtattagaaattcgtttagttttaattaaaggtatatttaaaaattcaaaaggctgctgataactaacaaaacgaaagagtatacacaaattgtgctttatgctagcaaacaagaaaattatggtattctctgcaacagacttatctaaattgctgaattagagaggaccaagacttttttttgtctcctttctcctagattttacctaattaaaacataaagatacaatactaaaacctttataaattaataatattgagtctggaaatttttattaatttataaaagtaatattttatcgagaaattaatcattattagtttacaaagagatttgactactttatatgttttttctgattctcttttttttttttggttataatacatattgggttttgaaattctattatttatagttccttatactcttttaatttacaaacatgtctacttcctttagttccgcgggatatctaagcatttctttcttactctaactggttaaataactttgaatctagtacttttttgcatataaataaatatatatatatacatatttttctgtttgccttatgtttgtttttataatattattacgcaataaattatacgatatatattttaaaaaagttntataatatgatcctcataaaaatatttttcggacccatcactat

SEQ ID NO: 43227 - DNA, 540 bp, Arabidopsis thaliana landsberg
  unsure (1)..(540): unsure at all n locations
ctaaatcttctgagccacctaatgtccttacacaaaatggtcatcaggtaattatttttcttcacatatgaattagttttgaccaatttntgttgtgtctattaacctcttcctttaccttttgttgttgatttagcacgcgataatgtatgtcgaagatggggttttctacggggctaaagcgaagataaatgtatggaagccggatgttgaaatgcctaatgagtttagcttagctcagatttgggttttaggtggaaatttcaactctgatcttaatagtattgaagctggctggcaggtatttttcttctttcggtttttgatagttctttcctgaaaaagaaactgtttttgattcaaagatttgtgttttcaggtcagcccacaattgtatggtgataataggaccagactcttcacttattggactgtaagtttcagactattcaatctagatttttgtttttgtgtgttttggctttcttgatgaatcattcttttgtctctcacttgtgagaacagagtgacacataccaa

SEQ ID NO: 43228 - DNA, 1982 bp, Arabidopsis thaliana landsberg
aactgagtttgattatatttgctggggggagtgatatctcgaatttgttcgtttcatctgtgttctcactttaagctcctgatgcatctgctatggaaacggtgatgttattagaagggctcaaagaatcaatatcatcaaaaacacatagaatcaacaatacttgtctcttgctaatgcatgtgaaatggccaatggaaggaagaaaacagaggaagctatctgtaacatgacgtctcttctcttcatcccaacatgatctctagacctgtttactttaacagattcagaacaaacccagataaagaaaggtagtgaatttcactgggacattgatagactttacgaaattcgatgttgttcctcgttggagctgtcaagaacagagattgccgcataaattgatgaacatcttctggaatctggaaagaattagctccaagaatatgaattttgtaaactacgatgaatcagtgaagactgtgagagtgagagacatcaagagcacctgtactggtaacgcgcggattcgagaagctctgaggagaagataaccatggagaaatcgctgccatgtgtttcaagatatgtccgcttctctgttttcacgaaatctatcgctactttgctgtttcaacttttattattttttagtcctaaaataatgtttttattaagtgactgaggattaaaattcaatatttataattttcgaataaatgctctaacaattaaaaacatatataaaataaaattatgtaatgcatacatccaagtcgacacataatgacacaacatttacacaattctgtttttgataaaatgtagaaaattataaaataatgaatatctttgagcaattgacgaccccaaatttttaaaattatttgtattaattagaatgatgaatactgaacaatgtacaccttcctagttagttgttaaatattactgtacttggagacactttcatagtttttttcaatcccaaacaataataaaactacccaaccatcatattaaaagtatctattttcctaaataagccacatatatcttttaatttcatcatttctaacttaaaatttttagtactttatcaaatacttttgtaaatatttcgagtgatattaacttttagttttaccttaatacttctaatttagtaccgccacgtcagcattttaagcttttctggagatgacacatcaactttttaatcttccaatcaaaacattttattaatatgattcagcttttattttttacacatcagcttctaattataagtgtcaaatagagtaaacaaaatagtccatgcgagatggactatatgtgttttagaatctatagtacaatattaataggttgggcccatttcagtgatggtttaatggttctaaacccaacaacatagtctctctttctgtacatcatatttattttaaaaaaaagttttataccttttaattgccagaatggaagccacaatagaagttaggccacaatagaagttacacagaactgaaccaaggaacaagcagacgtaaattgatatttagaaaaaatagcatatcacaatataactaacttcatattaaacaaaaagttgaaatatgactaaggtaaataaattaccttagtttattgcatagataaataaaaattatatttaaattaaacaactttagtcataaaataaattaccttagttttcaaccaaaaaaacataagttaccttagtcatatttcaactgtagtatacagttccaaagttgaaatatgacaaagaatgtaaaaaatgtggatgtttttgtttacaaggtttctttagtcagattggtcaacaaagtttctgacacgtgtcttattcagagtggttactttgaccagctgagctaagttatattttttactcaacaaattcaccggcaaatccagtgagtgacgacggtcatgttgttccacaaagattcgctgtc

SEQ ID NO: 43229 - DNA, 929 bp, Arabidopsis thaliana landsberg
catttgctcgagaattataacgatacgtataccaaataaaatacatgaatttctcgtaagccaaaataaaaatttgctctaaactcttaatttgtgatgcaggtataatattgtttgtgaaattaattcaaacgtgatcaagacgaacactgcccccacttatattaatctgattaatatgtttggcccacgtttagatcggtagatcatatccgttgcacatacaaactttacataattactcaatcaaacaattttatttcttaaaccaccgtggtttgatttttaaaacgtgcattatagtttcgttaatactccagtatagtgatgttattcggttcctgttaattaattgtaacacgaccatttatgatatgactacgacttaatccacgtgatttaacaccttaattacgactttcaattatcattttcacacgctgttctatgtcttctattaatttcttaaggaacaaaaatactagtagttcatttaaataagaaaatcattggttatctttgattattttgatgtcaaatctgaatttttttacaaaaatagaaaatttcttaaaacgtgcattgtaatttgatttcttttaaaaaattaaaataaaaagaattcacgcaacaaaccgcgggtagtgcgactaaacacctagtaaaatactataatcgtagaatcaaataatgatatgtagatatttatgagaaacatggagggaggtggttataaagagtcaatatttgttgtgtggtggggttcatctaattaaaagcaaatgaagtatataattatattgataggtgaaatctagatcttaaaaattgtttacaaagattgtaaactctggttaccaccgtttagaacatttttgcaccaaaccttgaaaccgttgatagaaaaatcacccaaaatgaaacgaacc

SEQ ID NO: 43230 - DNA, 838 bp, Arabidopsis thaliana landsberg
ttcgcatgactttaccgagacggactcacgggcatttaacaacctatatatacataagaacggacttgtatcacatgactgccagtatggacattaccagttgaatggatgggtcacgtggctaagcctatgccgccttaggttgactggatctattatagcaataaaacccatacgatgtctgggcaactttttaaaagatggtcttccatcaaaaatatacaagatatcaaagttcaaaaattagaaatctgaaagatcgcacctacatagtgaaagatggattgttgaacagcgttataaagtcacattaattccatgctatactaatacctcaaaatctcaaatacaacacatgcacgtgtctagcttgctgcgtttctatatacattatgcaactgaaaatcgaattataatgatactaaaatgaaatatatgatcttaaatttgttattgttaggaaaatataaagatgaggaatggggaaagtctgttggacagtgatgccctaaatttgagaaagcatatattcccctgctctaaagcctttgtcctcttcttagacaactttaaaataaataataatgctttcccatactttttaggaccctccttttaaggcctttgttctctacttttttctatttgacccccaacaaaaagagattatctttttattttttcgtaacataaaaataatttatgattgaccaactacgactatctatctttaatttcttttgaaatcaatttaatcatgaaccattgtcagtacatagccttagcatcgcctttcctgtcaaaggatgcaattttgttatgttttggtaatttaatt

SEQ ID NO: 43231 - DNA, 286 bp, Arabidopsis thaliana landsberg
cgtcgtgggcctggctcgcgttgaccacttccttgctattcgcatcttgcggtcgcgccggatgtacggggctcttttcctccagagccaggctaccacacgcgatccagcgagtcggtccacccgagcagtcgaattaccagccggcgccgagccctcatccggccatgatcccgggccccattatgccgtcgctaactgtcgaagacccgcccggtcccaaccccgtcgtatttcagcatcctgtcaaccgatcaaacatgggaacgcgagggacgggaacggg

SEQ ID NO: 43232 - DNA, 737 bp, Arabidopsis thaliana landsberg
  unsure (1)..(737): unsure at all n locations
aatagtgacacataccttctgataattagataaatcaagggatgaaagctttgcgcatcgatcacgcatatgctcaatcttttgtttcataagagcttctttacgctcctcattttgaaaatacttggatcctttactcatttcatagacaatcctctggactttctctttgtcaactccctccatacctaaggaacataacacagaaacatcgacgagtttagaaatttaactcaaacatcaatcaataactaaagatgcaaatttaagattttgatattccgcaattaaatcttcaaaacaacacataagaaatatgttcaaagaccagtcaactataacccatgatcaacgaattgatcaattttcaagaaattttgaactctggaagaaacaattcacgaaagaatcctgaaaaattgctaaagaagaaaaaccctattggggaataatcgggaacaaaccggctttcgcgttagtgaagacggtattgtaggattcccatggacgcgacgaattgttggtggatgatgattcgccattatccattcttctccagtcttcttccttctctttcaagcttgctggagaagaagaggaacagtntggtcgccgcaattttatttgcaaggcgtatcggaaaaagcccgccccattcatacctgaaccgaaccgaaannntatattatctatttatatattgcgatttaacgcctcagtccatttcaactttttaa

SEQ ID NO: 43233 - DNA, 624 bp, Arabidopsis thaliana landsberg
gatatgtttctcaccattagtcttctgagatacagtattgttgtacgagctaaaaggttctaaaatcactgactagtacatagtaaatatttgtgtgaaaggaaactaaaagcattaatatattcgtttaaaatatgtatcaaaagacaaacaaacaattcacacatggttgtatttgaccccgtgactagttgaagagttgacacttataatcgtacatttgctatactttaatgtaattttcgtatggggaccaagttttacgtttccgtacgatgattgcttccgaaattaaacccatgtgatctaaaacttaccccaactatactattaaaattgtttgcacctctgtctgtcctacaaaatcagttgactcgttgcgtacgtagtcccgagttttaatgacatatatttatatatctaaaaagttgctaaaaaaaacgtaagtaaaaataaatattgacgcaactcaattaatcatcaatttcagcagagtaatccgtatactaactagcacatcatccattcatttattacgaatatgaatcactagctcgagtatatatcatataattagaatgtggggaattataatatatacagaactgtgtgacatacattaat

SEQ ID NO: 43234 - DNA, 652 bp, Arabidopsis thaliana landsberg
tatcaccgcttatatggtttctgaaaccgatgcaatgtttgcttcagcttcttctgatggagttgtgaatgtctgggatgtttcttttccgtctcagcctagtggtaagcattaacgttgctgcagtatattaccggttaaacgaagtgaagtatgtcttctaagcagtatctacatctttttcttcctctgtgttatctgttgcagaggaatgtaaagtggtgtgtctggactctatctgtgttgacactaaagcaattgtaacgctttcattagcggaattgcctcaaaatcctggtcgatttgcccttgctttgggcggattggacaacaaaatcaaactttactctggagaaagaacaggaaaggtgcttcccgattcgcttttgtgccaaattattctcaactaaattcaattgtgagagtttttttggtttcatcctttttcagtttacttctgtttgtgagcttaaaggccacacggactggattcggagtttggacttctcattaccgttacacacaacagaagaaatacccaatagtattatgcttgtgagttcttcccaggacaaagttattcggatctggaaactcgtgttagtcggtgatgttggctcgtggcgaagagaaatcactctagcttcttaca

SEQ ID NO: 43235 - DNA, 388 bp, Arabidopsis thaliana landsberg
agattttttttttgttcatcacatctacagttacataagaaacaggtaattcaatatcagggaaaaactatcctaatatttcagtttttgatattttataataaattgaatacatagcttttatcaggatatttttgttttatcaaactgcaaataccggggaaaaaaaattacctctattttcggttgtgctttcatgatcttatggctccttaggatgtatctggggggaccaatgatctaaagattctacggatcccccaattgttttcttttgcacttcccatcttatctttctcggtgacaaaagaaaaaagtatcatgtgaattggtctttgaaatcaaatcttagtattggacttgaaaaaaaaatctgcaactaaacaca

SEQ ID NO: 43236 - DNA, 531 bp, Arabidopsis thaliana landsberg
  unsure (1)..(531): unsure at all n locations
ttgaccggtttatacgatcggtataagctcggtgtagttaattgatccggttaattacttatccgatcggtataagcttgatcatatgatgattgtgttcgtctcaagtctcaactcaacacagacctaatagcacttcatcaaaaaccaaattacttaacaatgagagaattagtcaaaatcaaaacaactttaaactttttaaagaaaccaaaaacatagattccagatatacaaacgatataaagtcagctagtattataacatgtgaatgggacacttctatacataatctctctctatcgagaacagagaccaagaatctcgagagaatccactttggtcatacatgagacgcttaacttagacagaagcacctcactcggatctctatataatgctacactgcctctcnnnnnnnnnnnnnnnnnnnnnnnnnattgctaaaccaactcaagactctaagagagattacatcttcatgctgctcaacaatggctcaccagatgccagcctgtctataggactgca

SEQ ID NO: 43237 - DNA, 372 bp, Arabidopsis thaliana landsberg
atacaattcacatttgattttaaaattctaacactctatgatatatttacacatctaagtagccaccagtaagcaatcgatgtgaaaccactaaaccataacagacgaatctacaaaaaatttgaactaatattagtaaacccccaaagttaaacatagaactgtatttatttgctgttcaccattgaagaaaactgccacttataacttcatattctcatatttttacgcaacgtaactttgacggaccaattaagctccaaaattcaatatttcaaagctattaacacatctttttttttttagaacatgagttataaatagttgaacctatagttcaaatttaaactttatagagaatttgaatagttg

SEQ ID NO: 43238 - DNA, 375 bp, Arabidopsis thaliana landsberg
  unsure (1)..(375): unsure at all n locations
ggcggaatccgcacgatcgtggcactttcaacctgacacgatcgttacaaattgcctgctgggcaattaggcaatctgtgcgccgctccaaacccccgtctcaagcgaagattcacaggcagacgatctgcattcgtggagtgaaatatcgcggtttgtcgacgccgacccaccgcccgaccaggctccactatccctgatactcccgcctcgtgacccggtgactgccgccgctcaatcggcctgacttgcggttcnnnnnnnnnnnnnnnnnnnnnnnnnnnngaacacggatcaccagccttgggctgtggatagcgcttgccgggatgctgtgtgtctcaccgtgtctggcttctgatgcccgcgaaaccc

SEQ ID NO: 43239 - DNA, 577 bp, Arabidopsis thaliana landsberg
tcaggtgtgtcggaacaccgtgcttggcgctgctgttgaatcacatattaagggaaagaaaaacaattactcatattttaaataaatcatgattttttcttgtttgtcttttgttaataaaacgtttcttacaatttagaaatcgggagattatatcggtggtgatgcatttcgaatatgaacaaaatgacaaattagtttataacgttacaaattaattaatgaactcatattgcttaagtctaattaaacttacgttatgcattgattgatgtaatatcaccaaattcaaacacaataaacacaagtggaaatctttgaagtcaaagtctttgatgaattaacgaattagaggccgttgaatcttttattgacgtttatgagtggtagaactgtttaatgagaagtgagaacttcacataattattctagttataacaaaatgtaaccacagaggaaattagatatgtggatattagagagtaggtaaatgaatcaatcataaaatcacgaaattttagatgcaagtcatgatatctaacactctgtgcataaacctcgacagcttctattcgtg

SEQ ID NO: 43240 - DNA, 804 bp, Arabidopsis thaliana landsberg
ccgatgattaacaaattcatgttttctcggcattcatgtatttactctccagttagtggatccacgctatgaattttttttttaaacagtgcactaacaattattgtccctcacaagatatatagattttagtttaatatgtaatttattaatatatctgcatgctttgatttatgttactgtagcacatgattaatgcgttaaaatgaattttgtcaattgaaaacgtgatttataaacagaatacaaacttaagccgaatatgggcaaagaagaaaaatggctaaataaggagttaattagctctaatatttccgaccaaaaaaaaaaacagcgaattgatgaaataagtaaaaattgaagaaggttactgagtaattgatggagaagcatcgaattccagaaaagacacgaaagagattactgcaaatgttgctaattcgtcttcgtcgtcgatcatcattaacctaagcttctctatatcctctctatctttctttttttactttcctttttgtttttgaaataattgccaacctaacctaaattttgaggtatctaatttgagatcttgttaatagttcgaaagtaaaccctaattgtgtagttgctagctccttctactcattcgaatttgatttcttagaaaaaaaaattgatctttttttgttcttctaatctatcggtatgtcattggaatcttatatcccataaatagatttttagaaatgcaaataaataaagtaccgggagatgaaatttttggtgcagagcctgttttcagtaacagcctcaaattagcag

SEQ ID NO: 43241 - DNA, 621 bp, Arabidopsis thaliana landsberg
tggacagatcaatcaatttccttctctggtgggctttcctgacgcaaccctcctcctttggtttttgtcgatctctaagctcagacagagattcgaatgacctaattgtatcccgtcttatcgagactttacacagattcttctgggattttatcttacacagtcgttatctacttgttgcgtccaattgatttctctgaatcagaaaccctaatttcgtgggtcttgtgcagtctctaaagtttgcacactctctcagaatcgagccaaggtttcgtctagaaattagggtttcttagttttttcatggtggaggatattgtttaggccgatttgagggctttccatcagttttaaacggaggaagtgacgaaaaagcatcaatcgagagcaattaaggcgtgaaattagggtttctgaagtctatgtttggcttcggagcctgttaacggaggagaaggtatcgatggagctcgagagaagcatatcatcaaagcttatatgatgaaaggcaatggttaaagaatacagtcatctttctttgcccttgaggctgtcatcgagaaacctgaggggctatttgaaaaccagaatgataacaatgatgtgagtcctgccgaa

SEQ ID NO: 43242 - DNA, 547 bp, Arabidopsis thaliana landsberg
tgttggaatcttggtccatgattttttttgtcttcagaagctgcttatatatttaaatggcgtaggaagaagtgaaatacggtctacattttattaccatttaccaaacattatggtttatgtatattaagtataacgttctaaaattagttgtcaccattcggacggatttagactcatatgcgtcaccgtgaccaggagatttggtgtgtgctagtcattgtgatttaaaatgttctcgagccttgtaattttcgagttcaagattgacttgaaaagtggataccaaatttcacatggaagcaaaattattatatactaatttcacatgaaccttatgaggcaataccatcaatctgttcccacttgcctcgttataataaattatgatattgcaaataaaaggaaattgtaacagtagttttgttttacagccggaagatctcaaaccacttgatcaaacttgcgactttgaatatgaattctgaaatggttaaagaaaaaatattgttagcataaattgaactcttttactagacttcaaata

SEQ ID NO: 43243 - DNA, 713 bp, Arabidopsis thaliana landsberg
accgttttatcatttttaaccccacacatatatttaacgtgaattatatcacgagttacataatagtctccgttaaatttggaatttagctcaaatttgttgtaagtgaattgcttgttaccaatgtcgtcagtaaaacataacggtaaatgtttctattttgtattataactattttaacataaaagatataaagaaagatttctatgtataatacattatttcgatatatagatttaaattatagttataaatatattttttgcttgatatctctgtaaattaataagacggaatttaaaataattacaataaataaattttaagcaaattagatgttagttaaaagttagatgagaaaacactgtagcatatgaagaaaaaaaaacacaaaaaagtataattagatgtgaagcattaaaaatgttcccattgagatgacgccacgtgtcacaatctgaggtcggcggtcgatgttataccgttgaaatgaggaagaaacggaaaaaaagtttgaaacgttcctaggagggaatggatgacgtgtcataatatgattggagtacatagctgccgttgatcgcgaaagtaatgccaagtcatcagtcgcacatgcctcgtgacttttcttatctttctcttcccaccctaacacgccacgtttcctctacatgtttgccacgtggcttttcactatccaaccaccatattgc

SEQ ID NO: 43244 - DNA, 230 bp, Arabidopsis thaliana landsberg
gtttcagtacactgaagaaagacgagaaaaaaaacgaagattagtccacgtgaataaggattataccatactctgcaggtagcggtcataagctgatccaatacttctagtatactttactgaatgggggatacctcgatcctcatgctgtgataaataactgtgcatatcacctgaaggaatcaaacatggcgtgcccactacaaagagagatgccagacaagccataa

SEQ ID NO: 43245 - DNA, 339 bp, Arabidopsis thaliana landsberg
tgatacagtaatcagcttatttacatgactcggttttaaaggcgtgtgtgaactgtataaaatctttgagtcctccaacttttcttgatcctaacattttgtttgcaaactgaaaaactataaatgaaaagaaaactacaaaaatcaggtttgcttaaagaggaagaagctaaacacatcacgtgtagaaatgctgacatgtgtagattttcttacataattaaactttcacttatatgtagaatctgagcatcatcattacaagcttgaacacatgcttccagagctacttggtaggctatccgaactaggtgcatttccccaaggatggcctaaagt

SEQ ID NO: 43246 - DNA, 614 bp, Arabidopsis thaliana landsberg
tttcatctaaataccccatccccctctataagattttcactaatgtaagtaatattccaacttgatcctactactccataattcatttcaccaactcctcttaatttctaacactcaaaacctacaaaatttagacacatagctttgccatataaatatctttaaatgttgtgtccatcgtaatatctttaatgatgagcaacattaatatagtcatcattatattatgttagttgagagaaacttcacattgattttcatttgacatatcttctctcttttttgtatttacatttacttgcagatgtgtgcatgtacctgaaataatgatgcatgatttattgttctaggaagaaaataaggcgaagaaaatgtttatattgctggagtataaaaaaaattcttgaagtgacgttatatgattaaaggaaaagaagagaaaatctagagagtgatgtaacacagctcatttcatgattacgagggacattcttttgtgtaacccttacaacaatggggggacttcacaagacaagcacctttgtttcaatttccaactctctcaagttgataaaatggaagtctactactaccattttaattcttttcttcat

SEQ ID NO: 43247 - DNA, 831 bp, Arabidopsis thaliana landsberg
ccactaaactagatcagctccttagaaaattagtattttactaaattatatgatctatttagtagaaaaatcaaaaatgtatatattatagctagtggaatgacgacatttctatataatatatattcttgtgtgtgctaatagtcatgcagaagtcaaaaataaatagcatgttttttttttgacactatatattaattttacattatgaatcacttatttacgactaccacttaatcatttttacgagttaaacttctatttttttttctttatttagcaaagtagccctactaataataaagcaagaaaaagtattaacgataaacagtaacaacaacaataatttatgctgcgaactttagataacacattaatataattccagcaagtggaagatatatagcaaaaactatgccgacgaaaaaataattaaagaataattccatccctctacagaaaccacctcgatacttcttgtcatacctttgtctgaatatatcttattccactagcttcaacactattatattgttcaaatcgttcatttgcagtataattgagtttttcgacaactttgttaaactatggttcaaatttaacttaaaatgtttagaatcaagcgttgtacttgtacgtgaaaagaaaaagaaacaactttttctatcaaacaatttgaactaaactgttggggagagccaaatgcttaaacatctttaatgcaataatgcaaatggatttcttttaaaagtagatgcacgttataaaaatgtttattaaatttttaccgacgttaggtataactttcaaaaagattccatgggtcgaaac

SEQ ID NO: 43248 - DNA, 464 bp, Arabidopsis thaliana landsberg
  unsure (1)..(464): unsure at all n locations
tgtgtaacttaggaagcgctaaagaacacgacatttgttatgacaaaaaatatgcctaaattatctatatgtcggcgctattcttaatgataagcgagccaattgttacatttgcggataatataacttggctccgggtctggccgaagatcgatctgaaaactgttcattcgtgcgaagatagatgaagggtccaaaaggtagcggttggcgcccttgcagtctgagcacgatggcaatgagagaatcctatgcattcgtctatcattagcctgaagacatcatatgggagctgttgcttatgctcgagaccgggggccgtaaacatctcnnnnnnnnnnnnnnnnnnnnnnnnnnnnnnnnnnnnnnnnnnnnnnnnnnnnnnnnnnnnngatcgcagcagtgtggccagaattggactgtcaatcacaccattcacatcatgatcggacatatcacatatg

SEQ ID NO: 43249 - DNA, 402 bp, Arabidopsis thaliana landsberg
  unsure (1)..(402): unsure at all n locations
cccccccncccccccccccccccccccnccccccncccccnnccccccccccccccccccccccccccccccccccccccccccccccccccccccctccccccccccccccctttttattgtccccnccccccgccccccccccacccccccaccnnncccccccccccccccccccccncccccccccccccccccccccccccccccncccccgccccccggccccccccccccccccccccccccccccccccccccccccccccgccccccccccccccccccccccccccgccgccccccccccccccccccccgcccccccccgggcccggcccaggccnncncccgcccccaccccacccccccccccaccacccccccccccccccacccccc

SEQ ID NO: 43250 - DNA, 554 bp, Arabidopsis thaliana landsberg
actctacaccaacatctcaaacaaatttgatctttgcactcgtgatgcatgtaagcatattcatcaactcttcaaccgttagtctcaataatctaaaaacttatacatatatgcaataatcaaaattatccgcaaattttaaaaatcatgcacataattctaattaaccaaaactagtatgaacacatttttatatagcaaaaaatagctaagtatattaaagatgcaaagagaacaaaaatgcgagaaagctttaagaaaccgaggtgaagagaagagttaaaagctttaaaaaaaaaggagcagcactcttgccaaggccaaagtctctgccatccatactctcttgtattttttcgttattatatttatttaaaaaaaaactatttttttaccatttttttcatatcttagagcattttcaaaggagcgttattaaatgaatattatttattaaaaataaacatgttataaaaaagagagagtaaaaaaaatgctcttatacaagagattcgggtacttaagttatatgaaacacatgttttctatatatt

SEQ ID NO: 43251 - DNA, 604 bp, Arabidopsis thaliana landsberg
aagctttctctctattcagaaaaaattgataggaacataaatatttgatatgcaagttatagaaaaagctgggcttatatacaaagtatctacaatctaaaaacaagagtttgacctaaactatatttgctaatacgatgatggcccaatagggtccaatatagtaggaacctaaatatttgatatgcaagttatagaaaaggcaaacttcggccgacaaggatttagggtttactttacagttttataaatatgccagtatataaaaacaaagaaaaagcaaagcaaagttatatgcccatgagtccttgactatcagaaactaattagagaatagagatggcatcgttgagaaaaagagagaaatcgaagagaagaaaagtcaatgatgcattaagagaaacaaatatcattgatgatttacctgagagcttgctcttggcttagattttctccaagctacgtaaccttagagatgttattctatgcaaaagcgtgagcaaacgatggaagtctctgttatcttcttcttcttctttccacaacactccgagcttggctttaatcctatagtacaaatcctcagtgtgctacaaacgacata

SEQ ID NO: 43252 - DNA, 965 bp, Arabidopsis thaliana landsberg
agtatttgtaaacaattagactcaacggtaaggcaggaaagaagagttgttgaatataagttagaaagttataaaaagaattcggatagagaaagtttagaagacgtacgtaagcagagaaaattaattcaacaaatgtaattcagcagcggaaagagacgtcgaaatttattttatttttatttgttgttgtaaaaaaaaaaaaaggtcagcgagaggcattgaccgatcgttactcattaatttcagcgaccttaaaaggaaatgaatgctcttatgggtttgcctccaacccctttccaattcctccaccctctctttattatacgcatctccctctctctctatatccaccatatatacattttataatgccacctggacacatgtgtatgtgtatgttgttttaatatttgacaaaatttgaaattttgatcatcttattgtatcacgggcacgtcaagatttcaaacattgattcatattatcgtatgcatacaccatgacatattattgcaagatatatcttaacagatacattgttaacaatatagatatagtagcttaaaccgtccgtataatacgtacgtaaatggacgaagacgtatagtgaaggaaacttaggtctttaaatatataatggtataactgtagcagatgatttatctacaattcaaaagctttatcagtttcttttttttctttctttggtagtcgtcgtacggcctagggaattgttagttaggaaaggtagatacataatgtatagagagggaagcaaccataaacatttacattcaccacatgctcttaaataattaattaatgccttctaacctatacttttgctctatctatctactttaattaattacttgaatatatgctgcctatagagattccttttttttccttcattcatcccttttggctactggacctctttttcttttttgctctcgatt

SEQ ID NO: 43253 - DNA, 958 bp, Arabidopsis thaliana landsberg
tttgtttttatattttatgccgataatgctatatctcaataaatttcaaatagttgttctatctttttatgaagaaaaaaaagtaaatgttctttaaaagtaacatggataataatgaataaatgataattttacgaattcacatctaaaagtttgtaatgttccttttttagcgattgtacaccgcctcttaacatgatataaatactttgtgtggtattcacttctagatcataactaacccactgcttttttttttctttttgtgttgatacgttccttttttttgggttttttgcgacacatattagttaatggtgttttcttatgattgtaggatgtgtgtatgcaagcaacatcatgacacaattccggacaatttgatttctgatacacatggtctacaatgtcactcaacgtcatatggtgagtttttagttttatttaacgtcatgtggttagtttttagttttacatgttcatgtttaatgttacctaagttgtttgaatccagtggttaatatgttgatttgattcagtgcaggaacttatagcagctagcgtggatagatgcatgaaggtttcatcgtatgatatgaagtaagttttgatcaaaacctaatttgtttggtaacttataataataaggaacaaaaaacgaattattttggttggtggttgcccttggatcaatttctttaacgtatagtagtttcggttatggtgatgattttggttagtttcaatgatttcatgtaataaagaacgaagagatatgtaagcatttaaaagtatattaagatatttattatatggaaagaagagatatgtaagcctttgaaagtatatcatatggaaataagaaaaaagtaaaatttcattattaatatataaaactatattttttaacgtttttaatttatgaatgtataaaaaacatgctattaaaaaagagaaa

SEQ ID NO: 43254 - DNA, 671 bp, Arabidopsis thaliana landsberg
agaacaacacaaacctgctttggctggccatttttttcttctatagtagttactattatatggccagtctcagtcacattgccattaacaatcgtagcttccatttcctagagatcatgaatcaagtcagcgaaaaataaaaaatcactgaagcatcataagaaacctttttacaaaaacatactttatcatcttgaattttcatgtccttcatctcctcaggtaatctatcaacatcagtaacgtttccagtagattctctaaccgcggcactaggctctatgcccaccgaggccatcccaagattaaaacagaagaatttgttttaaaaaagtttcttcctttgtcacgctcttcaaatctgtcaatcagagattaaaaaactcaatcctgcagcaaaattaaccataagcaaagtgatcgttagctcttgattcctaaaccatacatatgtaattacaattacttggttgttacaagacaatcagtttaactgaggcaattacacagatttgaaactcaacaaaggtgatcccagaactcatattgaagctatcaacatgcaaaagtttggattttaacgcgacatttaaaaccacgaaaaaaaagcaggagacagccaaaaatttaaaattatagcatccttaataagaaaaaaatcatggaacaat

SEQ ID NO: 43255 - DNA, 1067 bp, Arabidopsis thaliana landsberg
tcatgtattgataaaataaaaatgaattcttcagttatatgcatgcataataaccgtggggaaggttccctccttttttttttgggtttttatataaatagagtaaaagaagtcaaaagaacaaaaagtcggcaaagattctatgggcaagtacaattcacaaatcttctaaaattcttatgatatattcccccttcgatttttcttttccctttttgtaattgttttattttgtcactgtgaattgttattgtattcattcaaaagtgaaaaacaaatgttaaccatttaagcttattacgatttattcactaatcctcatacttttttaactttgatcatctttttatcaagctagcgattttgtcatacggcatgataaaaatcaaatgagaagctaacgattttgactatgtagtttatcttcgtaatattcgagcttttcttatattctctttgaaggaaccaaattgatttttcattcgataagaatatttacttctcttattcctcccccctgtcctaaccgtggcagagaaaggattttcccccaaattattaaacacgcaaaaggcgtgtaaaactgtagattaatacagaatgtagctagttcgtggaaaataatcatcttcgaaaaatactttgttttatatctaaaatatgtaaacaatagtttttaatatctagatacaagaacttggtttttcttagccctacatgttcatatgaaagctgcaaagcctcaaacaaatatcttgtaatgtttttttattggaaatgattatagtgagttatataaactcatttttgtaacgaaaggtaggtacaattacaaatcaatcaccccaactgtgtaaaacagcacaaagtaaccataacaagacatttgattctccataacatgtaaccactttaggaccccaaaagaacagaagaaaaacactcaagtttggttgagagtggggtgctattagtggatgtgatcgagaagaaaatttgcagccaactgttcgttcttgttgcgagctaagaacacctccaacaccacccttttctcgaatcccata

SEQ ID NO: 43256 - DNA, 487 bp, Arabidopsis thaliana landsberg
cataagaacaagtgtcaatacaaagaagttatgccaaaccttaaatttcaaggcccgggaagaaaagtaaaaaaactaccagcttctcaactttcatccaaaactttttcatgtctttcgagatattgagggctactttccgaagtcgctgttcttcttcctgtgatcgacaataaggtcacttaaaaactaatgctggaatgtgtaagtactctgaaagagaaaagaaaggaagaagagagaacctttagcttcctttcttccctagatgcctgatctagcattcctttgctggctctcaaagcaaccttcttcgcctgcgccagcttccatttcctctcagactcaaagtcctacaaaaacatcaacaattagcatagaaacgtcatgcatgcataacaattcttgcagaatgatccaaatagccacccttcaattacctttgacagccaagccatctcctccaatacatggtcccagtgagttt

SEQ ID NO: 43257 - DNA, 725 bp, Arabidopsis thaliana landsberg
  unsure (1)..(725): unsure at all n locations
tatacacactcatatctcgacgcgtcagcaacctttcctggccgtagattaagccccttgacaaaaaccaccgtggaattgtcgtcgtcgatcacggcgtcgtacaccagccaatcccatcggtgtgtgagccctacttggagattataatcatcaaccctccatctcgaaacggcgagggatacagtattgccacgaggcacggcggaacaccgtacgatctgacggccatagtcgtcggtttccaccgcgaaaggaagctctttaaaaagtttagacgaatcgtttacgtcggagaaaacgcaaaagaggtcctctttggtaaaaaaccgagaagatggagggtattttaggaaaatcaatgtttggtcgggaaactcaactgcttcatggatcgtgatcaccttaaccaccggtacagaaccacgaagaactgcgttgaccgaagaccgcaccaccggtcgaatttttcctgatttatgcaaatattaattagtattaagtaataataaataaataaaaacggttgtgattaatacctaagaagatgaacacagcagagaagagaacgaaggagaagacgaacaaagaaacaaatcggaaaaatcttctccatgaaacaacgacgtcgacactgcttnaaacaccgggtttctacgggtcttcattttttacaccgccgaaaacggcggcgatggctgagaattnaaatccaaggaaaaagt

SEQ ID NO: 43258 - DNA, 593 bp, Arabidopsis thaliana landsberg
ttctcacagacattcacactgtaccattcatataggctatatcattaaactcgcttccaaatttttaaagacagttctctgatttctttggaatgacaatttaatcacaattttacaaaattttcattatatcctgatttaatttagattccattgctattaaaataaaataaataattcagtacattttagttattcataattatttcacataccttcgtgtacaaccatattttcacctttttatttatttaaatttataattatttcacaccagttcgacttagttacatagtgaaatccaaatgatgcgttagttatatagatattgtaagattaaggaatgttgtgaagaggatggttggggcggacgagttttgttctattgtttaaagaaatttaatttttgttgcctaggctaggtttgatttgaattgtgagacaataatcttcttacatggtgaacactgatcgtgctcaataaagcattttaatggtgatcgattcttgatcgcactgatgatgttgccgacgaggttcggtaaggactatatataactagtaaataaaatatcaaagacaagttcccttac

SEQ ID NO: 43259 - DNA, 667 bp, Arabidopsis thaliana landsberg
aaatttttggttgaaatatcgccgacaatcaagtcattaagaactgtatcagtctaatatttatttttatggttataacttataaagtaaatcaccttattctagtttgattgaaattaagtaaggttatttcaaagcaaatcggataagttcattagaaaaatggtaactatcttttcaatagatcgaatgtatttaacaaagaaaaaaaaggtcgaaaataatgcaaaaataaggatcaattaattttagtcgtctgtgtgactatatatgtctagtgaaatccacgtatgtctgtatcgtcaaggataagaacagaccagacataacattttctggtttattaatcattcatcacacacatgttttcaacaagaaaacctttacgcactttcttttacgggaaataaatgaatagataattaaatgacattcaccagtgatttttttgtttgcgtagagagaatttgtttacaaattaaactgcacttgatgatattcattttgcgtccgtctattccaaagcacttgaagagtccgttttctaccaaagagttccggttacattttttattttgtgtccattaactaaaatttaattgaactaatataattagtatttagttattgtaatttattattaaatgttaattaaagatgtaattcc

SEQ ID NO: 43260 - DNA, 308 bp, Arabidopsis thaliana landsberg
tgcacttattggacgttgcagcggtttaagcattcgcacatagtggtgttccatcgtctagcaccctcttgacgtgtctagatgacggagcaggggtggcacttgcatcaaaaccttgtcacagattgccccagcacagacacaagaacgtgatggcgtttacgaaactgcttgatatcgtcgcatacatcatgctgctgttttcgggctttccgtgcacgccctgcgtagctggattccttgctgcaggcaccattcggctttggtcgcaaactgcaagcgcttcgcacccacagcacagtacgccg

SEQ ID NO: 43261 - DNA, 1094 bp, Arabidopsis thaliana landsberg
ctaaaacagcccacataagacgaaaatcttatacgagagaaagtttgagttaacattgcgagaaagaaaaggaggttgtgaaactatatacaaaatagaagagccttcaagggaacttggaaaccaccgagatcagttgctaacgtcactggcattggtcttctaaagatgtaacctttggacaaactatgtgagcaaaaccgtatgttttgttgtaacaaacattttaacttaccccgcaaatatttagaagtggcaccttgaaaaaaacagatgtttaatagcgttggtgtcgtacttgattcgaaggaaatcaaacttataataggtgaaactattgagttgggagaaaaagagaaaaatatatattggaggagatttgttaggcgttacaaatgaagagcgaagaaactgattataaatgaaaaataattgcttgcgttttaaaatatgtacttgagcaattaatgtgggcaaaataatctagacagacggacattgtcacactcacacaaatttcgcgaagacaaaaacgttttcataacaataaacaatagtcacagcagtaattataataactttattttttcagttataaaattattctaaatgctaatgaaactgtaatttactaatactatttctacaataaggaatcagttattttgacattgaatgatatagtctttaaatgagtaattaagagccatgtacttgacccatgtttttttttttttttgggttatcgtttttgttggtggtgttgacgatggtacaatgggattgcatttcggtgagagctacaagtaaatgtgtttgatctttaaccaaatgttttttttgaatcacttcattattagaaaaaaaaacaaaattgtaatttactaccatatgatataataatatcatgttgttaatcttgtgatgttgtttctatcatgctaaggtatgaattgcatttctctatacttcaacaattaatcaacaaaatttaattcagaaatttttgtttcgactcgaatgtctaagaatcaaatgtgtgatgtggagtaaaacaattccattttattcacattcaaaatttagaatataaa

SEQ ID NO: 43262 - DNA, 760 bp, Arabidopsis thaliana landsberg
  unsure (1)..(760): unsure at all n locations
ggaaatgttggcttttatttccatcattatactgccaattgggcttttacattaataactttggccgaaattaaaaaaaaaaaaaacaatccaattcccgaatttaccaagacgcgaaactaagtggactgtgcaatctcttttatacatttttaatcgatcgtctaacaacatataaaaagcaaattcaattgcaattcaacaacgaaggagtaaaaagatcaacttccctcctgctacgtggtccactcttattagcacaaacatcactaattttcctgcgaaaaatagctgtgtctatatatttaaacctttttaattacatcaattcaataaaaacagaagaataaataaataattccgaaaatcccgatgatgactgaaagagatatgcccgatcttccacgccacagtagtggagctgtggagaaagaagacaaaactgtaataatgttcattattacaattttcactgacagtttttttccataaaaagaagctaccacaattactactagcagtaaaaataaaagaaatctgaaatataataataacaaccaaaaagtgaaaaaatcaaaccacaccgtcccactaagaggattaacacggaatttgctctatcacgtaatataattgacgtggcatcatcgtgtctagtcagcttcttctttaataacctcttcagcttcagctatcacactgcacctatgaaatcaaccaatctcgntttaaccccaaccangagaagaacaaaaatcga

SEQ ID NO: 43263 - DNA, 785 bp, Arabidopsis thaliana landsberg
  unsure (1)..(785): unsure at all n locations
atcagaatactataaaacttcatattatatgttgttaaaaggatgtatttatgaagaggtaatgtagtgcgcgtgggcttattgtgtagaattgtctcttttccatagaaccaagaaagtcatgaagtagacttgtgaatatttgtgtagaataatttaggattagtacattttctaaacagttgcatataaatagatctagatacacacaatacattgccttgttatatacgtgtgactcctatctttctggataagccgaaaagtattgatatcagatattttgtcaacatgtcatagttgagtttttaatttttttatatccattcgttggcttatgtggccgacgtaggcctttgagagactcggtcttaatttgtaccttccacaccaaatatattggtttgttttctggagaactcatgaaatttcaatgtttttaggtgacgcatgtaactacaagtcttaacactaatttgtttatagtgaatttcagaaatatattagacgtctggttattggtgtattttatatggtatgttggacttggagagaaaatcactaaaagaccaaccttataaattcatggaagtttcacaacttcttgtttaggcgatgcatgttatttgcaagtctttagatattaaattacgaaataaatgttggaagttttgtgtaatttataagatatatgtccgagaaaaaataattaaatttatcagcctttttgaanaaatatatatagaatttgcgatatagtcacttgcattttggagatcaataat

SEQ ID NO: 43264 - DNA, 750 bp, Arabidopsis thaliana landsberg
tcatttcttggatgtttcccttaggtatacatttctctctattcttgtcatattccccgcttaccgtagttcctcgataacatttgtctcacgtatacatttacatcttaaggtctacacttaggaattttcaaaagctttcacatatatagtgtctaggtataacatctcaaatgttgtagtttaaatggttttgttggatgtagttgagcaaaatatgggatgcacagcgactatgggaccatgcgaaaaggataaaagctgtagtgccacatgcagagctacgtttggagatagggctaatggcttctgcgactacagtactagtagtagtcctggtggagaatgtacttgcgtctaccattgtccgcctgtggtgcctcatgaatcccatttgtgatttctactttgaaatattttcatttcttcaatatatgttgaaattaaaagttgaaatatccaaattatgtattagcaatttctactcatcgagttttaataagaaatgaaataagaccacatctcctcattctctattttaagatttaaaccaccgctctctgactatttttttaggcgacggtttaagatgttttgggatgctatttcatgtgaacgttgaaccaacctaatgcacatacacaaccaatgaattcaccagtaaacagttccagactgaaggataaaccggtatataggaactatctacggctcatcatcctaaggaacatgtgaaacccgggatgaagg

SEQ ID NO: 43265 - DNA, 584 bp, Arabidopsis thaliana landsberg
gttctgttttttcttggaaattttgcagcttatgcagctgtaatgaaaagtatgggaggttttggaggaagtaatgtgatgagtacaagcaatactgaagcttcgtctcttactcctagaagcaagttacttcctcctacttctagagcgatgagtccgatctctgaggttgatgttaaacccggtttctcgtctagattgcctcctcggacgctttccggtgggtttaatcgttcttttgggaatgaagggtctgcttcttccaagcttacagctcttgctaggacccaatctggaggtctagatcaatacaaaaccaaggtatgaacttataatgagagacgttttgccattgaaaccaacttcttgcggttgaaaattcattctgctattgttcttgtttgattgattgtactaaagaaattcaatttaacaggatgaggattcagcaagtagacgtcctcctttggcacatcacatgagtttgcccaagtctttatcagatattgaacagttactgtcagattcaatcccatgtaagatcagagccaagcggggttgtgcaactcagcctcgtagcaagc

SEQ ID NO: 43266 - DNA, 759 bp, Arabidopsis thaliana landsberg
aatttgtcttcaccaatataaataatttggtaacttaaactttaactaaagattcataatttggcgtcaacttatgtaaaagaaccttcatatatactttcgtttatctccctatatttttatacatacacatatttatagtatttttgtcgattaattggcattggccatttggaagttataattaagttggcaaatggatgtgatctcttaccctatacacctacataaaaaaccctccatgcaaaacattaatggatgttttcattaaaacaagttttgatatcaacttagtttgactagctacatccatttcaatattttcttcccaatattaataataaatttaaagatagaccactagttcttaacctcacaccaaactgactagaaatgttcttcccccttgcaaagagagaaagcctaatggaacccacgaccaaacattggtcctacttttccttgtttggacatatctccccgacacacaaatcccagaacgttcacttgcccacgtggctctccctttatttctctctttttctttcttaattttctccacatttctttttctaaaatcataaattaaattaataaaaaaatccaatcgaacaatataaaagtctcaagttttgtatcaaccagtctaaagaagttgtcagaaaaaaaaaaaaaaaaagtgtcaagaagatcatatctcaattcattatattatggcaaatttcgagaatctttcttctgattttcagacaatagcca

SEQ ID NO: 43267 - DNA, 1064 bp, Arabidopsis thaliana landsberg
  unsure (1)..(1064): unsure at all n locations
aaggtactttaacatatattcttgagccattgttggtgaccaagccttgataactagatgaatcgtattcatataaaagtgatcaaagtaatctgagtttcttatttcttgtttcagccgcgacaaaaggccttgaagagttaaagaatgaatcagaacaaggtaaataatctgatccttttgctcctctcaaatccatctgagacaagtttttaagacgatgtttattttttgttaacagctgaaaacaagagaaacagtatgttggaagcattcgaacgcgagtttgaaggtaaccttaagaaccaaacgcatgaattcatatagaaacaaggatagtatataatatgacagtttggtttcatcttcttgttcatttttctaatttgcagctgctacaaatgcaaaggctaatggagaaaactgtaagaaagcttgttgatatttttccttatgtcattttctatcttttaagtttttgtctgagatgttttgtcacaacagctgcaaagaatccatcaaccataagtactacagtgcagaaatcttctggcggatacaatggtaatataatcttcagattctcacaaacaaatattttcccaaaaagaaacaagatctcaatgtttatatgttctttatttttcagctggtttagaaggtcttctaaagcctgcaggttagctttaaagcttattcattcttgtgaatgtttttaaccgaagaaagtcacaagagtgctaatcttaattgtcttctctctgttattgtttcttgcagatggtgtatgtggttgtttcaacaaggataaagatggtcttcaggcagacactgattcttcgattaacatagcggagatactcgcagaagaatccaaattacaggtttgttttatagatctttcttgaatagacaatggaaggctctcacatctaaaccaatctcatttttgtttatatcttttgcttttgactatggtagggctcagggaccctctcgctcaccacatcatttgacagtcttgttgatactcatagaaaagaaacgtanctaaaggtaggctc

SEQ ID NO: 43268 - DNA, 373 bp, Arabidopsis thaliana landsberg
gttcctggccgcccaggcgatcgccgtggcagcgagtgcgaacgccgctccggttgttttggctcggccgagaccggaggtggacgcgtctttttgcgccgtcccgttggcgatcaggtcgcgcgtgcgggccgcaccgacggccgtgatgatcgcgaggccgagagcgccgccgatctgctgtgaggagttgagcacggccgcggcgaggccggcgcgaccggcatcgacgccggcgttggcggcggtggtgacaccgacgaagaccggcccgacgccgagggcgaccagcagggtgcccggcaggatgtgcgcggcgtacccgccctcgaccgggatctgggcgagcaacagcaggccgtcggcggcgatc

SEQ ID NO: 43269 - DNA, 465 bp, Arabidopsis thaliana landsberg
  unsure (1)..(465): unsure at all n locations
nnnnnnnnnnnnnnnnnnnnnnnnnnnnnnnnnnnnnnnnnnnnnnnnnnnnnnnnnnnnnnnnnnnnnnnnnnnnnnnnnnnnnnnnnnnnnnnnnnnnnnnnnnnnnnnnnnnnnnnnnnnnnnnnnnnnnnnnnnnnnnnnnnnnnnnnnnnnnnnnnnnnnnnnnnnnnnnnnnnnnnnnnnnnnnnnnnnnnnnnnnnnnnnnnnnnnnnnnnnnnnnnnnnnnnnnnnnnnnnnnnnnnnnnnnnnnnnnnnnnnnnnnnnnnnnnnnnnnnnnnnnnnnnnnnnnnnnnnnnnnnnnnnnnnnnnnnnnnnnnnnnnnnnnnnnnnnnnnnnnnnnnnnnnnnnnnnnnnnnnnnnnnnnnnnnnnnggtgtggacaaaaaaaaaagaaaaaaaagtcttttttctgggggggtaaaaaaaaaaaaaaaaaaaagaggggggggggtgtccccccccc

SEQ ID NO: 43270 - DNA, 222 bp, Arabidopsis thaliana landsberg
tcaacgatctgctgtcttgagcggcatcggggtcggcttcatgcccatcgcgacggaagcggttctgtcccatgctctgtgtctgggtgagattggtgacgaacggctggtcgaacggctggtacccggtgagcgggcggtacgggttgatcgtgtggtcgatgcagagcttgttgtcggcccagatccggatggtggtcctggtccactcaagcgtataca

SEQ ID NO: 43271 - DNA, 1039 bp, Arabidopsis thaliana landsberg
aagtaatgtgagaaatgccattgcaatttaagaaaaacttaaagcatagagagataaaaagctgtctcgattttccgcaaaaagaattgggttcccgtgactcttctaagatctcaagtactcccgaggagaatacaaactcataaaagtaaaagacattttgtcctacaaacttggcttaataactataaaagctcaaagagtttctgagagcacctgtgattaaaaataactttgatttctgctgaagcttccaagaaaagctttctggcttctcaaacatctgatcatctgatctcaaaggacttcatgagcctttccatagtatcggttaatgaatggggactgcaaaaacagaagaagcgaaaaccagatcattcacatactcagagctttgtaacaaactataatcaaaaccctttttttatcagtatcctatttgttagactgaaacagatttaaacaaattaaaggtggatttttgagctttttgttttacctggacaccatagacgtctggtgtatctggtgaaggctgagggtagaatttgtagaacttcatcttttgaaaggcttgcttagtatcttcgctcatttcttctattgctttctttcgagcatctttggcctctcgatttgctttctttgctgctcgaacttgctctttgacatattcctgagaaggaaaaaaacggtaattagagaagttactcaagcgtcaaaaactgacagttacgttacacctcactcttactttgaattcatccgcttgttcagcaggtaatgcttcctcttcaaccagtttatcgacaaattcctgagatagaggaataaaaagccatctcaagattcagcatacaatgaatgcgatttcgaacacacaaggaaggagcagtgcaaagatgacaattatctggactcaaatgaaggaaaaaaacaagttttatcatcacaaaaaagccaaatacacacctgaagttcatcaaactcccagtcaaattcacataccacctgcacaaacagaaaatcaaagcttgat

SEQ ID NO: 43272 - DNA, 612 bp, Arabidopsis thaliana landsberg
gttaagaaaaattcagttggggtgtttttggaaagatttttcgagttttatctaacaaaactaaaattttgggacatatggtaatttttaattaaatagagggatgttgttatcgtacgaattgggttggtttaaaactttgtttggacagattcgactcaaacgttgaacgcgtttaaaaaagtcaacaaaagtcgaaggttaccggctggtcaggttaaccgttagagattaatgaactggcagctgtatgtcttttttatagttctgtcttaacaggcaaaaaagtgtttaatttatctttcctttgggtttctcacggagtcacggttcctcgttcgtcctctcccgtcgtctctccggtgagtccttaattttccggcggtctttttccctttctcgtctgtttggtgctttctttatgtctgaggcgaatacagcaaaacgtatctgttttggttgttgagttcgaggctggtcctgaaaattcggtgacaaaaagagtcaataactctcgtgatcgagttggatgcgttgttttgagggttgattcagtttatgactatgtattttggtacttgcaagattttctgattttatgaagattcgtgt

SEQ ID NO: 43273 - DNA, 690 bp, Arabidopsis thaliana landsberg
tttccgaacaccttaggagaataatcttttacggataagaacatatttatccactctctatttagggaaatgcatacaaagcatttagggaatattttaaattatttcttaaacaaaatttataattgcaaaaaattaatgcttaatgcttaacacatcaagaattcattcgttctattacaattgtatattacatattttcaaaaattctatattttgtaccaaaatctggtgaaaacataaaaacagagagatattgtagttttcttaatagagccagcaatggtcaaatatatcatgtgaattagtttctaaaatacatcatcgttttcttcttaattaataaaacggtcaaataaaaaatcgtctccaatctttttctctctctggatttgccaataaattggggataaccagctaccaaactcattcacacaaagtcataacagtcgtttaaagtctgatcctttcttttttatttttctttagtgtgtgagaagagaaatatagttatggcggagatctcgggaaacggtggtgatgctagagacggagcttgggtggtcaatctcaaggaagaagacgaacaacaacaacaacaagctattcataaacccttgaagaaacaagactctcttctctctatcttctgccctttcttacaaaagggtttttacttttgtctttact

SEQ ID NO: 43274 - DNA, 188 bp, Arabidopsis thaliana landsberg
ctgggttgaattctttgactcagacacccatagctctttgacaagatcacattggcctagcatgggcaggtaccataccactggtgtgttttaatcaaacagtcggcctccccttgtccgctccagctctgaactgactgtgcaacgcccctggtaagctaaccagagagccaatcccatatcgtccc

SEQ ID NO: 43275 - DNA, 735 bp, Arabidopsis thaliana landsberg
ctctacgacgtctttttttatcagcagaaaactactaggtaacaaaatatggatcagtcacctagaactttttaatggacgttgtgaaggtaaaccacatttttataaattcaaagaaatttgcaagggttaagagacttgaaagaaaagtaccgctttgcacttcttcccacaaaaagaggtgattggttcagtggtatcagctggggtaacatttgccttgggcatgcatgatttgtgatctagaaattgagaacgttaattacatactacaaacaaaactgagtgaaaacaaaaatgcaatattcaaggcagggaaggaataatgacatacattttttctcacacattttgcaggtatttgcacccacagtctgagtaacatcttcaataactgccttacagaatttgcatgtacaattggggcaatgccaatcaccaagaggaaacatctgtaattgaacctcaaaaagatccaatcaggcatcagatgaccctaaaacaaccgttcaaacaaccctggtgtaattaaaagtcaacgacacttcagctcaatagagtttacatatgtattgagtcttgtccgttcatttagctaaaagtactattgttctaaaacctgtttatacagagcaccttataaactattgtacctttgtaaatttgcatagcttagcactgacttctcaaaaataaccaaaataagacatatacacagcaatatcagcatacccg

SEQ ID NO: 43276 - DNA, 741 bp, Arabidopsis thaliana landsberg
agtactttcgtcgtatcgttaaggttctcttactcataaacatctcgagcttatcgtggattgatctcagatataggtcgatttttagatagattcttcattctcttagatcgaattacggtggtagaggatgagaaaacctcggatttagctgaatcgatttgatattttggctccgcagtgtcacttagatttagcaattactgatgaagtggctgtttagatcactttctggatattttgttggagtgttatgatctgatgattaaacaagattgtttgaggattctgtaacatttttcttcttatgagtttaggaatttgtaagcattgatgtatgaatggtgaaatttgtttatgtgatcatacactatgatgcatattacattgtgttcgagtttgactattgggctatgaaactcttttttcgttctcagttttgtgatcagtccttttttggtcattgcagtggcagcaaatggatgttgaatatactttctggcaaatgcttaacctttgtacatctccgaaagttgtgtaagtctttgaaatactttcatttcctatcttgaaggttccttttgaacgattaccatcaaaatgttccatttgaaaggatgataagggaaaacctagaacttgtaagggttcttaaaatggcaaaaatggaaaagttacccaggcttttactagagggcggattaggatggaattaccatttaactgtggttctaggtggat

SEQ ID NO: 43277 - DNA, 1149 bp, Arabidopsis thaliana landsberg
atgttattagtattccttcaactaaaaaaaaaacactatttaattttactttatttttgattatgaaaatgtagcatattgtaaagaaacaattcatttatttatttttgaaacaattcatttttatctttaaaatgaaagaaaatatgaaatttgaagcaccattagtaagtaaaaaaatgttaacattcaacatggcatgcttctttccctctttgtcttatgctgagtagggaaacgtcaatccgattttttttgttaaatccaaatatagcattccaagcctactacttcagaagttctgaatgttcattaaatcattgatttcacacacacacacacacacacacacacacacacacacacacacaaaacaaaaacaaaaacaaaaaacaaaagaattcaagatcatggtaaaggttaagtcattagcaaaaaataaaaaaaataaaaataaaaatagaggtttagttttcatcttcatatttgtacctcaacatgtgccattcaggcttgcctcaaagaaaagtcagggtcactgtctaacttatagaaaaattcaaattatcatctatatattcatatttttgaactttggctcaaatatctcaacaatttcaagaaatgtaaaatctcaaaaaaaaaaaaaaaaaagaggaaaaaatgggtcaggtatcagagcatctacaactctctaggtaagagattctcacataaagaaaaagttgaaaataatattatttaatttaaaaatggcgaaaaccccatgggacgggtattttaaaactggtttttatttaatgtgtcaattctaaaattttattacctatataccaatgtaaatgaaatagtcttattgttattttcttataatcatgaaataaaattatctttatattagactccattatgtgtaatccaaattatatattaacattattttaattgatattaattagaagaactgcaaaatattaaactaatatttttttaattgggattggatatctttaaaagctaaaggtaactaacacaatacattgatgaatatatttacatttaaaacgcaattgaatatatatttgaaaaaattaatgaaagtttttgcataacaataatattaaactatttatatcatattggagaaat

SEQ ID NO: 43278 - DNA, 895 bp, Arabidopsis thaliana landsberg
ttagaaactctaacaaattcttttatttaacaaccttcctaagcttaaagtttgttattgttttgtatttttcccaaagttttagtatcttgatattttaagatcgttctataaatagatttgattttgtaagttgtttatattgttactaggcctttgtataaataccaaatactttgattatttttttactgatttcatgtcaaacaaaattccaaacaacttaaaggaaaaaagcttaatcgattggaataaaactgtacgtttaacaaaatgatattagtgaaataaaccagctcaacattctaaggatttctacgtgtatatacagtaatcgtgtttagtattaattatcaatcaacatcattacagagctatattttagcctcaaaaaacaaaaatccaaaacaacatgacgaaattgacttccacatcgtgtcctttctcgtcgacataaaaactttaaaatatagatgcatgtataagtatactcactatttgtgtcattagtattttcttttttgatacttggagctaatgacaaaaattccgctagaaatatcttctccaacgatagctacaaacaaatactaccattgcgtcatcatcacttatttatattcgatatttcagtcaacaacactaatctctttcaccaaaatctttggactattattacaaatgaattaaaaacttggacccttaataagatatttgtttcattaaatctatacaactcttattgaaaatgatattttcttaaatcaaaaattaatcaaaattaaggtaggctctagaggattgcatcatttgcccacccacattagcctgccattattattggacggtaacaaatttccttacacaataaatggtaagttacaattattattaa

SEQ ID NO: 43279 - DNA, 687 bp, Arabidopsis thaliana landsberg
gaaccataatgttgactttttgatagaaaaatatagtagtttattaattattacctatcccaatttttatctttcctttttaatgtgacgttatatagttctgggctcttaacaaaaacatatataaatagtcatttcgtaatttcgatattttgttggttggctagtgaagaaattgccttaagcgcattatcgttttttacaataaaattgactcatgaaatatgggaatgagagttctataaaaattacattttcggtaggccctacactgatgactataagggcccataaagccgtaatgggcttaaaggtggaccacatctggaccataaaaccaggctgtctaactggtatgcagctgtagtccacgtgtcatatcatttcgtcattaagaaaaattcttactaaattagtgattcaatcctttaaatccagtggtccaatttttctttccataaagagttaaagactatactaaaaaaaaacactgcatcattatatcaatcaaaaggctaaatttttaactgttcacgtttttaatattacgtatatagattagagatcatgggatgatcattagagataattgatgattaagtatgacacgtggcggaatctccacggtacttattatacaactgcgaatttgtagggtttgacgtacacttctgaagtgtgatcttt

SEQ ID NO: 43280 - DNA, 314 bp, Arabidopsis thaliana landsberg
tcgtcatttctgtcgtgccttgcacgttaaattgctcaaaggcgacgcagttgattaaaagcgagctgaaaaagtcatcaaatagtagtggcggtattttaagtacaccgttcttgagagttatgtcaagaggtgtctcaaaattcttcttttgttggaattttattcctcggagtcgaagttttctagctgagacaaccaacttgaggaaacggcgaggaggcggtgttagtggttttggatgtggttgtgttagtgttggtggtggtggtaatacaaattaatatattttgttattaggttaatttgtatta

SEQ ID NO: 43281 - DNA, 539 bp, Arabidopsis thaliana landsberg
tcgtaaaagggagatccctttccaaagaaacacattgaaaattctctttagcttattcataattattattctgagaatatattaaaagaatgaatgtgatatgtatatgctttctcatgaaaaaatgacttcaacctttctcatgattgtttactgaacgaatgggttgaattcgctttaacgataattctactttgacattttctgcctcacttgagttttcaaactgatattgttcgagaaaatgtatttacgaaacaaacaaagggagttttatataaatatataccaacggagccatgcgagtactaaatgtcaaattttggggtatattacatatttggaaaagcttggtagatgaattattgacctcttttctcttatatccaaaaacaattattggcagcaaagttgtctcaattatcgctttgcattaacatatgagaaccccacttacagtccaaatcacacctattacatatgggatatatatccgagaagatccgacaattagagacgagaagttagaaatatgaata

SEQ ID NO: 43282 - DNA, 163 bp, Arabidopsis thaliana landsberg
gctatggccatggcagacatgggctttcggactgaaagcctttgcgtggacttttttctcttatcgggaatacgtgcattagggggtgtgctggtcacaatctagtttttgtttccataagatataagccatcattccaccgtatattcgttagttttcagat

SEQ ID NO: 43283 - DNA, 189 bp, Arabidopsis thaliana landsberg
tcctgccttcatccgagcggactcgcccccttaaaccagccgttgttactaccgtccttcaggatggtgacgaacacgttgtcggaatttgtcacgacgacatcatcgccttgcctgtagaaaagatagtccgtaccaccgccacccttcggattccatgggccttgcctaatttcatccgggttgtca

SEQ ID NO: 43284 - DNA, 328 bp, Arabidopsis thaliana landsberg
gcctgtcgtgcgccgcgccgcgcatgctcgcaacatgaacaccgtgcacgccaagttgtgggcatcttttgcggtgctgctgctgacggcatgccagagcaacgcgccgcgtatcgagcctgaagccgcgccacgcgcggcggccgcctatcagtcggcgccgctggatcagcggcccgtctaccatgtgcaaggtgaacggtcgcagaccacgatctacgtctatcgcgccggacgtgccgcgcgcttcggccacaaccacgtgctgacggtgccgcagttgcaaggctgggtcgcggtgccgggtgatcagctgaacgcctcacac

SEQ ID NO: 43285 - DNA, 2719 bp, Arabidopsis thaliana landsberg
caaaaaatacagatgtgtatacatgcatgtggctgtttcttttcttattctttgcacgtaccgtatggggggcgatgtttctgccctatgttaaaaacaaatactgtatatagtttaccacctctctctctcatcctcaaaatctgtcttgattatggtataattattgagtgtggttttttgggtaagcagatcaataatgaccaccttgagaatgtaactcttagagaagagcatgacagattgctagcaactcaggatcagcttagaagcgcaatgctacgtagtttatgcaacatttgtggtaaggcaactaattgtggagacactgaatatgaggtgcaaaaacttatggctgagaatgctaacttggagcgggagatagaccagttcaattccagatacctttcccatcccaaacaaaggatggtcagtacatccgaacaggcgccttcttcttcctctaatccaggaataaatgcaacaccagtacttgattttagtggtggaactaggacgtctgagaaggagacatcaatttttctgaatcttgccattacggctttgagagagttgattacattgggagaagtggactgtccattttggatgatagatccaatcgttagatccaaaggagtatcaaagatctatgagaagtatagaagttctttcaacaatgtcacaaaacctcccgggcaaattgtggaggcttcaagagctaaaggtttagttcccatgacttgcgtgactctggtcaagactcttatggacacagtaataacctttaaaccaccacccattttttagtgaaatgttgttacatgaaatgttaacaagttttttttttttttttttaaacagggcaaatgggtcaacgtgtttgcacctatagtccctgtggcatcaacccataaagtgatatctaccggttctggtggaaccaaaagtggctcactccaacaggtatatatatagttttctgagtcgtctatattggttgataatccaagagaagtagaaacatttcaaatttgtgatcatataattttggcagattcaagcagaatttcaagtaatttctccgctggtaccaaagagaaaagtaacgtttattagatactgcaaagagatcagacagggcttatgggtggtcgtcgacgttactcctactcaaaatccgactttgctgccctatggttgttctaagaggctacctcaggccttatcatagacgacctgtccaatgggtactcccaggttacttcatgaatacatgaactttgaacaatatatgttggttcacttttggtcgcatggtatagatttgataacggctttctatagcctagctcaattctcacatgcttatgagatttttttttttaaaaactcaaaacgtgttattactcgcaatcataattaatgatctatcagagcatcttggacttgtactgtggagacataaataaatgtgtaatggttattattatattcaccacatgtataacacatagagatttgatttcacaggttacatggattgaacaagcggaatataatgagagtcacatccaccaactctaccagcctttgattggctatgggatcgggctaggtgcaaagagatggctcgcgacgctgcagagacactgcgaaaccgtctcgaccctttcatctaccaacttgactgaaattagtccaggtgaaagctatttaaattatagaataaatctcattacaactactttttaggtcattttcggttctccactaaatttggacaggccttgattgtgatatatgttttcgatataggattgtctgcaaaaggtgcaactgacatagtgaagctagcacagcgaatgactctcaactactacagaggtattacgagtccttcggtggacaagtggcagaaaattcaggtggagaatgtggcacaaaacatgagtttcatgatccgaaagaacgtgaatgagcctggtgagctaactgggattgtgctgagtgcatccacttctgtttggctcccagtgaaccagcatacactctttgctttcattagccacctgagtttcagacacgagtgggatatcttgaccaatgatactaccatggaagaaacaatccggattcaaaaagcaaaacgccatggaaacatcatctctcttctgaaaatcgttgtgagtttcaaaacatttatttttggtttaatgagtgtcgttttgtctatgtttccattgattttcgtgagttttgcaatgcaaacagaataatggtatgctggttctgcaagagatttggaatgatgcatcaggtgcaatggtggtgtatgcaccagtggaaaccaattctattgagctggtcaagagaggtgaaaattcagattctgtgaagtttcttccttcgggattttcgatagtgccagatggagtaaatgggtcatatcatagaggcaatactggtggaggatgtctactgacatttggacttcagatcttggtgggcatcaatccaactgctgcactcattcaaggtactgtcaaaagtgtcgagacactcatggctcatactattgtcaagatcaaatccgcgttagatttacagacgtaaccatcagcagctccagtttccgttgttccgcaggaaattcgacattggcttgtgccctagtttgcttttccaaccaagactcttttggattaacttttttatg

SEQ ID NO: 43286 - DNA, 518 bp, Arabidopsis thaliana landsberg
tgtacctttgtttcagtttcacttgatgaacaaatgtgtactccagagtcattgaataatttagataatgtaactatgaccattatcatcttctaataacttataagcttccagaaacgatatatgttacaaatcaatttttaaaccttccaaccaaaatggagtttttagaacaaacatgtaaagttttcatgaaatcagaactaatgcattcaagaacaatgtgttcaaattcttttatgggaaacatgattcttagcaatgtgtagtagaaataattgcagcattgtccatgagtcattgctttgtattttgtttcagaagaactgcgagaaataatggactgtttctttgacttcccaaaaaacaagagaatcccctataaagatgcagaatccagtcagaatcaataaaaccacaaagagatatatctagagcattaaaatagaataaactgtaaccaatgctcgtatgagatattgagctaacataagaatcttgtgacctgtctgaaaatg

SEQ ID NO: 43287 - DNA, 565 bp, Arabidopsis thaliana landsberg
gcaaatacttgcggatacgcgttgtgtacaacaagtaatttttgaatctagctctgttttggatttacaggctttcttcatgtgcatttattgacgttgaagttttctattaggttagaagccattgaccgggacaggaagctgtttcttgtttctttgtacttcctaatctggggtgaagctgctaatgtccgctttcttccagagtgtatctgctatatatttcacaacgtaagataccatattgttgttgattatacaccaattttccgctatcagtatactcatgttttgtttattagtttgctaagtgatttttttgtttcgtattctttactgtggaaaaatctaaatgtctaggttttacagattttgttgttagtgttgttttgctgttcatatatattgtcctcctgtaaaccacacacatctaagccaagaatagacttgtcagaattgctgtagcatctgatcgtctctgcatcgtggcactttgcttctgttaaacaaccagcctgacatagtttaatttagcaagttctgaaatgatgaaaaatgaaggcct

SEQ ID NO: 43288 - DNA, 556 bp, Arabidopsis thaliana landsberg
tttagtttttggtttgtcaacacttgtgacgagtctaaacatgtgtgttgggcttcattaaggatatctatacttttgaaaaattatttctaaatcatgtttaagcctttagccacatttcttaaacttctgtccaataaccaaaaaaaaaaatttgtaatatttttattttggtttgtcatttccttttaaaattaagctaagtggtgatatgaaaatgtaaattcaaaataaaaagggactctataaaaattaaagaatcttagcatgcgaaatatctataaatttaaaatcgtcttaacaaaaagacaaacattttccaacattttattcaaataaataaaaatagatttgtgtcggcaacaaaaaaaaatgaaaaagtttttttttttcccgacaaaaaaaagaacaatattctgggacagttccaacaaagctaccatcagttgaaacaaagagcaattatatcccaaaaatacaaaaactgaaactgtccgaaattgaattcacatttgttatataattagatatggaaacttactggcattcacagatc

SEQ ID NO: 43289 - DNA, 573 bp, Arabidopsis thaliana landsberg
gtagcgcttgattctaaaatagcataattagacgaaaaagcatgcattttgtaacattttatactttgtaagtaaaacacataaaaaataattttatgaataagaaatccacataaaaaaaaaagaagtaacatactgtgaaaaattaggaaactttttgaggcaccaattttttatgccactttcaaaaaagcattaatgaaaatttgtttaaaatatcattttaaaatttgacgtacaaaagtacaaaacctcatacaatttcaaaactttacaaagactcaataacatgtgttatagagactttataaactttcttataacatactctataattttttatatccatatatttgtgatatttttgaaaatggataaaataaatttgatatttttataaatagaaaatattaatggtatttttgaatttttcccaaaataattattagtcttatactccaaaatgtaaaaaaaaatcactttttattaaaaaaaaatacttaagcatttgcttaattgctagtcgtcaaagttttgtcattttatgcaaatactaaaaaaatgtagaaagca

SEQ ID NO: 43290 - DNA, 646 bp, Arabidopsis thaliana landsberg
atgatatatatatatatatatatatatatatttttaatttattgccattgcgtcaacacgtgtttactaaacacataaacaacgatttgtctaccttttaaaaccgataaacaatagtttacgagtttaatgctctaggcatttaccatagatggattgcacgatatattttgatttttttttgtttctttctgaatttgtaaaaaaacatatgagatgttacatgaacaacaacttaaaagaatcttctcagccaacgaaagccttctatctaatgaggacctaaacaaaagccaaaacaactctttatctttcaaaaacaaagctgcgagaaaacaagaaatgaatcaggtttagttttaatcgtgcaaccaaatctcgctcttgcatattacggcatatatagcgacaaaattattatttttgtatcgccttgtcaaattcattgctgcaatacataaatcatcgtgcaccaggatcttgctgcaccattattctaaggttaatttagctagcaatttgactttgtcttcttatttttatttattaaatcagattttatcagaatctaatctttacatatctaactcaaaccggatcacttggctagttggctccactcctgaaattggtaagtgtttgaata

SEQ ID NO: 43291 - DNA, 722 bp, Arabidopsis thaliana landsberg
ttttatggaattcgcgctcaccatacatttttttttttttttgttaaagggataagtttagattttggattggattcacctggttaatttaaaagaatgtatgatgttgactactgaatccacatatttcttaatgaaagttgaattataactctacgtacgtaaatggaattatcaataggaacaaaactacaaaatgaatggctatgtcttgatttctgtgtcttcaaatttaatttcttaaaatgagcgtattagttatatttataattaaacttctttgtttaacattttcatccatttttacatcggatcggatagtggctaataccaaaggcaacgtgtaagaatgtgaaccgcaatagctcaccagaaagaactaaggttaaagcagattagtgaaatgaccaaatatttgccaattaaattgagttgggagaggtttggtcgacattaattataaggttcacatttatgtgtaatgtgtagcatgtttatgattaatgtaaatgacaacattgcctaacagtacaaaactgaaaattgggatcactctcaaaaatagtattttgtagttcgtttttatattcaaattattataaccttcaacaaaaatttgctggttttttctgcctcactccagttctcatcacaagatcaaaatatggatcaaaggcccggcaaaatactatacaaaatttcaaatgatttttattttattt

SEQ ID NO: 43292 - DNA, 570 bp, Arabidopsis thaliana landsberg
catttcacactttgatcacatactctatttggttaccataaagttaagcatagagattagagatgactaatgtgtttggcgttactgtatataataatcagacttgtgaagaaattattttcccaaaagtagaaaacgaaagtgacaagtggcacagaggatcaataagaaacacagtagaccgcactcttaaagctttttgcagtgtccaacgaactcaaaagcccaacaaatctcaaagcctttttattacttttttcccaaatccgcagattcttcttcttcagctttgtatttcttctcctacagagagagacagcgagagaaagatcgattctgtctttatacagacattatctcccactcattctctgtgtcgcttgaagcagcaagagagagagagagactgacagagacagagttaaatgcgaatttatgggtttgatctatacagatctgtgtaccctaatttatgtctctggcgtaacggtcatatttaaccccatttcaatttgagctcttcatcgctgcgtttctgtgatctcggagctcttccaagagtacgtctgt

SEQ ID NO: 43293 - DNA, 191 bp, Arabidopsis thaliana landsberg
  unsure (1)..(191): unsure at all n locations
ttcatgtctgtatttcctccccctatattatattcttaanaggtgacctttaatgaatcaggggggctcaaatgtaagatacccaagggccaaaactaccaccaaaaatnnnnnnnnnnnnnnnnnnnnnnnnnnnnnnnnnnnnnnnnnnnnnnnnnnnnnnnnnnnnnnnnnnnnnnnnngaaatgggg

SEQ ID NO: 43294 - DNA, 763 bp, Arabidopsis thaliana landsberg
tttaaatgcttagtaatcttgaatcccatgcgtggaccatgtagagtcttggattggtgatagaaatcatgaacaagctaggtcggatgatataatcaaactataatcatcacaaaaattgtgtgaacatgactggaatccattatcaccgtaataaaagtttgaaacggaatgaatacaatattgagatgctgcaagataaatcgatataattaatgctttgtcttttctttcttcttttaagccttaagtgtcacaaacgtaaacatcaagattcaataccataatgatataaaagatcgtgcgtgaaccatgtgaatgtgatcaaacccaaagtgaagctaacaagtaataacacatgtcaaagatatacaaacatttgtatttagagtgtataactataaccccatcccaagagtgtccaaccaaaaaccataatctaagagatttataccgatcagatcacggaagaagttatagaaaaccgcatctcgttgattctggttttcgacaaataagatacaagccagcccaccgtctccacggatactcaacttccctgttggtaatcgagttaatttgaaatttcgaattacatgagtcaaattagaacaactgtccttgatttgattgtttttaaatgggccatgaggctctaatgtccttattagctcatatgacttatgcattcacgtagttaatgggcttatttaaggccgactctataatagactggaaataaaaataggcccatcatactaaa

SEQ ID NO: 43295 - DNA, 405 bp, Arabidopsis thaliana landsberg
caagtgggcaggtttttgcactccaagacgccacagacttcttctttcttctcgaatgctaccgtcatcggaaaataatacgtaaaaaataaattctgataactactgacttccataaatacattgtggtaaatttgcttgcagcgtaagtgtttatgaaaaagttaaagttgtcataaatcttctgttccttttgcgccaacatatttttaaacagcagtcgcagtagaaatttcataagaaaaggtaaaacaaatttcaagaaagtaataatcaaaacattcactgcacactctcaaacgtttaccaagataagtactgatatccagtaataacatttctctgttacttttactgttttacatggactagcaaacattagtaaacaaataataacctcttgaa

SEQ ID NO: 43296 - DNA, 363 bp, Arabidopsis thaliana landsberg
cttgcccactcgatgccatcgccgttggacgtggccgcgcgcgcttgctgcaccacctgctggcgtgattagcccacggtgttgctgttgctgatgttgttggacgtggtggccaaacccgcttgcgcggcattcagcccactcagtgctattccgtaaatcgagtttgacataaccggttgtcctatacgctcttatcggtcttaacgactgaatttccgcaaagttgaggcctgatcgaaaggagtcaacggtgcatgggctgtgggcgctgcagtttcctgtagcaactgcctggcaatttctccagtcagtcccaaacccttgcctgaaatggactgcacaatttgctgatcaatcatt

SEQ ID NO: 43297 - DNA, 1514 bp, Arabidopsis thaliana landsberg
gctgtaaaactcgccggatgtattggtagctacgtcacttttcccagcagcttctacgttgcacgaaagcttcggtttgatcgaaaacctaggcatgggcaaactactcggtggcggagataataacatgatcgctggaccggggtagccatcgaatccttcaggaaaatcacgcaactggttcgcctggatcggcactgaaccggttcgagtcagtctcgcagattcgatgaactctgctttcttcatgtgtgtttcagaaatagcttttgtctgagcaacgcgattgagagaagagttgttgttgacacgtggtcgagagctgttgacgcgttgcagaggaacagttgagctgttgacacgtggtagagggagaagaggaggctgagagtaactatgcggcggcggatatgccggagaagatccccaagacgacgttggattaagaggaagagccaaacttcctccggatcttgaaagagaaccacgagaactctttcttttagggttcttgaatggtctcaaacccgaaacttgtttacccggtgcattttgaactgctattgtttccattgattataatttggaaattttaggtttttaaaaacgattaaataagatttggaaggataaatcaaggaaaaaacagagatgtttatatacgttttagtggcgacgatctatcaaataatacgatcgaaaaccctataagtttgaataaaatttaaaaggtttatgacaaagataaaaattagaagtttttaaaacatattaatcttcaaattaattaactctcataacaagatccaaaggatcgttttgatagaataaaaactttctaaagaaccctaacctcgagaggacagatgttgccaggcactgagcacggatgtttctttttataatcgaagctaccaattatttcaaataataatgcgtatttttaaaatgtagtattttgtaaagtattaatttattttagactaaaatatcgcagtttttaatgttatgctagcttgaagattgcataccaattgcgcgatagagcacaagtcccgggaaacactgtaggacggtcaccgccgattgaaactgaaccgttggatcgtgaaataagtattacaatagccgctgagagaatctgagccgtgtgattagggatctgctttaggcagatcttgaccatacacgtcggtatcatcggtggctttcttcgttgatgacctcacgtggagggaaagtgtgggtcccagtcaattccgtcattgtagatcttgacaggtgtcatcacaccagccattcatcgttgtcgtgaggttttccaagaataggattggtcggtctttcatgcatggttgcatgtgctttccttcaaaataatacgaaagggagaagatattagatatcgaatagtattttctatggtggacattataatagagagcatcaaccataccactacgatattgtctattgcgtacataaaaaattttaagaatcgttctctgatattt

SEQ ID NO: 43298 - DNA, 819 bp, Arabidopsis thaliana landsberg
tgccattgctagcgaataggcttaaggtggtgtcaacatcagcagtggagggaggaggctcagagtctgccacgtgtttgcttggagtggagagggagtcttttcgtcctaatagcacggaaatgagtgggcctcccgtgagagccacggtgtctctggcggagaggatgatgacgtcagagcatgagacttgcttgggacactcatgctccagtgaggttttgatagagccaatcaggtccctctttttgattcctaagttctcaactgaatcaagctcagtgaactgttggtcccacttcgctcgagtaggattgatgcgtcacatccctgttacatgtaatatgtcccaacaattaatgatgatgatgaaatggaataaatacgaagaacaaattcgagtttttctccatctctttcaaagagtatggaaacgaaattttgtgacttatctatatcagaaaaaacagtgaatattttcatgcatgtgcttagtctctcttttcttttttttttggtcaagtgcctagtctaatctactattttcatccataaattgtaaaactcagattaacaacatgtgatcatctccaatatatcctcgaccattatatctgtttttcatacgtgtcagaataatgaaattagttttgctatatttatcaaaccaaataaaacaaaataataatgttgctatttagcttataattttattttgcaaatgcctataaatttaagttaaataacaacattattatataaaaaaacatgcctatgaatttagtcacaaaaccattatatcccatgttgtaaatgaca

SEQ ID NO: 43299 - DNA, 419 bp, Arabidopsis thaliana landsberg
gctgtcatgtctgttgctgatctggagattggcttaatcggttgtccaagaaaaactgaacagatttccttacctaaaacaaacacgtataaagttgcaatgagattacatatgtaaacttcgcataaataaagagtgagactgtcaggttaccgatgaaagatctccagtgggttgaagtgcttcaaggtctataaggttttgcatgacctgtaaaaacattgagttagttttcttattttcagattgagaattaacccttgcaagaaaaaattaccttttttgcatctttttcataaacagaatagaagagatcaagtaatctcttccgagtaaatgttttgatctctcccatcatgccgaagtcatagtagatgattgattcatctacatcaattgcaaggtttcctgggtgcgga

SEQ ID NO: 43300 - DNA, 262 bp, Arabidopsis thaliana landsberg
gctagacttatttatgaaccatcttgctatagtcaatgtgtactaaaatgctataagaacaaaaacaattttctagcaagattaaaaaaaatcatcttgacttttgatttcatcaactattacaacaatcattaaaaagttaataagttataacaatttcgtcatcattagatcaagaaaaatcaacaaactaaactttgattaccataaggtttttctcatataaaattactgaatatctagtatacatcttagacttaga

SEQ ID NO: 43301 - DNA, 132 bp, Arabidopsis thaliana landsberg
tggtttgcattcagtctactacaccgaatgaaaaccgacacttttatctcgactctggtatttctttcttaacggaacagatcattagggggcataaatagcctcatgagctgaaagccgatgcctttatta

SEQ ID NO: 43302 - DNA, 804 bp, Arabidopsis thaliana landsberg
  unsure (1)..(804): unsure at all n locations
gatttacttccaggatcaacctacataaaattcaacacacaataaaaactgcattaaagatatgaaccacagaaagagcactcagaacatggaacctaatgctatttcatcaattaatataacaatatttccatgcattttacattcaatctcagatgcaaacaatgcaaggaattattgcaattcctattcagactatcatatgataactgttgaatgagagatataacttaggaaattcaagagagagaaaacatataccgttcgagctttttcccggcaagatgccttcttcaattcaacttcaacaagagggagtccttcaactatatcatcagataccatggttagggttaacctatcagcatatcactacgcattacaacagaaaaataggtgggaaccagagaaagaccttgaatgcctaaggatgctccatcccgtagaagggaactgaggtcactaattagctttcgttggtccttgccttcacgaacatcaaccattacatcattaaagcgtgaaatccaagacaaagtgtcaacatgatactgcctcaggatattcaactcaggaacgttaatgctgaaactatcgaattcatgaagcaactcttcnnnnnnnnnnnnnnnnnnnnnnnnnnnnttcagaaaggttcgacaaaagagcttgttgttaatcacactgaaagatacagaacaaaagtacagccaacccccagacctaaagaaccagtcaaaactttgtaacttttatcacgggctgattctgatttctttaccaaatccagaagcccttgtgttt

SEQ ID NO: 43303 - DNA, 729 bp, Arabidopsis thaliana landsberg
tgttttaagtatcttaacagaacaaattaatggaataagtctctaataataatcaatgttgagttatcaacaatttgattaagaagatgagtaacaaagagttaacctcattaattcgttttgtcaaaataattcatggcgtacctaaattggtttggttaacaaaagtgtgtaactaaaaagaaaaatcaacaaaaattggtgatttaaagcgttggtgtttttttcggccaactttgaaaattggttattatttttttacattattccccttcttttttaatttttagaatgctttttaacttcagtcatcaattttcccattcatcttgatggaagtagattgctataagtttggcacttatttgcgctggagaattttatttagttatggtgaatctgatcaaaattctaattgtgattaattaaattatacatgttataaatataagcattttttaaacttaacttcttgctttcaaatggaatctgtagaaattataaacgaaaaaattgaaaaaatctgttattatgttaattatatatatactagaaaaagtctcatgcgttgcatgtgtgaaattaatttaatatatatataaaattatgtaactatatatcaaactgattgaactatcaatcatatatatgtctttactgaagatttttttttttttgctagaatcaactttgtttagtctggggttttttctggccgtgtggtggtct

SEQ ID NO: 43304 - DNA, 758 bp, Arabidopsis thaliana landsberg
agttccacgtgctgtcatgtctcttctcacagccattatatgtctgcgcgaatcacttcttaatccaacggctgagatttattcatcttcctattttatttttatttctcctacttggtatattattaatttacgtgtaagctgcgtgtttcggacgagtaacaacgcatgaaattaaaaataaacaaaatcaaaatagacaaaagagatctttttcgttggaatgaaaaaaataaaactttagtccaaatcctttttccatatttatcacaaattacatactaaaaaaaaatagacgcggtcaaaattctctctcaattctatcaatataaagacaatctctttctcattagggtttttaattttcatcatcatcatcactctctctgctcccaaattcagaaaaaaaggaacgatttttatttccggtgaatgagaattttctctcgaatttgatcgatcacatatttcatctgtgtgttttcattttgaggatgccagcaacggaatatcaaagatcattcgggaggtcttttctgaatttacggcgagacacggcggtgaactcggttgagtcaacgacggttacccccgagttgactcagatggaagcagagcttgtttcgtttcagagaaaagttgctgagaggtttatcgatctcaatgcgtctagttgtgaagatctactgtctctcgaatgggttgggaagcttcttgattcgtttctatcttgtcaagaagagtttcgttccatagtc

SEQ ID NO: 43305 - DNA, 536 bp, Arabidopsis thaliana landsberg
  unsure (1)..(536): unsure at all n locations
tattgaaangtttctaaaaacaaatttataatttctcatatacatattgtaaaagcttttttttttattatcattaatggngggtccaataacaaaattaaaaaaagtttctaatgacaaaacattggttctcccatcgtctctctagttgatccgataaaataaatttattataaacaaaatttctattaaaacacaatactgtaatttacttttacttcatctattaatttaaataagattatatatatatatatatatatatatatatgaataaaattagtacattacataaaagacttaatatacatacgtgacataattgtttaccataatatttagatgttttatcatgtgtacaagattatatgcatctttagcattttcttttctatataggcacacatcaacacaatagatgtaaataatacaatttatttaacacccaatatagtatacaaactttaagtatacacatcttcatatcaaatatattgaatacaagtaattatacactcacatnnatttgaaaattg

SEQ ID NO: 43306 - DNA, 1010 bp, Arabidopsis thaliana landsberg
taatgtaaactttcttaaaacaattatatccatgttattttatcgaagcacaaaagacatagagatttcttttggccctttttaaaaatttgatgagtgatcaacttcatcggctgatcattccaaatatcctgactgatttttattaaggtaaatataatcgacattattagattgatcgaatcgaactctagtattctactgtaatctcttagtctcacctcatacaatcgttgtgtgcgccatgccaagatcactaaatatctatcttgtacatgtgtagaaatcctccacgacggtccacatatgatccaattgggacattaacaagtatcacgtattctaatatattaaaagttgtaaaagtgtcatgttcgctaagtatgctcgccagtaacatcaactttgagttccaaaacatattactttttgtttcaatcatttgtgatttaggtagaatattggatcaacaaaaaaaaaacgatagcatagcattagcttgcatgtgctacatcaggacaaatgcagggataacaaaccaacaaatgtaataattaatggtatatgtatacatatatatatatatatataactttaaactttttgttagaagaacccaccatatatataatttaatatagtaatataatacatttaatcagattaatttcataattctttgttctttaaatctcatggtacatgataactaatgaatatttagtcgaatttcaaatatgacaaaattttatctattgtattatggatagaatggtagctacgatatcaccttctaacagttttcatctgtgaagtcttcctgtcacatactcttttaaagaaatattcattattccatatttttaaattcttaaagcatgcatgattgaatttatacaatttcttttggttataaatatctacaactaaaaaaaaaactgattaattattatgaaaaaaaggtttctttaaaaccgaaaaagaaagaatgcataagtccaaattcacga

SEQ ID NO: 43307 - DNA, 770 bp, Arabidopsis thaliana landsberg
  unsure (1)..(770): unsure at all n locations
agggtcatgtcctcttctccattcctcgtattcggactttggtcggtttttcgaccatggatctccacgaaacaagtccgggacaagaacgctatctcaaccaaaaaatcaaaaacacaaaactgaaatttcaacaatgaactttggaattcgagagagataagtaaacagagaagattgattacttatagccattgcaagccacacggtaagcgaaatcgcgtgtagctgaatcttgaaagccaaagacatcagagagtagaagcaatccagttccgttattgttcttcaccgccgttaaaagataaccttcaacaccgtcaacggacacttctgttccgttaacaagctcacacgcttcttcttcctcatcatcatcgacctccacgttaatggcgccgtcagaggtctcgagggcataaatgttcttcagagaacttcctctcctatagaagctcgtcgtgatatgtttcttgatctgacaaaacatgatcttatcaacatttcgcttatcaatgctatagactttaagtggttcaaattctgactgaaattggttaagacgagataattagtaaaagagaagattgcgtacagaggaagcaagaggtatgatttgtgaggaggagtggccggtggctgccgtttcggttgaacagtgactcgtggtgctccggctttagctaaggaggaaagagaggctaacgatgcagccattgtaagtatctttctagaatcaatatggtcaaagntttttcttttattgtttg

SEQ ID NO: 43308 - DNA, 581 bp, Arabidopsis thaliana landsberg
  unsure (1)..(581): unsure at all n locations
aacctgaaaaatggctgattggatccacgaggtaacttttcaacctctgcagcttccatccaagagcttgattcacagcaaattggatccataccacacactacagcccggtaacctaaacgaaacgaaaccaacataagttcctcattatgaatgtaaaccaaagtgagacaagcactgagataatacatatgaacgatgtaccaaaagttttgtgtctaagtttctgtcccaaacgaaatgcatactctgctttcnnnnnnnnnnnnnnnnnnnnnnnnacagctaatgattctgcctcaagctttgagatttcatctcgtaacttagctgccaaaccgtaatcctcactgtcaatggcattctggagatctgcactgcaatgatatcaaataaacagtgaagatggtatactccaatgtttacacatacacaagagaaacaagatgatgacgaatgaaactgctcaccgtagccttataatgctaatacccttgtcttgagcttcacttttagctgatgaccctcttttcccttcctgcagccttatcgactcctcttncacctaccaaccacagact

SEQ ID NO: 43309 - DNA, 484 bp, Arabidopsis thaliana landsberg
acttgttgattggaacaatattttgtctggcctctaatgtcgttgtactcatgtttgtttttatttgttcgggactttttaatcattacttaaatttccgttttatttaggctcttttgtgatggaggatactcggtcagttgcttcactcatggactctacatcatccaagattcagcagcttcagaaggcgtttgctgaacttgaaagtcagcgtgctgtaacacttaatctgaagtggaaggaacttgaggagcattttcatgggcttgagaggtctttgaagagaaggtttcatgagcttgaagatcaagaaaaagagtatgaaaccaaaacaaggaaagctcaagaactggtggagaaaaagaaggcagctgttgaggctaaggagaaggcggcgcttgaaaggcttcagaagaagagagacgcagctatgtttactataaacagtgctttggataagtataacaacgctcctgtcaga

SEQ ID NO: 43310 - DNA, 569 bp, Arabidopsis thaliana landsberg
atccgcattaaaccgcatcattccgattatttcattcggaaagagataagacatcattaaagaaaaacctcaaaacacatttattctatgaaagcattagttttgattttttactagaaaagatacagagatttagtaagtaattagaacagaaattatacaacgttggtcagaccggttcttagtcccactgtatattaaaaggaagtaaaccggcactcctcgggtttaattccataacatggtgaagttatactgatctggtctaaaccaaccaaactgagcttctcgatatactctcccataatatctccgacaacgtatgagattccgcaagaagcaacaacaatagacgtataataagccgcagatttgagataagctttagtcgatccacatgaattggttggttttcggacatagaccttgatcgaaccgagcaaaattacgcaaaccagagaacccaagaaaaccgagatgagcttgtagttcttgattccggtttcgtagaaggaaaatgcgtaaactaacggaggaattaggccgaaaaaaatgtaagacatgaccgc

SEQ ID NO: 43311 - DNA, 830 bp, Arabidopsis thaliana landsberg
ttgttatatgattactgaaatatgtatacttatcctagtatatgagatttctatttgaaaggtaacaaatttgattagaaaatgttaaactcctccttgtgaacaccagtagcattttaatcttcaagaattatgttctgtagccatgaacttaggcctacacaacaaaaacaaggttgcctgtgtcaatcaatacaagatgtgtggtcaaatgaagaatataactaaagttaggggttgaatatcgaaagatataaaaagctaaggagtcgaaataaaataatgaggaataagtttctcatttaattcttaacaaaataaactaatgttgaagtttatccatcccatcgggacatggtatctcttttcagaaaattcgaatctcacaccaataataaaaagaaactagacgacaaaaataaaactaaaaagtagatctccaccgtccatctaaaatccaacggttaataattgatacacacatgctttccgtgaatactttaaatacaagaattaatttccacgagtaaaaagaggagacaagcttttcttcaatttcgggtaaaccattttcgttctttcttcttttaacaagaaaccaccgctctgtacaaaacaaattctccgtcgtttcttctccgttctccggacaattcaaatttctcagaaagaaatttgtgctcgcgagttccgcgtgaaatacatggcaatgttggcggcgatggactcacgttcttctctccatcatcaatcgttccatgtttagcgatgaccctttttgccggtgtatcgtatgaaaaccatctcattacaaagtatctggtttccga

SEQ ID NO: 43312 - DNA, 263 bp, Arabidopsis thaliana landsberg
gaaaagctgttgagttcattagagaaggcaatggtcagtcctttgaatgactcagcacttatcaaactatataactctaatcttgctgcagctctacctggctgtgaaaaactttgggaaacaaagaagacgccagctgtggcctagggttggagaccaaaatacagggtatatgcatgcagtataaaaaggactacagtgcattaataacatgtttgcactggaaactgaagatggatcaaaagtctttgagggtatagaat

SEQ ID NO: 43313 - DNA, 525 bp, Arabidopsis thaliana landsberg
gttatatgtctgcccacataaacccttagatgagcgcggttttgttattcagcatcgcccgcaacgagtttttactttggttgttgcacaatcaatattcttttggtcaggttctccaaccaaaatgagtttaaatgtttctcatttgaaatccgctcaaccaagaacgtgtaaccaagtggtttgtttgagtgtgtagaggatcaagtctagagattgagttctaccatctacgaaaaccgtttatcattcatttttaactactgtaaacattttcaacggcaaaaaatacacgaatttctataaacttcgggggattaatcttgatttcggctcatgatctatctcggttattacaaaaacaaaaagggctctattatactgcgtttttatttgcttgactgtagaaactgcgatcttattatttggcaaaagtagtaatgcatataaacagtagaaacaacagattcagaatctgatctaaatgaaagatgaatgagattattatcactgtgacaggagcaa

SEQ ID NO: 43314 - DNA, 601 bp, Arabidopsis thaliana landsberg
acactccttacattttctaaacatccatggttctattttctttacgtcaacacccttcaagaaacatatcaaaacctgcatgagtggcttctacttttcagacttgtcaagctgaatcgatcagtttagccgaaaatctcacaaccaatcatacaaaacatttaattttggtggttcaggttcaatttctttgttacataattttcaacggatcttacatactaatatactagtagaccgtcaatattgaaattagtaagcaaattagagggttttttcagcctagagaatcgctgttaacaacttgaaagaaaagcaaaggttatgcactggacaatggacatagtcaaaagctataagcataacaaatcctcaactaaatattaattggatatcgggtaacgcttcaaaagaaaactatagtacacataataaataaattgattgcgtcctgtggggggtgcaaccccctagaaaaaccttttggctttttcttttttaaaaaatatatttccgcttttttatttggaaaaaataaaatttctattttactaatgataaacaattttttcacgaattaattttattagtgcaaaaaatt

SEQ ID NO: 43315 - DNA, 769 bp, Arabidopsis thaliana landsberg
cgtacattacagatcaaatatgtgtctaaacgagtcaaagcatttttcattgcaacagtttttccatgtgtgtttctgttaaattctacgatttttggaaagatcaaatccgtcatacactgatacacattacagaagtgacattcccatgaataaatcccaaaaatgatattggttttttttgtttggtataattaaaattgtatagtatgcaagaaaacctaaattttggacacttactcacttgagactatgtaaatgtgaaaacaatttgatcttacgttaatactcaaagcgaaatggtatttactatatagaatttactggaaccaaaaatctccagtggtcatcaaaagagaaaagattacaaaaccaaaagaaatacaaagaaaaacatatcacgatctcctcttttctttgttttcttctacctctcgaaaccatttactctccgtttttctttgtttgtttgtttgtttgaaaagaaacagataacaatggagaaaagcgggcgaaatctccgccgcttcatctctccatttcgcttaaatacgactagtccgatcagtcccacggcgacaagctttagcggtgaattaaaaaaaaaaaaaaaacgcattcttcaggattcgcttcttttatattatatacaaatacatattctagaagtcgatgattggttctccgattgtgagattgcgctccaccgtccatggtaagtggaagagtttcgctgtcacaaacttaaaaatcttattcacgtttatgt

SEQ ID NO: 43316 - DNA, 582 bp, Arabidopsis thaliana landsberg
atttactcactaaaccggattcgatttgattctatttccataccgaaactgaaaaccgaggacaattaaaacgctctcgatcggtttttattttatttacaaaccgaattggtcgaaccaggactaaatgaaattgtagtgatggttagttcaattaaattgagaaaagaaccggttcttagtcctctttcctagctgcttatcagacagattacatatgaattgctttgtacgctggtaacgtcaaatgactaaatgttttcaaatatagatacaagttttttttttacatagtttcataaatcatacaaattggatcagcaaacaccgaccggaatctctagagcatatacatacagaaagagagagagagagagagatggtcaatgatcaactaagctttggtgattggaaagatatcaaaatccccagtcttgctgctatgtatataactgacattcagtgtgtttaggatgtaaccttctccacagcattggtttcattgctttctatctctctctctctctctcaagctgtctttactttagtcgaagtatcttttcctctccggagccataagtt

SEQ ID NO: 43317 - DNA, 599 bp, Arabidopsis thaliana landsberg
tttgtattcatatgtttttatttatagtttagcccatttgccacgggggatctggttccatacttgcatggtatagtttatgatattacacacaaaaccggataaagattttacaacttgtttcgcttttatttaatatttttgtttgtttctttacataggaaatataactctaattgaactactttacataactattaatacatcctacttcgcgttttaaattgttaatgctatatacaaagaaccaaccaaaggcggttcgaggggagacgtaagagacagtacaagtttcgtctattttggtaaagaaaatcatatatacacagtttttgtcgctttgtagacactagacagaactttataacatgcaaaagtgagtatttaatgtatttgacacaggcaccgtatatagtagattctatttattttgttatgttttagaatcttcccaaaacaggaaacaacgtacgatacgatagttttgcgaataccactgtcctgaggcaagtacactggtcatagtggtcatatttaattactttaacatatacggagtatcataagtaaaagttagcaatacatggtcaaagaatatt

SEQ ID NO: 43318 - DNA, 876 bp, Arabidopsis thaliana landsberg
aaggtgattaatagtgtggggttaactcactcaagatacatcaaaaatgggcatctcttattattagttctcaccaacagcccagtaaactatcctaagtacaatttggtctatcaagagacgattctaaaggtcaagaacaagtttttagctatagaagctctcgggagaatgaattctcacctctagagccagattaggatgcccaaatcggaaatgcatcattcccagacatagcaaaccaatctcgtaccttccatacatgctgcagccagttgaaggaggaacaaggtcaaatccctcagtccctgcactttaaggcaatggatcatggatcagctcatgtttgaaacaacgttcctagtgccaaatatctaacaggcaaacacaactggatatttacaggagtcacatgcaaacaataaacgatttcggcagtaatattattcttaacataaatttttaggaaacagagaaaattagcaaaaagtacagattacctgtaatcaaagtaacggaggagattatccaaagcagcaaagtagtcatcactgtgaagtttattcaagtaacgcaaaaagtgaacctgcattgttgcatgtcgtgatgtaagaatcaaagcactgaaagaatgattaacttctgatttaactgaaaataaaatacaaaattgcaagacattacacgatgcagttcaggggctaatttctgaagctgatcaaggaaactttcgatggaacttgaagagaatgaacttgaacttccatggctgacatcaaattacaaggggatggaaagttaaaaaactagcaatacttatgacagaaatatattggatactaaggaaaaagagactttacatttcaattgcatcgg

SEQ ID NO: 43319 - DNA, 699 bp, Arabidopsis thaliana landsberg
gatcacctttcttcacagccattgttggtaagcttcaacaatctaagaatatctctatcaccaacaattcttttttaatcttctatactttttttcttactctcaaggtgcagagttgtgagctcagccgtttgggaagtcgattcctttgtttagttgggttccgtttttgaacggtaaagttcgacaaacctttcgtgctttttgttggtttctcctagtttttctccagagaagtttattttatgccatttgaacttttctcggttcttttcagagatgcaaatgtccagaataatactattctccatgattttctttgctgttataccaacccttgcaatcaagtgagttttccacacttcatcggtcttatcggtctcttctcgagctgagaaaaattgctaactttttctatgccttgctctgcttatacgcacactgcttcattctacagcacgtctaatgtttacaaagttgtacattcaagaaatggaagcatgcttctagcattagctatggtatagtctcctgcaaccaaattttgatttcgttacttatatttcaattttgttcttaacgtccatatgtaatgccaatatttttttctgtattcagctatatcccttagtcacgttaattgcaggagttctgatttggtaaatctttttctattttgttctatgactaactctcgtt

SEQ ID NO: 43320 - DNA, 592 bp, Arabidopsis thaliana landsberg
agcttctctgagccacttactcaatactcataacatcataaaccagaaaattaaaggtaaagttgaaacattttatcatgactcaccgtgaactataggattagtctgaggctcaaatgcaccgggaggaagaggatcaaattcaacccccagaggtggaccatcctcttggtattgtcttcctaattgtctctttacggcagtgatagcaaaattctcactctctcccttcactttcaagtatcccgaaggcttattatacccatagcttctcatgaactgaggatgctgaataacgtctttatgtgcaacatatctagaactttccacatcgcgaattccatctttgctagagacaagattcttacgtaatgatgagctacgatcagaagatgtactatcttcaccatcagcatttcccatataaagcctttgactttcaacttccctaggcttggggttccaataatccgtttgctttgtactaccacatgaatcctgtcgaagcccacttccacgatcctgaagaacaacgcttgaccgatcttggctcccaatggcattcccatcttcttttacatgacgtttgtct

SEQ ID NO: 43321 - DNA, 608 bp, Arabidopsis thaliana landsberg
cgaggattgacgtctaggctagtttactatccggattgtaacaaaaccgaaccggttgattactgaacgccggacaacttatcctaatgtacaaattgcataccgccaacacattgttagcaaaccggactcccaccgtgaatgccatagcgaccacagggatacgtttggccgctgtagaacctttcacgacgcgttcgaggccgttgatgatttggtaacgcgcattggaagataagccgaggaacacacctgaacaacagcacaatacagagaagagagtgaatatatatgtatatgtaatcaacaattcacagagtaaacttcagggttatctctgagctcagcaactaaattaccctctccattgatctaatattgctaacaacaggacaatgtagctaatatcttcacatagaattgtaagcataatctattcttggtatcattggcaattcaggttctttcctttctaagaaactaagcccggttaagaaaccgatggctgatcacaagaactcggaaaaagagtagacaaaacaatatcgacggttcaagactatcgttttcagtgaacatcagaggggaaaagcatcgatgactctgtc

SEQ ID NO: 43322 - DNA, 473 bp, Arabidopsis thaliana landsberg
cttagctaccaaatgatctggtaatgcgctgattctatcgcactccatgatcactacaaaaaacaaggacaatatcaacaagaagaacgaaccctatgccttgagagtttctcaattaattccaaaaactagggtttattaaagtcggttaaaaaacaacatgagctagttctatagcactctatcgcttaaagataaagaaaaacaacgacaaaataaaccaacaaagtcgaatcatatgccttgagagtttgttgagtaaacttacaatcgagggaggaggaatgaagaacgtaactaaccgacggtcaagtgaatatggccagagatctagctttaaggtgagcaagtgatacctactatatagtttatatagcttctcataaagacctttacaaggataacacttacaaaaacatttaccattataatttaatacattacctttttaatatactccttaacctctatta

SEQ ID NO: 43323 - DNA, 272 bp, Arabidopsis thaliana landsberg
ccttacacgaataaagttggttggtttcttggcgagacctcgtctctttctggcttatggaactcactattgacgctgagaagtactcttatagcgaatgcagagaggacctaaagccacgggagttctctctggctgagaacaacctcaccgtgcggacagtcaggtatgggacgtgtcagattcttacgatctactcgacccacaggttgcgtaaccttagattaggccaatgtatgacacctctcgcacacctgcacgagtatcacttc

SEQ ID NO: 43324 - DNA, 517 bp, Arabidopsis thaliana landsberg
ttctgttgctggaaactcccagaattatcgccggtccagtcccgccggagggattaacggttttatccgaaaccaccgtaagacaaacggtatcagtattcccaacgaacgtgaagtaattggataacggcaattccaacttcgctccacctttaaactcaaaaatcagctccggcaccgtcacatctcccttcccggagatattaaaacacggtccaagtcctgtttccttctccaagtctttctcacgagtgtagttcgacatctgtgaagcgaattcttcagcaacgagctcgaaaacgggtcgctccatgaaagtgaatgtagatccggaatcaacaatggatcctccgtcttcgttagttcccggcgcgagatacttatacggaatcttcacgtgctttcttccgacgtagattcgccggagattgaggtaataatactcgagaaaagctttgctggagacattgggatctttccgaacggcgtgtatgtgagacccggagttctagacccg

SEQ ID NO: 43325 - DNA, 244 bp, Arabidopsis thaliana landsberg
acccacacctcctccctcaccagccaatgtcgtcaaacatcggatcttgcattatgtctgtttgtggcgtgacttcaactgcaccaaccgtggaatctacgatggcatgatcatcaatggaagtgtgaatagtggtgttatgaatgtgacgtcaaaaatataaatgttatatgatgtttgatggtaaaaaagtttatggattgttaatgaaagttttcttttgataatggcagtagatgtagtt

SEQ ID NO: 43326 - DNA, 526 bp, Arabidopsis thaliana landsberg
ccatcatcagagagacatgtaggatctattttttaagacataacaactaacaaaagttgtgaactatgacatagacaaaggcaagctatttcaacatgtagacgtaataatgcaagctatatttgaacttgtgatgttagaccgtcttagaatcgatctgactaattaaacgaccgatctgtttggtctaagataaaccaaacctccaaccactaatatatagctagttgccagtagttctacttcaacctccgagtaatccattccactaatatatagcttccacaatttgcaacaattcaaatggaatatactcatttgtttgctgtatattctataagatgagctaaaaataaaaaggaatatactactctttgagtgctctgtaaaacaacaacaacatatggttactggttagagttattaataacacacaaacatttgaataaccaaaggatactttagatcgagaagcctagactagtctctaaatacccatctcttggtttaaatagcaaagggatcc

SEQ ID NO: 43327 - DNA, 689 bp, Arabidopsis thaliana landsberg
tacaactttgacataagtatcaaaacaaatgtcatttcaaagtagctaactaaattatagaatcaaaatttgtgtagattaaaacaaaagctatttattttctatctcggaaaaaaaaccatctagacctaaaggatcggatgtatgtgaatgaacgaaccaaccttgatgccacgagactgacaatctttgacctgagagccaaaatgggtgcaagtgttcgccgcagggttgcagtggccggcaaggttgagctccggtgtttggccatttccgaatttcacaagaaaggcgacgttgacgtaagcataccggccggtggcacacgtggcagagaggttaccttcgtttccgttttggccccaatagatggctatgccacctctggatgcatcggagggtttgctaagagagcagcttatgaagaaaagaaagtatataacatgcttgcgaagagtcatgttagtcatgtttttggttaaagatgttttgtcttctttgtggttatgtgtttgtttgttattgcttaacttcttttttataaaagaagtaaaagatgacttttgtttgctttaatttttatatcttatctatgtatgttataatgtctctcacacacaaagcatgactttgattggttgtttttttctttcttcaaataatatagctgtcctacttaaactagatat

SEQ ID NO: 43328 - DNA, 536 bp, Arabidopsis thaliana landsberg
attgagacccatcattgatcatcatcatcatgattttaagataatctttcttatatccgccgccagcccttccattatatgcgaaccatatctcatttcagatttttttaatttaagcgttgattttgattttataggagcatgcttctatatttgttatttgcaattaagctctcagattaatctcttcagttttaaaaaatatccttgtcgaaacctcaaaaataaactcttcagatatatatatatatccaagttatcataatttgtgggttattagatatttgtcaaaaaattatgttaatttttttttgacctcttccagaatctttagaaactctttctaaaccttttttttttgttgttgtatttttgaacttaattataatattaagagttttgatgctactttttgagaacaaacatacaatattatggtaacttcccttaccaaactccatttacgaaaagtatcatttttgtacctgagaattaaaccattaaatttttgtttttgaattatgtatgttaatgtt

SEQ ID NO: 43329 - DNA, 1033 bp, Arabidopsis thaliana landsberg
tctccactttttgacacaatagcacctcagcttcgtctgttcttaacatcccgtctcccttcagattccagcgatggagtcctatgagtacaggtaactcaatatgcataatcttgagttatggccagttcttctgttctcagttcttaacattgtctttctttgtgtcgttaattttctttttgggaagatatttattcttagagcttattttctttcaggggtaaagacaccattgagtccaacagttcggggatcaccgcgtaggccatttagttttggaagcagcatccagctcatggaatcttcattgtactcatcgagtagctgcgttatgcatagttgttcttctgatagcttaggggatatacaatatgacagtactggttccttctggtcctcccctcgcaggagtcaaatgcgtctccaaagccgaagatcgcaatctcgagaagatcttagttcatcgctcgctgattcacacatgctcaaaatgtaggagaaatttttggtacggcttttgtcacttccacaccagcctaattttttctattttccggttatgagaatcacaatatagaaaggaaaaaaatgggaaaacttcatgagcaaaaatttccttgtttcagttgacatgtaattctttctatataccatatacttacatatgattactaatttaacctcagttcaactaccaatcactctcttcctctttaccctttttgtgtatttctccaaattctttcttttacagagctggtccaagttctcttttcatctccaagtgtcttgggtttgagagagaagaatcgattcccagattgaaaataaaacctgtatgtgctcattttctgctccttgcttcttaattcttatcatcatacttaaaaaggaagaaaaaaaaagaaaagaatatattatgtgtttggacatcatttcattgcaagattcgaggctaaaagtatcattttcatttaccatggaaattggaaaatatctaatatcaacaatgtccttatgttagattgta

SEQ ID NO: 43330 - DNA, 589 bp, Arabidopsis thaliana landsberg
  unsure (1)..(589): unsure at all n locations
tgcaggcactaggaacatattactagaaagtcaaaacatagtattactaatgttttcattatcgtcttgcttatatagtctattatgtattaaccagggcataaagcttttcaggcgaatgaatcatgagaaagaaagttatcatggtttaggtaccatggagctttatgagattcgaaggagtctctatttccacaatcatatctctcaacttcttatacagtaatgatgtatgagaaaactaagttttcttctatttccgttgctcgaatcgcctgttcaaaatttcccatttacataaccttagcaggtctaataaagcactctagtccgngttgctgttctcgtaattggtctttaaattctctaatttgttacgacgtgtcacgtgtatgatataattcgcatgaaactatttggttaagctcatacagatctgcagcgtctcgtttcggatcactcaacgttgatctaatggtgtaattcgtatagcagcaaatatttgaaccggagacttcttcaactaagtagtatcagaatcgtgttactaaaaacatttgggaggatatttttaaaatttttttttccc

SEQ ID NO: 43331 - DNA, 1469 bp, Arabidopsis thaliana landsberg
cttacgcacgagaagataatagattcctcagatgtttatcggatcttgacaattgttcatttcaaacctgcatccctggtaggttccaaataactagctgcttctcatatttttatgctggttttttaaataagatttccaagctactttaatcattttggatctgtattctgtaaagaggttttaaatccagcacgaggtaacaaagaatagttctgaaactgatccgttctatgaattcagatggaaaatcacttcatggccttgaaaagagatggcttcaggagctaaaggatgacactggagaatcactgcaggctcagattatcttcaaaagtaaccttgttggttcagtaaataaggtcttctgcaatatcactgcagccacaaatcagattgtcgacggatttatcccttgtcaagtactgagccatactcctaaactttaatcttttatcccccaataagcttaccttttgcatcattaggaaaatatttggatactgtcatattgtacttacctcagctaatggtttacccactacagtttttgatcctcttgctgctgtttacagacatgcaggtgccacggcatcccattacaagattcagtggaaaagccaacagagaagttgaaatgctccgtaaccaatcatgaacttggaaagtatgatgtgattgaaaattctgtgaaagttggcaacagaacaaccctgtttttacctacaatccatagcctccagaaacttcatccagtttcttcccaagttgatttcaatgtcatagagaggactaatctaacttctctcagcgaaggtaaggcttttagctattccacagcactctcttcttttgacttcgattcttgcctccaagatagagagcttgattcaagtatgctattttgacgtaggcctactacttgggataccttacattgtaagcccttcaacttgtcatgaaacagaagaaatggatcaaccagatttgaacactcagagtaagcagtgtttttccataaagaaccccacattgcagtatctcaggtgtacccaatataaatacccattgactcatactttcctaagcatctagaatacagtttttcagggactatgtggtgcactatattcaatggaccaaggcttggtttgttcttcaaactgtaatctagacaccatgagagccgtggaatttcattgttattacgttcttcaaccgtctgaaaagggtccaatgcttctgagggtaaaaattcagtactctgaccctcttccttgatcacataacattagccttacagaattttatcgtccatatgatatgataagtttgtgttatgtcttgaattgtgcatttttcttagtcttaacagacaaaactatttgcagagattggcagggtcagaggaagtcctgcctatttgcaatgtcagtcagtttgccgagtcctctattctagagaaatcg

SEQ ID NO: 43332 - DNA, 716 bp, Arabidopsis thaliana landsberg
tgctccgtctcgagcccggagacaagtaagttggagcttggaccacaagatatagaaactgcgttttgtataacatgactaggggccattggttaaatccggtttacaaatttattatttttggctaagttagagtactaatttggtttcactctttataggcttatactgtggaactggagttggaattgaacaacctcacggaagaaaacacgaagctgaaggaaattgtggtaatttcttgataaagcattatttataacgactaatataagctattaagctatgattcttatttggaaaataatatcctagtaaccattttcaatttaatacttttgctaggaggaaaatgagaagaaaagaagacaagaggtaatactccaatttccatatgtactaaaacggttacttaacgaatatggattatcaaaaaacatcattttggatttatgtgtgatattgttggattcaaagttgacaatatcgttatctaacaaatatagcttaaatgataataagttaataactaagctgtgatgggttagtggtttttatttgaagtatgaactttctttataaattagtatagaaatcgatttttttccaaatggtcttctacttcaaaatttatgaacttttcaggttaaaaatataagtaaaataaatgaatgaaatggcatgcagaatataagtagaagcaacaaatgactaaa

SEQ ID NO: 43333 - DNA, 578 bp, Arabidopsis thaliana landsberg
caacgtactcatcatcactatcttcgtgattttcatcagaatctatttcgatatagttttcagtatcttttccttttcgagttgataccaaactatcaatcgatttcagattctgaagatattctgacatgttgtcatccttcatttgtaaaagacataaagcactttcttcaatagttatatcgctttcagactctatcgaattttcctcttccaaatccacgacgatctttttcttgacagttgttcgttgctcagcttctttgtttagatctggctttggaccaccaacaacttcactggtgtggacagatctcgccagaactgtttcattaggtcttctaaagcttgctccaaggttgttgcatgatcgtagtgatggagtgatcgagccagttgatgaagatgatccagggaaaaatttcaaagtgtgagctctcatgtgaccaccaagagctttcccgtttgaaaatgatttcttgcacacctgacagatatttgttttcttgagaagtgaatacattttgacgatgaaaaacacaaaaaaaaaactagaaaatttttaggcgtgaaagatt

SEQ ID NO: 43334 - DNA, 775 bp, Arabidopsis thaliana landsberg
tccaattctttaaaaaagtaccaaaaagctgagttaataaatcttgtttttcttactcaaaagaattctaaagttttcttgagagtaacgtttgtgatgattatgaagcacagtaactgggcctagcgtgaaagcataaagcccaatagaaaaggcctttttcttttttttcttcttattcccggaatccgacaatgttcaaagtgtgtagtagattgatgaagaaaaccagtgtcattttggtagataatcgtatggaggaattttttcttgcaaaagtgatatatatggtggaaaaatatatatgtaaacatagatgtttattgctcttccgcatttgtgttaaacaaatagtgtaacaatatcaaacagtttttttgtttcgtccattcgattgataaagacaaagatcattacgcattgcgaaaatcgaacattttgattaaagactacaaaacagaacacctgacattaactactactcgagggacgaatcgatctttcgtacggttcttgagaaagcaagaatgtcctctggcttgctagcgccatggtcgttgtctttgttgccatcatcgtcgttggaacctctgtcttccactatagattcacgaatgatggttcttatcgtgttgtcttcggcttttcccgcctcgttggtgacgactctctttttctggtctttctccattctctcatacgttgcctccatatctctctcgttctcttttctctagctggtgcaatatttttttgaaagacttctcgacccgag

SEQ ID NO: 43335 - DNA, 121 bp, Arabidopsis thaliana landsberg
actagatgattttgtatagatctaggcagtcatgggcatgtaggtactcattcgggttcggttaaggagtgggggttattatggcgtattcgaagagcaccggaagagcatacaaagcaac

SEQ ID NO: 43336 - DNA, 777 bp, Arabidopsis thaliana landsberg
ctttgcatacgccattaattttaccccggtgatgagattttcacgtccaataaaatcttaaatcacaaaaaacggagaatcaaccgtcgctagattcgctttaatgtctctacgaacaacaagttatgatccatcggcgaggattaaggcgcagataatatatatctagcggtcggatgagaaggaagatctgtaacgtaagaagatgacttaatataacgctaggtttcttaaacatgctgacgtcactttatgctgaaactgtttgacgagttatattctgatgtaactcaatccatgctaagaccacctgttgcaccgtaattaagtatatgtttttacttttaattggttgttagcggagtatactataggagagaacatggttgcacaataagaatcacgtagtggattattacttagcttgacagtggaacgaggtcaatgattaaaagatctttaacgatataacggcgttttttataatctagaacagacgctttgccgtcgagagttgcttgatttaagccgtaggattataagacaatgcttcagaggaccggatcggacggtcatcatgagatatagaaatcaataggcacgtgataatatggtttgggtaccgtggggatcttcggtgtaacacgcgacactcgtcttcttaattaagtggattccgtggctaccacgtgtttgccacgtcaacttattgtccacgtggaatcatctgttcctactcatcttattgtcaagtttccatattatacgtgaatgact

SEQ ID NO: 43337 - DNA, 648 bp, Arabidopsis thaliana landsberg
agaatcaattatcccgtagacttttaacagaccagccagatgggaccaacgtgcactgctttttggccggagaatgtataaaaaatattgaagatgcagtgaacactgaccaccattcacttctccacaacttttaatgaccggtttataaaataaaacatagtactatataattttcaacgtgttagtctgatttttatatttctaaagagaagtactcatctatttttgagctattaatctattacaatttgtgttctgatctggagagtggagagttatttcaaagtaaagtatgtagattgtagaggatctatcgagaatctactcatttaaaatagtttgacgttgtagcaaacaatttttttgtcattgatgatttgtattgtttgtaaatattatttagaaaccaaatcgaatttttagttgaaaattataatctgtttaataagtgataattacatcatgcacatgtacctagtgactcataatgaaacgtatcataatggattgacgagtagttgtctgatattgacatcttaatttataacttcccttttcattgttaatgttccttactgtcttctgattgataataaagacgttgacatgtcaaaccacataattatttgaaaaatatatattatt

SEQ ID NO: 43338 - DNA, 555 bp, Arabidopsis thaliana landsberg
aggccagaatacatggaagacagttatagatcgtagtcggtagttcctatatttagcacgttttattcatgagttataaatatgaatggattcataaaaatgagtaattttgcttgagcgtaccgtatggatggatagtactgggagcagaaaagtagccaacgatcgttgacctgtaactctcatgattttggcttttttttttaaatgacaaattttcaatgtttttatcatgatttttttttttttttcgaaaagttcatatcattttttaatactaaaaatgaagattatcaaaatgaagttacttgcgttgtttgcaatagataaatattattccatggatgaagttctagatgaagtcatgaaggttgttttttatattaaaaggaacaattccgtttcaaataaacatattagtatacattgttttttttatttgctgtgcgagggtgtaaatatcaaaattattaattactttgactatagaaaatattaattaattttcttttaaataaagaaatcaaactagggatagtggctgcaaaataatta

SEQ ID NO: 43339 - DNA, 520 bp, Arabidopsis thaliana landsberg
ctcgaataacgggaaaaactaaattcttcggccaaactcttccaatattcgagagacttttttcgatgccttcctcttcagcaaactcgtctttcaccatctttgctaaagcatgtatctcgctagagattgatgagtattcgatttggggtttagggtttagatctacgtcactcaatcgtctccctggcttccgaaaacctaaattttacgggaatcaatcaaagaaaacgagagagaaatcgaaactgaatcgaatgatcgagaaatttgaaattacctggcgatggggtttggagagaagagtgaaggacttgacgtgatcggagacggatcggagatttgggaagcggtggtttcaggtaagatctcatcttcgacatagccaaaaagcttcttcaagagatttcgaatttctgaaaatagagaaagagaaagaagatttgtttgacagctttatgagagaaggagcgcctctaaggtctaacggttgtattaatttgatccgacggtcaaaatt

SEQ ID NO: 43340 - DNA, 600 bp, Arabidopsis thaliana landsberg
gttaacacatcacatatattatagtattccaacataccaaatattatattaatatatcgtgaaactttaaaatgtgttggtgtataatgtatgtcaataagaaaatatattaatacagtttcgcgatcatttcaagatttataataattttgtatgagaaagaaaagtgtgagaagtagttgttagcaaatcacatggaaacatataaactaattaaatcttaaaaatgaacattttaactttttgttgttatataaagtaagttaactatcaatctatcatcaaatatttatggtacttaacaagtattataatatgggactaaaaattactatacaagaaactgaactctctgtttttttgtgtggtcataattcgcatataaaagatagattcagaatctgatattgtttatactaatgaattggtttgcatagaaaagtaaatgctttttcattaacatgaatacatgataatgaaactgtcgccattcattgcaaaattggtccgattttaatttgtcttcatcaattacccacctctctttcttgttttttttcttctgattgctttattcatttatttattcatatatatatg

SEQ ID NO: 43341 - DNA, 319 bp, Arabidopsis thaliana landsberg
  unsure (1)..(319): unsure at all n locations
cgagcnnnnnnnnnnnnnnnnnnnnnnnnnnnnnnnnnnnnnnnnnnnnnnnnnnnnnnnnactggttagtgtgtaaggatcaattgaccgaacctataaaagcttttagatgattatgcatgaattaaagaagttgagaattgagaaaaaaatatccatgtggtgactaccttctcaaatctcattatggcctcatcatttttcccaataatggcttcaacctatacaaatgaaataaatgtcaatcagcgtcagtcatgataaaatgaaaaattcaggtgaaattctgtttgcatcgtagccgatgtcatccctaac

SEQ ID NO: 43342 - DNA, 749 bp, Arabidopsis thaliana landsberg
acctccactttaactaatagtatccctgttgtcttttttttttttgttttgctctgctttttcgctcacgagacagttcgtggggaagaatgacttctggttttaaatcaataattaaagggaatttcacactggccagttcgtttgctttacatagaaataagataaaaggaagaaaacaacagagtgacgaataattagtcgtgcttagttttttaatagcaaatggggtagctaataattacccaatctgtctaatgattataagattaagtggggttgtgagaaagaagaaagcaaaggtaggaattctaacatgatgaaagaacttatacatgcttaattgaaactttattactttttagttttaattagcttatgcttatctttttttctcagacagtttatgcttgtctctttgatattcttttatctaatttatttgtcgaatattcttctatattatggaatttgatttgtaaaatacaccggagtgttttacataagttgcaatatactaggttaagaaaacaaaaatttgaaatatactaaaatgagctatagaatgtaaaatatatcaaaatatcttcaagtaaactaaccattatctacttaattgaaatgatttaactattcatttttaaactaattaaaataatcaaacaattcctgttaatgcacagtgtctccagaagtattccttcccttttcactcagagatgaaagctttaattaggttatgaaatatc

SEQ ID NO: 43343 - DNA, 570 bp, Arabidopsis thaliana landsberg
ctcttgatcttggtcacgtacgtggagtaaaagacagctcaacaagttaaagatactctaggttaaatattgtagctctatatatgagcattgcgattgtaatcgaaaacctaaattgaaagcaataaaatactatctttccatttctcatttatctttcagatattagtacaaataacaaatcattcgccattttatacaagttgtagtttttttttaacaagggttctcaaatcttaacaatgttaagattttatggcgtccaaaaacattacaaactaagtatacactcttgtatgcttttacatatcaagaaattacaagaaaacttatataaattaataacgtcgggactgtgacattttattaatttgacgttattaatttatctagtagcggttccagaacatatttctacatggggcacaaaatataaatcataataaaattatttaaaaaattatccaaaaagagccactatgaggcaatcgaaccgtggggctgaatattagcatggggcaccttcactaactatactagaaacattgtatttgatatcggtattttatc

SEQ ID NO: 43344 - DNA, 537 bp, Arabidopsis thaliana landsberg
gtaataattctgctcttaatagttttttggcagttcacttgtttaatgaaagcgctgcaaattgatctgtataagctcaccattcgtaggctcaggaattgttagcaagactagtagacaccatttcgcagattcttattgagaaatctgatttctttttatacttaaaattcccaggttgtagagtctgtgttgaacaaagttatggaagaagtccagcagcgtttatcaatccacaatgaaatggtgaggggcaaatgatgtcaactatgatgtcaatttcttttggagtgaatacaatcagtctgaggttttgaccgatcgatctttcaatttttttcagatgaaatcaagttcaaagcctattccagaagatgattcatcctgtgagacagtggtccggtctcagctgtctgatgcaagacaacatgaggaagcagaagaaaatagtccgcccaagttgtggaaaaaagtttcaaaggacaaattttgaacatcacgaagaacaaaagattcttctgaatcaacaaaaacaca

SEQ ID NO: 43345 - DNA, 654 bp, Arabidopsis thaliana landsberg
ttgacatattaaatgtttctcactactagtattagactgttgcagttgcgttagagacgtttcatattttttaatattattatccaagacctgaaattcttattattatgaaaattatgaaatatcgataagggaaaaactgtatggaagtgtaaaagacaccaaaacagatattgaaccaaaggtgaagcaaagaagttgattcaaagttgccactttatttaaccttttgcaccagtatatatacacacacatggatactaacccaatcattcatcacaacacatcagatccttcaccatatatttctctcaacctcgccaatttggcccaacgctttcaattgaactcacaaaccctcccaacggccgaccctctcaaaagggtctcccttattccaagatccgccgagcagaggctggctgataacgcaggcgagaggcgtcctttagcaccgagatctcacgaagacaacccctttgggggtcatacagatgaccaccatgttgctgctcctgcggaccataataaggtgatggatcataatagcgagaatctcggatacattgaccctaaaactgcacattaccctcattcatttgaggaaatccttgatgcctaatatccgacatatgccgggtcagaaatcattgg

SEQ ID NO: 43346 - DNA, 783 bp, Arabidopsis thaliana landsberg
ttgtgtgtcttaaatacattttgtcaatgaatttggttttttcgaataggtaattttgcatccggggaggcttctagtcaactgtgcttcaatccttgcactcctcaacttggcagtaccgagtgcaatacgatttgtgtaaacaagaaatacaaagagggctcttgtattggttttggaattccccctactttcaattattgttgttgtaaaaattaaatgattattaattagagtttgaacaataataatattgatatgtttttttattaattgaataataatataagttttgatcttatgagattagcacattttattgattatgttgatatattttgaatctaataacacggttctagctataggaagtggatctcgatgacctgtcatcgagttggacaataggctcacgagtccggtcatttacgagtgatttgcgtttctatgaagtttgggatgttataacaagttgcttcatggttcatgcaatttgttttttttttcatgcaatttgttagttttatcttagtttactttgttttgatttttgaacaaaaaaaaaaaaaaaaacttagtttactttgttttgtatctttggtgtgtaacaagttactcctcgtagattcgattacaatcgtgctacaaaggcatttcatcatgcatatgcgatataaagtagctgatgggcttagcgaatttgagaaacttaaggcccaactcagtttaaacctgttgtaagaaacaaaattgttgtgtttgaaaatggttttttttttttta

SEQ ID NO: 43347 - DNA, 395 bp, Arabidopsis thaliana landsberg
tcatgttttgataggaaattgttctttagcatatgctccttaaaatagtgtttaccatatccattacatagttggggttttttctttgaagcaataaagtgagagaggaaaactgagattatttcttggtagaaagcattacagggcgaatcctctattggcagtggaagttgatgactcttatatgttattttctcatcattttcctctgccaaaggagatttgcctcgcaatgcttcactaacgttatggggttattcgtttctccaatgtccaaatctagtagctaatattttcatttaatagtgttatttgaggcagctcatatacttttgtaatttgataattgtaaaagattttactagaagcctcttcaaattaactcctttcttttg

SEQ ID NO: 43348 - DNA, 849 bp, Arabidopsis thaliana landsberg
gttgtttgaactttgaacctagggaattggatcaaaaataaagttgggttttaatatcgattataccaatattgggttcacggttttagtatatgaaaccattaaaaacaacgccatagctaatcaatttttaatacatttaaataaaaaactgtaccaataattattaagaccagctttgattcccattattaattcatattaaaaaaatgtgaatgtaaatgctaaatttgatggaccttcatgaaaaaaaaaatctttctttccactaattaattcttctactatatattaacaagttagaccattttcaatgattgtctctatttttttttgtaaatacagagaaaaaatagaaatctctatttttactccaatggttcctaaaaatagaaatctttatgttagagataaaaatagagatgagttaaagatgcccttaggatttttctgatctattaaaacttttgtagaagcatgagacagcacacgaaagtggaaccttatagcaaaacgatcccaaaatagaccaatttcgtctccttttctcaaacctctgctatttatcttgactaagaattaaaatatttattaaaaagaaattgtttaggttttacaaaatttgttaaaacatggaagcaaaaaacatactcagaatttcaaccatcgacagaagtaacttcaccttttaccaaaaacaaaaaagaccatcgagagaagcaattcagctcacgagtcagatgaagtgataatcccaaggaagaggataaaagaaaagaaacttgaccagaagaggataatcctggatttggagatagagatacagaaatcgacgagtacagaaagttc

SEQ ID NO: 43349 - DNA, 631 bp, Arabidopsis thaliana landsberg
aatatgcgtgtataatatatgttcagaatctttgtatatgttctgtagtcttcataataagggtatgtacttatatttgcagtatttatgtgtctttttgtattataaagtatgaaacttacccatgtcctatcgagatagacaaaatattaggcatttgtttgttaaaaaaaagtatgatgaaattgatgatacagatcgatcgattttgtttggagttaaagtcaaagatatcttgttcttatatacttgggcctaaacatctgatttctcgttggtaacctccacatgttagtgggctaatgggccaaaattaaaattcaatgtgaccattccacgaaacaagaaaatgattatactagaaaagaggtgtggacaacttaaatgcaaggagaatttgatctttaactttgtctatctaaatagttagttatgatccagctaagataagagacgaagaagttttttctttttgtgaacaaaagacgatcaccgtatgaaccaaaaaaacttgttattcgtataatcaaggcttcctgtctgcttaactatttactacagtttgatcttacaccgacatgctttccgtccaatatttctttttaagaagatgaaacttttccttcttttt

SEQ ID NO: 43350 - DNA, 848 bp, Arabidopsis thaliana landsberg
ctcatatgttccacgtaaattaaaattgtgtttcgtttgggaatattgaaaataggttaaaatgtcgccaaaaaataagctttgaaaacttgaggtaggaaaaaatcatggttcttttgcacatgctccggaccaatcatgtttactactaaaattcttactgcttttataataatcatctcgactggcgcgtgtagaactctagatgaatgccaagtcttattttctaatgataaacgcaaataataaaaaggtttaagaatatttaaatttcacatgacaatatgacacaataaatactacttgaaaaatgatctttgaaatttcatattttctaatcaaaaacaattccttcatattttgaaatataatcgatctctcatatttaatttccaattagagaattatatccacatgatttgctttcaaatatgtctatttaacgtgtacgttgaacttgaacctatttattatttaattcattcccaaactaaaaatattttattttctaaaaaatatagtcgtaagcgtacttgtgtaaatatgttctaaagttaataatgggtttagacatttagtagaaatatatattttttggtttttggtttggttggttcggataatcaaaattttcagtattcgactaaaatacatttttgagttatatttctttacttaattttcataattgtaagtatttaaccttgtgtacgattaaaaaaaaaaaagtattttaaccttgtgtatcattcataatgtaggttttctttccattttgaaaaaaagttttgaattggttcgcattcataagttgaaaccaagtcaaattatggtagaatgcaatggac

SEQ ID NO: 43351 - DNA, 617 bp, Arabidopsis thaliana landsberg
cgtgtcatattagttttggctatagtaaattttatgcgaaacaaaagctgaaaattaacatgtttattattataaaaatgtggctgaattctgaaatatcattattagttaggtgcgttttaggaaatcagtaatgaataatgatcgtgcacaacaataaactggacaaaatagcatttgttctttttttctgtcacgaataatttcatttaagaaaaaaatatagaaagtcatttatatgccaacgagagacaggacattgctaaatccagctcaggacattagaaagttattctcacaatctctataaaataatccatgtcaacaaaaaaaaaacctttattaaacattaatcgaatttctaattcattatgaaatataatcagaagagtcctcatcttattgatcaatcgtaatacacaagaaaccatgactttagaggagcagaagaaagtcataatgcccgaggccgtagcatcggagccatcaccaccatccaaggaggagaagttcgactattcgaaagctattgttcttggcgtcgctgcaagtaacaaatcttttaaatttcactgagcaagattacattttaaattgcaaaactacttcaactattt

SEQ ID NO: 43352 - DNA, 658 bp, Arabidopsis thaliana landsberg
tcatgtagatcccactataaaagtgacgtgatttcttcttcttcttctcttttgtgtgatctttctacggctaatagtcttcacacgtgtaaaataatcagcagatatttattattactcaacatagaagtggttttgaagtcggactgttgtgaaatagaataacaaattcaaaatttgtagttaataattagtggattaaaaaagtctgacgcgtacgcaaatatcatattttaaaaagattaatgacgcgccaagtcgttatctaactcatctaaacggttacagctgtttcttagcctttctgttttctctgcatgaaccctattccaataaaaaaggtgagatttttttgcatattttgccatagaaggacactttgagagtccttctgatgaaaatatggccaaggactcacttcttcctttattcccacttcagggctcgcttttcacctatttaaaccatcattttcctttctccattttgccgtcatcacccaacaacaaaaccctagttttggtttctctggatctgaagaatcttcatgactttttctatagatcggccctctgatcagaaccggtcgggatcctttggactcgttttactttgggaccttttttttctatgctctggtttgaaatgatcttatttt

SEQ ID NO: 43353 - DNA, 645 bp, Arabidopsis thaliana landsberg
aagttataatcaaatcgacttagcacaagagagaacctaagtttctgtgttcttatatatgttttggattgcggcattttaaaactctaattctctctttttatacctcattgttataggcaacatggcggtatgcaaacatcggtgaatcagtctccattgaggtttaggttacccaacattaacaatcgtcaggcccctgtacgtccaaacgcaaacgcaatcatacccccacaggtactatttcttttatgcaatgaataatgtatttatatgaagttttcatcaatattacacaaatgaatacacatgcactacaaaagcattattgttaatatcaatgttacagggtgaaattttaggatgtcgacgaagaagttacccaagtcgatttgaatttggacaatcatcatcatcttcggctcaacgaagggtacacagtttttagagtctcaatttttttttaacgtagaaaaaatttcatgaaaaagaaatttaaacatgagttaaatcaaataatgcagagaattgtaccagcaagcgaaaatgttggctcaacttcaatcaatcatggaaatgctgaacaaaggttattttttctccatttttgtctattgacttatcacacatttttgaaaaatttgt

SEQ ID NO: 43354 - DNA, 674 bp, Arabidopsis thaliana landsberg
tcaggataagatagacgcactgagcgttggttcttcctttagttagagaaagtaaaaggttatgagacgaagatatccagcttgagagaagagttggaactagcaagagagagtttgaaggaaatgaaagatgaaaaaaggaaaaccgaggaaaagttatcagagacaaaagcagagaaagagacacttaagaagcaacttgtgtctctggacttagtcgttcctcctcaattgataaaagggttcgacattctagagggtttgatagcagaaaagacgcaaaaaacgaattctaggtacttttttttttctttctctacctttatacatggaaatacaagtatttatcccttggttcaacagcatgaagataataattgtatgataactttcttggatcttaggttgaaaaacatgcagagtcaactgagtgatctgtcacatcagatcaatgaagtcaaggggaaagcatctacttacaagcaacggctggagaagaagtgttgcgacctcaagaaggctgatgctgaggtaagacatgattgcccctatccctcgaattcgaattttatttttataagcttgctacattaacaggcgcttgcgaattgaggcctttcccttatttaggagaagaattaactggttattggattaaaaagtgatgtttaaat

SEQ ID NO: 43355 - DNA, 342 bp, Arabidopsis thaliana landsberg
aacgttaaaggtatcaaatcacttcaccatgaaggagcaggactcaaggtttttattctttccctactcccatctttttaaaagcctttttgtttgtgtttcaaccgaatctctagtaatgatcctcttggtgttgttcttgttttctgaattgtcactatggttttggatgcagggggaggataaattagggagaacgccattaatcttagcttgtacgaacgacgatctatatgatgtagcaaaaactctgcttgagttgggctccaatgtcaatgcttatcgttctggtactattatcatcaattcattttctttgtagctattcataataaaatttct

SEQ ID NO: 43356 - DNA, 524 bp, Arabidopsis thaliana landsberg
aattttaccaagtattccagtatgccttgcctaaagatatgtactttatgtgctactacgccgagaaatgcgctgatgatgagttcagtgaagaaaacaatacagttaggtcgaggtttcaggtggcaggtaagttctcagaaaatgacagttccttgtcgagtgaggacgcatcagatcttaacagtgctagtgttctcactgttaatggtatgttctttaattcaatacacaatgtgcatggttttatactatcatatgtggcttagatggattttcatctttgatttgcagcggctacagtagcttctcaatggttggaattgcttcatcaggacatcaaaggccgtgtttctggtaaccaaaactcttatatggtcattaatgctacgaaaactttagtacttgattgttcattaaatgtccttattgttcttttcagctcttcgacgtagcaggaagagggttcgtgcagctgtcacgatagagttacctcacttaataaggaaagagtttccagctga

SEQ ID NO: 43357 - DNA, 284 bp, Arabidopsis thaliana landsberg
cgatttcttgaccgacctcatttttttcagataatagtttacgattgcttcgttatggggatgaaacgtaaagcctgcaggtaatgggactggagccattataactctcagagacaattaacaatattgggacttgggtacgtacttatgacttcacctcatttatcttctcttactcaaacttatatatatattcttctttcttgaccgcatacattaataacttatatggtcactagattgattaattattaaatttttctttacttatattattatatctc

SEQ ID NO: 43358 - DNA, 778 bp, Arabidopsis thaliana landsberg
acatattcacatgcatgggccaaaaaaggatatatgttggttcttcactttcgtactttttttttttttgaatggtataattttttaatgtccatattgaaatttctgtaaattttttagttgaagtcaaaagatatatggtgattgcaatctttgaaatgtttagagagtaaacgtttggattcgtgttgaccaatttgatgaagcagaagcagtgaatgtagaccaatggtgaaaaagtgccccgacgcaagactttaagaaacaattaaattactaaaattttgtcaagaacattgttaagtaaagagattacatttatgacaaaaaaaaaaaaaaagagagtacatttatgataaaaaaagagagattagtttgtgttaagaggtaatagggagagagaagaaaaaaaactaaattgtttcagtattgttcacgcaagatttttaaattgtcatcatgcaagttttttgttaataaatatagttttaaatcgtagtcacacaatatatatatatataatttttttcttttttttaaacgtcgtcacacaagatatttttaaattgtaatcacacaatatatatttcataatacaaaaaatataaccagagtcatttccgaatactttctgtattttctaattcgttaattttttaatttaattcattccttttagttttatttgcatgagttttatgtgtaagaagtcttttatgtcaaaatttggattcggattccccatcctcgttaggttaccacttgccacctaaagact

SEQ ID NO: 43359 - DNA, 1405 bp, Arabidopsis thaliana landsberg
atcccagtttattagattcctttgtttgctaaatcaagattctttcaagttgaagattctttctaatagtatatacaatagggaagaatctttcaactatcactccctacaaattccatgagaaaattcacttttccaatcaaaacgtaaagaagaagaggaagaatggctacatgtcctcctttcgatttctcgaccaaatattacgatggtgacggcggatgcagaggagagcagcttcttcggaggcacgacggtgctcgatcaaggcgttggctacgccgtgattcttggttttggtgctttctttgccgtcttcacatcttttttggttagtttccgtttctgaattacaaatactttcttatgaaaagcaagacgacttctgtgatttgctcgtgaccacaaaaaatagtagtcatatggtttatgctaacaaataaaacaaaggatgctaattttcattgtttagtagacgttgattattctttttttggctttttgttctaaaattttcattcttattaaaatagatattaatcaaattaattcatatatcaagtttcgatagaaccttttttggcctattaagtattaaaattgtggcgaccgtgtgtaattttaaaaataatatgtatattttcctaataagtccaccataataatattcgtgactaaatgaatgaaggtatggttagaaaaacgatatgtgggagctcgtcatacatcggaatggttcaatacagccggaagaaacgttaagacaggactcattgcaagtgtcattgtgtcacaggtaaaactataattctaatcattataattgatgatataaagttataaaacactccatgatcttcgactgtagaatttaactgtagaattttggttaaaattattaatttggtttatgttggtcgatgagtgaatagtggacatgggctgcgaccatacttcaaagttcaaacgtagcatggcagtatggggttagtggaccattttggtacgccagtggagccaccatacaggttaattccgaaacaaaaactatacaatacaaacttttcgtttctatatgcataattgatgaataatcgatgatgattgatgaacaaagtaggtgctgttgtttggtgtgatggcgattgagataaaaagaaaggctcctaatgctcacacggtctgcgaaatcgtgaaggctcggtacgtaaaaaccgaactaactcaaaacaacaattatttttatttgcttagtcaataatattattaaatagcattaatattttttaagaacttataatactaatattatcagtatatcttaaatttatttctttttggattaattttcaaaaaaataaattttgtggacaaaactaattccagatacggttgccggttgaca

SEQ ID NO: 43360 - DNA, 230 bp, Arabidopsis thaliana landsberg
aaagctacgacaacaatagaaaccattgagcaacagtgttttctaatttcacgcaagttaagaaaaaatgagaatctgtgacgcaactagctcaaatcattgttgtatcattacttagaattcgagaatcaagttccacaaaaatgcgaaaagttgtatataaaaacctcagaaattcgtcacatgcattgagctgaagatttaaggataaacacgagtaagacatcgag

SEQ ID NO: 43361 - DNA, 811 bp, Arabidopsis thaliana landsberg
gcttatgttcgtcctcctgtctcttacatccctaccccaagtaagttgtgacttaaaaagattcataatcttataatttatgcaaaagatctaggttttgggtacaaagatcgagttttattttgggtacggttcgatttcagtggggattgcggtagcggtatcagagcttagagaggatgtagtatcagcttacaaacaggaactggattggagcgcaaacgaaatgcttcgtccttacaagaaaatgtttgaaaggagaaaggttctatctctagaactaaatcttaatctctctttgttttttttgttttgttttcccaaattctgaaaatgtaccatattgaaccaaaacaaaggtgcaagtagaggttttgttgctggattcacttgagcctgcagccgcgatagcggaagagattgctggaactggagtcacaaaactggtaataggaatgtctctccgcggattcttttcaagaaagatcgatatgtcttctttgatcgcaacagctgttccgagattctgcactgtctatgtgatctcgaaggggaaactagcttccgtgcgttcttctgagtcagacgctagcggaagcataagattcgagagaagcagttccacaagtggctccactgatagtgctagactccctgctggtaaaatttaacatcatgtaaactgaatttgagtcttttacatgtcggctttctgacttgcataacttgaaaaacagagtaccaagactgtctcttcgctgtttcggaagcacattgccgagtctgttctttttttctgctctgaaacatt

SEQ ID NO: 43362 - DNA, 615 bp, Arabidopsis thaliana landsberg
ctttgggtggagaaaatcacaagatgccggatatattgatgcaggtatgtattcttgtgaggagaaacgtttagatggagaattagtacctaacaataatctagatgtctcacctctgaacttcctacatcttgtccatagacttttatgataacttgcttcatgtggtcttgcaggagaagcttcggctttcagggaagtcaaacacatgtatagtacttacaaccgaagaaacttcaagctcagaggtattttggatcaatatatatgatatcaagtacactcgcagatagaatcagatgcagcattgcagtatgattgtattaaaccttcaaaactcatccgatctgtctcttgaaatgtttcagggtttaaaagaaagcgataagatacagctactagatgactgctaattcaaatggtgccaatatatcatcaaggtttgaggtcatattacttctttctttcatgaacagggacaaagccaaatctgtctaaaacgtttgttgtttactcttttgaagcaagaagccacgagtctgatagcattgacgagaatgaccctggatttggatagaaagaaggtataggattaataggagtgattattatgta

SEQ ID NO: 43363 - DNA, 1011 bp, Arabidopsis thaliana landsberg
  unsure (1)..(1011): unsure at all n locations
cacacacacacacacttgtatgatatttccaaatctgggaacataattttgggtcctagctatcaatcaaataagggtagttttggtaaattagtaataatgatcattttaatccctaacttgattaagatgtttgtttgaccaagccacgtcaaagctctaatccccttcaaaagtccacgtcctcattctagtctccctaaaagccggtgccatccaacgtccctcatttcgccaacagtatttctagagattcaacggctacgatcttccgttctagacccttccaaaaattacgaagcaagagagaaagagcacaaatcttttttacttagcctgagtttcacttggagacatttaaccatggttagttttaaaccacttgcttgggttaagcggtgagaggggtggttaaatgtctgagtaagtggtgagagagaatgagataggaagagaaaaaaaaancagcttcttcttcaaagcgagacctatctgagtcgactcgtaacgagttgatttttttttgttttcttctctactggtttcgcttttcgagcttctcgtctccgttaatcgttaaatctagctcattgatccgatatccattgttttctctcgccggcgcgtcattgtcattcgtcgtcgagttctggtgagtcttccatttttctgtagatttgttgttgtcttgacaaaaatggagttttgaagatgtttcttaatacgttcctcggttgtttgtttcctgatttgattcataggtctgagattgctattaattattcaaatctcatatcgagcttatgttttttgtattagttcaatgttgttgattgttaactagatcaagctggattaagaaaattagatatcttcaaatgcttttgttgcttccatttgttattttcagggatctatgttggacttaaagttttggttttgtgttcttactcacgttcgatttaattcctctctttgtagattgttttaactatggaagctcgtcgggag

SEQ ID NO: 43364 - DNA, 758 bp, Arabidopsis thaliana landsberg
aacaaaaaaagcttcgatctttagaattcttatattcttagaatccatttaagattcataatccaaatcaaaatagtactccaagtttatataaattctttgattctcaaaagattattttttaacagagaagattccactataacacatacatgcatatagagagttgcaccaagatacgatcccaattgcacaagaataaatatatacaaaaaaactacaattctcgagaaaaaccttaaattgtctggtcaaaaaccataattataccctagaaatcaaggcattgtgaagagattaaacgaaacaacaagagagtacctgaagaattcgcaagtgattctgatctcactagatcacgaagtcggacattgaaatagttataggcccggaattagccgacatgtaaagaagaacgacgagagaggatgattcgtagaaattgcaggcgaaggagaagaagaagacaaaaacaaagaatagtgtgcgagagagagagagaagttggatcgatattgactagaagattacgacttaaatagagaaagatggagcagtacatctatcagtcgtcatttttttcaggtctctctctttttctctctgttggatacttaatgcttagtcacgactttataagttttatctcattagctttagaatcatgatctttttgtgtatttttgttcatgaattttgcttagttgttaatttttttagaagtggtttttttatagcataacttagctgaaaaggat

SEQ ID NO: 43365 - DNA, 357 bp, Arabidopsis thaliana landsberg
ctgtcgaccggcagtcaggaatgtagtgactcgcggtcagcagcgttgctacagtcgctcccgaccggtgatgagcagggccccgaagctcgtccgagaggccgtaccgggtcccgtttcgcagcccccgcattcccgttcgtcccgtcggacgtcctgactcccatcgagccccggatgaccggcctggagtcgttcgtgggagcccgcctgctggccggtgccgaaagcgcagcgctgctgttcgcgctcggcacgctcttctggctcggcgaccgcgacggctggctgagggaggagctgcgctgactcatcgacgcggtcgcgtacgtcggactgctggccgcctgcctgcgc

SEQ ID NO: 43366 - DNA, 493 bp, Arabidopsis thaliana landsberg
ctggatgacctgtgcagtgcactgagccgcctggtcgtgctcggtgccaccaccgaaggcaccgaatcggtgtgccgcttcctgtccgcattgccggccggattgcgcgtcaccgtgctgcatacccagcacctggccggcaaaccggcggatgggctggtggaatacctcgcgcagcattgtgcgttgccggtgcggctggtggagcccggcttgcgcgcgcggatcggcgaagtactggtggtgccgtccgatcggcaggtgcgcctgttgcgcgacggcagcatcgaattgcagccgatcggcggggcgtccactttggcgccgtcgatcgacgtgagtttcaccatggcggccagcgtattcggccgcgatgcggtggccatcgtgttcgcccggcagtttcaccgatgcggtgggcgggttgtaaggtcatacatgatccgcggcggcaaggtttgagtggaagcctacaccggtgagtatttttgcc

SEQ ID NO: 43367 - DNA, 888 bp, Arabidopsis thaliana landsberg
ctacttccattttgtaaaatattcataggttctgttgattttcctagtggaaagagccaggtgctgaaagcaagagatttgttctttttcaatataaccaaattctcactacttttcaatgtcgacttcgtcaaaataacttttggataagaaagaaaaaaaataactttttggatcacgatcgcttaactatatttattatttaataactgtcgaatttagaacttaaataaagtagtcacaaatcacaattgtgggatttattatttagcactcgctcacttttgcacaacggattgaaaaatgctgttgaacttgttaaatatgtttactgagatggtataatcacagaaattcactagtatcaatttcagtatctgtttcaaaagtagtgaatgctttttctagtctacaaaacagttaacagtaaacagtcaaccatagtgggtgagtcaaattgagttatatgataaaatagacagaaacttaaatgaagtaaaagatcaataatatttctattcacgtggtggcgctatatagattccattaaaacggtcagttttgatttttgcgtcccatgtaccagaccccacccgacccgctccaccacttttgttcccacccttaaaaacgacagcgtttcacaccaaccttaataaccgttgccacagtaaaaatactataataccctcaccttcttcataatcatcaattcgaatcgcttttcccaccacagtaataccaaaactttctcttctctctctctctaatggctctatcaagaaagcttcttgttatcttctttacatggataacagctttatccatgtcgaaaccaatcttcgtatcatccgataacatgaatttcacattcaaatccttcacaat

SEQ ID NO: 43368 - DNA, 679 bp, Arabidopsis thaliana landsberg
tgaccttttctttgatttggattctgaaattcggatatgatcagctcttgatccgttggataaaagacaaccatgtgatcgttgtttcttgtcatctcggaaaggttttgaatcttcagggagagagaccgagcttgtgaggatcgtttgtgtggagaaagggtaaaagggtttgtaaagttcaccgagctcatctaagccacttgtctccatctccggttcgtagaaactagacgtctccatcggtaggcaaaacgaaggtgaaaacgtaccggaactttcgccggaaaacgcgtctccggagccggagtagcctctgactattgcttctaggtctccttcgtccatataagccacctcacccatatatctctctcttttcgagtttttgtttcctcttttatctcttttggtgggttggtgtacaagtacatatgacgagaacaagccttttgggaaacagcggtttatataaagaaggaaataagattagattgtttgtggtttagggtgttttcgtttcccatgtgaacccgttaagtcattaaacttttaaaatttattgtgttgacttttgaaaaagtcaattcgtacctaaatgtttagaaaattttaataaagtaacattaacttgtcaaatatccatctccgacaaaatatctcaaattataaatcatag

SEQ ID NO: 43369 - DNA, 511 bp, Arabidopsis thaliana landsberg
tctcagagcctttctcggcggaggcggcggcggcgacgcgacgaggtgaagacgagaataaccaacagattccgatgacgacaaaactatctgaaaactgacatagaagacgaagaagaataagaagaaacacatggtcatattcacgtcccatcttctcttctttccttgtccctgtcttcgtaccaacacgtgagtcatctcacaaaaccttgttccggaggagtaaccaaaaacagacgaacatgaagacaaagtcacaaagagacagtgaaagtcaaaggaagaaaaaaacaagagagaaggaggagaaagaagaagaagaagaagtggttttttggaatgcaagtttgtttgttgtcttgtgggtaaaaataagatttattgactcgtaaaaagtttctgatgggtcttcggatccttctaagatctggcactattctttcctctaaaaggcaaaagcttttacaagaattctctttttctctctctttctctctttgcctcggaa

SEQ ID NO: 43370 - DNA, 765 bp, Arabidopsis thaliana landsberg
  unsure (1)..(765): unsure at all n locations
tatgtcaattgatttacttccacttatgaatttaaatttatgttcaaagaaatgaactctttgagtcttggctaacaaaacaaattaaataaccttatatggttaatttattgaattatattattatttgtcaacgcttaaaccacaagtttgtgatagttttggaaatttaagattttttgttctgttttggaaataaaatattcaatattacagtttaggaaaagtctcataaatatttataatttttttcattaacattagattcgtttttaatttaataaatcagtcatcaaccaatcaaatatacttactctcttagaaatatatgagagttgcatatttcatttagtttagtgttataaaaaaaaaaaaaaggatcacatgcaaattgtattcactagagaaggggatgcgtgtgattcaactagtttatatatttgacaaatagttttcttttgattatacatttaaattagatgtttatttctttatgttcagatgaatatttttggaaattttcgtgtaattattttgtttatttcaaaatttttattttatttttgtgattggtttggtttgcaagtaacagagtgtgtatatgatcgtaaaactaaaccaatcaaaccgatataagtcaccggctactccggttggaaagtatgcggcttctagaatcagtctcgtagccgtcttcacctattcagccggtaaccccttcaaatnccattttcgtattcctcattattttttctctttcccaat

SEQ ID NO: 43371 - DNA, 857 bp, Arabidopsis thaliana landsberg
ttcccgatcataaatccatgattcatgaagctaatttagtcacacaattcaattattaaaaatgaaactaataaagttgcatgcacctattgatttttctaattaatcacatgtaggaagtttttctgaatggagtaccatcttaatcttaaatcctcgataaccatgaacaaatttgtgatacacaattttcaaattgcatggatcggttaaactatagcccaaagatcaagttccataaacgattgatatttgaaagaatgtatttgttcaagttactgtagattttatctaatacaataacaaaacgatattgataagattactttgttattaattacatcaattttatatcatgattgatagagatacgatataagaataatctaaattcttaaatggtgacggagaaaggcaatgtttggtccagcacggctaaccatttgctttgtcctatttgccggctctaaattattttaaaatatatccatcttacatgatacttacaaaaccacacatttgcttctcatagacatagtcaaagtctcaaaacgaaaatgaagtcaaataaagaatctgataaatatcaagaaaccaaatgaaatgcaatccgatttatggtcggagactcggagtgtaacctaatcagatactttgttaagaaagttattaaaaattttttgttcaaagaagaaagttattacattttccaagtaaacaaaacgttagcagagtagaaaatttagtacagtgactgacgcgatagaaagcccatttttagaatgggcctatttcagagctgaggcagtgaggcccggtttctttgaccgagtaagattaggtgtgactgaaacata

SEQ ID NO: 43372 - DNA, 495 bp, Arabidopsis thaliana landsberg
  unsure (1)..(495): unsure at all n locations
ccactaccgcatagactattccgcccccaaccaccgaattgacaagaccttgctggaattcgatctggatgctgtaagcacgcgggtaaaaagtcgactggaattctcaccttggtctgacgaccaagcggaggatttacccatggttttggacggtgaagaccttcggcttgaaagnnnnnnnnnnnnnnnnnncccgcttgcggattccgcctttagcctgaccgacaatcaattgatcattccgaaggcgcccaaacacggggtcatcgagatcacggtcacgattcagccttcaggcaatacccgccttgaaggtttgtacatgtccaatggcaattacttcacacaatgcgaggcgcaaggctttcgaagaatcacctattttcccgacaggcctgatgtactcagccgattcacggtcaaattgcgcgccgacaaaggcacccatccggtcaccttgtccaatggcaatctgatcgacagtcaggatct

SEQ ID NO: 43373 - DNA, 320 bp, Arabidopsis thaliana landsberg
ccatcatggcaccagtgcacgtagacttttttggtcttatgcatacccatttaatgtgggcgaggtgattgcacaacctgaggtgaacactaacccaatccaaaccaccataccactaattcaatgtctaaaggagcgcgagagatgattataaatacaaatgcactgtttgacacaccagaagaagccagctaggctgttactctgctaacgacgcatagaccactctgttccttaagccgcgatattgattcttcaacggcatcactcgatcctgaccaatcagaccactcctaccgccatgaggttttaatcggtgc

SEQ ID NO: 43374 - DNA, 821 bp, Arabidopsis thaliana landsberg
ttacatttccagagatacaggctggaaaatcgatgtattcttaactctttttttttcttcttaactttttaaatgcgtacaataacaatatgcatcaatatttctattagtactattattcttgttaaattattatgtaatgttcttttaaaccgttaaagttttatacttacataactatatatgaagctctagtaaacgatgaccaatgatcataaatatttaaactagagactagactagaccgtgctatataatactagcgagtaaagacaattatacagttaatttggttggagattaggtgtcattattcaaaaaaaaaaaaaaatggtatgatgattttttcacataagaagaaattgacatgcgaaagatttcttaattattagaaaacaaaaaatgatttcttaatgtcggaatatacagataattggtgatagacaaattttatgtgtctacttttttactttgtctactaagaaacaactacatttttgctttgtctactaggaaataacggattgtgacgaatctacgattactgagtcagagagtgtcaacgcgccaaactcatccaaaagatcagtaagttacatatgaacgtagtagtgacattgacaaaatccgatgtatccacatttagtttcattgtcagctcataaattaattagagtaactagttattttctcgtattgattggttagttgtaatggggggcaatagttctcggttatttacacagaaaaagtcagacgaagtattaaatacttagaatacatagccgcacttttctattttgatgatatatgtatgtgac

SEQ ID NO: 43375 - DNA, 556 bp, Arabidopsis thaliana landsberg
aaagaacggaatctacaccctacatctactatactccaaaaccttcgattctctatttttagaaatttcacatgatcatatgaacaattgatataaaaaaaaaaactaatatattaataattttgtgtaaaagaggaatagaataagtgtattggacaagaacatacctaagtggagagactgaagaaaaaaacaatggaactagttgttgtggtcctacggggataagctttctgtgtagtgatgatctttacttcaactttggactcttatctcagacttaagaactgctcctgatctcacctctcacatcaatgtcccgtaaaatgtatatgggtacaaaacttctactgcccatttgaaagagatatttttactattttatttatttttatttagatatttttttggtaaattgtaaaataaaacgtgcaataaaaaccgagaaagaacaatatagttgagaattgtgctcgtgacaataaagaacaatgtttgggaggtaaaaataacatgagtgtaaggagcatatgtttgttctttgaaaaaaaaaaaa

SEQ ID NO: 43376 - DNA, 674 bp, Arabidopsis thaliana landsberg
tttggggtcggacatgggagaaggattttaagaacaaaactccaaggaaatggtcacattagtgggaagtcgagttggcaattgcgctcatgacaaaggcaggagttccttcaagcctctaaagcattattacacaaattgttttatgatccttcatgttaataataatgataaattcgtgtaggtgattgaattgggtggaattccaacgattggtgattgagcagtgatattacaagctgctttaagagctcccatgccttcagacttcttgaagatcttgcagacgacacacagtcttggctactgatttggcaggtaactcagttacaacctgtctttgggtttagtctgttagagaagctagtctaaggcgttcgatatgactaaacttgactataaacaatgacatttgaatacacgtggtaaaaatctgatgcagcccgttgtacgatgagatcatcacattgtgtttggaccttggagaacttgatgcagccatcgtcatagttgcagatatggaaaccacagggatcactgtccctgatcaaacccttgacaaggtcatatctgctagacaatctaatgagagtccgcgcgctgagcctgaagagccagcatcaacagtaagctcttagctatcatatcctcttctgctggttgtgaagtctcta

SEQ ID NO: 43377 - DNA, 573 bp, Arabidopsis thaliana landsberg
ttttgtttgtcctctacgatttttcgtcaaaaaaaaataaaacttatttttgataacatgaaaagaaaactttaatcaagttaattttcaaatcatgaaagtaacaaatatattgtatcacacaattctctcctaatttagaagcatggagaaatgcatccaaagaaaaacttaaatggaaatttataacagttgggagttcgatggtttcaagacagtgatattataaccacgaaaataaaactctttttgataactagaaaaggaaacttcatgaaaagaaaacctcaatcaaatcatgcaactaattctctcttagaaagaaggagaaaatcatccaaatatacttaaatggacatctacaatggttgggagtttgatggtattaaggcagtgatactacaaccatgaaaagataacttcatgaaaagaaaacttcaatcaatttaatcgtcaaatcttacaactaacatacatcagctgacaattctctcctaaattagaaggaaggaaaaatgcatccaaacaagacttaaatagataaatggttgggagtttgatggtatagaggca

SEQ ID NO: 43378 - DNA, 140 bp, Arabidopsis thaliana landsberg
tatcatgtgggcgcggttagttctgtaatgatgtatatgtgcggaacgccacctggcccttttctttaggaccattaaatttgtgcaataaaagaggcgtaggtgcatgccgcccatgtgaatgacctctgatcgcctga

SEQ ID NO: 43379 - DNA, 320 bp, Arabidopsis thaliana landsberg
ggaaaacccaacattttgcgcccggaaaagaaagacaccctggcaaacccagggttttatttggttaggcacaaaggcaaaaaaaggggggggttcccgggggtttggaaggcgggcaagggaaccgggcccaggggcgttaaagatttttcaaaactttttttgggatttgcccggttttcacgccgaaactcacccctgggccctttgggagggggcccttttgggggcccccacacccttggtggccaaaccttttgggttcccaaaccctgggccctcaaatctaattttttaaccctcaattgggtttgggggga

SEQ ID NO: 43380 - DNA, 740 bp, Arabidopsis thaliana landsberg
aatatcatttacttaaacaatcgatttcattaagctcattatataaaattcctgtattttttttttcacatataaaattcctgtacatgatgaactatttgatcgaaagaggaaagtaaaccagggagaagcgatttattaaaaaacatttcttaccaaataaaaacattgcatttaaatcgtcgttattctcaaagacgtttaataagctgtcacggtcaaatcgtgaagaccagttatgtcgaagacgagggcagaaaaagcaacaaataagcctcttctattacaaatgatggttgtagattttagcatgtcattaaatttagggttgactttaatgttttgacttcatcatatacgcgggacccaataatatggtagtctttttaaaccaataaaatgtatagtcccatcgtatgttaagaacttaagatacaaaaagttttcacatttctagatttgtttcaaatttcatgacatgatcagttacgttatggaatcgaatcagagaagctttagttgtgtcgaatttctattttccataaagtatgagttgtcgacattataattttcatcatggataacaatgtaaaattattaatttaaaaaaatattgtaaatatacactgcaaaaagaggctaggtttcttcagttaaacccaaaaccaaataatccataaattcaaaacatagatagataggtgaatgagtttaagtacacaccacacttgcagtcattt

SEQ ID NO: 43381 - DNA, 1391 bp, Arabidopsis thaliana landsberg
gatcacttgaatagattcttacttcgcaatacaaagtggaatatttctctgtttcttgagttggtctattttcatatttaatacatgttaaaagatgtgtggccatattgtacaagaaggaattgagaactccattaaaggagaagaaagaaacatccattaagtgtatgtctctctcttcttcaccgaccccattaaatacacaacaataaggagaggcacttataccaaattcatcatcaatctttgtaacccaatcaaatcatgatcaaccacaaaaaaaacaaagcaaatttaatcgaaagtcatatgcatacatatatactcacttgctctctgattttctctacacaaaaaaaaaacaaaaaaaaaatttaactctcaaacaacccaatctaaatggcttctctatctttaccaataactctcaagaacccaagattcttctcttcttctcctcaaaacatctttaaaacccaaccccaaaccctagttttgacaacaaagttcaagacttgttccatcatttgctcatcttcatgcacaagcataagctcttcaacgactcaacagaagcagtcaaataaacaaacccatgtgtcagacaacaaacgagaagaaaaagcggaagaagaagaagaagagaaagaagttagtcttcgagaaatttggagagaagtacaaggttgcaataattgggaaggacaactagatccaatgaacaatcatcttcgaagagagatcatacgttatggcgaatttgctcaagcttgctatgactcattcgacttcgatcctcactctaaatactgtggctcttgcaaataccatccttctgatttcttctcaaaccttgacctacatctccacaaaggctacaccataacacgttacctctacgctacatccaacataaacctcccaaacttcttccagaaatcaaaactcagctcgatttggagccaacacgcgaactggatgggttttgttgctgtagctacggacgaagaagaggtgagtcggctcgggagacgtgacatagtcattgcttggagaggcacagtcacttatctcgaatggatctatgacttaaaagacattctttgttcagctaacttcggtgacgacccatctatcaagattgaattagggtttcatgacttatacaccaaaaaagaagattcttgcaaattctcttccttctcggctcgggaacaggttttggctgaagtcaaacggcttattgagtactacggtaccgaagaagaaggtcacgagataagcatcagcgtgacagggcatagctcggcgcctctctggctttggtcagtgcttatgatacgcagagctaacttgaatccgtacggagacaactataaagttcaacactg

SEQ ID NO: 43382 - DNA, 190 bp, Arabidopsis thaliana landsberg
caaattcaattcttattttttcttggtatttgtttaagattgtaggtgagagttaagtacttacggtttagagttttgggttccatatttgactatttaaatttaatttttgaatatataacctattttgttaaacttagtataaaacataacatatatgcatgttgaaagtttcttcgttttgatggag

SEQ ID NO: 43383 - DNA, 905 bp, Arabidopsis thaliana landsberg
aaaaaatgtttgtgaaggggggggggccaaaaaaaaaagaagatgactgggaaacagtaatgttgaattctaggtcttaccaagccttaatataccactatacattaccaaaagtgccaaaatttataaatttaatcattaacttatctaaaagttatcattattttgagagctaacaatatcccttgctcgtcttattggttcgacatatcaaatacttacacacttatgtacgtaattataggataatcatagtctgtaattcatagtataacagtttatcaatatgtattgacgttacgttatttgtttgtttctaggtgagcacgagcaaagtgcgtgttccggtgtgccaaaagtttcgacatatttacttaatttaaaaacagttattagaaaaagaaggaaaaaaaaacgtaatggggatggtcaggtcaggtggctttacataattcccaattcacttttgagtttttggtcataaaaaatattatcgagatcgtagggtccatattttttggcttctaacgatcaaattttatattttagtttgtctttgccttgcagtacttattcatatcttcttgatttcacaacggattgtgtcatcacctgaacaatagtgttagaattatttgaatgcgactcctaatggttcataagattttacaacttttgaatttctcttttttggaaatcattattgcttcctaattgtatgagctcatgaatgaagaagggtgtgcaatattttcttcatacgtgtactcaagaacatgatccaaaatcttgtcttactcgtaaaaagtttataagcaaaacacacttttggtttggttttggttttggcttttccggataaaatgaagcagtggttatgctattgcgcttttcacgcatgaagc

SEQ ID NO: 43384 - DNA, 627 bp, Arabidopsis thaliana landsberg
aagttcattctcacatttacgcgtacattataaatataagcacattttatagtggtagatgtttatagagagacgtatattatagctagagaagaaacagaaaacaaagatggggttggactggggaccggtgctaatgtcggtaattttcttcatcgtgttgagcccttgagttttgtttcagctgcccggaaagagcaaagcggttgagttcggtgggtttcagacaagcggcccctccattgtcatccacactctcctcttcttcgccttcatcaccatctccctcatcgcccttcacatccacatctacgccgcctaattagccctatcttccccctcacgtcatggcctcttttcttcatttcttgatttctgattttcttgtggaatactgttagttccttcttttatggttggttcattcatcaagaataatcatttttatgaaccatgtttattgtcatattaagttcccacttttattttggtttgagatttcaagagtagagtaacttatctcgcctcttattacgacccaaataaagctttattccactatatttatttgagcacgtagacagactttgactacgatatttactggtaacgccgactccctaaatc

SEQ ID NO: 43385 - DNA, 767 bp, Arabidopsis thaliana landsberg
tatgcttccacaaataagctatatgctcaaagctcagtggaccgtctgatgcatactgcattgaagaagaaatccccgcagctccattggcatctcccatttgtgcataagctcgaagcagagccatgtaaacttcttctgaggctttcaactcctttgcttgcatctctttcatcaacctctcacctagtttaggcttgccagcgtttacatagcccaggatcatggcttcgtagatcttctcgtctggccgtaacccatagctcttcaagttttcaaatgcctctgttgctcgctcaaagttgcctgatttactgtacatatgaaccaacgcagtggcggttaaaatgtctggaaagatcccattttgagacattttctttagaatcctctcaacatcttcaatgtgattctctttagcatggatatggatgagttttgagtagtccgagatgctagcgttgaacgatttttcatccaggacaccctctgccacctgttgaaacatcaaaaccagtaccaattgattagaaatcatctcttccaaacccatgttagacatatgcatacaagtaccaccatcttgattgaacgaactacctagagtaacaaataaaacaacaacaagaatcccattaaaagaagtaacgaaatcaaaccacagaacttccaccccatcaaatgacctccatagcaatccaattagcaaaaaagcttaaatcgaacaattggggaaatcagtcaagaaccaacacctgagagaacag

SEQ ID NO: 43386 - DNA, 104 bp, Arabidopsis thaliana landsberg
gatctcttgctgttaccttcttttttttttttcttcctttttttttttggccttgtatgggacctatcccccatagagccatagccattagttggggagggggg

SEQ ID NO: 43387 - DNA, 1058 bp, Arabidopsis thaliana landsberg
taccatatgtgtactaaatgacaagataactaattaaaaaacaatccacaaaaataaacgcattcactactaattaaacaaatatactgctaatcaaaatcaaaagcacattctcaaggcataattgaaccataaaattgatgtaaaaaaaaaaaaaaaaccgtaaagcatacggtaatcaaatgtagtgaccgttggagggggaatcggaaaaaggaattgcgagaaacgaggaccattatttaaaaggatggaaaaagacagatgtttatggatcgttctagccgttaccagatacgatacacgtgggatgatctgtatggattaacgaagagatctgacctgtcttttgccaaactgatgtggaaattgtgacctggatgttttagagataaagattggctgccccttgtggtaggtcagtccctttctctgaactatataatatactcaatttaatttaactagactagttgaaattgttgaagttcgctaaccataatgtacaaaaatccttcatgttccgggaaaataaatcataattaacgataggtatagtagcagcaaagataagatggtgatccattctcacatgcaatgattcggatgaagtttagccaaatattattattatccaacctcttctgcaccacgaagagactttatttacgtaatatatttgatggtccagtactactatccagacattattgttttcgtttccaaatcataaaacttgaaatcttattgattactactagggtcgatatctcactatttggaaaccgcaggctccctatttattagtttcaaactcaattgaaatgaaaatgtgtattggtggttttaatgtttgcactgcgtaatgttgcctgaactgtatatttaataaatttaccacaacttagcagatataattttgttatacgaaatcgtatagtcttcttcatggacaaagaggaaggcaatcatcattttctatgattgctcatcgacctggcatttccattaccaaaggcagcataatatcaaatcaaatatttctttgtcgtacttta

SEQ ID NO: 43388 - DNA, 532 bp, Arabidopsis thaliana landsberg
tctctacagcggttacctggcgcgcgtcgacgccgacggctatctgcgcatcgtcggtcggcgcaaggaaatcattttccgcggcggcgagaacatcagcccgcgcgaaatcgaggatttgctgttccaggcgcccggcgtcggcgagatcgccgtcgtcggcctgcccgacgagcgcctcggtcagcgcgcttgcgccgtggtcgtggccaatgccgagccgccgccgacgctgagcgatctgatcgaatttctcgcacagcgccaggtcgccaagttcaagtatccggagcgtctggaactggtcgatgcgctgccgcgtaccgcgtcgggcaaggtgcgcatggaagtgctgaagctggccattctggagggcgggacatgaatctgccgcgcggcgcgttggccgggattcgtgtggcggacttcagcacgctgctgccgggacccttggcaacgctgatgctggccgaggccggcgccgaggtgatcaagatcgagcatccggtcggatgcgaccgaatgctctagg

SEQ ID NO: 43389 - DNA, 565 bp, Arabidopsis thaliana landsberg
  unsure (1)..(565): unsure at all n locations
atattttgactcagcaaattgggctaatgaacgcgtttagatgtgtggaggaaaaatgatttttttaaggttagctaagctaagcaaacacctcaaattattttccagtagtaaaataatgaatcaatctaaatggtccatgactgatgtctccgtccatggataaacaaaaaacgatatttgtagagtttagttgtcctatacaannnnnnnnnnnnnnnnnnnnnnnnnnnnnnnnnnnnnnnnnnnnnnnnntaaaaccaataattttggatgaaatttacggctagttttactaattaattacttggtgaaagatgtcttttagatttattagataatttaataattatggccgagtattaacatttatgcacatatatatgcatataaagtcaatacacatggtaactactacaatttgaaatatagtttgatcttcggtgactgaggtacctgagtaatgaaaaaccaagattagacagcataacttcattatcaaaagagaaaatactagatatcatcatttggaaatattatattttgatgaatatatacatggttt

SEQ ID NO: 43390 - DNA, 528 bp, Arabidopsis thaliana landsberg
  unsure (1)..(528): unsure at all n locations
atgcgtccatgacattcatatcctccgagacaccactcaagacggagtttatcgatcacagagtagagatcttgtcttctagggctaagaactcgacaaaccaagctttgacggtttttctcacggactnnnnnnnnnnnnnnnnnnnnnnnnnnnnnnnnnnnnnnnnnnnnnnnnnnngcgagatatctccgtgttcttcgcggattgttcaaagccatcgtcgccggtgaaattcaaaacggagtaatcgcaccgatttgtttcgattttcgaaagggagagaaattaggataagctctagaaatgatattaatttaactatatttatatttattaagtattagtaaccgcccattaatgataaccgtttactttatgtggttattttggtgagtntgggtctactaaagcccaaacatatttttcctagcccaaacatggttttgacttttaatgggattcttgaagagaatgaaaaatgctgttgattcattttattttatttttaatagtctaccaaacact

SEQ ID NO: 43391 - DNA, 821 bp, Arabidopsis thaliana landsberg
taaaagaaaaatcaaaattttgcgttaccttgttacgttttttattcttttaaacggtttcctcgaactttatttatattctacaaattccttaacggaagctctaacgatcattaaatcgcgtgattataaaactcctagcgtggttataagtgctgcaatgggtgcaccacctagttgcgaaattggattcaaagaaggaaaaaaatctctcaaatctccatttacaaaagataacgatgttttgtttcagatgattttgattccttttgtttttacaaatatgctgaaatgaaactacatgcatgttttttttttggtatgaacatatgcaagtgtatttttaggaatcctacgtgactcaaatgagaatatttaacgtagtaatagtatataaatgacatgaactaatttactcactaccgtattacaaaaaccaataaatacaataaaagtaagaatacatttgtcaaaataaatgataaaacagataagaaatgtaactttttgtgtgtttttctttctgatatggtttcttataaacgttaagttttattaaccttaattaaatctttacaccaaatccagaaacaacagcaaaaaaaactttgatttggttcgaaggtgggatcgaatgataaatccataatctaacatttgaacagagtgggcacaatggaatggagagaggagagttgctatgaaaaatattattgcatgttgaccaattagataaacatttaaataaatagtttagttattaaaaaagattatatttaattctgagagtaaaatcaaatgtggattgaatgcagaatgat

SEQ ID NO: 43392 - DNA, 296 bp, Arabidopsis thaliana landsberg
  unsure (1)..(296): unsure at all n locations
tttctttaatcatcgcattcattttatgcacttattgataaatgaaataacattatcatcgatacacttaaacaaggtttgggttcatccctagaaggcnnnnnnnnnnnnnnnnnnnnnnnnnnnnnnnnnnnnnnnnnnnnnnnnnnnnnnnnnnnnnnnnnnnnnnnnnnnnnnnnnnnnnnnnnnnnnnnnnnnnnnnnnnnnnnnnnnnnnnnnnnnnnnnnnnnnnnnnnnnnnnnnnnnnnnnnnnnacgtcgcatataaacagtataaaacactccaaccaactcagt

SEQ ID NO: 43393 - DNA, 493 bp, Arabidopsis thaliana landsberg
tgcgacgggaaacaaaacgtcatcgttttcagtgccatagagttgaaacggagtaacgggctggcatttgtcactctcttatttacttaacccacttctttagttctctcagacagacattcatgtcatttcttcaagtcctcgttattaaagtctttatatcctcctaatttctgcatcgaaattggtcccaaaagatgtacaaaaaccaaacccacctcggattttagatttttgtagtgtatagcttcttcaatctcatacgcaaaagatcgtcttatttttgttattttatattttctttgctatatatgcgtatatgtatgtatctatatacttgccccaatcaaactctttctctttcatgtatcgacattcatttattatgtatgttcacacatcatagacctgtccaatctaaaaatatttgggtttttttttataagaaaaaaattcatctaaaaaatgtttggctagaaacatgaataatcac

SEQ ID NO: 43394 - DNA, 589 bp, Arabidopsis thaliana landsberg
aaccacatgagaggagctaagacatagcattactgagaaacttgaagacttcaatagaataactacttataaaaaggacaagagattggaaaaaactcgtctgcaaggaatatatgttcatctttcatctgaatgtgtacacagaagagaaacagactgaattgattgatgaagagaatctggaaaacacaacaagacacagagaacgaaatcatacctcaccaacattagccaatattaaataaaacaataattagaccaaaagttgtatagaagagaagaaaccaaaaacaccaactcatacgtaaaccatcctccctccaacaatgccttcaacatctacacaatctaacacgtaggaatttctccagaaattcagaaaagaaaagaaatcaggtaatctaagaactccaaaaaggaagcaaagggaaagaagaaaccgccagaaagtaaaagggagcgacgacagatcaaccacatccttcaattagcagagacgaaatagaacagaggtaattgtggttagataaaacagatgtaacaagagaaatcagacgaaacctaaatcgatgacagagaagaatgagag

SEQ ID NO: 43395 - DNA, 610 bp, Arabidopsis thaliana landsberg
ttttttttccctttttattccagttttaagttgtaaattacattgtctttttttgcaaaaagtatgcaataaagtattaaattaattaacactatcgctacaactacttctttaattagtctatactattagatatcatataattttatttcttaaaagttaaaagaggcaatattgtacattttgaatgcattgtgccttattaaacaattaaatttatttaactttaataaagttaaaaataaaaataaaaatttggactctggtagtatattacctgattaatatatttgagtatttgaccaaatttatatatttggaaaatataaaaatatcaactaattaataattcaactatcaatgaatttttttccttcattcagttaaaagcattcatggaatttgttttacttcccattttttcatttgatgtggacaaaaaatctgaaatggaaagctattattagctaatcaatcattgtccaaaacttggttttatttctctcctaactcttgacttccctctctctctctctctctctctctctcttcaatgccttaaacaagtcaatttctttcctcattcaacagtttctcttcttcttcctct

SEQ ID NO: 43396 - DNA, 776 bp, Arabidopsis thaliana landsberg
  unsure (1)..(776): unsure at all n locations
tctcctgcgtacgagtctaggatctaaacagataatatttgacatggattagctaaaacgataaccaatccaaattcaccagaatatatactcatgaagacattcataagagagatacttatcctcaagtttacagaatttcaagaaaaggagagtaaatagaacctcggaggataagtgacttgtacagaagtgacctccttagatatagacttcaagaaaatctcagaaggcttaacacgagccagaagcttcaatccaaacctatacattccaaccacaacttgacattaataagcctatcaacaaacaaagaccaaagcctcaagaaatgtctcaaaatacaaaaaggtagagattttacaaacccatgaatcttgttctttattgatccaccaggcgctttctcaagacccacccaagctttattcatctaaccattacaacaacaacaacatttcttcaaacttagtattggagaaatcaaggaggaagactgattaaaaaaagccattcttttatctcatttctagtggtcctaaatgaggttcgttgtcaaaaacctttaatcagaaacagaaccaaaagcttattcattggtcgaaatgttatacacccaataaatctcactagacgccacataaacacacgggtatgaattctataaagagaaaaaagtttcagacgccacatagagacacgggtatgaattctatagagagaacaanaattcaatgtaattttaccttgtcagagatgaaatcgacgagaagctc

SEQ ID NO: 43397 - DNA, 358 bp, Arabidopsis thaliana landsberg
  unsure (1)..(358): unsure at all n locations
gagacgatggggagttgtttgggagaatcccgccctttgaacctgnagcatgttttgctggtgaagatgcatttgcttccgtcttcttcttgccatttactttctggtaagaaaatggattaaggacaattatgagcattcgaaatcttttcgaatcaaacattgctacttaaaatcaaatattgtaaacgtacatacccaagaaacttctggcttttcagccaacaactttggtttggaaatagaatcagaagctagtccctgcttcttcgtattctttttcttattgcctttagttttctggcaaaacaaacaaactcagctcaactaagaaaatataatcttttttggaataaac

SEQ ID NO: 43398 - DNA, 468 bp, Arabidopsis thaliana landsberg
ctttgcttacgtcacatcattatctgtgactaattcttaatcatcatcacttacttttatttaaaaaaatctctgtttgtatatatatgatctttgcgatttttatccaaatcttccaaagcttagctttttttttcttttcaatttctctcttgcgttttcgattttattacaagaactttgttttgggcttcatccatcgttcaaggttcgttgaaaactatgaagaaagttgagttttttatgctccttctctgcttcatcgcagcgtcatctctagtggtaagacttaataatcaaaagctcgaatttttaatgttcttccaatcattgaaatataatccgagattaaagtttttaaatttgatcttgattggtgtgtaaagtctgctgatccaccaacatgttctgctgatttgggaggcaagtgtagtgattctgatgactggccaggtgatttctttcctg

SEQ ID NO: 43399 - DNA, 482 bp, Arabidopsis thaliana landsberg
gaatatgtgtattttttagttgttaattgttaataataaaataaaatagttatctgaatgttatttatgtcaaaaaaaaatatgaatgctatttttgtcttaaaaacctaaaattgtacactttgaagaaaccctattttattttattaatgtgattagatttataattaaatataattaaatgattgtaaaaactaacttaaattcttatttataaacataaagtaatatttaattttctttaattaaaaatatatattttattttcataatttgttttgctttttttttttttagttttgatttatttttaaacatataatatgagtatatgactatatgacatagcatattggtttattttgattagatagaaaaagagacgggtgaataaaagggtttaatactatggtgaacccaagtatatatcgtccataacaaaaacactatataattgaggtttgtagattgtgcaaacacgt

SEQ ID NO: 43400 - DNA, 1119 bp, Arabidopsis thaliana landsberg
taagacagagcttgataccacaacaaaaattactgtttctaaaaactaacaaaattactacacttccaattataaattgttgacttcaatgagtttttctttctttttggatagctaattaacgaatgttcaatcaatataaggagaaagctttatatattcgcttttgaagtaaataaaaagtatatggttgactactacaaatatcagtgttaagcattaattgtttcaaattagcacttagctattattgttttttcgtaattgacttcaaattgatgtgaccacatgatgaaattctaacattcttgtcgctaacaaactgcattattgtttcttgttaaccctaactctctcactaatcgataccgcaataaacgtaactcatactaggattcatctaacctataatacgtctttccgtaattctttataatttggcgcaaccttgatggatctcctgataacagatatttttatatagtttgtcattggtgacacacttgccattactttgacatgtatttgtttttcatcatttggcatgcataaagcaagaaacaaaatgaacctaattaaaaggagacattccactcgattatggcataaggcattccaagactcacgcgatcaaataaggagtccaaagactgctagaccaaaaaggcaagagatattgtatagagaaccaagggaagtccatggatccttccaaaaggagatacatcgagtcatcgaccatgacagagcctcaagatttggttcaaggggtctccgaaaatgccaaatgtaattcagctgagggtttagttccataaagctcgctacaattaaaattaaaccataacacgtaatatatggtccccaattgaatgatttaattaagaccgtaaaacattattgatttatgatttaatattattgaattttcatggatcttttgtctaaaattctctttatgatattttcttgatgttttaattttgatatttcaaattattctttatatattttggttgtttgagctttgattctattttaaaatattataatttgttatttataaatcataatatttcatttcttataccatatatgaacgtttaaatcgcctacaat

SEQ ID NO: 43401 - DNA, 582 bp, Arabidopsis thaliana landsberg
ggaaaccccataacaagtgattattacagtgttagtaagcaaaatgacaaaagaaaaagttgatctgatgccaaagttatccataagaaacacaaaggtatgggaatgttccttatgctctgtgtaatgtcccatcaatagctgaaacttgaatctatattctaaaacaacctctaggattcagtcaagttgcaatgaaaacagtgactcgagcaaaagcatttcacacttcaaccaattttaatcaaacacaacacaataaccttcaaaattggtaacatcattgatatgtaactctaccataagatcttctcataagaatagacaacaacatgaacacgatttagccaaatcccaaacacatgaacacagtaagcacatctaaatcagaagctaaacaacactaaacaatacgcgaaccctaaaattgaagaagccgaaaagaccaaaaaacaaaaaatacacgaaaaccgaaaaagatggaataaataaccgatgagagcaataacgaagataacatgagatttcgccggagattttgattatgtcgtgattctccggtgaagaataaatgctggcgac

SEQ ID NO: 43402 - DNA, 513 bp, Arabidopsis thaliana landsberg
  unsure (1)..(513): unsure at all n locations
tgggagtaagcttcttttggaactctcagctttaatatttgttgtttcgtttccgttcaaaagttgaagcggggttaattacctatttgcaggatatttactgaaacatgccagaaactgaagatcatgaagggttctgattctattggcttaggtaagttttccaacatctttccccctaatctgaatacaaactcaatggctcatttcattgttgatttattctgtggcagctccaggtgcagtggagaaatcgaagaacaaagagcgggtttgaaacgaagatgctcaagacaaaaaaaaaacactatgcacagttccaatgtttaagttttatttactgatgtgtttgaaaactctttagtctttttactaatttgcgttgtaagactttggattctcttatttgtgtgtgcttgttcaaaacaaatacattcttatgtgtgtgtttctactttgaccttcaagatatttcnnnnnnnnnnnnnnnnnngatttgtttattgttagcac

SEQ ID NO: 43403 - DNA, 662 bp, Arabidopsis thaliana landsberg
accttttcttaattgtaattataaaatttgaacgagagatatggctgcggcgccgcttgctcttttgacctatgtctcctctgtcaaatgttttagttttccactatattactatatgctatatttttctatatctaaaatcagcaaaaagttcttttttggtaagataagtgaaacaaaacacatgcatattcttttgacacatgctttcccgtgtaaagacggatcatcatattgttgtgttgaaatgttaatccaaagtccataagcttgatttgttgttgaaatgttaatcttaagtctataaactttttggtactctaataatatagtaactcctcatattgatagtcattcgatgatactgcaacattgtgtgttttgactatagattttatacaattgtgaaacattcattatccaatttgatttctacggattaacctcttttttttgtatccgtaatcaactctgaataaaatggatacttataaaaaaaaagctactgtccgaaaagtatatgtggataatcttacatgatttgcaagtaaccttatattgtatgctaattcgatttaagataacgattttatacacccctagatctactaatgtaaatactctaaataaatagacaatttcaaacggttgtctcggtaata

SEQ ID NO: 43404 - DNA, 632 bp, Arabidopsis thaliana landsberg
atgcatttgccttatattacgttgattaataccagtgttgttatcctaatcctaaaaaataacatataaatttcccttcgcttaaaaaagaatcatgacaagaaaaataactacttttgatttataagacagggaaaattatcaaccaaaggctaaactaataaccttttgaaatgcataagaattgttacttttctgcatagagaagtaaaagaaaatcgaaaaaaacataataatgaattcgtgaacgcatgctcacaacgtttttaaatgtaagccacacaaatacaaccctttcactttcaactttacaacaaaacataataagaaaaatcacctttgttgctttgtcattatgaatcttatagtttaataactttatcatttttctcttaatattccaattgaaatttcttaattttacaggttttcaggatttatctttagtcattttttatcctgagcattgcccgcatgatctgtaaatcccaacattttatgttgaaaattgcactaaaatggaattgtatcgtgtaacaaaaaattatgtacttgtctattggatcttttaaaaaattcttaacttttttttacccaaataagataactgggaagtcagaaacatcaaagac

SEQ ID NO: 43405 - DNA, 799 bp, Arabidopsis thaliana landsberg
gtaccaatctttttgagtgtacgatgtagtcggcgtagaggaactagtttttttctgatttatccaatttggtattttagttttcctcgccctattttatctgatttatattgctaaaaataagactttttgtattgggcttggaaacccatattgattgctgggcttcaaaatccatgttaaacggataattgtcgttgatgggccattcattgaaaagaaatgaattttcagaaacaaaaacaaacaaaattgtatgattcactaaaactagactacattttatgaatttcgtaataagtagtgagatatgattcactaagactaaattttttatttttaacatataggttactttatgatttttatattgaacatgattataaaatcgatccaaaactgaattacatttatctgatttatgtctcatgatattaaataaaagttttcaatctgcttcctaacaaaaatctttcgtacttgttttttttgctcaaaatcataagttgatcgtttctttgtttgataaacctaaaaacttaaattttctcaactctcccaacctatagacttgtgttcacatagaaataacatgttaggaagaaaaagattatgcatcctctaacagttaaaatcgtctacgaaatgtttgtggcaataattatatatatatcattattgtttttctagttagtgatgaatttattttcatttttgctaactgcttctgaaaaaatgatggatcgttgtatatattcatgtaaaactcaaatatagtcacaatcttcttaagttcgtc

SEQ ID NO: 43406 - DNA, 355 bp, Arabidopsis thaliana landsberg
ttataaaaaaaaactggttgattttcctttgagaaaaataaaataaaatttctcttttgcgtggaatcaaaccagcaaccaatggtttgagttactagtgtgtttccagctaaactaagaaattttcacgcgaaaatggttcgatttagtatacaaatatataaggcagctataagcaccagctttagtgacttgtacttttggacgtctctacttgtatccgaaattatctgtatcctaaattatctgaatccaaaaaatctgaaacgaatccgattcgatatctaaatgttcatgtttctttgtaacggtcccaaagtgcaaatgacagatttggtaaggtgtcaaatattaa

SEQ ID NO: 43407 - DNA, 506 bp, Arabidopsis thaliana landsberg
ctgattgcacttctcagtctaccttaaagtgtttctctctgagaaatcgaattgtcacagctctaaatggtaattgtttagttgtcaaggcaaagtcctatcttccacgtttctctatatacagtatgtagttttttgttttgcccttgatcggaatgtagctaaagaaaggccttgtatcaacttttattcatatataattgtccatttctttactatgaagtttcacttccttctcttgttagataagaagtcgtcatgtattttatggttcatgttcattggaaatccccaaaccatcatattctcaataaccaagagctgaaacaaagagtgagcttaatatcccatctaaacaaatccgagttcagaaagcacaagaggatcaagaaagtcacttggactctgttttcttctttgcttaaaaacctaataaagactgttttcagacgtcaagaaacaggagagtttgtgaacagagagaagagctgagaggagacaaaaag

SEQ ID NO: 43408 - DNA, 617 bp, Arabidopsis thaliana landsberg
atacatagaacgatgcctacaccaaagattaaacaataaacatgactcgtggtacgaaaagggaattttttaaacctcaatactgaattttgtgttctttacctgtgctggcacagctgcagcaagcacacgaggaatagtcttaggttcaaggaacacattaacacgataaagggcagatccggacagtacatttgcaaagaaactgttccatacagtaaagattagaagcttgatacatgcagatttctcaatctggctatgagaaatgaatccttgcattgaggaaagtagaagcataatgggtggtactataagaaggaaaagctggaaaatgagactcggaagatatcccgtaatcacttgactcacgattttcctgcaatcataagaaaaaaaagaagattttgtaattgttcaattgaaacgaagaaccatctttatctaaatagggctttacttacatatttaatattccttttagaaaagggaaccaagtctccaactggtgaagattagcaagaccttgaaccaatacaacggggacaatgattggatcaaagagctacgaaagcacaagcccactacatggagatccattttttacatacatgcag

SEQ ID NO: 43409 - DNA, 359 bp, Arabidopsis thaliana landsberg
tggttctgcttctcaccgctttgtggggtgttctcctgtattaatgaatcataccaaaagatcataaccggttaagcccggtttggtaacaaaacctaattaaattatcatatttaaaacctagagattaattgttaccttggctactacgttttcagagacaggcttgttaggaacagagccttcttcgttttgcatgtctgattccttgggtctactaccacagccacccattattatataattttttgtttttgtgattttgaattgcccataggatctggagtgtgcaaaaaaaatttacacaaactttttaagtcacttgtacttttttattaatgttgacccgaggattgagc

SEQ ID NO: 43410 - DNA, 995 bp, Arabidopsis thaliana landsberg
  unsure (1)..(995): unsure at all n locations
aagattatggtccttgaatgcactaaagaacaagtcaaaaatcaattagaaagtgattaaagaatttcgaagaacttagagacaacaatttctcaattctacatagcaaatatcagtaatcaacggtgcataaccaaacacgaatataaccacaatgccttttgagaccttataagtggaaagacattcaataatgaagggtgcaagagaattcttacaatttgacaacatgacaatcagtgtcgttagtgggactgcattcacattctatttcttgcttagctgttggaggaggaacttcagttaaccccaccatttcaatcttacaattttcagcatcgaatttccagaatttcgagcccaatgtggtagcgatttgctgcagagcatcgactaaggaacagacacagaagcaaacatcataataaatcagtacaattacttgagcaacaacaagaattacactcttcttggccttaacaatcatcaaactaaagctagataaacaaattatctaaaactcttcatcaacaacaacaataaaatatgaatgattgcttcaacagtttataggatcatcaattcatcatcatcatcatgtgaaagaaggcctaatcaagtgtttaatacaaaaatatgacaagttctttctcaaggtaactcaatggtcaaggggattcaaaccataatcaatcaaaaaatgatttaataaaccctaacggacctaatcacacccaattaacacctgcagattttggactcaaaaaacttcaattaaaaaaatgaaaaaccccaacgtcaccggaattgttgcggctaccaatcatgaaatcccatttccaacagataatgaaaacccaaaaaaggaaactttacaaataaaatgagaaaaaggagcaaactttgcatagaatctgtaaacccagaatccaaaaaggaaagagaaacgataaagtcaatttttttacccaannaacagaaggaagtaacttgaa

SEQ ID NO: 43411 - DNA, 621 bp, Arabidopsis thaliana landsberg
  unsure (1)..(621): unsure at all n locations
ctccccaccttgaggatattggtcgcacgtttagctccaaacatttatcagtttaaacaattgcattagctaaatatcagtttattatttatcaaatcagaatttgatttaatatttggttcttaaaagaaaaacagctaaaaactctaatgaagtggtgaaccactattatgatttatggccaatgaaagtaccctaaaagattttgttttataaaaactacaaagagatccaaaattgatacatcacaatgagtcgcatatcgctttcactaaatctctttatttaatatttacaaaaaaaaaatatcttatttaatttcaactacatgttttttannnnnnnnnnnnnnnnnnnnnnnnnnnnnnnnnnnnnnnnnnnnnnnnnnnnnnnnnnnnnnnnnnnnnnnnnnnnnnnnnnnnnnnnnnnnnnnnnnnnnnnnnnnnnnnnnnnnnnnntacgggccattgatattggaatccaataacaaatatataaatctataaaagtcgtcatttatcctcctaactacttcttcttccttaattcgtctccccccatagacgacgcctttgacacgagtttaacagttacttncagagacgacgctttaacacgaat

SEQ ID NO: 43412 - DNA, 1024 bp, Arabidopsis thaliana landsberg
cacaaatggttatatttgttgagtttttttttcctcttgttgtaaacctaaaaataaattgaatgatcctatcaaggtctttgcaaaaaccttagagtaacattaacgtgaaacagatggagtatatatttgcaaaggttaaaattttatcttatttcaatatcttagagaaaaacagaacttttcttaccactaataaattctttatttctgttttcttaatatatatagaaaccaacagaaaattcatattttactgtaaaatcagaaaagctttataccaatcaatttacgtagaatttaaacccttaccgaaaatcccaaaaaactcatatagtatataattcaaaggcctttaaaactataaaatgtagaagtgtatagtttagttatttataatttatactaataaaaagagtaatggattgctaagacatgcatttttagtaattagtattcttattatggtaacatttcaacacgaataatgcagacgctgttggaaaaaagttaattagccgacacctactcctaagagatgcctaattgcctactataacatgggtaaagcgatgtatgtcgagtaaaagcttgaaatcataaaagtatcatgtttccaaattgtatattatttatgttttgtgctttaagaaaatgctattaaagttccaaaaacacttatctatacaaaaaaaaaactatctatacaaaattttaccctttagacttggatgttttttgttctacaacatcattatattaaaatacagaaaacaatagttaaacttgaaaaaaataaaaaacatatccaatttagataagcaaaacataaaataataaaaataaagaaatagaaaattaaaatttaacctatctaagaaattcatttttatatgagacgagaatttgagaacaagttcgagagtaccgagacaaaacataacgaaaaagaactattcctacttctttcggaaacaactttttttttattattaaaaatcggaaacaaatttttgaaacgctt

SEQ ID NO: 43413 - DNA, 259 bp, Arabidopsis thaliana landsberg
cggcgaatcttcccttatccacttttcgactccattattgttcacatcaatctctgctctgagaattggtgggccataaacactgcgagggggtctctggactccgacgagagcgaagcacaaaaaccatacctaacacacggtgaaatcagcggcctgtggcttaatacgactagtgattttcagtgcttgcgcctctttctccaaagagacagacgcacactaagaaaagaatgctagtgggcctaaacattcactg

SEQ ID NO: 43414 - DNA, 586 bp, Arabidopsis thaliana landsberg
tatataaagtggattataggggttacacgccaatatttatcaattttggtcgaaatcacattgttacttggagagaagatataaggagccaattcaagttagttcattttgtgtattctacgcctgaaattcagtaataggaatcatcttcataacttaattggtatctcactaataaacctgtcgccaaagatagtaaagtacatttgaccagaaaaaagtagcaaaaattataaaccaatcaaattctgcatcataactcataattaaggcctttcattttgaaaagaagtcacatgaataactgaccctaacataaataccaacataaatagtaagtaggctatatatacgcgttattaagtgtagaaatagaaaactaggaatgaacataaacactagttttcatgtgacttctttcttatgttctttcatagttttccatttctacacttaatcttgccggttaaatgaatacacacacacttactcaatcttagacacgcattttgtccaaacacatgcatgaaatccggtttccatccaactataaaattcattttaaactctattcataaccgaagaa

SEQ ID NO: 43415 - DNA, 696 bp, Arabidopsis thaliana landsberg
taaagcaacttttgtgatgcttacacttgtgtcccaatgtttggttatggttttagttcaaccgcatctactctcctatatctttcggaaagaagtatgatcctgatgggaagtacattaggcattttctaccggtactgaaaggtaactgaagtttgtttccaccatcctggtaagtttgtttactgtgtattctttcattagctaataagttttctgattcagatatgccaaagcagtatatatatgagccatggacagcaccattgagcgttcaaactaaagcaaactgcatagtcgggaaggactacccaaagccaagttagtaataccgtctctatttacatatacatagtagaaagatacaaacattattgtgtctaaaattttgagaaatgatgtgatcaatatcatgaagctagttgttctagtgaatttgaggttgctgatagataaagtcttctttaagttgccatagttctaacttcgttgtttgcagtggtattgcacgattcagcaagcaaggagtgcaagaggaagatgggtgaagcatatgcattgaacaagaagatggatggtaaagtagatgaagaaaatttgagggatttgaggagaaagcttcagaaagatgaacatgaagagtccaaaatcaggaaccaacgaccaaaactcaaataggtagaggcattaaaagct

SEQ ID NO: 43416 - DNA, 720 bp, Arabidopsis thaliana landsberg
atgcatactgattgaaacggtttttctatctcaaaatggatatatctaattctagcatgactaatattggtgattataaaagttcttttttcccaatttggattgtacccacttaccttagtagtttctaaatcgaaacattagcattaaaggtatggattgcgttagttagaaatttgttaggttgtggttaagtaagaaagcctaaagtgagaaaggtagttgcgctttgttaataacgattaacaagcattaaacctaatgaccgattcatacgtaatgcattaataaagttatggtggatatcaattaacaagaagatgttaacactcaacaaaacattttattacgatctgaactcttaaccacattaaaattttgggtactaggattttggagcaggtaaatatatggtgttgggagggtaatcgtcattatattaccatatttctaaacccaagattttatgacgtttaattttttggaaaaaaaattgagtactacattgcattggtcaagaaaacattagaaaatcacttccgtgttttgagaagaatagtattttttccgacttggttctgttgtttcaatgagaatataggtttgtgtttggtcttttgagtccaactaaaactggaaaagaagtcataatgttgtcaagtagttttctttcctgaaaacggactaaatacatagttgctgagtttagtattcttaaaa

SEQ ID NO: 43417 - DNA, 648 bp, Arabidopsis thaliana landsberg
taataagaagatagaagtgacgtttgagaagcttcggattgagctcttcttcttcaatagattgattgcagcgcaagtggtccagccattcttgcagaaaaagcatgagacgaggttggaaccaatccgtttgatctctagtttggtaggcttgcctgtaaaccacgcggtggaactcaggagacagctggaaaacaacaagatagaatatgagattagaggtaccttcaaagtcaaagctcattttggaatgattcattactcttatcagctgcacgggaggtgccaacttcagatgaccggtccaccaaccggaatcctgatttctcgtaattgcacgacgaagaaatgaaaaagaatacggtacagttctctgagtcagtagtcatcttcaaagtctttagctttggcatgtttattcaactatatttctatttgcttacccacaacttgtataaaagaaaaagacctagtgaactctatccaagaaccgagatcggagtttgtactatttccaagataaagaaactggaaagatattatctttctatgaagcagatccataattgatccacaagacacagtgccaagacccatgttggattttaataccgttcaacatccctgaaccacgaggggaaaagaatt

SEQ ID NO: 43418 - DNA, 660 bp, Arabidopsis thaliana landsberg
attgcgaatacctacatagcaagttgtctattcagtttgacgatctgttcaagaaggcatgggaagaagatactttctctgaacttgagggagatggtgtgttcaatcattcatgttcaatttctataatcgtcacatacatttgattttttttttttttttttttctgataatcaaaactgtcatgaagatcatacagctggatctgagtctccaaaggcggaagctgaaccggatgctaaagcgagcataagcaatgaagtcagcaagggactagagactgacgtcactgtgctggatgagattttgtcatcagcaaaaacagcaataatgtccgaagaggcagttactgggagcagcgataaacaactacggaaagaggtaagaacgtggattctacattttgagatttgaatttccctctcataaacgtgatttggggtgtgttctttttagggatgggccactaaaggagatagccaagacattgcagaccggttttatgagcttgttcctgacatggcgattgaattccctttcgaattggacaactttcagaaggaggtatttccctcaactttttaaatttgcggacatttgaggaacgtgcctggttgccttttatgtatgagttattagtaaataaataaatgtcttatg

SEQ ID NO: 43419 - DNA, 161 bp, Arabidopsis thaliana landsberg
agcgacctcacgggatatgtcacttcggactccgctagatcgaactaggcacccgttttttggagagtatggggaaatgcggacatgtcctttgaatgctcccagggataggttaagtgatatccctggagaatccgatggaggagatgttggaggttcgt

SEQ ID NO: 43420 - DNA, 595 bp, Arabidopsis thaliana landsberg
ttaagtatatcaagattacctatgattatgtctcttcttctctcctttttctccagttagattgggccatattagagagaagggcaaccatacaagccctcttttctcacttttaatcaaatctgtaatattatttgccttcttttctaagtttgatatttttctcgaccacaaaatcacaaaacacaaatcaaatgatcagttttggaaaagcaaatgaggcaagcaattagtaaaaatagcataaccacttgggtgtttattttttttccgtataatccaaaagtattttttcagtagaactacaacataaaataaaggacttaattaacaagtatataatcatcaaaatcgtattataaaaccatttattttatttgaaaaactaactcaatccacaataactcaactaattagaaaagcatcagccaaaaaaatgattaaaaaatataataaaaaaatgattatctttcaatttgggggcataatatattaaacagaaaacattgcttttttattaacgaaaggaatatttagaagaaactttaaaatatagaaaaagatagcagaaaataatgaaaagggacgttagtac

SEQ ID NO: 43421 - DNA, 430 bp, Arabidopsis thaliana landsberg
aagcccgccatagctattatcaaactttattttatttgatcatgctgctttccaaagattagctggggtagtgaagcaacaagctctatgaatggtcagctagagaatgttgactgtgcttacttggatgagtcaactcctgaactgcatcttgctattctctgatacaagaagtcaaaagcttcttcacactttgccttcatcaatgtttccttaattataaacccatgccgaaatgcagcttggatcgtgatctgtttccatttgatagcttgctggagtttctaatctcttcttcttcttccagcttctttctccttgcagcctcctccttctgtctctgcaggagctccaactctcgatacctttcctcttctttacgttgaagttccattgcttgtcgcctttgagattattcaaccctcctact

SEQ ID NO: 43422 - DNA, 671 bp, Arabidopsis thaliana landsberg
tacattacgattttcattttggacttgtggaaaaaagctttaattattttctaagaaacttactatcattgtttgtaattagataccaaattagtttctattgacgaactgaactctttgactttaaaggttcaccaaattagagcattgaaaattattttcaatacaaatttggccatgacatgaaacctgcctatgttttgtgttaatgttgttaacctaaactttatgtgtacatgtgatagttcgaatttctagatattttaaaagtaagagtcttattcgactttaagataatatgatctcaattccgtatatgcgtatatattcaatgaatcttgtagatccatgcatgaatgaactaaccttaacttacttcaatttagctacatcatttcaattttcataagtttgtaaagtaaaatgtacaaatatcatacataaagtaggaagaaatagaggaaggaggaaagaagagagtggagaagaaggcaaggtaagaaagaggtgtctccaaagtgcatcagcaacgcgtgcggaggatccatagatgacacggacgataaaagagttggtatcaatcttttaaccactacttgcaactactcctcttttcttctatcattcatttttaccttttgttaaccagctggttccatgtttacatcaca

SEQ ID NO: 43423 - DNA, 758 bp, Arabidopsis thaliana landsberg
tcttattaagagagctaccgcctgtagatgatcaagtggctgtaagaatcaccctttcttctccatatcatttacatttaagatttgacatggctgagtataaatattgagttctgtttacagcgtttggctctcaaacggttgattgatgtcagtatgggagttatagcacctttatcagagcaactaacaaagccattgcccaatgccatggctcttgtcaacctcaaggaactatctggtggcgcttacaagcttctccctgaaggtgtcccaattgtttacctgaaagaattcataatatagagaacagttttctttcgttatttcttagcttcggttatttcaggtacacgcttggttgtctctctacgaggcgatgagccttacgaggagcttgaaatactcaaaaacattgatgctactatgattctccatgatgtacctttcactgaagacaaagttagcagagtacatgcagctcggaggtaataattgaatattctcaatagctaatcttttactgagttcaaaattgtcacttttaagcgctaagtggtttttttttcctggacttgtaggctattcgagttcttatccgagaattcagttaactttcctgttattcatcacataaacttcccaaccggaatccacaggtagataacgacttcaagctttatgcagtgaatggaaaatccagttttgaccatgtgatgttttctttcttcttgcgcacaatgcagagacgagttggt

SEQ ID NO: 43424 - DNA, 497 bp, Arabidopsis thaliana landsberg
ttggatttttatgtcgaagagtctgtagctaactatttagctcttatgtatggtcttgaagtagctttacagaacaatctcagctctgtggttgctgtaaccgactccgagttgctctataatcaggtaaagtctctcttctttagcttgttgaagagacttgctttcatatggttttgtatctctttgtaggtttgagctcacgttttatatgaattgactttgcagataactcgtgaggagcagctcgagatccctcttttagtagctctgagagaaagggtattggagaaaacaagtaaccttaatgggtttgttctaaagcttgctcctttctgtgatcttgatgaagctctaagcttggctcaagtagcggtaggaatcgtgtcttctaatcttgatggggataaaccgatcgagaactgctcgatctgctgtgaagaccgtcagtctgagatgatgctatcattgaaatgcactcacaaattctgttcgca

SEQ ID NO: 43425 - DNA, 1956 bp, Arabidopsis thaliana landsberg
atctttaatacagtttatagaaagaaaagaaagttacttaatacacctgggttatgcaaacagacttaccagaacatcacgatattaactctatacgttaactgtttggttcatccaaatgttcaaatacacaaaacagcaggcaagctttaagtctactagtgcgcatttgccacaagacaagactatagcaaagattgaattataacttacttctcctttccttgactcgtccaaccggttatagaaccttataacgtagacatcctacaacatataatagaaataaaactagtaagtgtacctgtttttcatttactctcatacttccattcattagagaagtagatattgaagagaattaccccatgattaacttttcgacgtcctagctcttcaatcaccattgtcggccctatgacaccacgccttataggtttctccaaaaaaaaaaaaaaaaaaaaaaaaaaacatcacattatgtaaacaacatttcagaggaatgattcttttaagctctaattaaaaagcggagaagaaggatgaaaagacatacaatgtctgggttctcatgaggatctcttttatacatctcaacatatttgcctctaatgaaaaggaaacgaagattacagtactcatgaccgatcttattcacacccaaatgataaacccatccgaaatactcaaacgttcctccttcaccacctccggcgctgctgctgctacgactatggcttccactatggcttccactatgattaagatctccggaaaaacttacttttccgagattgccggaaactttcttctccgatccgtcgtcggtggtaacaactttcttcgatccaggcgatgtcatcgcctttctccggatcaatcaatcaacgcgaaacaataattcagctagatttgatgttgaatcgttcgttgcttcattcaattttgagaatccacttttttctttgtttgtttcaattatggagtttgttgagtttggtgggttcattgattctgagcctagtctgcgacgaatttatgctctccaatcaaaaccatccacgtcaagtgaatgtttttgttttgccattttcagactctgcattaaaataaacatttagccatttaacatgcattttcgagcaagtcgacacggagggataattaattactaaaagtaagaatttattaaattcactaatacgctttagttgattatgtaacccttgacataatcaaattactttctagtatgtaaagggtgtgtatatttaacccaaaaaaaaaaagtgtgtatcattttatgggagaggcggagccctcagcaaaaccccaaaataattaaaacattttactaattttgtttttcttctaagactatacatttttatcttaataagaaaaattaaaatttaagaaactgattgcaagacgggtcaatcaatattaattttgatctatttggacctattaatcagtatttctaagtgcaagaaattgattgaccaaccatagacatagaaacaatttttatctagttacaattcacaatacaataattcaaaatattcaaaataatgtggttaaaaaaactgatgaaaaacaaaattattagaaggccacttatgagatgacctataaatgccgttgcagtaactagtgaacaatagtctcggccattcatgacttaggctttaaaatgtacgagagtgaggttactttttggttatgtgacactacgtaataaaataatcacagttttcagttttatttgccccaaagtaagataatcaacaatctgagacataataaaaggagaaaattatgaacaaaaagtagcagcatcactctctctctgtttggtaactgatagatgagcatttaatgaatgttccacaacttcaacttcctagttccattacgaaaacacgctactcaaagaacccccctgcaagt

SEQ ID NO: 43426 - DNA, 888 bp, Arabidopsis thaliana landsberg
  unsure (1)..(888): unsure at all n locations
gtgtaatagaaatcatatatggatcgggcattatcgatccaaagatgtaaaaaagaaaggaacatcaaaaattttaaatccctttgtttggtaccacacgaatgtaattgttaacatgcatgtttataattaatttgcatgtacatgtgactgcgactgtttatatcctgtgagtaaattgtataaatacacaaagtgtgtttccggccgtgagaaacagatcgtacatttcatatatataatatatacccaagacttcgccgttgcttcaatccgacgtctcgttccacatgcatttgcatcattgcttcggtccatgccttctcttttatggagttatattgtgatttgctcattctttttctttaattattgaactatatatttcataaaaaatgttcaagatacattttatgttaacttttttcgctgtaaaaacctgattgccgggaaaacaacaactggttcacctcacgaaaatggtgatcaccaaatcgaaagagaattatcgtccccctaatgacatattttgaattttacatattgagagaaaaaattgagagaaaaattacaccttattcaaaaaaaaaaaaagaaaggaaaattaacatatgtcgaaaaagcccatttatttcttgatcattgtttccaataataagttataaaactaagagcctgctgctattcaataagcccattctgcaatgtaaaaaataaaggtggccctaatatttcgattatttttccttgtcaacacaagttttcgtctcggtcattccatcaatgtcgtctccggagactacgncnaagaagaagaagaagaagacatcnccgacgccaaaatcgaccacagattcatcacttnccgatgatttgctactgagcatc

SEQ ID NO: 43427 - DNA, 533 bp, Arabidopsis thaliana landsberg
  unsure (1)..(533): unsure at all n locations
gaaaatcaatcaatcacagtttttcatatattaaattatttgttataaatatatcctncnnnnncnngggggggtatctttaaatggccttgggcattttaggtaagaccgccaccttcacgttctcatatctttcctcaatttcccactttcctaatcagaatctttggattttatatcgaccactacttcatgaatattaaatgaatatattttacttaatggagaccatgatagatccgacaaatacaaccgtactactattgtttttggtgctaatcgcttctctttgtatagtaggcctggtctctcaatcaacttgaagctcaactgtcattttcccccacacaaaataaaaataaataacatcatacgtatatacataacgttcgacgcgtaaagattttatgtattacaaaggtcaaaattgggtacgtgtcatatatggaaacttaattcacacgctaaaaacaaaatattgtcgactaaaattactgaagagtactttggtatcttactcactacatggatga

SEQ ID NO: 43428 - DNA, 892 bp, Arabidopsis thaliana landsberg
atatgatagttggtagaaatgtatagtttctagtaataatagagatcgttggttaaactccccaactttttaaaattaatttgattagtggatccgcaaacaaatattagattgggcctatatgcatctatattatttttatttttctgtaatttcagtaaaatgggcctatggtcctatatgcatccgaataattagtatactgggcttatgggcctatatgcatttgattttatcgataaaatgtgagtcaaatgtctaatgtgcgccgttatgaagtgcaagtggctaatttttttcacctagattccttctattgaccgtcgatagacggatgataactatgacgtggcattatcgcagccatcaaacaaagtcatgtataacaaacaagagcacacaaacgaaaacaaattcagttgcggaacccaaattcaaatcaacggaattagaatcacgctttcaattccgtaacccgccattaaaaaccttgaaccctcgaagcaaatcgagcaaagattttcaaatttcgaatttcaaaattctatctctctcactcttccaagcttagagagtcttagagcgagaaaatgatggcttctcttaagtaagtgattgatctctctctttctctctactacgattcttcttcttcttctccattcatcgttttggtttaagctttgtcttaagttttgggtacctgactcgcttcttctcgttattattttgttttccgatgatcctgatctgtttgtgttgtttcggattcatagagctgaagaaacgagccaaatgcagcttcgtgagcgtgaagaaaatgatgaagacgaagatctatttgagatgattgacaaatgtaagatttgaattcgttttcaacttttacgat

SEQ ID NO: 43429 - DNA, 413 bp, Arabidopsis thaliana landsberg
ctataacgaataatgtatttttcatcgtggttactagtgtgggaccaagatagttcatcactcttctataaataagcatttcatttttgtcaaacttcttatatctactaagaatctcagatagatgttttgactaaaaacatgttactggatgtgattcaatcattccctactggatttatggttgactccagagcaagtacagcaaattcctaggataggattaagagaccaaaacattggaacaaacaagaataatggaggagttgcaagacataccaaaatagggtagctcaatctcaaagaagtaaacatgtcaaagtggtctaactctaaatcccaacccaccttcttgtgcccggccaagcaaaataagtgatgttgggaagtccatgtcttgaccataaactctt

SEQ ID NO: 43430 - DNA, 443 bp, Arabidopsis thaliana landsberg
ttctgaggaatcttggctaaaaccccgaaaacaagcttatcaacaagaccgtatgaatcagcgtgtaagaacacttgctcgcagctcttgagacacaatacgatgtcggtccaggaccagtagaacattccttgtagaaacttctctgttcgaagcaagagattggaggaacagagtttctctgtcatctcaaggaagacagaagagcaatgcagaatggacacatttgagacatctatcgagattcctccaccataacagaatcttaaaaccaagtcgaacccatctgacccacctggaaaattctcaacctcgatgatgattctactggccttgggattctttttcttcttattgctctggtttaatcatcttgctcaagaagcctgagtactctgagagcaaatcctaacccaagagacagagaaacagagtttaattca

SEQ ID NO: 43431 - DNA, 823 bp, Arabidopsis thaliana landsberg
ataattcacttaagcagtgtttttcaaattattgtaaagtatttgatctacttaatgaatattttgtaatatttacttgtatctttatcccttttggcccttacaaaattctattctgaccatcttttcttttttttccccttacttggtccatttctagattcctgtaataaaacacctaaattttgccattaaatcacacatttgtgtctttgtgtgtatgcgtatatatatattagcctcaaatgctaagtaaatggatatcccaccacagtcacaatctcatcaagtccattaccacattccgtctttcttcttcttcctcttcttcctctctctatatttcaaatctttacttcctatcagaagcagaaactctgtaaaatctcaatgtctgccacttaattatacatcttaccaaacgtgaaactcgattcttatttcaccttcttaatcattttcttgtgtaagccttcgttgtgggtttttgcagcattaatggtgcactaaagtttgtgcaaaacagttaaaaccttcccctgcaaagccaaaaacaaaaattcgtttttttcccttctcctttcttagaaaacgataagaaatgggtcagagcaagttggtgttgtaaaagtcagaaccacaacgtgagagagagagagagaaagaaagcaaaaaaagttcgttagcttgtgaaacttgtcacaagtttcatcactatatttataactaaccttatgttgaagagaaagcacctcaacacaagaccaatgtcaatcttttgtaccagaaacttcttcaacgattctgcgtcgaagatacaata

SEQ ID NO: 43432 - DNA, 712 bp, Arabidopsis thaliana landsberg
gcaggtcgactctagaggatcccatcatttttttttcttttttcttttttttactgccatttatttttcatttcttaaatatctttttaatactttttaaagcccatcctccacaatgatatgaactagaaaatcttttattataaataattgaccaaaaaacttatgttttttttggtaaaaaatacttaagtttgtacatacttatttgcatatttgttttatggcaacactcatctatatttcgagaaaagaggcatgtgtttttcttctttagatttttatatatatatatataatatatttttttgtaaaaggattatatatatatatatatatagttcaatattaacttatacaaaaataatgtgatgttagtttttttcacctgaatcttattagattatctttagttttcttataagagtccagctagagaatatatggtttttgatccaatcaaattttatatttagttgaatggtcgggtttgactacaaagacatttgcaaaataaatgtatcaatcatacagcaaaatgaggttttcttgtcattatttgccatcctatttgtttggggtttcacaaggcctaagtcaaatttgcacagaatcggtaaatacaatgttgccacccaaatcaaattagctgaaaaccataaattttgattgcttaagatttttttttaaaatgacaaatcgttagcctgaa

SEQ ID NO: 43433 - DNA, 904 bp, Arabidopsis thaliana landsberg
atccaaatcgtaggaaaataaaaacaaaaatagatagcgattttttttaactggattcaccaatgtattcacgtcctcaaaaccaaattcttgaacacaagtacagttagtgcaactctttttcacatcctacaaaataatttacgatttcgtttagccgtaacaacttatgaaaaccaagttgtgagaataagaacaaagtgtacacacagtttgtttttcacaatacattattttacgtcttccaatttcaacctaaaatttaaaaaccataaagaactcttattcgactcgaatacgtttttaagactatgacatctctaagataagcaatactcatgactctcgcttgagaagtgcattctcatattgactacaccattaggcaatatgtttcctaacgtttaaccatacaagtttgtccccctctttccctttgcaatactaattagtataacaaatttcattagagaatgtttaatttcataaatatctcaatattttgatatcttatcctatcttccatattttctttgcattttttgtaaataactacatattattatcttcaaaaatgaatttcacatttcaacaaaataaaatattttcatgtttctacatgcatgctagtttattctcttaatagttgatacaatattcctaatactctttaagacgtgcataaactttttaaaattgaatgataattaatttaattcaaatcgactttagactacgttccaagtaaacttccaacacattatgttttttttttgatatgttctaacaatatttgtactttactactttacaaacgccgataataaataaaaactgtcgaatatatctcattccatcttcaaaaaaaaaaaaaaaaaaaaatcagattgtacatttcaaaata

SEQ ID NO: 43434 - DNA, 709 bp, Arabidopsis thaliana landsberg
tttttaattaatatttagaaaaaattgattaattatttctcttttttggtagattttagtaccatacatgttacacattcacatattttgaggtttatttttttctccttctatattttgaaaatacaaaaattgatttggcattatatttaactggttatcctaacattttgatgtttttataaatatctggcttagcccttgcattagaacacatgaacaaacacactatactaccgtattaataaaaggtgaatgcatgatatcataagacttggttatcaaaaatagattacctttataagccaaatgttttcatacatatctaaacctttttaaaacttctctaaattcatatctttcactttaaggaaaatctgctaacatagtagtcaacatggtttcagtctaaatagtgcttattattgcgattatattcatatctcgactataaggcttgggaaatggattacccaataaaatattctatttcattaattaatgcactataagaaaacaaagcacttttttaacaagtgcaaaatccttccatacaataaggacctggagagtttttgcaacgaacaagtttcggacaatcttcctgaatgtcacaattcatactgatacatgaaatacttcctccttttttaggacaccataggccaccacaataagtgttcgatccgcacaacggaatatagctact

SEQ ID NO: 43435 - DNA, 706 bp, Arabidopsis thaliana landsberg
acggagatgcaaattagggcttagtgcgggattttcgacatgggatcctctgatttgtaaggtttcttctgtactgtttctttaaggaggaacagaaaaaaaaaaacccaaagtctcttaatagtattattattattatcatcagacaacggtccatacacaaaaggattccaagctgttttttttgtctgtgtgtctttgtatcaaagcagatagtggacactactgtcagggtgtagtgtgtgcctgtgtgggcttattgtgtcccttctaacactttttcatttttcttatctattttgatttacattttgggacggtgctataacctttatgaacttgtttggttgatttataaccactatccagctcaagatccaaatacctatataattggctaaaaataatgtttaagagtaaagttgtgtgaatgatatgagcataatctttggaaacaagtgattgttataagctttcttttttttttggcaaacgatatgtattatagcaaatgaacacaagaaagctctgtttcatggaacagagtatgtaagtttgatgaagtttcagatcgagaaaaaaaaaaagacagtctcaagaccgtttaactttctttcttttttgacactgattgaatttactaagagttaacgaactcctacaactgataaaccaaacttaacggcacttaactagaacttaacgg

SEQ ID NO: 43436 - DNA, 552 bp, Arabidopsis thaliana landsberg
ttttctggtagtggtagtgaataaatcgcagaggaacgaataagtaaaagctgtctctagtctacactatatttgagtaattgactattgagcagctagcataacgtaaatctgttcacctgtttgtctcccaattattttattttaacacatttttgagacaccaagtatgaatgctatatataatgccaaacatttgccagacaagtgcacatgccctgtgttaaaaacgttacttacaatctccaccagctgtaatattgtgcggatctcattctgataaaaattactctattcatgaacctctcgacacatttatatatatatgcgatactactatagcttagaagtccattcactatcaaaacatatatcagaagaagaagaaagagagaacaaatcatgagtggctattccaagatggattcaacagaccagaaacttgagccggaccacccggtggtcgatcctcagattcagaagcccgatcttgaacctgctgaaatgaaaccgaagctgagcaggaacaggtcagtgtctgcatcagcacaa

SEQ ID NO: 43437 - DNA, 725 bp, Arabidopsis thaliana landsberg
ttagacctttaatttgaagaaatagataaatttgcaaacctagctaccaatgcgattaatcgattatatattatatatcattgtttcaccaagaaaaaacactataattattcagtgtcagaatattttacacgcaagtactatagttgatagatcgcactataataaaattatcagatggggttttaattccacaaagtgtgctgacaaacacatggtgacgtcacacattgtgatccatgcatgcatgaaaaatccaaggcatgctagtataagattagacaacgtaactcctcctgttataacaatatgatcattacccttttatagtatatatggccaatctatctcaaatttatacaaactagtttttgattacttgtttacgaatatatagcacacccatgcaaattaattaaaaacacaatgcaaatcggtttaaatacaaatatacgactgatattacaagttagctttttgaacattaagggctattatatttaattatcttttattaaaaaatgataattaaggggcatttccacatagaaaaatatatgtagtatatatagaatcgtatatatgcgactatgatcagtttgcggctctcgagtgttgtgggacgttaagttgttcttcctccgaatcgaatggccgaaatatgttagcttttcagactatgagaagactttttgaaagcttgacgctaaaattctagagagcac

SEQ ID NO: 43438 - DNA, 556 bp, Arabidopsis thaliana landsberg
tgcgcaaaaacagcgttgtgggagctttcttctgcaccagttatgaaatgtctaattattggggttgggattacaatactgcatgtgaaaaccaaagagagagagaacaaaacgtcaggcaaaagtgaaggttgtacctcttgatcacaaatgtaagcaaaactatatcaatgatttacagtttcaacttaccctgtacttttcttatctccaagaatttgaaatagtacaccaaggactttgtctcctgtaataaccgggccaccactatttccaccgtaggtagttgcgtcaatatgtattgtcagtagtttagtggaacttcgaaggtaatttccagttttaactccagttacaacaccttttgtaacgcatattgtttcaccagctacattgagcaaattatggaagcataataagagctagtttcattaattatcagcaaaaaaaattccgtaatttaaataaacatgacttgcaagcatgatgatttcttggagatcacattaattctcgctagtaaccaaagcagaataaaagtttcatatttttaaca

SEQ ID NO: 43439 - DNA, 886 bp, Arabidopsis thaliana landsberg
caaaggtacaaaagtaaatgttctccaactaacaggttgctttttgcagttgctgctgatttctcatgcacgcaacaattataccgctcgaggttagacgcaaataatttttcatttttgttctgaagaaagtggcaaaggaacaaattaaaattgggcgagggttcgttagctttttcatacatggacaataccctttttattcgtcatataacactaccattttaaacctagacaaagtaataactctttttgtcaacatggttatgaacctttttaaacgagtaagaaacgtatatatattatccccatatgataatggtatctcatttttgtcgaagaaaaatttattaaaaagaaagggaaataagttaaccctatactttgggggcaagatataaaagtaattaaataagtaaagaggaaatggttgcgttaacgccaagaatatgactttgtattagattcgacgtggcattctcctatacgagtgaatagaatataaactcggccaaaaaatgcaacaaatttagtgaatcattgcatcaactaggataaatgcctaatctaagtacaatatttcatcataatcaataatgctttctttaaatattaaagagaataaagcgaaacaatattcatagaaagggtcttcgagatggaatatttttgttttcaccatcatttgttgaagacaaatgtcatcgaatgcgtcatagcttcttactcatatattttaatttagatcctaatgattctatcaatattgacttgttataattttgtatacctctttatataaaataaaaaatgtgtacaattccgatagctagggtgtagtaaaaataaatgaaagctaatacaagcatagagtcacttcaagaaa

SEQ ID NO: 43440 - DNA, 468 bp, Arabidopsis thaliana landsberg
tatggtataccacgggttaaatcctaggatataactaaaagactaaatgaatatcgatatttacgcaatcacttcacaaatttcggtatctaatattgtattttgaggctcacactgatctcattagaggctattttttcaagtgactaaattttgtaatgatttgcatattctacataacttgctttatccaaaggtgattttttttttcccataacccgtacacgtttcctcaaatatatcttactaatactataatgtatttctgaattagttaaaattcatacaaagtggtttataaagtttttgtatggatttagattaattcattttgagcaaagtgaaacgaaattcaaattttgtatggctgaataggtttcaattcagcttgagatataatctatgaaattctattgacgtatatggaaaaaatactttggtttaactttaacagaccaactttcttac

SEQ ID NO: 43441 - DNA, 305 bp, Arabidopsis thaliana landsberg
ttgggattatgagacttgttttcttttgcttcttgctaattctttatagcttataaaaacttgttttctgcggggggtggttcttagcaggatgcagcgagagatgctatattgcagcgagctccaattgaaacctttgcactcaagactgttcaacactttatacaacctcaggtaactctttcgaatcaactaacaatttcttcactcctttagtcttacttattggctttattggaaaaattgacagaaacaaacaaagttggctcaagatgaaaaccaaatgcttgaaaacatgctccgga

SEQ ID NO: 43442 - DNA, 739 bp, Arabidopsis thaliana landsberg
aagacgtgataaataaattccgctaagaacagcaaatacctgtaaatatgagaaattagaagggtccaaaaacaagaatgtgttggtcttgtagagcttgtggatcggaattcggatagcgacagaatgagatgtagagatatataaaaagaccaatgcacatgaaatccacattgcgtcccatgtgacatgccaacagctcacctgacttaaattctaactttctctactcgtagtttcttgctccagtagtttctcatacctacaaagttttttgctaaattccaatccctacctacaaagtttgtcagagttaatgtcgttataatatcttcttaatttatttttttcccacaagttcttgtaaatacaaaaattgaatatcttgtagtataagtatatatcaagtgaagtttactctttttgtaagtagtagtattatttacgtgattaatattataatttgtttctatgcaataagtcttgactctttcaaataaatcctctcacttgatctgtacgaattttctggtatttctatgtctgtgaatattcataactttttgttatggttaaccgaggatgagcgatgtccaaaagagattagttgagtgctctttgatgatgaaactctatgaaatagaaacacatctctctttgaagattattgttcaaagcaaacgaagtgattggtcaatgcagctcttgagaattcaacatgagcaccaacgtaatcaat

SEQ ID NO: 43443 - DNA, 665 bp, Arabidopsis thaliana landsberg
  unsure (1)..(665): unsure at all n locations
gataccttgcacacctgtgttttatatgcccaactttctaacatgtttcacctgttttgtcagatcccctgggattataagtggtatcagcgacttggatccaatcaggtggcctggttcaaaatggagatgccttttggtaagctatgaattatgttcttaagtcattagtttggtctgagaggtcttctataagattgttgccttttctatatccgtaagctcactgctctgaaactatgttttgacgtcatattcaggtaaggtgggacgacattgtggcaaatgggcatcaacagcgtgtctcgccatgggagatcgaaccatctggttccatctccaattcaggcagcttcgtaacaactggtcccaagagaagcaggattggcttttcctcaggaaagcctgatatccctgtctctggtacacatctacttagccaaagacattgtaccactcatataaccatttatcgcctgtaatataacgttttctgctcttattgcagaggggatttgcgccacagactttgaggaatcattgagattccagagggtcttgcaaggtcaagaaatttttccgggttntatcaacacttgttcggatggtggagccggtgccaggagaagccgcttcaaaggaacagaatttggtgactctatggg

SEQ ID NO: 43444 - DNA, 900 bp, Arabidopsis thaliana landsberg
gttccattttttcaaccggctaaaccactggattctttgtctcagcctatgcaagttttgatgaacagttcacaaagagttatgagtttacctaattcaggtccaccaagtaaggcagtcttctggagagaaagaacgtttattgacctagaggctgatactgataccaatagtagtcatgaagccgtcattcatcaaaatcacttggattcaagtttaacttctcaccaacagcgccccttgtatccatatattcgtccagattctgctgtctcctggaaccatttgcactcttcttggcaaaatcctagctttggattccctcagaaagttgcttcagctcagagatatccggttctaaacatgtctgatacactgattggtaatgctcagaagcaagggtatcttggagatagattgcagtttgaaagcaattctagatttgactcagggtgcgggaattccagtcggttaaaccacaatatgttttacaatgagtgttccacttcatcaaaatcgaaagtcgctgggactggctataattatcctaacggaggaagaagtgattacagcccggagaggaagtttgtgagggatttgaacttaaatgtgacactttcaaacacttctgttgttgaagtcagaaaggatgaagaacacctggctactttaccatggcttaataaacccaagtctgtttgtaactctgagttagctgatgggaaatggagtctgaagagtaatgatgctgttccaagttcttctttgaaaccattggatatcagagatgaggcaggagacaaagttcagaatattatgtggctagagaggttaaagtctggttcttgttccaataatccggtgactgagaagatcgatgctaacaaggaaattcctgga

SEQ ID NO: 43445 - DNA, 558 bp, Arabidopsis thaliana landsberg
cactttcttcggtaaggaaggattaaacctacaagtagttgcttggaatgctgattgctatactcggtatgagcgggtacggtaatgcatcttctaaaccgggtggtaaagaacgtcgtagcctgtctattcccataaccaagtcacagaaactatctgaaacaaacgaatctgatgaaaaggtgtagaagaaagaagtgaatcgcattgacatagaaacaaaaacaagatactcagatacaaacaggtagagttatcaaatgggatattatttataaaccaaaaaaaagaaagggatttaattatttaatttcaagaactataattttcttttcttacagagctttttgtttttatgaatcttacatattggtaaatccttttttggccttttgcattttgcatttttttgcctaattctcccaaaagaaacatcatccatacggagcgataaataagaaaatctcaattttattttatttttaacaatttttgtctcttatgaattataacagtcacctgcaatatccacttttgtaggtattttcgttcgtgacg

SEQ ID NO: 43446 - DNA, 620 bp, Arabidopsis thaliana landsberg
actccaacagcacctgcagagacgaatatgagtatagctacttttgtgcacttattgtaaatgtaaaaaacagcgcctgcactgcagagaccaccaataaactaaactagagtatgaaattactaaatcagagttaaccaaaaagtacatttctatactcttttaataaatagctagcaaaagttatcaatttaactaaattcatattaccatcacggtacaagaaatgaattttaagatccatatggatatatattataatcatatttcttcaaaataaaaagctaaattgttatgggattttgttaataaaaagataaaaactaaaaagagataggtccgatgaacaaagcggaagaagaatctgcaacgtggcatgaggagagtggtggtcctgcaaattttctcctgaaactaaggccgtcgatttgttctcgacgcggacccatttagaataaaaacggtaacctttctggcttttaaatactacaacataattaagagaaatgcgaaggtgcttcgcaatctttagcttagacttagcagtggaataatcatctttctgcgctaatcataatataaggaacgtgatcagagggcttgcaatttcacaatgtcct

SEQ ID NO: 43447 - DNA, 511 bp, Arabidopsis thaliana landsberg
aaataaaagattacattgtattcgttattaaaacattttgtatttacactttttaaggccaatgatgtgtgggggttttttagttcgagcggggggttagtgtaaacaattatgataaaatgtgttcatatgtcaaattagtaataccgtgatcgtgtcaccaatcaaatttattttcggtgtaatgaataactcgtgaattaagaacttccatatgtccaatttttgtcttaaaacatattattgcaatagatatagaaataaacaataataaaaaaattgtaatcgatatgtataatgtatttatacattacaaaatatttaacatgactttgaaattttgtaaataattaattgaaattaggatttgtaatcgaataataaaagtgttgtcaatatgtcatcatcatcagaatttataaatccgaataaaaaaaaaagattagttgattatacaattaacaacaacattagagtagatggatgcacacatttcgcattagaggaagat

SEQ ID NO: 43448 - DNA, 568 bp, Arabidopsis thaliana landsberg
acactcattgtgtatccttctcattgacactagttttaatcgtctactgacctgttctaatgcacctttttcaggtatctcttaagcattcaggctctctctttatgtacgccggtcacaaggggggagcatatgcaaagaacagttttggtaatatgtaagctcatttattcttagcttcagttacaatttcctttattattgatgagctcttcacaaagaatctttagccaaaaccccaatgaataaacccaaactcgagctttagatttggtttacccttttcattcattttaacttagaacatagattatttctacattttagtttcatagttagttatgcccaaggagttttgttgcttgctgatgatcttgatgttacgtttatggataagattccacaccatataacagttgtacgacagatatatttcaaaaaacattttgatgaagcaaatgcattttactattctttttcatttctgatgctaatgaaatctttctggtgattgcaaactgagctgtcgaccaatcggttttctcgtatgctaacccaatattttatt

SEQ ID NO: 43449 - DNA, 604 bp, Arabidopsis thaliana landsberg
  unsure (1)..(604): unsure at all n locations
aacgagacctccatcctttgaaggtttttagagtacaagttttacatgtgaaggttgctgtttgaggatttaagttattttttttaaagtttcgcaatagtctgtttaccattaatgtaagaagtaatttgttgaggtttctattttattactatgtttgaacaaactttgtttctaccaatgtatgtatcactacacattaaaaaatttggtaccaaaacattttagtatacaatcagattactacgcagtttctacaacaacctttccaatttttagattaaaaatcttaaaatcattatttttcatcttggtaccaattccgacgaaaacataaattgataaatgctctttagtataaattagaaaagtttcaactgaataaatacatgtaaataaaatttaaatgagaatattgtttttattcttaaatgataaacaaaaattacggaggattttgtttttgaaatttaaaatttaaaattaccttattttcaaatctttttaagagcgtctataaatttatctatattatagntagcggtaaaataagaggtaatgattaaaaatattcataaaaaactganatttagtaatttatgtt

SEQ ID NO: 43450 - DNA, 569 bp, Arabidopsis thaliana landsberg
  unsure (1)..(569): unsure at all n locations
cgacatagaattgaaacctattttggttaggttttttgacctaattacacgaaaaagttcattgttctagtagcataaattcatttgtttcatgataaaaagtagcaataataaataataatttaaggatatttgttcgggtatcggatttcagatttcgtatccaacccaaccgcaaaacaaatgttttagaataccaaactagacttttattttaggttgattcgattccagaattttgggtttgtttttatggcttagacctatatttaaaacaaatcctttatatatataaaccgactattacatgcttcttaataactttggaaattctaggttagcaacgaaatgggatttaccgaggactagaatttcgaaaattataaccaatttaatttgtttgattaattctgagagtgaatcagtccaacaaaaggatttgttcatggattccaactagatcttggcaccggattggagagacatggatgagcttgttctgcanaaactatgntacaccaccatcggcaatacaaatggtttcaatccgtatttctcaatggacatcc

SEQ ID NO: 43451 - DNA, 576 bp, Arabidopsis thaliana landsberg
tttgatcttggcttttgtgttatgcctaatggcgttgatttcttttccacttttacctataacacctccaacagcggcaataggacataagattctgtaaactacaagctcatctctattaatcttatcatgtgaaattcgtctcttttgattcctgttgctctcactgttgtttctctgaatctgtttccgtttcttgcgttctaccattgttaagtatacagaatttagaacctggaaacagattgagattgaaagctgattataataacgtaagggagcaaagtttttctaagaacagttaagattaagactaatcaagtatgagagagttaatgaaattgggtgaaattagagaaaatcaaagtgacaaatgtgttcaattttgaatgtcatgagagtttggaaatagaacataggaaacaagacatgcgaaagtatctaaaaaaggttagtaagacaatgggagagattcatacagagattctctgaggtttaaggaacaactttgaaacaatgatgagatcggtcggagaaagctcttcggaagatgatgaccgaagagaagatgaacta

SEQ ID NO: 43452 - DNA, 454 bp, Arabidopsis thaliana landsberg
gtgcgggtttttttttctgcccttaagaagacgtcgcttttttcctctttagtatcgatactcaaacctatacacacaccaaacatcccaagtttgttggctctgtttttgagcggtgaaaactcgtcggaaaaacgagttttttttaattgggtttctctttttttttgttgatctggaaggagaaaattagcgatggcgtccagtaatagcgagaagatcaacgagaatctgttcgctgttctgggtttgaagaaggaatgctctaagacggagctccgttctgcttataagaagcttgctctcgtaagtttccttattttcgaaatttgttaatttcgttttggttcatggaagcacaaaacaatgattgtatctgtttccctgattgggagtatttgcttgtaaaaccaaatttgatttgaatttgtagctgcattatttgtacatcgat

SEQ ID NO: 43453 - DNA, 717 bp, Arabidopsis thaliana landsberg
ctcggaaaatcttatagtcatcttaggaccggaccgaactttatagatgatgtttttgtatcaaacacatgtataattgtatacttgtcttaatcacttttatttcccaactaaggaaagaatttcttagaaccttgatcttcattctggatttttagaatctaaaaagatgaaaaatagtgacttactacagaagtttttattgactctgtcatatataagcttttttcttggtagtggtagagttgttgatttgatacgtaattggcttattgctatgactaggaactcaaacttgtgaatatattattaagaaaattaaaatatgtaaaaggaaattaaagaaaaaaagctggaaaccaaagcacttttctctcttttgctttagggaaagagccaaacagcttgcaatgtcctctttataacttcatgtttcatttcactaaaggtgtatatcaaaatatattacaacaagaaaaaatttcttagcatgttttcagtgcgttaatgtttatttaaagtgattctgcaaatattaaactaccgtaaacttcatataatcattatacaaaaattcgggcttttgtatgagattgtaaactcgaggtggttaaaaacaaaaatatatagagatgcaataaagtaatctgcaaataagaaaatgtaaacctcttgggtctattttgggggcattacaagcaattgattaaaacccta

SEQ ID NO: 43454 - DNA, 712 bp, Arabidopsis thaliana landsberg
ctttgaattctctctgaatttaatttgaattagtgtgaaatattttcctttggatcaggtctttgtacatcctcatcctttgattaaacattggctctcgttattgagatctgaccaaacttctttccccattttcggtgagtacaaaaattatgattacggtcactcttgtgatcgaatttgcaacgtctctttgtgcttgccgttgttattatgggttttcacttgaaaaattagatgcttcttatttcatataaccaactacttgatccaaaatttgacgtctttgctacttgttggatggcttctctgttacttgatgcttcagttagaattccaatgacttctgtggttgcaacgaggtggtcgtttctatcctcagtcaaagaggaaagcagaatttatcagaacgattctctaaaagcatgtggctgcgcatctgtatctccttacactgcacaaaataatgtttatgttgagctcaaagacccaaaggtgtgttgaatttcactgcagatggacactttttcacactttttccttgtttgcgatattcagaattctttgccatgttttcaggaaaatattggcgtgggttctgcagaaagatcatattcatctcgtagcatgttgcaatacaatttactggcaaagaaccttttggcactagaggaaacgtttgttgccttggattctttaagaatggaaagag

SEQ ID NO: 43455 - DNA, 766 bp, Arabidopsis thaliana landsberg
ctaatatagtattaaactataggatgatggggtcattgacgtggtgactagttgacattattatcaccgtaagatctgattgtgctatataatccctaatctgacgctccatttatttattcctccattaccattattagatctctctgtctctttctttctgtcaaaaatattatcttctttgcaccaacttcaacgcattacgaagcagaagacagaacccaaaaaccgacaaagctcccctattctctcggtataacctcatctttatcttctttctccgccattttctcttttctttgtataaatgtctttacccattttggattagattttccccctccaagtaaatgaatcatctgcttcttcaggtctccattgattctcctactctgttttcctcctatatttgtatttgatgttttgttttttctttggaaccaaacaagtcataaagtttcgatctttgagatcttgcccaattcttggaactagtgtttggttttcttgataatatttctgtgagagaattcttcaattttcagattttcttgataatgttttgctcttttaggaaataatttatagccattcagatttattctcttgtttctttgtggtatatggtgcttgtaattttgcaaaatttggagcaccctatctttttgtttgatgttgatcttattggttctcgacttcttcaaagagttgacttatcctgaaaaaactttttgcagaaaaatcattacttctaaagatggaatgt

SEQ ID NO: 43456 - DNA, 758 bp, Arabidopsis thaliana landsberg
cttttattttaagcattaaactagtagctaatagtcatacacaatctaacgcttttttaaacctatttagtaaaagtaattaaattactatataaacttctaccgccacccttactttcatagctcatactcattgaatatatctttcgtagttagtaaaaatgcagcagatacttcaccaaaatttaagaaaccgactgatgtaatcatctttgttttcgtgcactgccagacgaaatcctggtaaagtgtttccttgcattccatgatgtgactacccttcactatattttgtctctaggactttcgttgtttcattgctttgctagagtttaacatagtaccttcactccttgaacggaccaaaaaccttatttattttgcattgagattcagtcatgaataagaaaattggaacactctctatcaaaagccttacaaaaatgaatcaaacttttattacgacaaattgggttttatttccttctttcctttctcgaccttggtggggatcttctattattgtaataagcaaatagaaatacatgcttttggtggaggcatcattagtgtcacatttttcctagtatgtgtgtgtcacatggttgcgttgcggttaatgttgtaaatatcaatctaatccgaggttgtaataagatggattctttagaataaggttaagggttgagaaccaaaattgagaatttttgggcatgtgatgaaaacgtgtaaaagaatacggtcgataatattgtgat

SEQ ID NO: 43457 - DNA, 1838 bp, Arabidopsis thaliana landsberg
agcaccatcgaaacaatcaaaattatattgtatgtagtaactgatttcttgtaaattattatattgatccatggctgatttcaaatatgaaaaaaaaaaaaaattgaccgaagaattcaaaacttcatatgtaaaatagtgttgttgcctcttggatagtacacattattacatatagaagtacaagtactattacacacgaaaaaaaaaatacatcaaaggaatgttacgttaaattgatgttgtcttgtcgaaaggacggatataaaaatgataacccccttacccacaaatggggtcccattcaatatcatcgttttgttgcgtcgaaatttggtatgattctttgaacttttttgacaactttgtacataacctgatgatatgataaatggataatggagaaaatgggtcgtcgatgcccatttcgctttctttgcagctgtctttgggaccatcacgcttacgctttaccactttctcttgtctctctttgtaacacctatcaaacctatgggacaaggccaagccactaggacatttaaactatgaatggtgaaaaatgcagtgtgtaacggttaggtgatacaaccgcaacatacatatctaaacatcggtgtgatacttttatgcggatactgaatcatacatcaaacggtccactatatatgtatgggtttcattgtatgaacaatgaacgatcacaccaaaaagtgaaagaagactaatattatttatgggacaaggccaagccacaaggacataccaaagaaaaaaacaagagaaggtgataaaaggggcaaaaaaaaaaaccaaacaaacaaacaaagaagatcacaaagagtggtaaaagaaatatttacaaaacagttaaaaaaacaaacaaacaaaaccccttttcttcacctcgtcgcttgtcataagccaaaccttccaaaagtaactactagttttttactaccatagaactgaagaagaagtcttcagttttttactccatactgtctcttttaacttctcgagttttactttttactatacgactctcaaaactggcatgaagtgccaagtctctgtctcttactcaacgttgcggttttgcgttttgcgaaagccggtccaagtaactcttggaacctctcgaggaagagaacccactcgtcttctttcatgtctgctactttcacaaagcttgcactcactggaagctgttcgtttgcgcttttgtgaccagacgatgtgttctcggatttgcctctggttaagggttttgggtttttacgtgtcgtgtcactaagatgtgtgttcttcattgaagtggaaagctttgaaagagatggagccttgtcatgaaaagcagctgaactaaaaaaactgtctttcataatgatcatagggacagtattttcagttttgtcctcttcttcttcttcatcttcttcttcttccttgatgctttcttcaagcttcccgagcgaagaacgtccatttgaaaaagggtttttggtgaaatagtcatcggttagttgtatcttagaactgtagactgactccaaatcatcacagtctagatcaaactgaaactctgcttctcctactacatctgaccttggagagaaaacatctcgttcagtgactgatctcttggcttcaatacacacaacctccagttcacttggctcctcttctccaggacgaaattcccgagtcatcatctcgccaatctcggcaaggcacagaccatatgcagaagcttctttaaggaaaatagtacagagaacaagaacccgaagacacgcctctctaatcattggaagttctcttctaagcatgtcaca

SEQ ID NO: 43458 - DNA, 546 bp, Arabidopsis thaliana landsberg
cttcctgtattttatataaccttacgaatcttttataatcgaaacattttgatcttttttttttaaatgaagtttttttgcctaggctatgcctatgaccaaattgtcatagttcttaagacagtttcatggtcgacacatctctgtctctagttttggatatagagatggtccgtaatttttttatacattgtcacgagtggctctaaaccaggtgatattgacttaaaccagaaactaatcaatattgaaaatgacaattctgcatcttattcaataatctaaacctaatgagacttaacgtgtgtttgttgcgtggacctattttatatctgtaaaattttaatttgttcctgatttttgtcatgaaataagtatataaaatattgtttggacatgagatatggattctttttttgtttctctattatttagctccgagtactcgggtattggcaaatagtacgcttaatctcggagatgagttgacattttggtaagaaactatttgcaggcctaccacattcaaatcacatgagctaaagc

SEQ ID NO: 43459 - DNA, 1372 bp, Arabidopsis thaliana landsberg
tttacaaaatcatgcatagaatgttacatgtatttatgctcttataatgtattcctagtgtatggaataacgattcacaaaataaaccaaaacatcaaatcttttttaccaatcttttgaatagttatttcacttgagctctgatcaacattttttatggtatggtaaaaaatccacctctcagataaagcatcacatcagatgaaacacgaattttctttttcagtaccgtcagattaaaagattgcccacacgtgtttcccgtttactcttcttagattcttattcaatttgtacaaactctttttttacatctccacgtttccggaaacgacaaagaagaacaattcaataaagtgataaacccttctccattcctaaattaaaataattaattaactcttaacattcatgaatctctaatcctaatcaccattaataatttatccattagattaaatcttctctcttctcttccttaacttagaagactcttaaatctaataactctgttcacttgcttcacacgaatcagaaacaaagagcttcgtacatttcgcctagctttcttcgttctagggtttcggatcttacttaattacccaaaacccttgaatccattactctgtgtgagcttaaatctcttaccttttatcactttcaatcgattgggtattaagttgtaaaggaaggaacttggaatcatgaagcttgggcttttcactctctcgtttcttctaatcttgaatctagcaatgggtagattcgttgttgagaagaacaatctcaaagttacatcacctgattcgatcaaaggtatttacgaatgtgccattggtaatttcggagttcctcaatacggtggtactttagtcggcaccgtcgtctatcctaaatccaatcagaaagcttgtaaaagctactccgatttcgatatctccttcaaatccaaacctggacgattaccaacttttgtccttatcgatcgtggaggttcgatttcaaagttcttacctttttagttgttcccttaattgggtattcaaaagatctgtttttgattcaattttggaactgaattttgttttcagattgttacttcactttgaaagcatggatagctcaacaagctggagcagcagcgatccttgtagctgatagtaaagctgagccattgattacaatggatacacctgaagaagataaatctgatgcggattatcttcagaacattaccattccttctgctgtcattactaaaacattgggagacagtataaagtctgctctttcgggggtgatatggttaacatgaagctagattggactgagtcggatacacattctgagaggcgtgcactggatgaactgt

SEQ ID NO: 43460 - DNA, 703 bp, Arabidopsis thaliana landsberg
tatccaacaaggatcttatccaaatcgcggtatctatgtgatctaatggttataagtggaatttaggtgttctaaacatgctcaattagtcaattgtatacttcactttccaactcaaaacagcatattccgagcgaacaatatggatttttatactataacacccaatttctaaattaaacaaaaattgcgaccattatatatggttctatcttttaaaaaccatggaactaaatgatgaaactatgaagtttttttttcacaaaaaaaaaaagaaactatgaagttttttttaccctatattttttttaaaaaaagatactatgaagctttgaagcagctactacgagttgtgtttgttaatgtttctgaaaacaaaaataaattgaaaaaatctttagtcaacatcaactcgtgttttttctcttctcccatcgttataacgtctttttgacaaatgacaaattgcgcctaacttctacgatagacacgtggacacgtgtcgtcatgatgtagttttgtccgtatggaaaacgctttccatgttgtaacctaagatacattgaacagttcctttgtccttttaacttcgcttttttcgaagctctttcccttaccctaccacaaaattacgcgtgtcctttttattacaacatttggcacatttacatttcagaaaaacccgtcaacaaaaaacacgtga

SEQ ID NO: 43461 - DNA, 917 bp, Arabidopsis thaliana landsberg
catctactacaaaaaattcttgcatgaccacaatcaaagccgtaggctaacctttaaactcataagctttctctggtaccaagtaatcccatgtcctttcaagtgcctttcttattttcaaatttgtttctccatctaggtttgcagtctgcacacacaaggaatagtcatatgaacacactaggtaagataatgctactgataacagctttggccctggacaagaagacagtactatataattttaaaggggctgtcaaaagaagcacctcaacgtagcagataccatcagaattagtactggacatgaaaagaatatctgctgggaaaaatccatctttttttatctgcaaaatcaataaccttatttaacaattttagatcttaattcaaaggtaacaagtctttgaaataatgcaaagaaggtatgctgtaaacattgttaatcccatgaccgtcgtaattattgcagggtcaacgtgtggaggaaaaatagatatcaagataagttgaagaaaaggaagaagagagcagtgtctcaacctaaggaaacgcaaagttcaagagcagctgaggctgcaatcgcgtagtgttgctttactcagttatttaatactgtaatgagtgctgttagtatcctgattgtattagcaagctcagccggtggtataagtaccaagaaagtaaaaaaaaaaaggcagatgaccttaggtggatcctggggttgggttgagaagtgggcctctatctatatctatctctctggtctaaaaattcttgacgaaccataatggtaactaaagttcagaacctaacagaacgccaggaaaaaatgagaaaatagttgacaaaaatcatgctttgctggcctctagaatttgggaagaagttatcacggtggaaagcagtagctgact

SEQ ID NO: 43462 - DNA, 617 bp, Arabidopsis thaliana landsberg
tctcatttcttacaattatttactgtaataaaaaaaagaaacaatcaagtgaatttttagcctattttctcagtaatttttagaattcaactgttgacatttgggagactttctatttttacacaaaaaacacgaaaagaacaaaaaaaatccaaggaaaaaaaaatcatcctcaacaaacaaaatctgaatcgacttgataaaaaaaaactctcttcttcctatcttccttgagtcataagcaaccgtgtatgcctggattttgtttccgaatttctttcgtgaatttcaaaaatctgttgatctcataaacacattttctcgagaaaccgctacgatctttaagatttaatttctaggatctcaggggaatttaaacctagtttggcttggatttcaaagttttaggtcctttcttgttccacaagaaacttctttaagatcaaatacaaacatgtaaaaagaaacaaggagaagcaaattaaacaaggtgaagacaaatggacaaagtccagcaacaagcagatttattcggtaagacgatatctccgtttgtagcttcacaaccaacaaatgtcggaggattcactgatcagaaaatcattggcggttctgag

SEQ ID NO: 43463 - DNA, 556 bp, Arabidopsis thaliana landsberg
cttcactatctgtggaaacaagggggtaaagccaattatatcccgtaagatatatagcattagtcaagataagtagtatattctttgttggatattctgtaagttataatttttcttttgcaataaaggtttcagcaatctgaaggagctccatcagttcttaaagtcaaccatctcggacatgctctacacgcctttgttaatgggagattcataggtatgcctttttaccgttgaatatcctactcaaggttaaaggtttttggcatcatcaaagttaaatgcttctaactttgagttttatttaggttctatgcatggaactttcaaagcgcatagatttttgctggagaaaaatatgtcattgaataatggcacaaataacttggcattactcagcgtaatggtaggattaccggtgagccccagtcttaccaactgaacttcaatatttgctccagatagagtacttctacatcagtatctgtagcaaatatcaaaaaaccatctggagtacattttttctgacggcgtctctctttgtaacacagaattc

SEQ ID NO: 43464 - DNA, 513 bp, Arabidopsis thaliana landsberg
caaccatgtgagagtctcgagacagctaaagtcaacgaaaggcgatgatactttcaaggttttattcattttaattagggttaggtacaagcacgacgaacgattccagaaacatatttattgagtggttgcgaattggtttcataaaattattgtcgacgaattaaaacttatataatacttccttttttctttaatgattgattttctagaaccaaaaaaattgtttcaatgattttttatatttcttatgcaaaattagttaaatatatattattattatgtctttattgcttctttttttaaaaatttattatcacaagattattaataaacacaaggtaaaaaatgtcattaatttttttttatatgtatgtttttcaaaaaaaatcaatcattatgaaacaaagagtaataataatctcattacagagggaattggcctcatttcgtatatagtataattatcaaagaagtcatgaagtgaaacacatctagttttgttagggattt

SEQ ID NO: 43465 - DNA, 304 bp, Arabidopsis thaliana landsberg
gtttgatcccttttttcttttgctttaatatatgggggtcattttttttgtctcttttaccccatttactcttgatggcaacacatccatcatatccaactcttgtcggttacttacttccacattaaccatgctttgcttttattttaccatgctttcaattcatttcttacgatgaatctagctacgaggggtgggtgggcatattagccacattaccgttttgattcgatcaaacttttgaatatccgaaactatgagtgtggattacaagttgttatacaaacaaaaacgctatcgctat

SEQ ID NO: 43466 - DNA, 953 bp, Arabidopsis thaliana landsberg
tcgtataattaagaggagaagtggggtcatcaaaacatgtttgagaggacaagattccacgagagtgtggggatctaattgacgacccctaagaaatgggagaggcaacaaagagagaagaaaatagacgtctttctaattggagtttgtcacgtgacggaatcttattggaatccacaaaccaaagtcactaggctctgtccttttccaacacatgaagagaaaatctcggagattccaaacttgtggagagaaagatgcgactggccaacaataaataaacatatttagacacaaaatcctgcggtaaataattaacaattgctaatgtctaatgcataggatcctgctaattgttagcaaatgcgtgccacagctactttacaacttcacttaaaaacatattactatattagaatcgaactatacattgggaatgagtataccactagtccactaacatttgtctaagctatttccaagaaagaggcttctatagactcgatgcatatgaggaaatgttttggtgcatatgataggaaaaaacataaccgatgcatcggacgaaagaaaaatatgatgcatacaattacgtaagatttactataaaaataggaaaattgtgatatacctgtcgagttggacccaaataatcgacaagatagactttacacataataaagagctatgtgtattgacgtatataatctatcttctaataacgtagattagcacaaaattgacgagataagtacataaggaaaacgggaaaagaaaggaagttgtttaaacaaaaagggaaattgcaagccaacttgaaacttttaatttatttagttcacaagttgtgagaaacagttatttctcccaaaccacatttttatcaatataataagacaaataaaagaatgcataacaattaacaaccaatagttatcgctcccttgcatgca

SEQ ID NO: 43467 - DNA, 101 bp, Arabidopsis thaliana landsberg
tataaatctagaataacaataaaatttgatagattttgtaggtactaaatatgtcataaaagaacgagttaagtcaactaattaatgcaattcaggtaacc

SEQ ID NO: 43468 - DNA, 818 bp, Arabidopsis thaliana landsberg
atcctaacttaatctgcctataacttgtcttgtagtatttttcaactttttttatatttttaacggttcataatactctttcaaaaaaattctgtattttttaaatatatcaataataaaaatttaaaatttatttggtatagttaaatggtttgactaaagaaccagatcaaactagtacaaacttttaaatttggaatgcagtttatgtctttcttttttaatctaaaatccaattccaaaatctcaaatcagtttttgacatttgttcttcatgttgacctaaattgcaacatgattttttttttttttttttaaataaaaaatctataactttgttcactattttaactacgatttttaatagattagccatcaaacttttgtataattactaaaatttctgtattatatgtctaattagaaaaattatcgataatcatgtaccagattttatagggagagaagcacaatctgtgaagaaaaatcaaaattaaacactagtaaacacttaagtataaggcaatgacaaccctaagaaaaaacctcagagaaaaactagggtttgtaggagaaagaagaagaacatgcttaagcaactccaaacacaaggacctgatgaggctacattacttaagttagtaccaaaaagtttgacatttgttctgattatggttagacacgaacagtttaggctaaaattgttatccttgcccaatcgtttgttgagagtatacttaatcctgagggttctcaactgatggtgcttaattatgtaggatactaattttatttttatttttctgaaagttcccacc

SEQ ID NO: 43469 - DNA, 482 bp, Arabidopsis thaliana landsberg
gagaaagtgttattaacgagcaaccccaagagagaaaatcttcatcgacaaaattcgattcaggtgatctttttctttcatattttcgcaattatttcttggatctgatgttatctactttggaatttcttcgctgcattatcttttgatttgttgttcttgttcctttgcgtttctgggtaagagcgaagcttgaaattgcaattggaatctctaacaagtttaagactttgctttgatacggtttatgtggaagtatctgtgatttcttatatatttatggaagatattgcagctgattcgagtttggtttgcctatcattgttgcaattttctcggttcaatcaaaggattttctaggttgatatataattccagggatttccagataatttcctttaatttggttggaattcgattgaattttcgttgctttcaattggtttgcagtgatttgggtgaaaagatttttccaagctcat

SEQ ID NO: 43470 - DNA, 514 bp, Arabidopsis thaliana landsberg
gaaatgattatacaatttattagacttacgtatttaagggtttttaaactacgaatacgtctctttgtggtgtattctgtaaagtttaagcccatgctcttagttttccccttttctttcttactcttttttatcatttattttttttctcatttattttttctctattttttttttctttattctcttttttttttcttcatattttttttttttttttccttttttttattctttttctatttctcccttctttcttttcttctctctattcttctttttacttttacattttctttttcttcttattttttctctctctttatttttttttttttttttctttatctcttatttttctatttttttttattatccttcattttctttctttatattcttttttatcttcttcttctttttacattctttactctctttcttatatttttttacttctattctttttttttctttctctatctatactttccttttatttccttctcttttc

SEQ ID NO: 43471 - DNA, 3035 bp, Arabidopsis thaliana landsberg
tgttttgcaaacacaatttgcatgaacaccaaaccaattgtttacatcgttaacttaattattttgttcctttctcttttttttaaaaaaagtgggttgatgaaagaatatggagaaaagatgacgaaactatgtgagaagataatgaaagcaatcctctctagcttcggagacgatcttcatcacaagtattacgaatctgagtttggaaactgtcatggctacttcaggatcaacaactacacaatcccttcagaccaagaagatgatcatcacaacggtgatgagcaagatttgatcgaagggctaggaatgcacactgacatgagttgcatcacgatcgttgaccaagatgacatcggaggtcttcaagtcagaaccagagatgggattggtctgatggatatcaaccctaaagatgaagcactcgttgtcaacgtcggagatctattgcatgcatggaccaatggacggctgagatcgtctcaacacagagttatcttgaaacgacgtggtttcgttggtaatagattctcacttgcttttttttggtgctttgacgatgggaaagtcgtgtttgcccctgatgaagtcgtcggaggttgtgagggtatgagggtatttcgatcatttaaatgtggggattatttgaggtttagagagagtaatgagaaagggaagttcgagaaggttggggacacggtcgaagactttgcacgaattgaagaccgtcgttaattaatttttccctaaaatgaaataatattaatattttttttttgacatacactgagtatatttgtgtatttttcctatatcaaaatatcatttatcataataaaaatattgcaagatacgaaatagtcagaaaaacaaaaaattagtcataaataggctgataatgtttaaacatgctagaatatttgagattcaatgcatagatgtgaaccaaagttggagaccagtttcatatctcatgtctcctaaaatcttatattagacaaaattagcatatacactaacattaacattgcgttttaaaaatttaaatgttaaaatctgtttttattagcttagaatttttaggtattaattgattttttatttataaaaatgtagtttgtaaatatttaaacggtttttttttttttatcaacaaaatggtttaaaaattaaaacattctcttaactaaaagtgtaagaaaattgaatttaactatttgggcttataatgggccaaattccgcgactctgctcaatatcgttttcgataataatctctctcatgtaagtcgcgacattacttgtcttagatctgaaaccctaactcttgagttttgctatggagtccgtcgaaatgaacaatcccaattcgcaaaccctagatcaacctcctccttcctccaacggagacactgctccactcgcattggatcatatgaatcctcagaattcggagtctgtggctttaaacggttcttctactcctatccccgatactaatggttcatcagcaaagcctgagctcttacgtcctttgctatcggagaacggtgttagcaagacgctgagtggtaacgataaggatcagtctggtggagaggaagagactacaagccggaggaagcgtcggagtcggtgggatcctccgccttctgagtccattaataaccctagcgccgaaggggtactgattccggtactgggactaggaagcgtaagtcgagatgggcagatgatgagccgaggacgcaaattcagttacctgacttcatgaaggatttcactggaggtattgagtttgatcctgagattcaagctttgaatagtaggttacttgagattagtaggatgttgcagtctggtatgcctttggatgatagaccagaaggacagaggtctccttcaccagagcctgtgtatgataacatgggaattaggatcaacactagggagtatcgagcgagggagaggttgaatagagaaagacaagaaattattgctcagattatcaagaagaatcctgcttttaaacctccggcagattatagacctcctaagctccataagaagcttttcattccaatgaaggagtttcctggttacaattttattggtctgattattggtcccaggggtaatactcagaagagaatggagagggagactggtgcaaaaattgtaattcggggtaaagggtctgtaaaagaaggtaggcatcagcagaaaaaggatttgaaatatgacccttctgagaatgaagacttgcatgttttagtcgaggctgagactcaggaagctcttgaagctgctgctggtatggttgaaaagctattgcaacctgttgatgaagtgctcaacgagcacaagaggcaacagctcagggaacttgcaaccttgaatgggacaataagggatgaagaattctgtagactgtgtggtgagccaggacatagacagtatgcatgtccttctcgtacgaatacctttaagagtgatgttctttgcaagatctgtggtgatggtggacaccctactattgattgcccggtgaagggtactactgggaagaaaatggatgatgaatatcagaacttcttggcagagttaggaggaactgtacctgaatcttctctcaaacagagtgctaccttagctcttggtccgggaagttcgggaagtaatcctccatgggctaataatgcagggaatggtgcaagtgcgcatcctggcttagggtcaactccgactaaacccccctccaaagaatatgacgaaacaaatttgtacattgggttcttacctccgatgctggaggacgatggtttgattaatctcttttcatcctttggtgaaattgtgatggcaaaggtaatcaaggaccgtgtgactgggctgagcaaaggctatggttttgtgaagtacgctgatgtacagatggctaatactgctgttcaggcaatgaatggctatcgtttcgaaggccgaacactcgctgtcaggattgcaggcaaatcgccaccgcctattgcgcc

SEQ ID NO: 43472 - DNA, 526 bp, Arabidopsis thaliana landsberg
attgaattgagatactaattcatccgcgttcttatcatcacaacttctgtgaatactttgacttatatttcagtttgcaatactttgggtttctgataatgaattgacaattttgtttcaacaagcgtttatagtctagataatcattttcaacgagctttttcttttttaaatgcggagacaattttatgataatttgagtctatctatagtatgagaaacctattattatgatccggatcgtattggaatttattatgagtattttaatccgaaagtttgaataacatcgtttaataagtgagtaattttcatttgtggtagtctaattaaaatggtcaaaacgtgtgaaaaattcgctggatgattaagactcaatagttgtatacagttgttgtgaattaacatcgattatttttaatctctattcaaaagaaaaaaaaaacgaatacaaaatctttcggattggtactttggtcgacttaacacaactaaaagcgaagtgtcggataagtattataaacct

SEQ ID NO: 43473 - DNA, 606 bp, Arabidopsis thaliana landsberg
cgaattcaaggcaacgatggttttatagacttcctaatgtttctgagaacgctccacataaacgtagatacaaagaagagagcaataccatcaacaatggcttgtttcaaaccaagatttaccagcaagttcaccaacagtccagcaaacactacaccgcagaaattagcgtaaacagcagaccaatacggcatgtcgaggattgatgctattatagctcctgtccaagcaccggttccagggaatggaactgctacaaatagcattagccctaaccattggaactcttccacaggtccagctttctctttagctcttttgaacaagatatcaagtaatttagaagctgtttggctcttacccgccacaaaagatgcaaacgttttgaggtaaagtacgatgaatggaactggaaccatattgctgcagaaaaacccaaaatcagcgtcacttctacttgcttacataatgaaatcatatgaataaggattgaatgtttgctctaacttatcatcatatgccacatattcttaatcaacctcagagcttcaactcgtcactcgaagcatgttccccgggtttctcatatgtcctgttcctggatgc

SEQ ID NO: 43474 - DNA, 372 bp, Arabidopsis thaliana landsberg
acaaagaaatttatatctgtagacacggcgccatgtttcgtaactataaactaattttatcacgtacgtattttactaattagagattctgcatatcgcgatctgagcgcgttaaacgctaaaccggataaaaacgattaaaacgcggtgagcgctcaagaaatttaagactgaccaggtcattgtgaataaacaacaaacgattgttgataatttacgtggtaatttggtacaatcatatgacatttattacatattttattcccattgtttctcattgggaatatctgttctcgtcccagccttagggcgatgaaaatcgtattgctggacctatcatgcatagcttaaattttgaaaacgtacttattt

SEQ ID NO: 43475 - DNA, 764 bp, Arabidopsis thaliana landsberg
gtcacgtctattaagataataaacatcaagagacacgataatccaagctatgacttacacgattgtcgagatcatacatatctctcaaaatattttgtggccataattctgtaagtcttctcagtcggatggaaactatcccaaaacacatattcatctctatttggacatacatcagctgcaaagttgttgcataaaagagcaacttcaattagtccagttccacaacatcctttatcaaccaccttaaatcctgttacattaatgaatgacatacaatttcaataactttttgataaaatggaaattttaatttgaaaattaattgtttatattaatacgaacgacgattaccatattgtcgagggtcaagaatgatatcaaggagagaatcatatatgtcaacgtagattattgtcttgtctcctaaagttcttgacaaagaacccaaatttgcagcgagcttaacattgtagagctttgttgcatcattgaacctaacaacacaatttcttgttggccctcctgctaaggttctctgtgatgggacacatcctactggtggtgcaccgaatacttgtattctcctcgctccatattcatgtaatttctgtgaataccacatcattcaaaaggtttagaaagataaaaagggtaaaggtaatcaaagcaaaatattaaaatttctacgtcaataataaactcttacgacaaacgtgagcattaaatttgatactatataaataaggagatagttcattaat

SEQ ID NO: 43476 - DNA, 1119 bp, Arabidopsis thaliana landsberg
tcttctatgatggtgtatttagttcatcacatcttttttttaatctagatacctaactggttttcttatatatataattaataatcacactgttaacgttttcatagaagcatctcatataaatcaaatataaaaaatcaaaggatctttatcacattttcttcctccaacaatcaattaccaaaacattgtgcagggagcacatgccatccaccaccaccaattatattacctataaacatgttttgctgattacatattgggccaaatgattaaggcccatttataagccctgtcaagtgtcaacaagcatctttcagtttaacaacctagacgacagtgtttcgtataatgattaagttatctttttttgggtgtgtagcattaataggcatttttatttttatattacatagatttcctattaatgctacatgtaatataaaaatgcctattatcattaaatttattgattcccaagttttcattcaattttagccaaagaaaattttgataattttttcttttcccaatacatttaaaatttaacatagtaaattttcattctataactattaaaaaaacaattatgtttccacaatatttatactaaaaatataaaaccaacattgacacctgtaataaatcaataaattataaatctttcatgtgtcactctctaatctaatacttgcaacattgatttctgaaaaagcatagatacttgaacatatatcattaaattttcgaataatcgaatatggttaaattttaaaaatcacattatttgcttagtcattatttattgtttaaaacaccatgactatctccttattaatgttatagccaaatttgtttatgttataaatatatatattatataatttaaaacaaaatttcgtctaaaaatagcgggggataataaatatatagatatctatacataattgttatagtcattataatgtttaagacaccaaaattatcttctttttaatgatataattaaatttattaatattataaacagaaatagtttaaaacaaaatttcacctaaaaatagggagatatttatatgtaagatatatctcccttacacctccataacacatctattc

SEQ ID NO: 43477 - DNA, 665 bp, Arabidopsis thaliana landsberg
caagtgcttgaagcgattaatcggtatgagatgctccaacgtctatgatatatctcccaaggtaacaaatttctacaatgaaaatcttcaaatcccctgattcatttgattcgatttccattagggtttatgttttgattttgctccaatttcttctacagacgtatatgttcaagctcttgaatagtagcggtatcacagaatctggtgaaagtgagaaagttttgcttttaatggaaagtggtgttcgtttacataccacagcttatgtcaggtaaaaacccatctctagattttgagcttttgttttggggaagtagtaaagtaatgatttttttttctctcacaaatttgtgtagggataagagtaatactccatctgggtttactttgaagttgaggaaacatatcaggactaggaggcttgaggatgttcgacagcttggttatgatagggtatggaacttggagttttctattgtgttttgtttggttgccgtttattgcgttttttggttttaaccttttgttgtttgtaccagattattgtcttccagtttgggctaggtgctaatgctcactatgttatattggagctgtatgctcaaggaaacataattcttactgattctgaatatatgatcatgacactcctccgctctcat

SEQ ID NO: 43478 - DNA, 585 bp, Arabidopsis thaliana landsberg
ttgttgtggacggatccattacttccactgctcttgtagtgtcgtagaagcagacaaggccttctctgctctcggaaatatcgagaaaccccttatatccttcgaattcgaaatcttgttcatctccctcagaaactgacgtcttctccaaggcaactgtttttaaaaacagagtgtcctctgcacgatctacaaaatcatcacaaacaaaaaggagtttgcatcctttgcttttctcaagagccatgtgtctttttccgaaatacttcgacgtgatcagagttctccagtgttttgacacagtttgaaatctcgtgagcgatttcaccggcagcctcaccaagatttcttcgacgatttcgttaggtatatggatcttctcaaactcttttcttcttcgtttgatttcttttcttgcggacaaagcaacttgtttgatcgtaaggagtttctccatcgatttcttctgactcttgtgaaattcaatgtgcgctgaatttataagttctgtttccatattttctttgtaaccgtcataaagagtggctggaatcaacgtgaattatgatgtatatatctatatag

SEQ ID NO: 43479 - DNA, 724 bp, Arabidopsis thaliana landsberg
cccttagcaagtctcagacgccaccaccaccttttggtcagatcactcattttctatctatagtggtcaattctttttcctttcgtcgtatatagtctctgatgctatcctaagttgacttggtatacttggattaagctgtgaagcaacatgttcatgttgcgtactaatctcaccaatcattgaatcaaaatgattaaaaaaaaatgaactatgtgtgtgtagggcgtcagagtacccagaggagtatgatggtggctacgttcagatgagattatcttacagcccggcggcccatctctttctcttccttcttcagtggactgattgtcatttcgctggcgctttgggcttgcttaggatccttatttataaggtctcttattaattttcctgctgttttattgctactggatcttcaagatcacaatgttcttgtctgcctgatatgtgattctctgttttttatttataggcatatgttgatgggaagaccacaatgtcgctacatgaacgcaaaactagtatcagagaattctatggtaatctgttaatcacttattctctcttaatctccaggtataagattagaccaccccatatgttttttctgactagcaatggatgttgttgggcagatgtgttgtttccttcgctattgcaacttcatggagggatcaccgatgtagaagaaagcacacagaaggacttaaaggtccaaaag

SEQ ID NO: 43480 - DNA, 490 bp, Arabidopsis thaliana landsberg
  unsure (1)..(490): unsure at all n locations
ggttctctagagtttggtttgttctaaaaattccctctttttttctttattccttgtgatttttcacctgcaggggtacacctaaaaagatgcgatttttgatttaatcctgatcgataaagtgaatgtcgggtttcttctgaaatcgatttgcatgtcaagttcgaggatttaactaatctccctgaaggtttgcaaaaagtttgaaactttttatcttctgggattttagggttcttacctctgtctgcaattgcatgcatgttacttttggtgtctgattactctaattacttcgattcatgcaggtttctgacatttccactcgacccagattttgatttcatctgaaagtttggatttttgagttggaaaagaagtgaaatctgaagcgatatagcgacaattttctctctctctctctctctcttntacgaacaaagatctctctctctctctcggatgaattcttcgttaagttctaagaatc

SEQ ID NO: 43481 - DNA, 737 bp, Arabidopsis thaliana landsberg
tgattttcagggaagatatgatccagtagagaaagcgagagactcgagggccgatttgtcatattattcgaaaaaatggagagaagaatcaggagaatacgcagaagcaggtaaagagaaagcccacaagacaaaagaggaagctaaggacaaagcttacgatatgaaagagaggacgaaagattatgctgaacaaactaagaataaagtgaatgaaggagcaagcagagcagctgataaagcctatgagacgaaagagaaggccaaggacaaagcctatgatgtgaaagagaagacgaaagattacgcagaagaggccaaggataaggtgaatgaaggagctagtagagctgctgataaagcttacgagacaaaagagaaggctaaagacaaagcctatgatgtgaaagagaagacaaaagattttgcggaagaaactaaggagaaagtgaatgaaggagcgagtagagcagcagataaagcttacgagacgaaagagaaggccaaggataaagcttatgatgtgaaggagaagacaaagaattatgcggaacaaacaaaagataaagtgaatgaaggagcgagtagagctgcggataaagctgaagagacaaaagataaagcaaaggactatgcagaggactcaaaggagaaagcagaggacatggctcatgggtttaaggaaaaggctcaagatattggggagaagactatggatactgtgaaagatgtgtggg

SEQ ID NO: 43482 - DNA, 645 bp, Arabidopsis thaliana landsberg
ttatttacacgtgaatagttttttttttttttttgtcttttattggtaaacattatgaggtcaatcattctcattctaaatttactggtgaagctatttcgaaattttaaagatatcaaacgtagatgattaaccacggtaaaaaaaaagtatattttgtagatagaagttgtttttcagtactgtacacagttaattatatctatatatggaaaactatagtaaaatgagaaaataataatactaacagaaaacaggattattacgtattttgccatttttagtggtatttatgaattttgctattttggctaaaatattatggatttctaaatgatgtattttttaggaaaataaattgtttcaaaaagataagagtttttaaattttatatgtaatattttttagttattattgatgactcgataaattttaagaaaattaattgaagacgatcagtagaattatagaaaattgtgaatctcaaaaaaagcagatactttgataatcaactattcatatgtgtgagtgacaactcaagaaaatacattatttcaaaacaaagggagtgtgtataaaaggtcatttgatataattatgcattacattttcattctacgcactttagaacggttttcttaacct

SEQ ID NO: 43483 - DNA, 1118 bp, Arabidopsis thaliana landsberg
acaacacatgtagaccttcacgcgcttttgacgcgccgggtgtgttgtaccatgtgttcatgcttcggtggtgatctccgtgggtccacctcggtttattttggttgacacgattcttccttacgtgacgtctttcttcttcaatttcgaaacgacgcgttttaattcttcttctgcatttcatatgaaccaaggaaaaagcttgaagcgtcgtgactcgtgaagcttcttcatctttagtccaccgaacataaatggctcagcaagtactcggctgcacgagccgccccatccgcgtttctcttcaccggtgttctgttattaccaccagtgacactatcagaaggaagaatctccgattcgttagaaacccgagattgtcgttttctcttcaatcttcaactagaaattatcgtctgccttcgattaattgctcgacggtgaatggagcagtagcggaaactgcggaatattacgaaggagaaggagataacgtttcacttgctgagaaaatccggcaatgtattgatttcctccggacgattttaccaggtggaagctggtggagtttctccgatgaagttgatggtaggttcattgctaagcctgtgactgtttggcgtgcgttaagtcggatgtgggaacttgtggctgaggatcgttgggttatcttcgctgcgttttccactcttatagtagccgcggtgcgtggttcttccttggttatgtatttgtagaagtattctgaatctctacttagaaattcttagttctaatgaggaatcagaatcgtccttttcttatacattttgtttacttgtttacagctttcagagataactattccgcattttttaacagcttcgatcttctcggcacaaagtggtgatatcgctgtgtttcatcgaaatgtcaagctcttggttacgttatgtgttacttcaggcatttgcaggtcaagatcttgtatgatcaaacacttgtctctggttttatttggtttcaagttgaattagagagttactcttgctgtctaaccaacttgttgtttttgagattctattataaaaggatttccatctgactctttgttcaactcataatttcagtggcatacg

SEQ ID NO: 43484 - DNA, 258 bp, Arabidopsis thaliana landsberg
gcaaactcagcacaccgctggtgttgctggggatcgcgattgctatattggggatgaaggtcttgcgagatcgcggtatagtagaactcatcatctacagtaggcaattgagcatggacaagatgaggagtgggctgctctgcagaggtagtgccagcaacgtatatttaactatctgagatgggaacctgaggatcatacttatcctctcactgaaagatccactacccctcctgcacgcagagcatatactggtga

SEQ ID NO: 43485 - DNA, 1036 bp, Arabidopsis thaliana landsberg
gtaataattagtcctatatcaaattaaatagttttcaacatgaaccgtaactatttatacacgagggtaaatttttaacaaatttaacccgaaccaaaaagatttcagttaatcatagttttgttacaagcgaaatctgaaatattcaccctcaagtttgttacgtaattgtctaatctgtgtttttttgtgctagtgttataattgtttcctcgaatgttaagcaccacatagaagtatacacttttctgttattattttcgttcttcttccatttagaaacttttattaattctactgttaaatccaacgttattagtttattttctctgatgaagttctaattttttttgtttgttggaaaaagggttacttttctgatgaagttgccgatttgtttccatccaaacctcagctaatatagttagggagacggataagaaattgcataaagggagaggctttgtaaacacgcaagtttacgtcaacttgacacatataaactcgtatataggaattgtgtaaaatgttaatcaatatatgtttatgaatatagtccttttatttccttaatctatagtcatgttatcatcatatcggcaagaaaattactattacaacatatgtttccgtgcttcgatttgtcgatcaggtaggcaaccaaaccgggccagattagtcacaaatgaaattaggctccactttggcaagttttttcacaattaaaaattagaaagtctaaccaaactaatagaaactgaaccaaacaaaaatgttcacgcaattacgtagcacttctctatgaaatactggggataattcgatttgagctaatctatggtaagtcgtttctcttaaactgaattaagcttaaccaaaccgaaaattaaccgttgtagaacacccattataaacatatatatgttctctactcttatatggctatttttccatttgcagatacctgggacaacattcccaatttttgcacatgattcaaattacaaaaccccaaaatttaaaattataaaccctt

SEQ ID NO: 43486 - DNA, 767 bp, Arabidopsis thaliana landsberg
tcttgcagacacgaactctaacaattttgttctacgaataagattttacaaatatatggcatcagcccaacagaatattaggcccatatacgaacgttggcgaaaaatattatctttcggcccttgtttttttcttcaaaactatcggcatattttattatttcaaagattatcaatgggttctactagctaggttctacttctaccttgagaaaattgagttgaggtcttgtatgtatagatatttcagtaaacaaatattaatgtttagattttaattttaaaatgtaaattaagatattaaatttgactttttgtacttcgattcgtttgttttctacttacaagcgtttcacaacttttttcgagttgtaacgcttgacagtttcacaaagtaagcatacgtgtaaaatagaatcatttattgtgactaatgtttttaacaaaatatcgtatcttctaaaacgtgataccaatcaccttttaatcactatatacaagtttaagtttaatatatttatatataaatttataactttttttatccgaattgtaacacttattggttccataaaataaatatatgtgcgagagtataatcacaaaatatttggtgatgaaattctacaatattgtgtttttaaaactcacattgtatctactaaatttaaattaatatataaatatattctaaaatcaatcgtaaataaataaaataaaaaagaaatggtgggtccaaatatcttctgatacattggacataaata

SEQ ID NO: 43487 - DNA, 751 bp, Arabidopsis thaliana landsberg
ttcgacacgctttacatagagcctttatcaatacatgatatgcaatcacatcaaggcagggaccattggcacatatgtctcggaataactctaaacctctatctactccctcattttttatgaggccatcaatcgcagcagtagaggcaaccatgtgaccaaggaaaccttctccagctacatcatcaaggtacttgcaagcatcaacagcccttccattctcgcaaagttttttgacaagaaaggtagtatgctttatccatggctcaaatccataaaaacgcatctttttcagcaggtccaatgctcctacaaaatcgcatcgttcagccaagcaaccataaatacaattaagcgtgaattgacttggttcaactccggcatccttcatttctcctaagagtttcaagctttcttccgaccttccttctttacacatcccctctattatgttgttgtacatcataggacctggaataaggccattctggacaatatcatgtaacaaggtcactgccatatccaccttgttagctttgactaagcaattaatcacaatgctaagagaatctgaatctgggaggattgctttattatgatccttaagaagcttaacaatctcagacacaccatccgactcataatttcccatgaggttctgaataaaactgtaagcctcatgcaccaaatcattcctaataaacccctcaaacaaagatttgtaaagaagcatcacagattttttgtctat

SEQ ID NO: 43488 - DNA, 694 bp, Arabidopsis thaliana landsberg
tctcccgtaatcaaaagacatttttattcgattatatgcttaaccaagaactagtggttgatttttgccaataacaagggaaaaaacagaaactgtgcaatgaaatgagagatgaagcagatagagttgtacatgttattatgcataacacaggttcctcaactttttttctccagcccttttgtgctggaaaaatggaaaacatggttgagtagtacaataaatcatggtgcaaaggaaggaatatagagctcattactcaactctcaagggtttttaaaagccataaagttcatgtttgtgtgaaaattcttagcaatggacagcttttcgctccaacagttgtggacaagtaaatgccttttatttagaggggtatatgagcatgtaaaaattacttacagtcatcggattcggatctaagattctagtgatgagtttcatggcaccgagtgagagccacggaggacagttgaattcaccagatgatatctgcaccaaaccacaaaaatgccgaaagggagttataaaaatcctaaaacaagcattgctggaagatttccatctgaaagagagagttttaaaaaagagttgctcacttttttataaagattcattagattagaatcatcaaaaggtaagtaacctgcaagcaggacatagagtacaacaccgcatcaccacatgtacagct

SEQ ID NO: 43489 - DNA, 1265 bp, Arabidopsis thaliana landsberg
taaagatatgaatgatacttcaaaagatatacaattaacgaagaacttgtatggataaatatatatatacatcccatcaaaaatattgaaactacacgtttccatgcaccgatgcacgagtaagattaaagtcaaccgccaaaatcaccaccgtaaccgctgccaagacaggcgatgctttccttgccatccttcttagctttgtggtagagaaagtgaatgagccacaagatgaacaaaaacatgagaaatgccccaaacactatgaacagaatggccacaggactcatttgactaacttctttttgattgttaattttgtttttcactcctccgataaggaaacaacaagatgtatatatatagagagattgatgacatttattatgaaagtctcgttgtcttaatatttaagtcatcttgttaaccattgacttttgtgttaggttttatctgaatttcaaacggaatattcggatattaatgtagtcgttacttttggctttttcttcaagcccaaatggagatgaaatttagaatttttatttcgaaaagattattgaaccgaaaattatgttcgtcaggtgtcggattaatcatgaccctagtatttgttttctgttaatagatagatagcacaatatattttcataaaaaggttttactaatcaagtatttgtttcaatgtgatttattgtttcactctttgttttattttatgttttcgtagagatattaaatatgttttcgaaaaaacatacatatagacagtaatcatgagaccaagtcatacctggattagtgtattacaatcaattagtacaagtcatgtttttataaccttgatatagttaaatacatactccaacgaagagtatcatttgaaatagacaaattcttcgaaattatagaattttaatgaaatgttatatggtcaccaatcaccaatttttacatgaagttttattaattctttaacatcaactagattgcgtttgatattataataggctaaaccatagtaactgttttcttgattctctcgtaacttttcttgttaaatagacattccgagtagattttcggtatgtatgatgtgttgggtaaacaatggagaaaaacatttctttcaacttaattagtgcttagagcgatcgagtttgttctaaattaaacagaaaatgttttttgggattaaaaattttttaaaataatgatcattttgctaaaattaaggtcctggtaatttgtttttttgaaaatta

SEQ ID NO: 43490 - DNA, 1274 bp, Arabidopsis thaliana landsberg
  unsure (1)..(1274): unsure at all n locations
caggactttccttggaagtgttagcaattactgttttaacaattttaagtgcccagttcttgtggggagaacaagggcttgaagacctcttctcatgaaagagttcgagaaccctggcttgatgtgtgtgtgttgtaaacatattgataataatgctctgcttggttactattgtttgaagaaactttgtgagtaaacataatttattttgtttgataatgaaagagcattgccgtgttcggggcttgtgattgctatttccttgtttcaataatgcagtttttaatctaatatgaagacaggcttagaccaatcattatgctgtaacttcagcttcaaccgaaaatcctgtttagggtagctgctagtctcacccctccctgtgctaaccgctgatacactatcggtagacgtgaatagaagtattcatctgcgtagaagacattatgtgtttgttagcttctttcttttgtgaatcatcatagttttttgggtggattctttaccttctagagtgtctccttccgttacccccttgtatgcccagtcacaggctgcttgaattccttcggatgcgtatctaaaaaagtttacagggggaaagcaattggaagttaaatctgcttcttgctggcatgaagaagaaccacttctattcaaaggtactattatcatacttacatgtctggacatgctgtcttctttgtgcaggtctcccatctcttaacttgatctgcccattctgtctgcattttattaatacatgtcagcaagtcagaaacaccttgtagcatacatgtagagaacagtagttttgttgcattagtaccgtgatattctttttgagtgcatccaccattccttctagtgcagagttatagagatctgcttcagctgtttcgataatgttggaatcccatatctgtatgaatctaaagtttaaaactttgtactatctgatgctgaaataatagatgcgtttcgcagttcttacatggtggaggttagcttttctcgtgtaccaatgtacttcgatggtgttacctcctttgtctgaagcataactcacatgtagaggctgtattttacaattatgccagtcagacatactcagataagaaaccagttatcttgatcgacttttataatacctgatggatatcacccatgaaatgggacacgaagagcagggcctccgttaagttgtctggccacaaggaanaatagaaacagaatataagagggagataaaagatgaggaaattggtgaaagc

SEQ ID NO: 43491 - DNA, 719 bp, Arabidopsis thaliana landsberg
cttgttatttgcgacctatggaagagagttgagcaaagaagatattcatttttgtgtttcattttgtctttatcagtatacatactatttatgtgtgtttccaaaatctcttgttttattgatatcaaatacgatttataatatactttaaatgtggtccttaagttaggtgatgttgctataaatatacaaactctatattaaaactaaaatttaatacttttgtttgtatttgtaaatttatttacctatttctttgtttcacaatttatgctgttctatattatattcactagaatttaaaagtaatttataaaaatagctcttttcctcttcctcttcacattgaagcttttatttttcttataggtttcgtgtcctccaagtggttctttcttctcaaaggtctttaaacgaaaacgcgcaaaatcaacttttttgacgttcttgctttatattgacggtttcttacataaattccccgacaaatgtctttctctttttcttgcttcatcttcgtcttctttcactttctcactctcatttcctaaaccctttttcactttcggtgtctaggtttggattttatcttccaaggatcctacaaacttaactcgttcttcaagattccagcataaaggctcaacctttctctgtttttacttctcttgaattgcttttaattttcactcgaaaatcaaaggaaatggccggtggtg

SEQ ID NO: 43492 - DNA, 355 bp, Arabidopsis thaliana landsberg
ttttaataagactaaaacttaaattaatatataaaaacttaatgtaataattggttttgactttggatctctgattcatcatgtttaccaagattttcttataattaatcataacatttacggttggtgtatcatatatgaataaatcacatgtatacgaatctacgtttggtggaccaaacactatagtttatattcccggaattggaaaacagtggtgacacacagacacacacacgtttatacacataccgacatacgcacatatcacatatatattcgaaaatgggtacaaaaatataagtgtatgcatgttacaaaacattgaattatcatttgtatgagcttaatttgc

SEQ ID NO: 43493 - DNA, 407 bp, Arabidopsis thaliana landsberg
aaagagtgaggggacagccccaaaaccttgcaaatcaacactactagaataagcaccatgtccactgtcagcacaatcagcagaagggagcgcgttgaggaaccaaggaagtttctctttgaattgtgttgtggaagggcggtcactacttaaatctgcatgccggaagcactaaacaaccagaaattttttattaatgcaaaatcattgcggggagtaaaaatacaactgggactaattcaatcacatcataagagtgagttaccgtggaacaatctttgcatacttcacttaggccacagctcgcttgaccagaagggcaacaaggaggctagaaaggagacacaaatacatgaacagtagccttcagttaggcggaaaacatttttggacctcggcaataagta

SEQ ID NO: 43494 - DNA, 909 bp, Arabidopsis thaliana landsberg
tgtttgctttgactcaaccgtgggctggtcttgacataaaacaaccactgagaagccaacatgcttattttggtttgaacatcatgataaaaagctcactctaatttaatcattatgcttctttcattgatcataaaaagtttcctccaaatccgcctttaccacatccacaagcctccccacctaatgtatacacacatatcacacattttctatatagtatattataacatgttgttgactcatatagaatattcccatgcgttcttcttcaccacgacttactcacaaaatctctacaataatctatagaaatctacgcatatatattactggattcttttaaaacatttttatataactttagtaaaatgttttttttttaattaaaccctagtcctatgttcgtacacgcctccatgtctttcttgtaagtattcaaactcaacttcaaatgctcatcatcatcaactccaaaagctctcttcattagaggctgctccacgcaaacgacgtcgtttatgcttctcttcttccccttcatcacttccgagttgatctccatcaacggaagttcaatcgatttattaaggttattgtcagtatccagttttgtctctgaggtctctgaagatgtcaacgagctctctactgaacatctcagctgactaattcctctgttttctggtttcttgtaccacaagaaaccttcttctgcttcttcttcttcttctacttgcgttagctctgagaacgaagtgcttggacagcctctgttcaccattgaagctaatctagagagctcggtcctcgcaaaatccatgccgagatttgaagatgagtagccagctagagtttgttgagctttcattaaaacggactgtagatactttccttgtgcctcaatct

SEQ ID NO: 43495 - DNA, 719 bp, Arabidopsis thaliana landsberg
ctacgttttgttactttatgtcttaaaatgactacatataatggattttcgactttaattactttttaaatatatatgttatgcatgaattaagcggtcgaaatcggattctaggtgattctgacatgtgttcatgctttcttgctaaaagataagaaactgtcgtggggttcgccatgcaaaaatgcgaagccattaaatataattaagcaaacgcagccaacgaagtaaataaccacgagacaatttcaaacatattttatcaccataattatcgtctttttcattagtttatgttttattttaaccgtttttgtataaagcacacgaattccgtaattatggctgctatataaattccacggtcaaacaatcaagcatgtacaatacataagattaaatttcagctcattaatatttattggtagtatgtgataaatttatataacatgtttttttctagtcacggatttcacgcaacaaatgtagaatttgaaacttaacgtgaatcttgatttaaaatatttatgcattaaatgtatagtcaaaatagatcaggtacaaaacttaaagttaaataaaaatatatttctaaagcaaattaaatatccatgatttgtgaattcatttaataagaatgacgtggaaaagaagcttgtcatgaatacacattccaaagtggcggttgtggggtgttatttagaactaggtaggtttta

SEQ ID NO: 43496 - DNA, 686 bp, Arabidopsis thaliana landsberg
  unsure (1)..(686): unsure at all n locations
ggaaaggatcatggagtatgtaagcggcagacattgagggttatgggcaagggatctaagcatcacttgaaaacactacgtatatagtactaatttctaaagaaaataactaaaactcttctttattacagttagataatcatatatatagaaaattgtgaaagatgtgaagtgtcttgaaatgaagtttgactaagcttaaattaagagttttacacatggggtatgttgcttgttaaacccggataaatgtagcacttttgttacagtgcatgcagcctctctgtttttatttgtttacagtatgaggagaacctttgaaattgagcttattcacccttttagcttgcattctacttgtagtactactactagaagagcatacttaaaagttaaaccttgtgagaattcatgattctaagtcatcattattgtcaccactttcagaaaaacctttcataaacaactctaattttagatgtttagtcccaattcgaaggatgtggctagttttgtcaacaaatgaaaattggaggggttgatcagttttgtattaataattttgattgaattttacatgaaacttcttatgttgaacacttgaacttgttggttattntattcaattatcgatcaaccttcttgatagttgacttatactttcacatggatccaagaactagtga

SEQ ID NO: 43497 - DNA, 730 bp, Arabidopsis thaliana landsberg
ctctacataaatgatcatacggataaagaaagtgatttaaaagatagatcacaaatttagttgaaattgtatctgtttcgatccctccacgagacatgatgttttggcctaaactttatggttaagaaaaatacaatattaaacctaagtacaactttacttttaacacaatttatgaaatttttattgtttgtaaagacgatcgaaaaccaaaataaattatgaacaatttgaaggtaattcggaaaaatgtttttcgtcatgtgaatatgtgatctcttccaaactaatgcatgggttcatataacccaaggcaaacaataacaacaacaaattgtattgtgtaaaacaaaagttgtaattttgatttgtaaatggagatagactaccaatatatacatctaaaacagtaaaatctaacaagcaccccatttatttgtttgccaacattacactttcagtgtaatatatcagtagaactttcaatttagtaaagctttaatatctttatgaattattgcttctcctaataattagttgagacagacgtataacggtagatagaggccgtataaagtcttataatgtcttgggacaggcatgcatggggctacgagaccgtatacttgttttccatcacatcttttatttctttttttaggagtttcaataaaagtcaatcttttgcattacccatatttgttcacaagaaaatatcatagttttgttt

SEQ ID NO: 43498 - DNA, 2044 bp, Arabidopsis thaliana landsberg
aggagataaacaagtaaggaaaattaattaagttccttattatcccaagagttaagagaaatgtacatttattttaagttttaataacgttattatgcagtcggaaacttaccgaaaaatgaaggcggttactgaagattactgggaaggaaggtaagtgtaacttttccaagccttccttttagttttcatgccgctaatttggaaatttctgcagactagactagaatattaagccacaacattatctttctttctagaaagcatgagactgtgatatgagcattagtacgcaaccaaactgaagtgtgcctaaatgatttgatgattaatttaattgccatgttttgttttgttctttctaacaacagctttgctcgaacaaatgttctctggctaatttatctcgtggatatcttacttaccaagaagtcatttgtaagtttgcaagacacagataattattagttgcatcaactaagaacagcttattgatactcctttcgttcttgtgtatatgttttaggaacggtcttcaaaacacgaaagagaactacggtcactaaagaagcgaatggagaagtatgaatcagctaaagaggctgtgtcagatcctttcttctcagatatgttgatggaccaaatatcatgaagaatttaataaaccccgtaagtgattaaccagaagctctctctcttgtatatttgtttgcctagccacttaaatcaacagtactagctcttgcttcgtaatattatctaaggctccgttatctatataccaatcttgattttcatctcttcaaatgaatccaagaactgatatgttagtcttttcttgtatgtgacaatagtttaatggtagcttttatctatagaaatacttttgaaaccatgaattcttttaagaagaaagtatcaagatctaccaattccacatgggttgtccctacttgcatgaatagatcttcttatctcaagaacaaaagttgtcacatttttattcttgtaatgagggaagaacaatattcaaacgcgtagatgataaaaatgagagatttgctttaaatttaggccaataaactaatccatttaaacagctaacaaaagctttatgttgtctgcttttttgttttttcaaaatctttccgctttgttgatttctttaaatctttgtgggttttgctgagctaagcaaaagatcatccattgtattaattaatctcatgatcttaatctgcagcaccagtgtctcttctttccttttctcctttttggataagagaaataaaaataccaatttgcagcttctttcttgaaaactttggagagctttatgcatatgcttatgtctgaaacggatctgacaaaaatgggtttttctctttcttgtttttttttctggctagcataaggtaaaagcttatatctttgcacacaaaaatataaagaacagatgagattagtcagaggccaaatccaaaagacttcatagcaaagtaaacatcttttgcctactttcttctttttttctcacttagtcacttgcatgtagagtacagtcagcatcttctctctttttctcccccaattctctcaagagaatctctaagcttttgttcttcttacaaatcatgtacttataataaacccaagaaagaagaagaaaaacaaaaccaatcccaagctgtgatggcgaaacaaagttacttcttcgtcttcaccttcttcttgtttctttctcttctctcatactgttcttcaacaactacacatcatgatgtgttaaacccaccaacggtctttcctacaaaccccacaactacaccgacggctacatttcctccggtgaccataacgccaacaaatccagccacaacagttcctattgttcctccagtcacaactattccacctgctacactcacaccacctccagtcataacaattcctgctcctacactcacaccacctgtgacaaacccagtaaccaacccagtgactcagtatcctcaacacaaccctcaagacggtcccagtacct

SEQ ID NO: 43499 - DNA, 586 bp, Arabidopsis thaliana landsberg
atgcgacatagtactgttctcctttttgcctggccctgcccagcttatctggtgctattagggaagaaaagaggctttaaaggttttgctactataactataggagatgaacttttgcaattccaatataggtcttacgaaaggaaatcgcgttggtaactttctcgctatgggagatggaatggatttctcgataagcccactactgcatgggatcggtatagatcgtgacgctcatctcaagatctaaggagatgtaaatgtgtcaaggaaatggcatctgactttaattcccactattctataatagcactcaatatggtgacgaaacaatggtgaccaactcccacaattgaggagcaagccgggatccaagcccaagcagccaatgaaaaagccacttgtctctgtcaacttcatttcattttcgctctaggattgacatgcaaagtaaggacttagattagccgaggagctgtggctgctggactcgatttgacttttgttaacgatcgactaattaaccctttatcacatggaagcatgggatagacttgtctgaaatgagctggtcataataggaatt

SEQ ID NO: 43500 - DNA, 274 bp, Arabidopsis thaliana landsberg
cgcagacgatgcgagctcacgttgatgacccatgagctatgtcgtgcacctaatgcatgacaccctaatgcgtgttggctgcgaatggacattgatagagggcccattgagcgctggcccgagcgcggcccgtcttggcccgacggcgagcgctggctgatgactacaggactagattgtcctactctttagggaccgttccatgtaggttgcgatccacttcatatgggccccactctacttgctcgtggcgtgatgttgagccttccaatgc

SEQ ID NO: 43501 - DNA, 1061 bp, Arabidopsis thaliana landsberg
tcatggaccgttgaccaatttaatagaaaactaatccattagtttctttcgatacaaataaacttatcataaattaaaaaatggataataatttacttctaacccaaccaacaatggttaatgtaatacattgtattctctttctccgaactatatgatgttcgaaggcaattaggtaactaacacatgcatctacacaatccaaaaaaatgcaataaatataagaaaatatgacatcctaatagcaataatggccacaagataaaatacacattttataaacattaaataatgagtgggcatgagaaaatagtgtatgtccatcttaatagtgattccgtcattttctaaaaataaaaaaggaaataatgatctttcaattgatccaatatcagagaaaggattgctatcaaattcagtatactgtgtcgtagatggaagcaaaaattcaagattatgtagaggtagtacaacggtaattctatttattgataatacgaccatatgtttttctttctgtattaaccattaaattaaacacgaactaacattgttttggcctttcaaacgtatcatactttaagacttcttgcaaaataaccacaagtaattttcaagagatattgtggtttaatatatgaaaactttcaatatataaatataaaaaaaaaacttttagatttattttatagtaaattaaataaaaataaatgtagtatatttgagactatctttaccaatatactgactaaataatcgcagtagttatttttaaactcattataatttaaaattattataagtggtaattatgtcatatacgatcatatggtattggatatatttggaagttaaactaaccctctactctacctacgtatctgggatggttgattatatgtataaataaactataaaactgtgtatatatgaaagggactgaagagaaatgaggaatatcatgttctcttaaccaacaacgatccaacagcttccttccaaaagtggttatcgaatataaagtaaagaacatagaaaattatgttattttcagtaaatgt

SEQ ID NO: 43502 - DNA, 323 bp, Arabidopsis thaliana landsberg
  unsure (1)..(323): unsure at all n locations
atccactgttattatatcgaagtttacaattataactatattaataacttaactanntaacctgataatatatactacaagagaaaaaatcgagggtaggtgatgcccccaaggccccaacggacaggggatcgcccggaccccccccctcctcccccccacccacagctctccccacatccccctctcctccctcccccccccccccctctcccccatcctacccccccccccaacttcctccccccccctcccccacttcctcccccccactctccaccctcccccccccctcttccccccctccccccccccacccccca

SEQ ID NO: 43503 - DNA, 733 bp, Arabidopsis thaliana landsberg
ccctcttaacaccttcaatttcagaaggctgcaatggtgcatggaaacacttgacctattgtaaaacaactattatgtgcgtcatggggataacataattaaacttcaagcttctttttaaaatctgaaggatagggctaagccaattcaatgacgaacagcgaagcacatgaaacacgaaagaggaaatataagaacctgaaaatcatttaactcagcctcgctaagagcaccatctctgtcatgatcacagagtataaagatacgcttcaatgcccttacacaccggggtttcagtgcctgggaatcttgatcaaacagaggtcctgttgggtgaaggacagtcttttgtgcataatagaaaacttcttgtgcctacaggaaagcttgttcattaggatgatagtttagacctggaatataatttgtaattaccaccgaatgctaatttctgactaggcatttccagttcatgactgataaaagtccaaaccaataacaacaatatctactttcaggcaaaaatttagcacatcttaagtccttgaaatttcttagtaagacaagcacatgcctaaactacctcggaccaatatttgtgccatgtttgaacaaagaaaaatatcacatatcaagaggaattcagaagtcatgaaacccggagttgcctcaggggagaacactcgatacaagtctttatcttccgaaactggtgcattataggtgacatcac

SEQ ID NO: 43504 - DNA, 805 bp, Arabidopsis thaliana landsberg
gattattaactcctgcatgttcaccattatataccgtgtttgaagtttgaactatggtaaatggatttttttttggttttcattgttgtgaaggtttagtcgcatccttcatttgttaatatcatcgcataatcaaagcaaatgaaaaaagaagttgtagaaaaaagttttcaaaattatctgacaagtaaaagattgtgaaagtaggttttcattcattttttttatcgtgttaccaatttaccaatcaaaatctatatgacttatattgattaactcttttgtaatagaattccaaatggtacttgttattatgacatttcaaatgttgtttttaagaaaatatttggacttacgactgaatatttatggtggagatatatgctctcaagtctcaacccatgtttaatctaccactaatgcattgataaacattaaacacacagcatttactcattcaaatataaagcctaggtactaaattgtttagcaatttgcattttgactgttcacccataacacattatacattatgcaatgatttttttaaaacgctttggatgcttttatgataaggaaaaaaaaaactacaaatagagtgaatagtttggttgctggagaaaaaagaatgtcaaacctttaaatttgacaatatcaatctttacaaaataataattggctttatcaattatatattccatttttatttgtgtgccaactttttattttagcaagaggcatggagcaagagagtaccccactgggccaagtccacttactcttgtcccatgtcacacactcattg

SEQ ID NO: 43505 - DNA, 769 bp, Arabidopsis thaliana landsberg
aactcgtgtgttgtaactccgatctcaccaactcaaataaataagtaatcatgttcttgttgtttctaatttatgacttgatgtgtaagtgtcgcatatcttttaaccttgtccggtttatatatttcttttgctttcttttacgaaggaaatggtcttaagtaataaaaatatgcttttatctgcctaacagaaaagcctgctttcacgtcaaaaagaaatcaagaaaaagttgctttttccaaaaagagctaaaaaaaaaacagagagaggtacaccggaaaaacaacaacagaaagagttacatttaatttggcccgattaaagcccatttatgctcttacaggctctctcggacccattgacatttgttctattatgtttagatgaaactcggcgttttggtttttttttttactccgttatttatttgcctttgggactggtctggtgagtccagtggtcgtttctcgtgtactcgagtctcatcggaaagtcttcgactgagttcgtcgcttccatctttttatggcttaatctcctttttttggtcaggtggaagataaaaaaacctttggaactgctgtctcaaaatcttgaagacaatgtgtcattggaaccgactggaattagcctgcgactactgaaatatgagactcttatgtaaaaagttttaatgtctatgtcaagagagacaaagtttggtcagttgtactttgaggacagtgatttgactgacactggacaatgtaacgacaagagatcaaca

SEQ ID NO: 43506 - DNA, 585 bp, Arabidopsis thaliana landsberg
tacattttgctcagagttatgtgcctctcttcaagtatattattacctattgtcctttcccaatattgttcactattcaagatattagccattacaaagtaacagaagtttctaacttatttataaatattttacctccgttgaagttgaatcggaggtagaccagtttcccttttcagcttccgaagttatcaaattcccctcttcatttaaaacaggtaaacctctccctgcaagaacaataccaaaactatattactgtaatgtgaaatagggtgatgcataacaagcagaatatttcagcctatgttatcttctctcatgtatctttctaacaaacttttaccatgatgccaatttagaccatagtttattgaaactatagtactgacaatctaacatatatatcctccacaaatatccgtaatgttgggaaattctagattattaacattcataatcaaggacatgagagccagaccttctgaagtttgataagatcctatagaagcctgctgaatggagctagtgatagatgacatattactccgacgcaagccctcagcagcaaggatgcacaattgg

SEQ ID NO: 43507 - DNA, 1058 bp, Arabidopsis thaliana landsberg
  unsure (1)..(1058): unsure at all n locations
aatttatgaatagtgtaattagaaaaattattattttctaaaattatattagtatttgtgaattttttgttgattatagaacagatgcattaattttatggtttatattagatgatgatgacaaaaagaaaatgtgaaagaaggcacaagaagtgcatcaaatgaagtgcatgggttgggaacatgaacatgtaaatttgtctttgcatggatttacgaaaaagttacggagacttaactaaacaaatcaaatcattagttaactaaaaaaacttaggattcctaaatatatttatcgttggaaacttgaactaaccgcgtgttgcccgagctggtccctctctgcctattactaatatatttcttttgaccgagtcatcagaaccaatccctaaaatatttgatgacacatatcagatagaacatgagagtgatttttttcaagaataatatcgattaagtttgaaactttgtgttcactcttcaccacaagcatatggtggtcatcgtgtacttgagtatttgttggatatgggctgccctcaatgacaaagcccgacctaaattgggttttgcttagaaaagggaaaaagggtccagctagcctatcagtttggctaggcccaattagacttccaactgaaaaaagataataacaaaattctgtaatctgcaactgcaaccgttaggtcttgtttctgactcctaaaaacaatctatcaaaacttacgagtgtggtaacaaaattttggtggaggtggagtacaaatggtcaatcgagagaaatgcatttgttggcttgaactattttcataatctaaatcaagacataacaaaaggttaactttttttattcaatggcatattatgatttacatcctctttttataaccaatcataatctatcatctaataaatcttataacaatatattattggttataaaatttctatgtcggtttgaatttataaaagaaaaattaagatttaatataatattatatttttaaacgacattatattntatatcgatttatatttattaaagaggattagat

SEQ ID NO: 43508 - DNA, 698 bp, Arabidopsis thaliana landsberg
tactaccgatgtttattttttgaaatttaagaaatggttatatttcttctttagaacgagcagaaagctgtacttggttgcatgtgttggggatagttttcactttcaagtgtttgtaaagaaatagatgaaattttttgagtgtttcgtacaaaccaaaaattggtcttgaatatactaaacgtctttttcactacaacaaggtttacttttcatgctcacatgttcatgaatatatatctagattcggatccctcttgctgttataaaacatatacggttggcatttatgtaaacttactagtattaaggaaacgaaacacatatatcccacttgagtattttttttatatatagataatttttgccgcttacaattttggagagctataaaaaatatacttaactgttgttaagatatcaatgacttttttttctgaaaaaaacacattcatagattttttaatcttcgtattcttatagtagggattttaaatatctaaacgttttattactgaaaacatatttttatgtaaagtaagatttgattgaagagaatgcattttggttttaaaatgcgttgtttgggtttaaatgattgagaagacagtttattgccgaagtctaaacaatctacaacggttcacactaagtggaggggcttcttcggcgatggtttccaccccgaccaccaccat

SEQ ID NO: 43509 - DNA, 531 bp, Arabidopsis thaliana landsberg
  unsure (1)..(531): unsure at all n locations
aaaagaaggtcatactgttctatatacttctactatctaatcatgatctttgggtaattagcagtacattcgatatttaattcccaaaataaccaccaaattaaactttataaaataacaaacttcaggtttaggagggttactagtttttcttttacactaagcccaaagtttgcggtattcttagacttttatattttcttcagatgtaaaagtcttgaaaatttcaatattttttggttgttgtcattcttgtttccctaaattcacagtcattgaaatttgttatttccacttaatgtcgatgtttaaaccccttttttatgattaaattgctcttcttaggtttttatcgtttttntatgccgtgttaattcctatctttctctcttgctatatttgttttatgtattcttatctcaagattacctaattaattacgtaacaaactcatctttctttttggcacattttaacaattataaaatgagctacaaaagggtaatgagaagcgaaaggagattattgact

SEQ ID NO: 43510 - DNA, 446 bp, Arabidopsis thaliana landsberg
aaagcataatttccttttctctttattagtaactcacgcctaaaatgactctcctcaaacttatccaacaaatcatacgttatttacttgtccctttcttgtttggaagataagtgctctgccttactttagaggaaccacaatttcatactgattaatatcaatatatatcgggatctttccgattcatttggatcctgattgccaattcatttggttattcataaatgagtttcatttccatgaggtccaccgtccaccgaacgacgttatcgaaaagactaagaaagttgcatgtataataaaagtgatcggcccaaaacgccgtcgtcactttgacctgctttcatttatgagtctctgactatttccaatcatattaataaccaaatagaattatttttaaacaatgataatggatgaacatggtaattgacaagtaatca

SEQ ID NO: 43511 - DNA, 907 bp, Arabidopsis thaliana landsberg
  unsure (1)..(907): unsure at all n locations
gtccagatctatctaacactccatcactatatatgcattcttatattgcacgttcattcttccaagtttacatttcttagataagaactattggaaaagtctactaggtaaaaccgtaaaagttggttacggtgatgagaaatccattcattaccaagtcaataatctagagaaagtgtctgtaattccagagttaaaaaaaagtcaagatgttcgtagaaaaattggattagcaatatatactgctaaaagcgctacggtggaagatattttcttttctttttcttttgagaaccattgaggtggatttatttatacaatttttttttttcttggaattattttgcagtgaatccggtaaaactttccaaataattttttttttctttatatgtttgttcgtaagttatatattatagatacgtgtttagaagataattaaatcgatattttcatcaaaacttgtaattaaagaaaacaatcatagggtacgctattatcatcgaaaggtatgtgatgcatattcccattgaaccagatttccatatattttatttgtaaagtgataatgaatcacaagatgattcaatattaaaaatgggtaactcactttgacgtgtagtacgtggaagaatagttagctatcacgcatacatatatctatgaataagtgtgtatgacataagaaactaaaatatttacctaaagtccagttactcatactgatttcatgcatatatgtattatttatttatttttaataaagaagcgattggtgttttcatagaaatcatgatagattgataggtatttcagttccacaaatctagatctgtgtgctatacatgcatgtattgattttttccccttnaatcatttcagttcacaatattgctctttgttccaa

SEQ ID NO: 43512 - DNA, 623 bp, Arabidopsis thaliana landsberg
tgctttcttgttaggtggtggtaaaagcacgtactagtgataatgcaatccaattagattatgtatttaattttatgtcactatgtgactagatttgacttaagtaaaaattatatatggtttgatagataaaccacatagcaacagaattatgaaacgatttcatagcttcactttactaattacaagctactttttgaaattttcttaccacatgttttccgacgagcataaatcaaagctaataattggttaaacaattttttccaaaagaagtggcgacatcccaactcgtggaatagtttatataccaaaattgatgacaaccaatagccaataagtttgaaaatctgaaaatagtggtgtttaatctcattaaagtcataattaatctcgactttaaaaataattatttagttactaatctcttcttccattttattatacaacatgatgtcccggcaaaagtgttatttcttgacgaatagaagtaccagctctctatctctcaatgcttttgtctagcaccatttaggtacccaagtctatcaatttttttatagaaatgatgttatatattataattataagatctccaagatcaaattatgccccaccaaagt

SEQ ID NO: 43513 - DNA, 579 bp, Arabidopsis thaliana landsberg
ggtttatccgcaacatcccgcaattaaagttatgaaacaatgagaaaagatggatcgattactttctgatctatacttttgagattcagaaattgttattttttgtcttcatctcttgtttttatcaatgttaccttaatcaaacatagtctcaacatcatcatcccgaactgttgttgtcacgttcagtgaaaggagttttcgacgccaaaaaaattctaaagtagttcctttccgatggctagtctagtcgcaattcgaagatgaatgttggaaaaaaacatttttttaaaagcgttatgccacgtgcctagttgaatattaaacgataatatttcacaaaaaactagtccaaaacatagttagtattaagtaatatttttcaagtgtcaatgtatgcaatatttctcgttaaaggcaaatcggttctaaaagtatgtaacggtaacttttatttttttaacttgaaattgtttttattaattagatgaaagtagaaagtcataatggacacactcatttaagcaaactggtgtaaacaaataatcaaaatcatatattgcctattagtgacttcat

SEQ ID NO: 43514 - DNA, 738 bp, Arabidopsis thaliana landsberg
ttttctttagaaattgcaatgatccactgattcacatgtgaaattagtaaattacaaagtaaatgaccaaaactcaattttctttttctttttgttcatctaaatctatacatttcacatggtatatatttgtaacaatccaacaatcatattttctttttcaacaagcaaaaaaaaaataaaaaatctagctttcaatggtatgaatataatctataaagtcttgaaaaactcgagacgagggacatctaaacggagagagtatgtagcttttttgtagtcaccccatgtgaatgaattataacgtcttggattttccggcgacaccatttttggcaacggtgatattttcgcctctaacggtggagctgcaaagtacatcgccgacatacgtggcttctttgctgtgtttgctaaaaccctatgcctcacgctagtgaatctcccattcgtcaatgcctattttcaaagattatttcattaattaattaattgatgaaaactattttgtatgtctttacgaaacaaaatgtggttagtacctgaaggcagtcaccgaccaatacgaagaagcatgtagggtcagatgggattgggatccacaagccgtcacgtgagcaaatctcaagtccatctacgtcgttggatcttaacaccgtcaagatctgagggtcagaatgttctccgaaacctatttgaccaacgccacttaacgcgtacggtgctggtggatagtga

SEQ ID NO: 43515 - DNA, 633 bp, Arabidopsis thaliana landsberg
cgctgcgcgcgccggggctgggctggttccggctgccgctgttcgtctggtcgctgtacgccaccagtctggtaatcgtgctcgcgacaccggtgctgaccacggtactggccttgatcgcctgtgaacggatcttcggggtcggcattttcgaccccgcgatcggcggtgatccgctgctgttccagcatctgttctggttctactcgcatccggcggtctacatcatggtgctgccggcgatgggcgtcgtcagcgaactgatcagctgcttcgcgcgccgtcgcgtgttcggctacaagttcatgacctggtcgatactcggcatcgccgggctcggctttctggtctggggccatcacatgttcgtgtccggccagtcgacctacgcgagcatggtgttttcggcgctcagctatctggtcgccatcccgtcggcaatcaaggtgttcaactggaccgcgacactgcacaagggccagatcagcttcgaggcgccgatgctgtacgcactcggcttcatcggcctgttcctgttcggcggcttgaccggtctgttccttgcggcgaccgcgctggacgtgaatctgaccgacacgttttttcgtgttgcgcatttccactacattatgg

SEQ ID NO: 43516 - DNA, 683 bp, Arabidopsis thaliana landsberg
accttaagtaaatacaattaaaagtcatatcttgtatggtttggtaagtagctaagtggctagaaagaacttaaaacatttaattataataacttaaataaaaaagctattttttaatttatatatatatatatgaacaaaataagtagagactattcatccaaaaacgtgaggcacaatacagactcttcttcactcttatgcctatagcctcctattttctctctattgcctcttcttcttcttcttctgttgctttttagattttcatagctttgatattttgatgagtttgagagagcttaaagagattgtcatcttcactaagtttgtatttgtatacaggagaagccctagtcttattatcagctggtagatctgtttcagttttggtctgagcttggtttttgagtggattctagcttcaaagtcgatggaccaattacgaggttacaaaaccaactgtggattcttacttgggaaaccgagattcggatctattaaggttaaaatcccaaggatcaaacctgagatagaagaagaccaagtagaagaagatgatgaagctaaaaacatcggtctcgaggaagaggaaaatgatcatgaagctaagagtatggatctagagcaaggagatgtggaagaagaagaaggagaagagaaaaaacatatatgttgtgaat

SEQ ID NO: 43517 - DNA, 576 bp, Arabidopsis thaliana landsberg
gccgtccgggatgctgtgcaccgcgaccgcgagcggtagcgcgatgccgacgtgcgcgtcgccgcccgacgacagcgcgatgccgtcgccgaggctgtgcacgacgaggccgatcatcgccagcgcgagcgcggccagatgcgctttgcggcgcgcgcggctgatccagtgttcgagcagcgtcggcccgagcaggccgatcgcgaggaacggtgcgctccatcggccgccggcgctgaacgtgccgggcagcacttcgagcagcacgaggccgaagatgctgacgaacaggaagccgtcgaggaacgcgagtacggccgggcgccgccgcgcccagccgtacagcagcggtccgctggacagcgcggcgagcgttgcgagaagcagaacgagatgcatggtcgtgccggtggtcagcagacattattccatgcgcgtcaagccggctggccgctgctacagtgacggcgttcagggagaccgctatgaaaaagagcttcgcatcgatcgccgtgctgctgatcgccgtatcgctgatcgtcgccggcggctggtggtatcacgcgcgccacggtg

SEQ ID NO: 43518 - DNA, 938 bp, Arabidopsis thaliana landsberg
atccccgactcccacacagacgccactttttgggcttccccggcttctacatttggtctactcaatctttgttggcctagacaactccatcacttactatgccttcacagtttgaggtacatattcattgtctgtttccctaattctcatttgatataggtagagttgatatcaggatttgttcttggcgcaatcttgagttctgctatttgttaatttgttcttgtcataattaagttctgttatatgtgaccccttaggtgctacaccaggatcaggagccagctttggttctatgacagtaagtacctttttcggtttaaaactctcattttcatcagatatattttggtagatcattacgccccaatctaacaattgcattcaatgcgtgcatccttcagttatgtccttggaatattgtctaaacctgaacttcttttttctctcccattgcagaaatcttcaaggccaaaatctcgaactacacgccgttagacatgggatatctcaagtttcatccctcagcctgtcaagtgtcatccctcagcctgcaacatcgcatcgtgtacatggcttgagttcatcgtcttcagttggtgaagtcgacttcggtgcaagttcgaagcagatccgtattctcttatgcaccagtttgtatttgtggcgttattcattgaattgatgattgaatgttcttaaaagcactatcttattatctcatcttgacccttgacaaataaaaaaaataaacaagggttcattatctcatcttgacaatgctattgttgtagaaatgagtgttctttttacaggaatcttattcatataaaaaatagtcaccccgatgaaacatctttgcctatcatggtaagtgaaagctgaaagttgctactactaattcttcgactggagacagttgatacatcgtcttggct

SEQ ID NO: 43519 - DNA, 767 bp, Arabidopsis thaliana landsberg
tttgctatcatatttatactttcaatcttttctttgtcaacaattctatctttgctttacactctttagtatcttatcatctttggtttaatattttatcaaaattcataaattgaacatacgagttttattcagtttgtcgctttgaagtttggatgattcaatcaaaacacttaagtagagattaaaactcttaaaactccatctaaatcaaagattaacgacccttaaatgatgtgactctactttttgtcgacttcaaagcacccaccgaaactttccatcattttgcaacttacaaagactagcgtgtggtttttacgattagaaaacggcgtgtagtttatatttataattcaaacacggaaaccatttcacgagctgcactccaaaagtacacgcgtcatcgttaaccaatcagaaacgtcaagtgagatcatcagtccagtgattagcttccacgtggaacatcgacgtatctattttcgcgcctttgtaacaacttcatcttcccaaatccaaaacaaacatttttagtttgcgattctcggattcgatcagtgaaattcgaatcgaagcgccgccggaagaatcatcgccggtgtgggagcgtttcccggagcggcgatggaggtccatggctccggattccgtcgaattctgttgttggcgttgtgtatctccgggatctggtccgcctacatctaccaaggcgttcttcaagagactctgtaagtaaaattggtaggtcatatcgattctcgtcg

SEQ ID NO: 43520 - DNA, 599 bp, Arabidopsis thaliana landsberg
gggtgggtaacaaaaaagttacaccaccgatttaaacgtagaaaccaaaattcccccactctctctctctcattacgctccaccctactcttcttttttgtccctctctctctctctcttgccggcactaacaacacgaagaaatttttttgaaaagagagagaaagtttccaagagaccgtacgaagaaaaaaaaaacttggtatagatcgataagatcgataccgtcggagagataatttcgtggagtaatgtcgacggaggatgagaagttattgaaggaggcgaaaaaacttccttgggaggatcggcttgggcataagaattggaaagttaggaacgaagctaacgtcgatttagcttctgtttttgattcgattactgatcctaaggaccctcgtcttcgcgattttggtgagtttctctacctcgtttttttattattattatgttagggtttttgtttttgaagctcagatctgattagggtggtttatatcggtgtggatctgttttgaatctggattgttgagtgggaatgtgattggtctagggttccattttgctttacttcagattgaatttctgattattttttt

SEQ ID NO: 43521 - DNA, 781 bp, Arabidopsis thaliana landsberg
tatatggtttctataattaacgatgttcttttgtatttatatacagatagagagatctatgttttatatcatttaataatcggaaattatttatatggtaatttttggtttaaactactgtcacatctactcctaagcctatcataaaatttccgcaaataacaatatttttagctgtaaacgagtcatttaaaatgtccgataacgtttaaaacctcaaccaattacttccattaactttcacaatgacaaccacaccccgttgcatttaaaccaatgaaaaccctaaataataacgagcctatttttgatactcaaataattggagactttattatttttcaaaacttaattgtaagaaaatagttgttaaaaaaaaaaaattgtaagaaaatattttttctcttgtttaacgaacattactcttaatctttcataaatcagtttctaattcgaagaaaaagttataccttattctgaaaaaattcaggtagcaagtaaaggatctctcatttaatgtttggactaatgaatgactaaactatatgagtatttatttagtaagactatttttatagtatataggatgcttcatggcacgatctcgatcattgtattctatatagtttagtaaatctatttattaaataggatgattcattgcattatctcgatcattgacttctaacttatttttcctagtttggaacatattatattgggcgtggaacatataatataaaaacgtgacttaaaaatatatcatgtatgtccaaaaaaa

SEQ ID NO: 43522 - DNA, 694 bp, Arabidopsis thaliana landsberg
ggcacttgtctgtgaagaaaagcaaaatgctattaaatgttaagttgtatccagaggtatcaaacctaaccagagaaaatccaccggttgcttcctttgctcttcgtgttgtctcttctactggtgagagaaaggctctatctcatccaggtagagaagatctcttgactcaatagtttgattatggtttacttttgtttctgttccacaaaagatgaatctttcagaatgctgacactgtttctttaatgattactcgaatgcagaagtaatagataagcggattaagacaaacgaagattttatttggactattgaagttcccttaactgggaaaatcatcatcgacgtcgagtttcttgacttgaaggttttgtctcaagatgtaagtgtctgtctcatcacttagagatattacttatagattgactagccttttctttcttaaattaactattctatgcaacattgaatcagtatgtttggtgaaacatgtgtgctgaactgataaattacctgaattcggcagagtggagaactttactctatttgggccaacggttcaactgagaatcaatcgcaagtaactgcggtaacatcccttggacgtatgttgacagaaagcatttacaccgacataacgatcaatgcctctgatggaagcattggagctacaccgagcagttctcgctgc

SEQ ID NO: 43523 - DNA, 673 bp, Arabidopsis thaliana landsberg
atcgaaaaaaataaaggcatcgtgtgcaattttcaattaccttcacaaatcaagaaacattccgagcatatctccttggcataatgagtgggattttagagttaagccaacgaaatttgggcctaatttttcatcaaatacttgggcctagtcatcggttatgtcattgctacttatataagacccataggtataccgataaagtcttcatattgagatccaaaggccgggatcgaacaagttttgttcttattgaatcagcgttagaagcagccttgtctttattatgttcttcttcatccgttagaaaaagtatccgtatgatgtccattcgtttcatttgtaataatttgatgaagtcttcttaaagacatttggattggagttagaatgttccttcttttatttttcttcaggacactcggagtctcggattagtcaagagacttcgatcatattttctttatcacctcttcttcaatttatatggatcatctgtaggaaaactataacgtgttaattgtgaaattatgatacaaactttataattcataaataaatatgtctgtgcatagtttttttaaaaaaattatccggattatgattatgagagaaaagcatgtaggtcgatcatgaatgtttaattctggcacatgttgaatgtgaggtccca

SEQ ID NO: 43524 - DNA, 614 bp, Arabidopsis thaliana landsberg
  unsure (1)..(614): unsure at all n locations
aacgccgcacatactctcaacttacacccgctgatttgcgcacgattttttccatgccctcattttaccatgaaggtgaccgggcgtgtcacatcgccctgtggataacgtgaaacccgtgacttcggtcagccgaagttttttcccgaaccggtgccccgtgtggccggtgacgcggtcaagggaggccggggcaagggctggtctgccattcggacgacgcaggagccgatctcagacggtccgttggcggcggggaggccacacatgcatgggtgaacactgccagagcgggatgaaaggcggagcctgcggtgggtttgaagggatcaagggtgcgtcatttaaaatgaatgatcaggattcgtgattgtcgtcgtcaatcatcaatgccaccgtgactttcaaagcgctgcaagagaagcatgaggagggtggtttagcaccctgaactcctcggcatacnnnnnnnnnnnnnnnnnnnnnnnnnngaacaatttgtttgtcgtgacgcaaagagaacgcggatagcacatttccaggcctgcccaagtgcaaatgcccaaaatgaaaccgtcatagagtgacctcatggattgatagcaagagtgtgc

SEQ ID NO: 43525 - DNA, 650 bp, Arabidopsis thaliana landsberg
cggtcaaacattttagtataaaattttataaccaattaatactccaattttctgctatcatttacaaataattccccaagttctatcaagtaagtttcaatattttatttattaaaacaattccctagtcttactcttacggttgtgtgtgtcgcagctctatctcaatcataatatagatgttgttatctttcattgcagagatttagaaatataatacgaattaaattacactataaaaaacaaaattcaaatggtatatcaaacaaacagtttttataagaatgaagtatgtaaaattatttaaagaatatcatatattcaattagatgggaaagtcgaaaaataaagaacctaaaatagtaaatccagaaagtcggtagttggtaccgacaaagagtataaattaaaaagacaaagattattcttgaagaactcaaggaggcatggggaagttttcatgagtttaagtgccctaaagtaacattggagtttcagttatattaaatctttgtttactgcttagggtttctaaacaaagtctctacttttgtagttccaaacatcttttaaagcatagatttgctaaaaatgcctagtttgtacaatatttaaattagatttgtacgaaacagtctggttctatattc

SEQ ID NO: 43526 - DNA, 499 bp, Arabidopsis thaliana landsberg
aatttgaatggaagtcaaattaagatcgaatacgcacgaccggtttgttcttatctatatcttcgtttgttctctaactttgattgtcttttgtcaacgattatactctttttgcgaattcatagtccaggttcacaaaactttgatgatgcttgtttagtccaaaaatttcttgttgaatctgttttttttttcctcatcgtacaaatcaaagtcgaaacctagtttttttctattatacgtcgttagcttaaggcgaaacctgatccgatcgaaacgtcttttctcaaattactttggttatatcgaactcgcgcaaagccaaaccacagagaagctctgcaaaatttgatgttaaagcatatataactcttagcgaatgagctctgcaaaagaatacatcaaacacatgtttactctcgtttatgcgaagaaggtttaatccgattgtcgtttatctgcaaacttgtatccgcgtttagcagtctgatttcaggtt

SEQ ID NO: 43527 - DNA, 131 bp, Arabidopsis thaliana landsberg
  unsure (1)..(131): unsure at all n locations
nnnnnnnnnnnnnnnnnngtttatattcaaacggcgtcttattgcttctcactctctctatctcgattctcagactcaagacactctggatgatcccttaagcattttcctcaatcgttattggggttttt

SEQ ID NO: 43528 - DNA, 533 bp, Arabidopsis thaliana landsberg
aggcttattcttgttgtttagttttcacatattaaacatgctaagggtagagccttaaaatttattagaaattatttttcatagatgttagaccaactcgaggtcataaaatagtggcatggctaacgccttgccatcaagacaaatctttcaataaatcgctctaattgtaatcattgtcttaattgaggaagaaatagatttatataagcacagtacaagacgttacataatatgagccaaatgctacatcgtacaagcagaggctgaatatatcatactacaagaggctacataatacaagcagacgttgcctaaggcatgcttagtaaaaaaaaggtgatgtttgagagagtgtggtgtgaggaagatgaggttgtgttgttttaatctttaatagattttaggaagagtatttctagagagataaaatttattctatgaatatgtgaagaattccattagttttaaagttatagtcagataaagtttatagtacgatatctaagaaataaaattggcatttgaagaat

SEQ ID NO: 43529 - DNA, 548 bp, Arabidopsis thaliana landsberg
atcaacatttctcattgtgtttgctaggcatgactgacattggtgaacatcagtatgatatcagaactgtctcagccaaagctctatctatgcccaagtatgtcatgcttcttatactcagacaccacccattagtttcatagctctcttgttaactgtaattctgtaatttctccacattgtagaaatcaacttctaaaatgactcgattgtaatctttgcttataccaccatattaaaatagctcgcttcgttttatgaactccccttgtttcaattatacaatgttatgatcttctataggtccactttacaaaaatatggaactttgtttatattacaacctttttcactatgcttcttctaattagactgtcaaccccaactctttttcttgtttacatcaaattgccacccataactcatgaatacataggttcacctaccacaccatatctgagcttctttatataaggcctcaccccaaaactaacacatattaatcccatattttactttcagtcatggagaacatagatttcaacatc

SEQ ID NO: 43530 - DNA, 500 bp, Arabidopsis thaliana landsberg
aatcacataacatgccaacaggtggataaaatattcacaaaaaatagaattttaatcttgaattaatttattaattgaaaatgtactaatataactaaacagtaattactacataaaacaagcagatataggtaagaaaaaccaacaatgataaaatttgagaaacacaagaaacacacaaaaagggaaatatatatgttcttagaatgaaaatttatatgtaaaagacaaaattcagttaggtaataacattggcaaaatgcaaaatacaggaaacaaacaagattctcctaaattcttgtaagactatttttaatcatgtcttatgaatcaatttcatcagatcacaaatatacgggatccacgtcgtatgctttatgaaatcacatacgtccacgtgtcatagtatccatctggaccgcgtatattcatctgcttcgtcaaccttgacgacttcagtttttctcttgccgttgaagcaagtgagaaccaaatccccc

SEQ ID NO: 43531 - DNA, 959 bp, Arabidopsis thaliana landsberg
aaagcccagccacctcctgaaggtcgtctgcctcaggccaccaaaggttatgcagttatatgaaaatgaatttagcttgaattcaggtatcagattgtagatacatgttcataatcataaattcaggtgtggatcatctaagagatgtgtttggtcggatgggactcaatgacaaagatatcgttgcattgtctggtggacacaccttggtatgtatgctgcatccagaaacaaagacctatgtgcttttctcagttctggctcacaccattcttttactttcagggtcggtgccacaaggagcgttcaggattcgagggtgcatggacaccaaacccgctcatttttgacaactcctatttcaagtaagatcagattctctgcttctgcttgctcatacttgaattggacatgagctgaattagaagctcttgaatcttgatggttgttaaacagagagatactaagcggagagaaagaaggacttcttcaactaccaaccgacaaggctcttcttgatgatcctctctttctcccatttgttgaaaaatatgctgcagtaagttgttcaactcatcatttcatgattctctcagcatacatatattgtcaataggataatatcactgactggattgttactctcaggatgaggatgccttcttcgaagactatacggaagctcatctaaagttgtcagaactcgggtaagtaacatatagaacaatcattctcatcaacattttatttaactttctttcctattctcctaatgtagtgtcgtaaactttgaatggtcctcagaaactcttttcatttgcaaacactttgatcataataacataacttacgctcatgtcatcatgtcctttgcaggtttgctgacaaggagtaatctggaatctggtgtcatctcctacctccttgattcttgttccctcacattattatgatatcat

SEQ ID NO: 43532 - DNA, 1236 bp, Arabidopsis thaliana landsberg
gaacctcgtgagagccttttatcgttttcactggattcacaactttggggctcaatttggatttcatacttttgggcccattttggagaattttagaaaacgttcttaggaacaaaaacaagataaaggtaaatgttaagaattaatatagaatttcatgctaatacaatacctttgaaagaccgtcaagagtgagattatttatgtccacttaagagttaataatgttgacgtgcctaaaatttggattattgtatttgttttatgtcatttaaataagaagagacgtatcaaagaagatatatagtaaataattcatttaccagcaaaatccaattattgatcgagaagagaagattggtcattcgaaactttttttcttttcattcgaaacatatcatatacttgcaacaacattatataatatgaatgtaagtcaaaaagaagaccaatgatatccgaaagcatagttgtttataaactatctatgtttgccaactttacctctagctttattaccggtttgatacaaggaatagtgctagctataattgccagatttggattcgaatgtagtattttgcctgacccaatgagttatgtcgcatgacatgagtttgtcaactaaaatttttatttttacaatatccacgcatttttcattttgatgatgatacaatcaatcggtcattggcaatagattacaaatgatatctacacgtccacaacggtttcgatgcctagatttggtgtttgggaagtatttgaaagatgatattccaccattagaatatgcttaaaattcttcttaaaattgacgtaataaattgatctttctttagatataagcttatttttcaatttaaaaacggagcttttgtatgtattttctaaaataatataatgtttgtcatatcattgtagttgtctagggactagggggtttggcaattacttgattctcccggaagatcttttataactttgcttctttttctaacattctggcttccttttttgtttttgttaggtgaatttgataacgaccccgaaaacaaaaccaaaatcattatcaccgagatttctttttatagccagataatattgaaaatctaaaataaatgttccatctaatacagatttgtgtcaaatggatttcccgtatgattcatatatgattggacttggtatatgacattttaatagtatttgggaggccaaatattcttcagtcaa

SEQ ID NO: 43533 - DNA, 421 bp, Arabidopsis thaliana landsberg
cctttgcaacacttgattccaactctcagaacgcatgtctactgttattacacataaaaaaaaactcgggggaaaactcttaaaggagatgcaaaaacctctggtgttaagagagaaatatactcgaacgggtggagataggtttgccattgcataagcacctttacttgaaactctaatgtagaagacgactataaatatgagataagttactttcaaaaatgagtccatagacgttttgatatattgctggattcgcctgaatttatacaactttccatgttctcttgatattgtacctttcaaaaacaaaaacaaaaatctaaatgtgatttctttgttattttatcatcataaatgacaacgattaaaaaaacaagtatggttccacaaacttggtatcttcataatcaagtgtaac

SEQ ID NO: 43534 - DNA, 755 bp, Arabidopsis thaliana landsberg
attttctgtttgagattagcttctctagtaaccttctttgcaattcatgatgccaattgctaagtatgtaactatgtctggtatgtgagctgggatcatatgatacctgactatcgactcaaagagaattatgtttagtcaatcaagggcttagttctgaggctacagtgtgtgtggtcgatgtgctgttatggtggaattggatactaaaatatgtctaagagtgggactgcaatatgaccttcttagtttattcgatgttttgcttgcagaagaggaggtcatggacgtttctgctagaaagtcacaaaaagctgggcgcgaaaagttgaggagggaaaaactaaatgagcattttgttgaactgggaaatgtactcggtatagactcaatggttatgtggatttttctaaacagcagatgatctcactttgatcctcacatagctcttctgtttgcagatccagagagacccaagaatgacaaagccacgattctgactgatactgttcagttgttgaaagagctcacatctgaagtcaacaaactgaaatctgagtacaccgcattgacagatgagtcccgcgaggtacgtaccttatcccttacgctccaggcttttcctaacaggaaaaattagcagtctacatgacgtaaagatatcgatagggatcccaatatagataactcattgtgtttttgcttttatgatatggtgactacacctatttcgtaagatgcaaactcagacggag

SEQ ID NO: 43535 - DNA, 633 bp, Arabidopsis thaliana landsberg
acgatttaactggaccataattactttctcccaacgtacaaatgtactcaatcgcaacatccattaaccctaaaccaagacccaaaactacgttgagtccgcgtttgcaatgaccacgctggatgagagatggggtttattcactaatgactatgtatatatcaacgcctatcacacttactattactatgtatacagaagacatacgcatgagcctgaaattagttatggatggttcttaccttatggaagcttaaaagggtctgctctcaggatcagcgaatccagctagtagtgcaccgaagagccatatcatgagtaagaacaccactgctgttcgcagaacttggctgcatatgttcagactcggctcgtcttcataggctaaatcaggtgtctgggcattgtaactccagtggctgtcgtctagcttctctgtttcactcgagcttctactctttcttcttgggtgtgtttgtggctgtggtggatcttgttcgttgagatttgagcatcttttgcagttgcagttgctaccaaggtatgaaggaagtgtctggaggtattcagagaggactcgatggaaagtttccccttcaattctcaacttcttgcgtgtggatggtctaagaa

SEQ ID NO: 43536 - DNA, 980 bp, Arabidopsis thaliana landsberg
ttatttacacctaattgagttgtatgcgttgggtagttgcttgggtaatgtctattgtttttagaaaacagttgttgcaaccatttgggatatatcggtctatgctttaaaacagatattacatttctttgtatcacgctcttttaagtaagaaggtttagaccaaaaaaataatttgttttgagtaatagaacgaacgtgtataaaatcacatatctgtctccttaacatgaatgtaggagggaagagtcttggtttgaaaaggataactttttgttttctctggcggaaaagacagaagatataaagttaacttgaaatgagacagaaatagaggaatttgaataacaaaaaaaaaagacagaaactaatgctgttgaaacatgtgtcattgacattgattatgagtttagaaagttagaagctagaagaaaacaaaagtttctttagaccaccgacttcgtttctcttatatttctgatttgataaaagctcttagtaatagtatatagttcgtacttgtaaatagctcaacgtaacaatgggacgaaaaaacaattcaaatttgattggttcgtcttctttcccttttgttgtttgttttctactcagcgtaagcactaaaaatgggtcttacgcgttgaggaaaacaatgacacgagccccaaaatttctcctccttagaaaagatccaatgatgtatgctttgattcattaacatatacctttatattttttgtttatttatatttataaataaatttcatatatttggttgtatcaagaactaaatctaattaacaaaaaaaagaactaaaccgttttttgttttttaatttagaaggaccgaatatatgaaaatattatgtcatactcaaattcatgttttggagaattaaattctatttgaaagattttatgtagtcaagctcctaaatttttcaacctaggtgtggatctgacttatcatcaatggaaga

SEQ ID NO: 43537 - DNA, 679 bp, Arabidopsis thaliana landsberg
taaatattctgaagtgtatagcttaagaaatgagtggaaactagcctcgtgaactttacaacaaacataggcgatgacccgacaaaagcaaaacctaagaactcgatcagaatatacgtacatatgtcttaaccaacttatggggtcttaatggttcattatacacatatatatcgtgtcttaattaatttggatgctttcggatcggaatctcggttatgtaaagaagtgtttgtatatgttacctgaggatacaaagaagggttataactgttgaagctattgcaactcatttcgccatgtaatctaatcttctccaattgtgctactccaagacctctctgtggctgcttcggcttgctcggagccattcttcttccctcttcttgtcgctggagaagaagaggatgacgtcggagacgatgaatgcggccaatatcccaccacgtctggactaccaaagaaagtacttcccatgtttctttgatcggccttaaatatcacttgcgatcgtaaggaataccggaaaatgcaagaaactagagagagaaagtcttctctagagagaaagagagggagagagagagaagaaatgaattttcttattttgctttgagctaacaaattggagagatctctctcatggcgatttggagatcactttcttgataatattttt

SEQ ID NO: 43538 - DNA, 773 bp, Arabidopsis thaliana landsberg
aatttaaaaacctttaagaaaaaaataaatttgggtagggtttggtgagtggtgtcgatagaaatggcggatgcatccttgagattaaaggtatggtaccaacttggatccatttcttcgataacgactcttcctatttccactctgttttttttttgtttccctcttctttatctcatatcttccactactctcaatagtcaattctatatcccaatttttatgttaagtttttacgatttacaagttattggcaaattgaaaattgctgtcaacttgctagagggtattgtaacagtactaccaaatatgaggtcgagtcttaagtgctatatatggagagagatgatttacgtttgtggaatcgcaataagtatatattatcaaatgctagtccatggacataaaactatgagccaaaaattagaaatttctggttaacaataacaataaagaaaaaaaaaatggtatatgcatatacagtataaggtagatagttttgatttttgaagaccattgattaatattatatatttcaatatcaattgttggtaagttataaaaaccttcaaacgagagtgaattaacttcaaagtcacaaagttcgactttcgatgttaaaaaataaaatgtttacacgttccattctcttgttcaaaaaaattatggatcagtattccaaatttcatagtaatctaaaaagaaaaagttgcattaatatggtttgcttatctaatcatttttcgggacatcaccgtatgtatggatgacga

SEQ ID NO: 43539 - DNA, 610 bp, Arabidopsis thaliana landsberg
acacataaattcaaagttatcatcaaatgttttactcataaccatatttttcacattgagaagtagacttatatatgaaatttactggtctctgaagactcttgtcatggagagacatccaccaggaagcattgattgcatattaagtgcgatgttagggctatgaatactctgcctcatatgcacccaaccatactcttgcccactctcttcatcactcactcttaccctgaattattgactgttaattcgcattggagcatgtactatcatataatataaagtatttgtgagcatattaatttacctgtacatgtgagcatcaatggcagatggatgatcatttgagtccaccaagcaaccttcagtcacccaacaatccccacacgtgcctaattcccaccctttcagttttccttcctagtaaccatttttatttgttccacaattataattaccaagtctaaagctacagccataaccaatcaatataattgattataactatttataccttaatgtattgcctgaaagtctcaatggcttcaatgccttttgctctggcatctcttggctctgataaaatattcaaccgaagctcaaccgtttt

SEQ ID NO: 43540 - DNA, 896 bp, Arabidopsis thaliana landsberg
actaaatattcagggaataacccttttaatattgacttcaaatgtttgtttattctgagtggtacagtcatggaaattgtagccactcactcagcatttgttatttgttagctcactgcatgtatcttaatagaatgtttagtcaagaggcttttacattgaaacaagcaatcactttgtgaacaggtaggcacagatgggtagagtatgcttcaaaggatcgttacaacgcatctcaagtaccagctgaatggcacgggtggcttcatttcatcactgatcacactggcgatgaggtaaaaccaagagccatttcaaattcgctgtctcgttcaatcaatagataatatattgccttgtaacttgataataaataccaatgtctctgtttcaagctcttgagtttgaaaccaaaaaggtatgggcttgagcataaagagaacttctctggagaaggtgatgcatacatctaccattcgaagggacataccttgaacccgggacaaaagaactggactcggtaccaatcatgggtacccaccaagactcagtaagaagatgatattttggttttacgctctgcgagactttctctcgagtgatttgttgttttgtttctgtgtcattttaataaaagctgtcttggatctaaagctggacaattgggtttcggatctggaattgtaattgttactgtgtaataatttgctgattattaagtttcttgtttcttcacctctggctaggaaagtagaaaagttttaataagtagaagtatttaaaaatatattaatcaaataacttcatcgagaaaaatatctttcaagattttttttttcttcgaaatccttaaagaaatttgatacagagtttatgatcaaaaacaaaaacaaaaa

SEQ ID NO: 43541 - DNA, 1122 bp, Arabidopsis thaliana landsberg
ctgtcttgtctagttgtctatagagcttcgagtattgttgttgcggagagatccaagctgaaagtgaccgggaggtgccgatgtagagaggtctaaaatagaagctttcatatcgatagtttcttccacttatcgaaaagagaaatcctctcctgtaaatcgaaaagaatctttagagttgactaaacttttgtttactttacctattcacataacttgaaatttattagtcaaaagtttagaagaaaaaacaaaaaaattcgcaaaagaaaaacacgataatatagctgaacaagaaaatcaaaaacaaaattgtattttggcagaaaatgaaacctatattcattcataagggaagggaaacagcccaaaaattgaaaagtcaacaaaattgaataaagaacaagttggtagtccgacaaaagcccagttgttctgactttcaacgtcatcaaaactaaggaaactaccggaaaagacatcacatattcacacgaactcttctagacttttttgacattttcatttctctcatcgttttcttttttatcattacttctttgaatctttggttataaccattaaagaattcaactggtatgcgcataaatttccgcataactccattaatataatcaggagaccaattcactggactcaaatttgattcgtcttcttcttctctctctctctccatttgtaaagaagctgttgaatcatcgtcccccacgagttttggaaaaagcttgcaagtcaaatatcaataggtactctatcttcaactctgatgattgatcatagccgttcaattggctaacaagatcttttatcttttgagtattttgttatctaaattataatattatccattaaggtttcaacttgttttgttttgttttgcccagaaaatgtctctgtaacttacatttaattaaacttaaaaaccagaccaattcatgactctctctctcttcttctctctgttttgtctctttaagcacgactagagattaaggaaacaaaagcttgaacctttgtagtcaaaatcatcaggtatatatatcttcaaaaatctctctatagtttcaacaaaaccctgatgatgataaagaagaatgatga

SEQ ID NO: 43542 - DNA, 1181 bp, Arabidopsis thaliana landsberg
ttttttttcaacttaaaatttgcaaacaatataagacttcacaaaaaaaaaaagttatctaatttaagatgaaactcataaatatttatgaatacatcaattagagtattagctaatcttcatttatatatgtttccttaaaattttagaatctaccaactgtattagtgcgggccgcaaaaatggtatcagattaaggtgaactctgaatattatatatgattaagatcttaaatggatatactgtataaattttccttataaaaatacatttttatgtttaaatagatatttgtggagaatttttgcattcgcagacacttgaaactcactaattgaacttcctttcactcaacagaaacaatataatgtgaagtcttaattagtgcatgattttttttcagtaaaaagcagtagtaaattaaattaaaattgtctcatttttgaaaaattgtataaaacaaatgattgtttaaaaaaatactcattatatttaagataaacacaaaaaaacttgtttagatcactcatgcgttgatcgcgtgattacacaagcctaatatttgttatgttcaatttctctctgcaactcttctcttcccaaacactaaaccatctatctatgtcaagcaactattttaggcctaaatgcgaagaacatgcatctacacaatcaaaaagataagagaaaaaagggatagtaggccataggcagcaaatagctatagatctatggggattttgttttcgatctatatcgatcactaaacagtactatgttgtttgttcaaatttcagtctagccacagtccaatcatcctcataatcacatgcaaagatgcgagattcagatcttatctaatggcaaataaattgatcaaaactatctatggagctgaaaatttaacaaacaaatacatcacacatattttaatataatactaaaagatttgttatttcaaaattatatatggaaaaccatctcgttactcatctttcgtcccagcagtacggccccctagtttgagagcgaaggaaaatatactttaaaagactttggaacttattatacatactctttcaactataacaatctccaatattgctaaaagtggctcaagaactggacccacttagtctgatccaagtcacattattcaccatttcgaggctctaattta

SEQ ID NO: 43543 - DNA, 620 bp, Arabidopsis thaliana landsberg
tatttaacaaatctaaaatagtttaatttgagaaaaagaaagaaataatgaacaaaaaaaagagcgagcgttcgttgctccggaaatgatgggcaaaagtgggtaagtgagtgggaaattgaggtctgtgaataccaaacgcttccctttttcttcactttcttccctctaattactctcttgtctctctccctttcctctttcgtctcctacgtgttataaaccttgaaaattcaaagagtcttttttggtgtttaaatcacccatttttgtcaatctgtttttcgagcaaaacagcaggaggaaaccaaaaagctagaggctttgtggagtgagaagaagagtctcaggttagtttcttctattcttctgtgtattctcattatctgtttttttgttctcattcgtcttgtctgcaaaattcagttcacaaaggttgagactttacacgacttggttctctttaaaaccgttttgaggtcataattggtaaacatttgaattgggttttaagagctctgtttatatagtagaagaagttggaacctttcaatgttcttgattaagggttttaggttgaatgtttatagggtttgattttggatgactagccccttttt

SEQ ID NO: 43544 - DNA, 492 bp, Arabidopsis thaliana landsberg
  unsure (1)..(492): unsure at all n locations
aagagagaaaaaagggataaataagggagtcagattcttcttctccgcgtttagaaaagggttaagaggaatcaggcgcagagacaaagataaaaaggtaattagttactgtagtaattaaataagtaaccatgtttaaaagctcttaatacattgtgagactaatccaacaaatattcgtcataacaaataatttattgtagaaattttataccactgactcagtatatatatatatatgtatatgtgtatatgcgggcgtatagatcctgagaggtatatatctacagttttcatctctggctcgtgttgttttgtgtatatcncgaggaaaggccaaaaatcgagaagaaaacttgagagccatcactgaatctttcttagaccagtgaacganngggagaaagatagatatttgtcaaatcgnntctnnctatagagataagttagggtttgtaggagttggagagggaaattaggggggcgtgtttc

SEQ ID NO: 43545 - DNA, 733 bp, Arabidopsis thaliana landsberg
  unsure (1)..(733): unsure at all n locations
atcttcaaaagaatcccatggagtggctcaaaccctatacagaacaagtaaagaagatacgagacacaatctagtttttcttttttttttatgtatccccaaagatgagttttaggtgtaattgacatcaaaaagtgtttctttttgtatcaggtgtaatccaccggtagatgttaaagcaagtaggaaacaacagcagatcacaacatcaagaaaaccttaaaattccagttctttttttgtccttatttagatcctctactttcgttttttttgtagaataggtacctagacatgtgtgcttttaatgctgtaatctacttgaaatatatgaactcatcttttaatcttattgatcgatcaagataggatgaaaatttaaaacgcctcctagctcgagtagtctaactttccaaaactattctcaacctctttaatcttttgagttcttcttcttttctctgctttgtggtttcttttatttgacttcagcagacttatcctcagccatagcatgttgttctcagtggtgcttaaaaccttaaaatataaaatgatcaacctctttatctatgttctcggntctatatgcttcaaaaatgcatcctcagatccgtaaaaaattgaaagttgttctgcaggaaacctcacaatatcctgactatttagctgcctatctcgatatccagtgattactcctcactgcaaaacagcaacaatgaaagaagtaatc

SEQ ID NO: 43546 - DNA, 1536 bp, Arabidopsis thaliana landsberg
gcaaaagctggcctttgtttcacagataagttacgaatggctgtgaaagaggttatatgcaatgaccccaaggaaagggagaagtacaaagaagctttagtggctatcactgtggatgagtctctgaaacggtgagtcataactcataagaattcattcacactcaataccacttttcagctaaatggcattgtttttccttatcacgttaagcatttttcttcagcttttgccagcggattggaagacacgatttctggggaggagagtccgagctgctagtgagtttcctgcatttaaaattgccatcatagagaaatgatctaatgtcagtgttttgcttcaacaggttctctccaagctatgtaaacagcctatcatcgtctacatacctgagcacgaggtaaacgccctttgaatttgagtcttatgtaagcaagactaggtgtttcttttgttctagtaactgtattcagaacttgagttatttggtattgtttatctagcatggaagaggaggagggtatgggccgggttttataccgattcaagagtatggaagtgaatttcgaggaggctggggaaaggggaagacaaacaagaatgttgttaggcttctttacagtggtagaaaccactatgatttgcttcgttgaccaaattttttttttttgcctctgccgttgacatttattgatatggtcagagaaattgaaattttttacccattagtgtatgtgtatcacataaggagtgctttgggagacaaagttactgaaatttctgtcaatgaccttaaactctaagatggatttattaacattgttggacagctataaggtatttaccttaactgtaaggttttggcccaatcaaaagccaaagttcggtgtttatatggtcaatccgacaatgtgtaataattgtttgttctcaacacaatgtgtattatcttcttcgaatttttgtttgtttcattatgaaatttgattttttttgaaacattcacacattatttttttgaaaaaaataacccatagtttaaaaaaaaaaaattatacatgtatcattaaaataattgttccaaattaatgtaaaatccataaaatatggtatttatcaaaaagaataaaaaagtatattttctgaaaaaggtaattaatttgaagaaaataggatcgtggcttgcttgatgtttcgtcttcgctccgatctccaaactccttcgtccggtcgataaattcgtaccttgctcgattctcctctttgaccaaacgtaagttttcttattgatcgatgtttatcaaatattactcctttaacgacgttctcaaaatcgattaaagtaatgagattgatgaactttgattgctccagtttcattgtagagcctttacctagattagtcttcatataaattgtgtagttatagattgggaattgaaaaaattcagcgtagtttcgagtttgatcgcagctaacgtaatttctagggtcaaatttgcgatttttagatgattttttaagtgtgatttt

SEQ ID NO: 43547 - DNA, 827 bp, Arabidopsis thaliana landsberg
tccttctgtgtctactacatctacaacctgtaaccgcaactattccgagctttatgtgcttctttggagaccaggatcgtctgcttcttcttcttctttatctcttataacatctatcaccggggcattgcagaaaaaacatctctgacagttgagaagatgtctagttatgcagccataacatgatcgatgtgaacacggagcaatcattgcattagcctcccccgcgtagcagatacagcaagtgttgtcttctgtatccgacgtgtctttgttgaatgactcttcttttctttcgggttcttgcgatgaagcccggtttatgagatggctcaagaagttctcaagttgaccaagtttctttacataggcatcatccccgcttacacaaccggcctgaaaatgtttttgaaaagctgtgtcagtaggagaagcaaacgagcagaaactagatttaagagcttacgtacccaattatattccaagagatactgaaacccgtaatagactgtatcgggacagtccatgcttgcgaaaagaccaattacatcatgttggtgctgtggttgtgagtcttcactagcctccaagagattcaagattataccaaccaaaggagctaataagatccctcggctaactttctctgaagggtgtccctgccgtctaagggacctgacagatctcaaaacaagaagaaaacaatatctattaaaaattagccgatttccaacaaagttagagcctgtttgggatatctttgaacttacagatcaaagaactcgttattcaatgcctgggtcatgggattcaggacgaaaagaatc

SEQ ID NO: 43548 - DNA, 447 bp, Arabidopsis thaliana landsberg
  unsure (1)..(447): unsure at all n locations
nnnnnnnnnnnnnnnnnnnnnnnnnnnnnnnnnnnnnnnnnnnnnnnnnnnnnnnnnnnnnnnnnnnnnnnnnnnnnnnnnnnnnnnnnnnnnnnnnnnnnnnnnnnnnnnnnnnnnnnnnnnnnnnnnnnnnnnnnnnnnnnnnnnnnnnnnnnnnnnnnnnnnnnnnnnnnnnnnnnnnnnnnnnnnnnnnnnnnnnnnnnagtcggcacaaagtcaatggtatatttccgttgacttgcttctttaatctgagggcgtctatagagctcactgtactggtcgttgttttacagttgtgactgtgaaagcagatctgtcggacttgctatattgagacggattaatattaataagccaggttgaccagcattaatgagtcgatcaacgcgccgagagaggcggattggacattgagcgctcttccgctttctatctcactgactc

SEQ ID NO: 43549 - DNA, 813 bp, Arabidopsis thaliana landsberg
ggaatattaactcgtttatgttatcttcttatgttccaagtttagtgcaactataaaccaagcaacggggcaaaaggaaagaaagagattattattaagtagtttcatttgctacacattatttgtttcttgtatcatctcctttagataaagattacttccagtcaggtattaacttgtgtttttccaatttcatcaaatgcttttgcatattttaccataactttttttgtcttactagatcttccaattttgtacccaacacaaacgttcacgtacctgcttttacaaatttttgcagtttcatgtgtttgaatccctcgaacatgaatttcattgtgtcataagttatgcctcgaccaattgttgtgagtaaagatttgtctgaattatttcacgttcttaacaatgtgaaagagaagctgactcgatagcctaccaactctttggatagtcgcacgagaattaagaacatcaaaaggagtccgacttgttcttcctttcgttcacacccccacaagcaaatcaagtggcggattatttagcgaatatttgtcccatttttcatcacattcgaagcgattgtttcttaatctttaccagacccgatagcctaccaactctttgacctggtaatgcatttcggttggaccaaaatattaaaaaaccataatcgttgactttttagttgattgaattcttagactgatttcttgaagattcagtgcacggatactttttaaacagtggcacttacacagcaaaaacctagcgaaagaatacaaatgggaaagacatttcgatttacatatt

SEQ ID NO: 43550 - DNA, 149 bp, Arabidopsis thaliana landsberg
catcggaggaatcggacgggaggatgcatccatgagctatggtttgaattctctgataatattactttcgataggaggaggtgccagttgtacacaacttgttaccttattcccatttcatgcccgactccagtgcgaaaggaaaggct

SEQ ID NO: 43551 - DNA, 717 bp, Arabidopsis thaliana landsberg
  unsure (1)..(717): unsure at all n locations
cagaattgagatcgattgaatgtaaaaactactgaaaccgaaggtagggaatattacaatgaatttttttcaaaaaaaatcccaccagaacgatgtaaaatttctatacacttgaacaatttgagtgacaacgtaagtaatgcacaaaaaagataacaacataagtacagaaaatcacacccctgtttttgtgactgtcctaactcctaaccagaagtagcaagcaacacagctttcaatcctagagagttcttacacttatgtgaactcaatctcctcgtaagaatatctgattcctcgcttccgtcaagagcaaaaaaacattcaggacttggctcagagcttcagtgtaagggtcaaaatgactcagggactatagtcttgcagaacttatgaggttggaagatggatgaagagctccaaggctcaaaatgtttccggtgtttgaaaaattggaagacaaatggaagatgcattcgcattcgggtaacgggtatgtgtaaatcgaagttttccggttgatcttcctgactctcggtaccatcactccctttctatcgctttcccctagcatcagtttcatctactttgtgaaaacttcccacctaattcaagattcaaaggaaatatttgtacaaactcttagtcataaaaagtgttaaaactgctcaatatatgtctctcttgtgtgcatgggagctntagatctttcatgtc

SEQ ID NO: 43552 - DNA, 820 bp, Arabidopsis thaliana landsberg
aacgaaattgttgatcctacaaaagtttggatttttgacagcatctgtggtaggttccgggaagcaccttttctgccattagagctattttaccggaactcggcactcgtaagagaccgacttgtatgtctttggaacgccattggagtttcatgaatgtctgcgagaacgttatcaagtatatggaatcaggttcgatctcctgtcccaaacgtggtctcgtccgttcaaaacaagaatgaactattccacatcaactcaatccgttgataagaacatttaccttttgacatcagaagaatgtgtacatcaggtgtacaacattagtaaaggtgtattcacttcttatagggagccttataagtctgctattggttcgacgacatggacaatgactggtgtttgtgtgtttgaaaacgtcttttactcttatgatgctgagtatggactgttttggtatgacaccaagcttgataagtggaacgctgttaaaggtagcacgatgggaaggattgaggattttcagcttgggaagacttggtcaatcgcacttaaagaatattacggaaagctagttctgttgtggacagatagggatcataacccttttgacccagaagtaattgctgaggatgctaggatgacagttcggtacacaataattgctctaagaaggaccgaaacagagatttatggagaggtcgaggaaattagagttttgggcacattacctcgccggtatagtttgggacattgtgtgtcggttttggtctaaccagtgaatagattttttgttgggtatctgggattgtgttgagtg

SEQ ID NO: 43553 - DNA, 710 bp, Arabidopsis thaliana landsberg
gacatgttgtcttttggctgcattgatgccgagctgttgcttggattgccactatttccaggaggttcataatttgatatcttgaggcgtatgattgaaatactacggtatgatcctttgttatggaattgtgatttgtagtctataatcttaggggtcagggaatatttggggtctgcaccttatggtccatcctcattctcttgcgtcttttgtttcatatattggtctcttatatatcgggcctagcctattgttggtgctttatgggcattctttcattgccctatgtctccagcaaccccctattttagcttctcaacgtttgtgcaactatgaagtcctcgcttctatataagacaagtgtcaagatttctagcaacgaggagcttttcttattttctttcatgccttttttattttctcttatgattctatcaattttctgtcaatttttttccagcaaacaaccacctgattatgtgctcaaggaagcaaaaaatacgaataagttctttaaatgtgttgggagtgtccacaatttagggaatggtggaacttatggtggcctcaaaagtgcttatatggctttgactggagaagagtttgaagctgtaagtaattcttgctttacctttgagctaaacaaaaatataaagagaggggtggtatggggagaagagagccacacagaaatgagtattaaaaac

SEQ ID NO: 43554 - DNA, 909 bp, Arabidopsis thaliana landsberg
aaaataataatagaaaatttttcaacttcaaagccaatttatatggtcagtgttggtttttttgtctaatagatttttgtgtatcgttagtggttatatcgtgtttattcacatttgtatatctccgttagtgagtattttgtgttttattcacattatttgatttagttgtagttgaatttatcgtaccataacaccttattaaatcattcaaaagcattacatgacattttgttttatcgttacaaaatccaaacttttcaacagaaaacagattaccatttatttttgcaatgtctaaaaattaaaaactattagtccattcagcttcaaccaatcttttaagttggaataaatgctatacattaacttatatatgatgtgtataaccaaaaccttgagatatacgacacgcatgtactatataaggctacaaaatcttagacccacggaaagaaattgatatcttatcttatttttttttgttatgtgcaaattacattacattatattggtattaatcaaatgtattgcaatttagtgacctagagccataggcacccccacgttaggtagactttagtattgtactttagatagataatcatccaaataaattgcgacaaacaacattagttacatgtttgtgactgtgtgctctctagtccaatacgttactttaattggaaagtcgtatcttaataaataaattcatcgggagttggtgcccttcaaaatgtatgtatagacgatcatttattttttgcttttccgcaatgattggctgtgtttatagatttttaattttctgtcgtaaatactttgggaaaagtaattctattaccaaatcttttgtgttttccatcacaaactattatcttcctgaatttcgccttaatttgagcgtta

SEQ ID NO: 43555 - DNA, 726 bp, Arabidopsis thaliana landsberg
gggaaattgtgagatcggagcttccgtgtttctcctcaagtcgcctccgatgaattttctacggagggatgtttccgggaacttctcgaattcaaacaacaactcagatatctaatgtaaataatcagctgaaacagaacaatccagaatctttcattattgtttgctgattttaataatttatcagcattatgcattaaactaattcatataataacattattgcaaataaagcccaaatcctttcattttgttacaatatttaccgtatagttttaatataaataataaacccaatttgttgttgcatccatcatcattaacgatttcacatcaaaagtcctaaattcttaaagtcttaaagcaattgcattagggccataaacacttttccttaaaatctttaagctattttatacaaataattccgtcgttttttgtttcgattaaaaaattctgtttacagtcaacgacggaaggaattaagactactactgcgacaatatcgaaatagtagtctcttccctaaccaatttacaattaagcaaagtattaaatgaaaaccaaaaacattacaacactactccaaggcttgtgatggccacaattgcttccacgtagaaatctcttcctccgtacccaatttctttactccgccgtagaaaccgttttcttcatttcccgtctcacggtggtctttcctctttatcaccgttcttctccacg

SEQ ID NO: 43556 - DNA, 677 bp, Arabidopsis thaliana landsberg
atcataaacatcaccacaaacgatagaatcatcaccactaccctctgaaccatcacggcatacaatcatttttggacaaaaagttaaccatcggtccgtcagaaaacttaacaatgtacaatcatctccatcctccagccttcttctcttccacgatcaccatctttttctgccataacaacgtggatctaacttcaattcctccaaaaaaaaaaccttagcggcgatgttttgttttaataatagttgtattcactcaccaaatagttaagatttttgtttatacactcaccaaatacacgtttgtcaacctttttcttctctttgccaaaaaaaaatcatttgctacacttttaaatacttccaaatttgaggatagccacctatttttttttattttttttttaaaattattaatcaattacttcaaatgaaaacaattaaaagctcaaaattttctattattgctgagcatatataacattcaagagaacaaaatgaaaaatacgagaatcaaactattggccacagttcacctgctccaaatctgttgtagtgatgatttgtgtctagacattaaagcaagagttccaactctgttgtcgtcctctgtgacactatcatcggaccggtatcatcggaccggtaacacgggctaaagcatcagtgtacctctc

SEQ ID NO: 43557 - DNA, 1200 bp, Arabidopsis thaliana landsberg
caaatctatacccatccggaaagaacttgaccgtattaacatctccctcgtgaccatgaaaggtacgcactgctcggcttgcagcacgagtgtcccacaaccgtgctgtggaatcgcatgaaccagatataaaccagtttgggtttgatccactgattgagacgctgcaagaatggggaataatcaccaagtaagagggcgagtttaactgacttgcaatatatcatccatgctagcttttatacacaagtcaaataaacgtatctattcaataagaccaaacctatatgttgattccaacactcgatccaaatggtatggttctggaagattaagtagtttttcaaatatattctactttatcaaacaaactgatgccaatgagccaaggagatgaaagcaatatccataccttagtacatcagcagtatgtccagactgaaattcacgccaaaaacagaagttttgagaccagtagttacatcccataagatacaagtttgatcacctgaactggtgataaggtgggcatcctcatttgggacatactgacagcacgaaacatatcccctgtgaccagtgagcattcttgaaaccggaacagttccatccttgtccgccgttgagctaaggctaaagatagaacatacactgtctaatccaccacacgcaaccgactgaccatttggagagaaagcacatgtcataacccatgcacaagggagtttaatagcatgagttttctgactcgttagagcattccacacgattaatctcccatcttgagatgcactgacaatccggttcctctccggtgtccaatctaatgaataaacctgcaaatcccacatgttaaatcaacaacaagctaacattcacaatcaactctcctgtctctacatttccgtaggatcttatgcaaatcctcatacatgataactggtaacatcttataaacaccaccaactaaataacaaactagatacaaccccaaaatggaagctttttatcacaggctagaaaacactccacaaagaagcatgcttgaaggataaagatgcaaactttgagtcacctttccggtgtgtccctgaagagtacgacaacaaaccagctccgtctgctccgaagctcacccgagtacgtccatgcgaaactgaatacctcgccactggcaaaattcaatccaaattaaagaag

SEQ ID NO: 43558 - DNA, 504 bp, Arabidopsis thaliana landsberg
tgatgttccttcagctctccaaattgcataaagaactccttgaacttttctatacaaacaccaatcaccagatgagaaacttagttaataaaaacatgattctgaaataagaaaatcatattatggaagagtgtttaccatcatccacagaagaaggaattccaccaacaaatatcttcttggttttgaaatcgttagagctcatggatcctcttggtatcgtccgcttaatttcaacctgtagagcaaacaaaacgttgaatgttatcgcgctgcaaggcacaacacaactaacacacgaaagatgtgaagcacatatcaatctaacctgcttgccaattataatgtgattgtcctggataactttgtcgaccacagaggaatcagcatatgtcacaaacccaaatccccgaggctgtccagttttcctatccttcattacacagaatcaggtgatctcttcatatttcccaaaatgcttgaggaattcagctgcataagcaa

SEQ ID NO: 43559 - DNA, 561 bp, Arabidopsis thaliana landsberg
actatatataggtacatacaaatataaaatatattgcgataacaacaaactgttagaatactttcttcataaacaaacggctactaaattttcatataagaaaacatagatagatgttatatgcgatgttgatttataaatcatgtcctatgaattggttcgtgtagaactacaaatttgattaagcaaaagttgtaattcccgtaagagattctacagggtttgccaaatgttgtattaacaaatgttttagtgctctttaaataaatgcgtttaaaaaaggtttgtacaaaacatcatatatgtatgtttgaatatttgagataaatgtacacaacaactatataaacaaaacccacttaattaacatatcattaactctcttttttttcataaaacatatcattaacttaataccatatataaatctacacaacccaccaaagtgcattatgggtttctttggaatggtataatcatagcaccctgggggtctattacgtgggagataagaagagttgttagtttatacaagaaattctggcatgaattaaaactcga

SEQ ID NO: 43560 - DNA, 1862 bp, Arabidopsis thaliana landsberg
caaaacggcatttcttctagttggttgtagtcagcttaacatctttgttaatagaactttatctttacatcgacggctaaatttagaaatattcacctacctataggtatactatataaatgatacccaaagaaagtcaagtgacttctctagtcatggacggttaaggatatatatgccttaaagtttgtatgaatttagcatatcacaaaatgctttttctattgttgcatgaagcatccaatgtcagattttggaagggtctctaaaatttatttcaattaatagattttgtggatgaaagttttccgtaatctaatacatactagtcatgcatgatttggccgatcatcaatagaaagtgataggcaacataaatggaggattagaaaatgcttgtgaattaaaaaaaaaaaaaaccataatgcagcttataagcagtttgaaaatgtcatgatttgaattacaaaaaaattggttttctcataatgagttatcttatattatccttttagaataattgtatccctactaaaaaaaaatattcgattaaatttcaatatggattaaaggaagggatgattactaaaaagtctagaatagcccaaaaaaggaggttttacaactagagtggcacacaaaactcgtgggttaattcagtcatttctatctccaaaatagctttgaggaaaaatagaggactatgttgaatttgtaaccaagtaaatggtttttcctttacgttacgtttagaagattttagtaatgatgctattatgagacggttagaaacagttaagagagaattggttacattaacggcgttaaaaatcaggtgtattttcaatggcaaaagtgtgaccagagtaaagttccgtttagtatcggcgttatttaacgacgacgttattgttcgtttgcagtataaataacgaaagacggttttcttggagcttgtgcactctctgtcactcattttccctttgtttgcacaatggcgacgtcatctctgaaactgaccagtgcttgtttcgtcttgctcttcatcttcgttggctgcgttctcacagcaacaaatctccgaaacaacgaaatctctcgatcgaggtgcacatttataattcttcgtaatgaatgtctctaatctatactcgtctctctacctaaatatatctcttttctgtttcctctagttcacattttaagctacattttcattatttcatatgttttctcagtttttcttagcattatcatgcttgatttgaaatgttgtacacttcacataaacgaattttctcgtcccttgaagttttcctatgtatatttaacgtatgtctcttttatgcgaatttttaaagtagtctcggagatttaagctatggattttgaacttaaaactaatcttttttcctcggtgattttttttctataggaagctgaaaacagaggattcaaagagctttaacagttcaccaatgacgactaggtaacagataatcacaccattcttagccgtcgattccaaacgtcagatatgcattttaaaccgttggattaacgaaatttaccctcatcatctgtttttcaaacattcctaagttattagtcccaaaaaaagtataatgataattcatccataagaaagtaaacaaaaaaggatccaacggttgagatttagatgcatcggatccatatttttatcaacgacaataagattacggaatttagtaaatgtggtttattactttgcgtgtgaaattgattttaaagaagtttaattagtgtttttttcgggggggtgtttggtaatgaatttgtggttggttgcgtcattcaggcttgatggtgtagtagagttg

SEQ ID NO: 43561 - DNA, 748 bp, Arabidopsis thaliana landsberg
ctgtaaaaacaataccaaagcccacatatgattccagtaaagagacaatgatatattttctatagatttaaacagaaagccaaaaaatgggggaataaaaataatatctactaatttgtagatattgttaactcaagaacccaactaaaaactatgaaggctgagttttgcccatcttactttgtgcaatcctttcttttgctagttaagcttctgtacacttctttgacgaccatggccggagtctctggctttggctatgaatgtatgctaaagcaattgaaaaagattgcaaaactgatatctttgcttgagactggacaaagtagagaccatctcgaacattcatgatccttagtccaggacttccctgcatcaatccctgaaacgaaaacacacaacgaatcaatcgaatttcagagtcaatatgaccaagactgattttttagttgatgagttatcttgaatgcaagaaagtttccattttttgaaatctatgatgtatggttaaggaagtggtaactggatcttgaatgctacctctgtgaaaagctcaaaaagattgcattggccttcactttggtcttttcgcgcttggcctttaaggacggttaaggggcaacccaagtcccatccagagcaatcacagcatccaccggatttccatctctgaatcaagctcgaaggaccaccgtttctatttctcggccctccgtgaatccctaaagaaatacaacatctatgcttg

SEQ ID NO: 43562 - DNA, 721 bp, Arabidopsis thaliana landsberg
tctaacggttgtcgagatctccatggaagtcgattttgaccatcatggatggcatctctaccgggactttcccgtgaagggtggccacggtgaggtgtacgactttcccgagggatatagcgctcattgggtaagatgcagggtgaaccggcctgcaatagttaccgtggagttcacctacagctgaattttgaagaatggacagacgtcgcgtcatggtgttttggatgcgtgaactgatccggtaaccaagtggattaaaaccatgaaagcagtcataaaaattatcttaagtaactggattaatctgcttacggtttttgtggttgtgtattcagtcggtgtcgtaagcgcgatggcaggtgacaagttttcttggaagggtgctgtatttggaactgcgtatgccgtgctcggatatgggatgatattttggatcggttttgcgatttgcatactgattttggacatgcttttattcggtattgaccgaaaccccggcaacacaacgattaaattgttcgttgaatggttggtgatcggctgcccgtttgtttactggctgcttgtatacagagagtggatcttaattgcagtagttctttctttcctcttcggtcagtatttgcgaagatcacatatcaacaagatattggctttacattaaacatgcttcatgcaggcagtccggcctatcgcgggccttgtttgcggccgttga

SEQ ID NO: 43563 - DNA, 732 bp, Arabidopsis thaliana landsberg
tttattctcaccacatcaatgaccctgagtttgcagaggcattggttgcttcatttcttgagatttgtccaataacttacgcacaaatcaaaccctctgaaacgacttcgactaaacctagtactggagagcatgatgatggacatgtgagatcgaggcttgaaaggattccatacagtcctaaagagtttcccaatgcaaagccaggtttccttttgcttcccacttaccttaaactaacgaccagatcaattggtagttctagtatttggatacggaacttgcatgttggaattaaaaaacttattatcatcactggctccagaaaccttggaacgaactcaggccattttgggacggttgagagatcaaatagagaagggaataccaataattgggggaggtgctggtactggaatatctgcaaagtttgaggaagctggtgggattgatttgatagtgatatacaactctggacgttttcgtatggctggaagaggatccttagcaggcttacttccatttgctgatgccaatgcagtcgtgcttgaaatggcaaatgaagttttacctgtcagtttcttatttcattcccacaatacccaagaaacttgcattctttttccagttgcttctgttagttattcatgcattttctttctaagacccgtcttcatatgtcaaatttaacttgcaagtagtgaaggcggtgcctgttctggctggggtgtg

SEQ ID NO: 43564 - DNA, 195 bp, Arabidopsis thaliana landsberg
gtgttgaattcatacaagtatctaatttttattttttttggttatactaaaaaagtatcgtacaagtatctattaaatgtagtaaaacaaactctcactttcataaaattcaaattgcaaacctgaaatatacaaactaaaatatattaaaaacgtggaaaatgcttaacattgttaacccaccgtcaattcatg

SEQ ID NO: 43565 - DNA, 732 bp, Arabidopsis thaliana landsberg
aggtcatgattacttcttatcctttttgtcagctttgatagtgctactgtattttgtttgtgattttatctgattgggagatggtttgtttattgtattgggacaggataaatggagaaacatgagtgtcatggcaaatggctggggatcgcgcgaaaagtctaggttagctgttaaaaggacgttctcccttcctaaacaggaagagaactcactagccctaaccaattctttgcaaagtgatgaagaaaatgtggatgcgacctctggactccaagtttcttctaatcctcctccaaggagacctaatgtaaggttagaaatgtgtctattttgtttcttgtattgaagaggagttgctttgttgtatctctctcggtggtatttctgaagttggatacatctcaaaatgtatggtttgccgtcacttttttttctgtgcaagtcgataagtgttggattacattaatgtgatatgggtttgttttcacagctctgtttaagttgtcttcactggcttaatacatttatcctccttttcaccgttagcatgcgagctgtttgctcaatcctatcactgtggctttataattgtgaaattatgatgaggatttgtgaagtcccacttacacgtagatgtttgtatcagtcaaatctttttttatagacaaattgtaactttttaaacgttgcaggttggatagccttataatggaagcaataactaccctg

SEQ ID NO: 43566 - DNA, 419 bp, Arabidopsis thaliana landsberg
  unsure (1)..(419): unsure at all n locations
cttcttctacgagaaatttagggtttggagaaagaattggacacttgaggaggaagaaggaagaagcgagtatttcttgaggattatttgaccgttggaaatgaaggagacgttactcattactccattaaggagcgtcgtcagatttggaccgttggattaagcagccacgctccgatttcattcaaagccaagttacataaatgggccaaatagcccaagagctgatctcgttgtgggcctcttgttcctcgcacaattggcccgacgaatataacatttcagtttgctcgtaagatgaattataggacctacctcaataatgacaaccacaatagataaataaataaaagccttatggagtgactgacttgtctgtctctatggattacgatgggtntggaatattctagtactat

SEQ ID NO: 43567 - DNA, 740 bp, Arabidopsis thaliana landsberg
aaaacatcatttcttccattaatcttactcatcaagttcaaaacatgtttttaaaaatttgatttttaactgtttcctagggtttacaacaaaatctgttagtcttttcagagaagatctaaagaacccagaaaaaaggatgaatcccatccccaagtatacatatccaacggactttagatgaatttgacattagcgtcaattcaaaacccaaaattggaaacccctaagggttactaaaatggattgtcgtggaaacaatatccccctatgaacttatatcaatctgacaacaaaattgagtgatttgatcgaattggacgacccccagaatcaaaaggtggaaactttaagcttatgtgaattaaagagtactcacaagagaaattaaccctaatttcatatcagatagattgttcttctctcagataatgtgaattaagtagacaaacaaataagcaataaaatataagaaaaaaactttgatagatgtaaagagaaatagaaaaaaaatcaaaaacaaaaatggaaatcaaagagaaacacaaaagaacatccaaaaaagcaaacttgttataaaatgatacagatttggggtatcccaaattttttttcctctttgctttttttaaaaggatatgatagaacacgtacgttcgacacaacaacacattacagaaagacccatacatacaagacatttttgtgttacttaatatgtatataaaatgtttatgttt

SEQ ID NO: 43568 - DNA, 495 bp, Arabidopsis thaliana landsberg
tgaaacatttgtcgaaaatatgaataagacgaagcgcgaaagaaaagacacgtgaactccgtcacatgtgatagatatattgggccgttggggacaaatgctcactttcagaacacctacacgttatacacgtaggcatgcgaacttgttgggccattgtaacgaaggcccactttctgaacacctactacacgtgcctacgtttatctgatttttcattttgtcgtttttatttccttgcattagttctcacttctcaatgcaaaacatatcgattaatactatgttcaaaaaataaaaaaaaaacatatcgattaatatttaatagtgtgggaaaatatatcctcgaataaaccaaaagaaaaaaagatagattaacaaaaagttatcagtttctttttccgatattgtttggaaaaaaacaaactgattaattatctaataagtattctttataccaaacgtgaagaaaggaacttgtgtgttttaattaaa

SEQ ID NO: 43569 - DNA, 694 bp, Arabidopsis thaliana landsberg
tgatttttatccctttttatatttgaatgttctttagtctccttttgtttgcccaaatgttgaatctttgctttggttttgattttaaagccaagtgatgttgcctttgtttcgaaattttaggatttgtagatgtaggagtatgaggactcttgaatttaagatctaggttttaaaatgttagagattgttgatgtgattagttctagatttattgatcgttacagcaatctaattaagatttgattcgacgattggttttattgtggataggcttcgatgatgagattgaaattccttaaaggtaacagtcaaatctcagtgacctaattttgttttgttggggtttgtgaagcaaatctattgtccggtttataccaccggttttgctctttacacttatgtttataattgtggctttacgatttaacaattcactctgtgtgactttgtagatgacaatgattgaattagttatgctaagagatgaagagaggattcattggaggcatgtgaagtgaagatatttttttgttttccatttatggatatgtaatgtataaaattgttaaagaaaacaaatggtgtggaagtaaagaaacagaaccaattcgattagtaccgttagtgcagaataaatgcaagtaatgatggtacttagtggccaaacaaaaccgtaaccaaaaacaaaaaa

SEQ ID NO: 43570 - DNA, 994 bp, Arabidopsis thaliana landsberg
acacagcctgtaaataatacttgtccagctacagagagaaggaaacatctacagagagactccaagcaatgagattattagctgaccaattcaaagagtcgttcacaaatgtcactgtatatcattcaagcgaaaatctaattcctcgcaatgaactaaaggtccaaccttccctatcagattatagctaggtagaattatctgtcacctattacagtattctagtaaacacattttgacagcagctgctttccaatttgcacggcatgttatacagctatagatatatcctatattttcttcatggcaagtctagaatgcagacatgttttaaattcagtgacaaaggaacaccgaagaaagaaaaatatagagacaaaacaattagatttcatctgaagaaactttttaaaatagcccatggatataggttgaactttccactagcggaagagagcagttggactatatttcaagagtttgagaccagtaaaaacaacacttaccaaaaaatttacagcatcacgacaagccagtgaaatatccagcaacaagaagcagatttgaagtgcgattgtctgcatataaatagcaagttgtcagcttacagccagtaggacaggtttaaccaaatcaagcaaaaagaaggatacaaacctcgtctagccgctgaatattttgaaacaaaggttctagaatggaacaagattttgaatagtgatacagatgaaaccaggtaaccgcctgcagggagaccaatgaacatcaatacttaaccttgagaaatgcgaatggcatagctgagactcaaaaaatcatgggaatacatcagaacatacaatgttgagagttgttactgtcctatcaaaatgatcctttgacacagagacgttagttccagggtttgcagcttccacttggtcttttgctgcagaagaaagttgttcactctgtttctgaaggaaaaaaaaaagagaagaagaagccatgtcac

SEQ ID NO: 43571 - DNA, 953 bp, Arabidopsis thaliana landsberg
  unsure (1)..(953): unsure at all n locations
atcattatactacttgtttgtgctaatttgtcgacgctttggccattttcatctatcatcgagaattcacaatttttggtgcgtatcgtttacatgatcgaagaaatagatatctgtaggatattatgacaatgtaaattaaatatagtttttctttagtctgttgattatctttatgcttagtttaagaaatagtgtaaacgcttaatatactcactttgcatgacccatataaacagtgtaaacgctaaaatataactcttcatcacccatattgatttaccttaaaatcacattcaccattgcgtctgatggaagtaatatttaagtatagaatacacccatatatatgtatatttattcataatattatatcaatatatattcatatatactcgttgacaaaacagaaattcattctaacacgtacgtttatttaactttgataatgctagagtattattgacaggtataccgtgtacatggaattaatgtttttactcgctgctaataaaatgtatcttaccaccaatttaagcgaacgtatatcgtattattttaacaatagtttcagcagctgcaggtttccaacgactaatcttttaaattttggaatagcgatcatattcatcatatatcgttaataattatgaaccaaatatgatttggtcgccaaaatctataatatcatcgttagaacttgtcgctatttttaaacctatcattaacttaacataagacaaacaagacttggttcttggttacaaccactagtgattgtaaaacgaattatcttaactatgaaagaagtatcctacaaattaaaaccgcatcaaaacttaccgtcaaacttcttttaaataattatcgtcatgtacgcgtatctaacaaatgaatatattatatcaactcgaataagaatccatcatttgtaacangatcccttaagcgag

SEQ ID NO: 43572 - DNA, 1053 bp, Arabidopsis thaliana landsberg
agttactctagttttctaagttggtgaaatttgtcaaatcatacaactacgaaagtccatataatagaaacaaatgttggatcaaccgatcaacctaccgtttttatgggtttatgaatagagaataagatatggaaaacggttttaagtataaaaatggaccaaaataattgaagcttaaatgatgatgagtataaatggtatttagggttggagagaaagtggggtatgttgaaccatgtgcgtccatgtgctctgtctttctcttctagccccactcttaatttcacttcttttccttttatccaataaatgcctccacactctcatttcttctatattaattctcttcttcaatctaatctctctccctctctctcacttctttctagggtttaagtttcagacactatcgagctatttggatatcttaaaacagaaataagcgtaaggtaaaagtatttattgatttcattaacgtcacttttctattcacatctaccgtttataattaaaagtgtatctaaggaaatgttttacgacgaagctatatatatagcgtatgtgcaattatatatatccgttaaaatgtggatgattaaaacagtgagtatacaatctaacgtttatattcagatcatgatatttccctgaaatacatttatgtttattttattaggatatgatgaacacgtacaacatggtgaagcaagaatttatcaagaaatggataaatactctccacatgttagattcttctatcgaacatcctttgaacgtaacggaaaggaaaaatgcgattagactatcatcggacttagccatggcagctgctcgaaatggctctaccgtatggagccgcgctcttatttctaggagcggaaataagacagcaaacaaacccatggctcgtcgaatactaaaaaaagctcgaaatcggatgaagaaccgttgtaacattcttagacgaaatggcaatttcacggcgaaaaccagggtgagaaaacgtacggacttgcttaagagtcttgtaccgggaggtgagttaataga

SEQ ID NO: 43573 - DNA, 857 bp, Arabidopsis thaliana landsberg
tataatcaatcagcaccagtcaagatatacataagtggtttactaatggcatactagaccccatctctcgcagatcacaataataacaaagaatgtatgtttgagttctataaccaaacttaaaatgttaactaatcttctagtcatagatttgtaaattattacatggtgaaagtgacgcggcataaactatagatttttaaataccatatatttttacacgtgatcttttttttacggcataacataggtcaccggatatgaagttgaataatacgatgaaatactaccatccaacatgtactaacgagggcggtcgctggtcgccttttccgtagctctctttttgaaaaactcaataacacattaatgtaacaaaatgttgagattggaaaaagattcttcgttttttcaggaaaataaaataaaattaaagatgataaacaaaaagaagaagatactttgtgtctatatccaaaacaagtacagtgtgacatattaaagataagatttcttatctcaaattttgtgggtttcttcttttcttttcttttgtcaatgatgtccgaataattttcaactacaaattcatagtttacgaacagtacagacaaatagataaccgattaaaggaccggaatgtatgaaaaaaaaatcaatctgggcattttaagagatacgcggtttaagataatgggcctattcttttgataaagcccaatgtaacttttattttcttaacaaacaaaaggcccaaataaatttctccgaaaagaaaaataagaacaattggtaactctcatggcggaagtggctcttacaaagaaggagatgacgacaaagggaaagagcgagaa

SEQ ID NO: 43574 - DNA, 634 bp, Arabidopsis thaliana landsberg
cagcagcagaaagatcctctgtataaataaatcctttacatcctattagaccattacacaaatgatttaagttaaaaataggcaactcacaagaaatgacatgatacagtcctagctccttttcttttaaaaaatacaaacgcatggcaacaagataacaaatacaaaatctaatcagtcaatgtggttcaatcaagaaactatcgcctaacaggtagccccgtcttcaacatcaagtgatgtcaataacctaatttacgaagcattgtgaataatggagataagttaatggtttaagaaaacgtcagccaactgagtagcaactttgacatttgaccagaaagctacagagtaaaactataaagggattaagattataagagaaattccaaaaaccaacctctatttctgttgattcactcctgcgccaaaatgaatcaacagaggaaagttaccaaggtggataatggcttggtcgtctgaccctcatcagtgacacacccaggcaaattaagctgagacaacaagcaaacacggaggaattttagagcttgctttttgtagtatatctctggagggaggttgttctgcataacagctgctacagcaagattaatgaatttgtccattggca

SEQ ID NO: 43575 - DNA, 718 bp, Arabidopsis thaliana landsberg
tttgactctttttggtgaaatgcaaacatctaagaacaaaaaaaggatcccccggaggcttcttcaaattgttattgagtttctcttgttgcaacactatcattaattggcgaagatgttccatatgttcaacggcatttttacgaaagaccaatatctcatcaaaagataccaaaacaaaccgaccatgggcgcaagacctgcgtcattaattgcataaacgtacttggagcgttgcttcgaccaaacggcatcatcatccactgaccccttgctcccaagccaagtccaggttttttttccatctctatatgagccacgtaatgatttgcataggatcaaaatccagagacacactttctatagcattaacaaaccggaacccggactcaagtcattcggtcatagtaatgatttttaacaaagaccaattgttaggattctttgcctccctatcacatgaacatcttaatgagatagaaatgaatagccatcaagaaagggactctcgaagattcccactggaaacggaataagaaggaaaagcggaaggtttaatttagaaacttgaaacaaacaaaattgtttaaacatcttacaaataaaaaaaagggagtgagtaattcataaaatactatgctttgtcagtaacgcagaagacccaagtgcacgtaatacattagaggaattaattattgcattgtgcacattattgcac

SEQ ID NO: 43576 - DNA, 745 bp, Arabidopsis thaliana landsberg
agagatgggtaatgcattaaaaggttcacctatcgatactttgatccggtcctgtctcctggaggaacgatctggtgctgtttcgtttaactacgatgctcctggtgctgcctacactctcaagtggacgtttcacaatgatcttggacttgtctttgtcgctgtttatcagcggattctccatttgctttatgtggatgatttgctttctatggtcaagcaaagcttctctgaggtctatgatcctaaacggatggcttatgatgatttcgatgagacttttaggcagcttaggattgaagctgaagctcgtgctgaggaattgaggaagactaagcaagtggggaagcctgtgaccagtgttaagaagcaagggcaggtttcaaaacctggacttgaaggaggaaacaaaagggttagtagtgaaggtggttcgaagaaagatgatggcgatggtggtaataaggccaaagttagtaccttgactaatggtcattccaatgggaatcatcaaatggaagatgattctcaggagactaatgatcttgctaacgggaaagaaaacacgagttctaatgttgctgttgatttaagtaaacttcagaaacttagaagttaaggaatcagaagtagaggaggtgtaaggaaaactgacagtataggtaataagaggttccaagtagcggaaccagcccaaaaagcgaccaaagaaaaacacgggttggggatgatgccggctcccaaa

SEQ ID NO: 43577 - DNA, 664 bp, Arabidopsis thaliana landsberg
tctattgatcaacgtctattctaaattacaaagaatatatctaaacaaaaagtgaatgtccttttatatatgaccctagctataaaatttattcgagtcccccacatgttttgttatgttcagattattgtccaacagatttaccaattataatatgtttcctgtttctacaataatatcatctacttgtaatttgttggctattgcattttcattttgtccatcatgcatttggtaaaatattagtagtatttcgcaagatgtaccaagcgtcgttaatatctggtctcttttgtccattttcgtctttcagcatcaagagaatgaaaaaattggagacctgagtgacgtgtcgcgatactgacgcctgaaatatccgtaattttcaaattgagatgaggtccagtgggccaacttatgttgacaagtgatatctcacctattattggcccacgtaatccttttattatcaggtgtattttaaattatatgtaattattttgtattattataatttaaagaaagtcatatcaaacagctgaacactaaataaataaattattattcttttttaaacactatgtttttgttttatcttgatatatggttgacaaaaatacaagattgataaagaaaatgagtcattgtggaaaacaaaaaatga

SEQ ID NO: 43578 - DNA, 642 bp, Arabidopsis thaliana landsberg
aaattatgtacggttaacatcgatcatatacatgcgaagcatatacatatatccagtcaagcatataataaacaaattaataaatatattggatttgtttcattaaattaattaagtatataacatcccatgaaggttccaagttccaactatacaactgcccctaaaagattccttcatgtcttaatcatttcatctacgttgttttatttgttaaattatgctcaacaactctttacggaaacaatcatgtaccgagttgattattaacgaaaaatatatttaaaaatgtttcaagaacgtagccatctctaaccaattcttgaaccatactttaccaacttgcgttcgaagcaagaaactgctcctccatcatcttcctctattgatcttcttcatattctcaagtttactccaaaaagtgcgaggtagagaagaggaaactacaaaccaagaacattaaatggattgctcaatctgcaccacaatgccatctatattaagaccaccaagaaacacaatatgtggatcatgctacgaaggggctagaacaacaattgcgctgctcaagaaacttgagggctcgaaagaagatcgtcatgacaaatcgaaccataattccaccatcaataatggctcctc

SEQ ID NO: 43579 - DNA, 673 bp, Arabidopsis thaliana landsberg
agccgcaatatggactgttcatggttcgggaagggttatgataacctaattccaggaggctcatataacataccgttcatgatcttataataatgaacgatataactgaaaaaaagttttatgcatattacatgttttattaacattcgcaaatatatggttatccaagtcgtggatcatgccatgtgggtaaaggcttttagtttggaatggttagcacaattatttatgaatgtatgtatttgcagtaatcatgtataacatgttgattttttattattattttttttgccatattataaaatgttgattatgcaaatagatacttcaaaatatagataaaatactctgtttatcacctgattatatagattatctataatgttagatgcatgcttatattaactgataaataaatcgagatacatcaaaacataacttataagatatatataaaaaaatttgtactgataaataaaacaatcaagttttaaccatctacagtcttaccatttctttatacgtctaaactaagtataaaatttgaatataattatgtgtgtagagaatctagagatcgatgaattgctaatcttaatttgaagttattgcattataaacgagatccaccacttattattcataacgtatatgaatcgaatcattgatagat

SEQ ID NO: 43580 - DNA, 643 bp, Arabidopsis thaliana landsberg
tttgattgagtgacctatcacctagatatttatctcacccacaaacataatattgcgtgcaaaaaaaaaaggccggatctttctttatcgaaggacggttttctagcatttttccaccaggcttatcgaaattaagttaatcatgaggctattatcccaatgattcttttaggttttcaggtattccacaaacataatattgtgtgcaaaatgatctatcatatcttgtaagaaaaccggtgctttttggggtgcaaagtgtgacatatacattaaactttggccaggccaattacaagagaagtcaaagactcctttgcttgagaataggctaaacgattatagctacggtctacggagagtgaaagtgaatgaaattacatcaagaaaataggtgctaacatttaatatatgtataactagaaaataaattttggcgacgtacaaatttgtagatgtatgcgagtcttcagctaaaaatgcttactaaaaggtgttggacagtaaagaggccccattaaaagctgggatgctttacttagttataacttagcccatctcaaagcccatattattattattatccttttttttgttgtcgtcaaagcccatattattatactcaccaaaaatgcatgaatat

SEQ ID NO: 43581 - DNA, 827 bp, Arabidopsis thaliana landsberg
catcgatatgtgagagatttcatatccatggattacaaagaagacttaagcacattgatagatatgcacattcactaaagttgactcttttgagtaataatgcttccaacagtatcgacgtttgcttccacaggtaaaatctagtatctgtgtcatctctatgtatcaatctagtatctgtgaaatcttaaagtttacttctttctgattataggaattcgtcgcgtgcaattggaatgtgtcctgataatcagtggaagagagtgtccaaagggttaccttgggttgggataatgtcaccttttgactataagattcttgatataagaacatttggtggctcatctaatgtcagcaccgtggagttggttgctaaacaaggtagagtgcttgtgttgttttgtgttttgcaaaattctaaaactaaacaaagtagagtttgtatttgcagagtttttcatataccggattgtgtttttaatcatggggatagtgttactgagtttggcttctagacttagcaaatcagttgcgttttactatgtcggtgcaatgtctattgggattgtcattcttgtaactcttatcattaatcaggtaaaagttttcataacgctatcttttgttatatgtttcatggttttttctctggttaacgtgataaacggttgtgcaggggataaagcgtctaccaactagagggaagaagtcgtttcagttatttctctactcgtctatggtgagagttgtcttctctttgagttcttttgtcgaacatgtactaaccaaagccttcttttatattctcagattggtgtgggaggtta

SEQ ID NO: 43582 - DNA, 728 bp, Arabidopsis thaliana landsberg
caaattcaaaaaaaataaaaaagtagtgcaaatattatgaaaagaacgcaggaaaattaatatagaaggaagaataaatatgttaaaatagttgtaaaaaaaaaaaaaaaagttgttgtaaaacattattatataacctcttgtacgtatgcatgcaatgcaaccctgctctctttgaatggaacgaagtatattgatatgcatagagagaactgttccatcatcatcaaatgttaatgtttttctttatatataaaataaacttcgaatttttcctcttgtaatacaatgttttgtttttgtgatgataaaaagattgagaaagggacaccattctttgcataagcccaaacttattgggctcgaagtttctagaaggaacacgtgggcaattttttatttttcttggaacaaacaaacaaagaaaatacatggctactaactattattcgccaaaaatccatatcagaaaaagaaaaaagaaaaaaaaacgcatgaaaaaaaaaggaaataacatgcgaaatcggagtcttagattaatcgaaatcaaaatcgaaattggtgactggaacaaaggcgatagcgagtttaaatgagacataggcatcaacggtggcgtggagtatctactttcgcccaagctttggagagcaaacagttgctcttggtggtgatgttagccggagaaatgtgcctcttttgatgtctttgttaataagaacggttcc

SEQ ID NO: 43583 - DNA, 656 bp, Arabidopsis thaliana landsberg
attgaccccataatttaatttttgttctgctaaaagtaatcctagattttattacttttagtaatttagcttgaaatttcaaattgtcacaaacacccctagttccctacccaacattgtattaattgaggagataaagataggaaacatattatacagagataataaagtttatgtttatagaccaattttaggctaagtcaaatatatgtgaagtattagtatcattattttcttttggatatttgatctgttacttaaaaaatatttttagccataacataaaaactcattactaaaaaaaattatctttatgaaagagacttttaagacaatttagagagaaaaatgtattgtaaaacccaaattaaagatttggaaaataataactaaaacccaaataaatcgatctctataattctattattgatatcatagactcatagtaacaaaagacttttatactacatgaaaacaaaagttagaatagtcgattctctctattctctctattgaatctttcaaaggagactcattaagtttgttgccgtccggatcttttccggttatcatatcccgtgtaacggactcttttccaacatgcaccagatctttaagggtgttggttgctttttatcctacatcaattgacttta

SEQ ID NO: 43584 - DNA, 559 bp, Arabidopsis thaliana landsberg
  unsure (1)..(559): unsure at all n locations
cctcctcttccgtccaggtgtacttaatcctgatctattacaagactccttatctctagtatgagattttctctgcagattcaaatcagagttttcaaatttaaccggggacttcgagtgatgactcctactagttgaacctctattcatagctataaagtccttctctttactgttgatagcattagcaggtgaagaacaacttctgttactcggtaaggcgaaagatcgagcttccggaggaaacctttcctctctatgcaacaccttcttatgatattcggatctgtttctataacccggcagcgacatttcatccttaaattgagcacggtgtagagctttcctcaccatttgatcagtactgtctttaccagaaacagacacagatgaatcttcatttctccaaaacacatttcttttactccgttgaaaaggcgttgattcagaaacacacgccatgttgtttccagtgtcttcaactacctgactcgaaccattcacatcaaccaaactaccacaagatttacangangcaacactattgttataaccacat

SEQ ID NO: 43585 - DNA, 586 bp, Arabidopsis thaliana landsberg
aaccgggggggggatttataaaggaaaataatttcatttttcgaagctatattagaaaataatttacatttattttcttctaaacaaatctatactttatatttacatacattagtaaagaccaaaacacatggaattcaaattctgcaataagtaattgcaagaaaacacaaagattaatcccccactaaacccgtttatttacgttagtatttttccgttttatacattacacatgacatgacattacacgtcaaaagaaatatgtcttacgtcagaacttacgtatgatcaaactcgatttaaacatagaaacatctgtttactaaattatactaatttcataaagacactttaatgcatgaacttctttgtttaaataacaatttcccccttttgggggctatgtctcgtcgagtcctaccaccattataaattatctcatcgtttgctttcttttttttaagttgtaaccatttccactcgtaatcatacaacttctctactcttctagagcaaaaacccaaaaatatattgctatcttcgttaatggctgataataaggtcaatctttcgattaatggac

SEQ ID NO: 43586 - DNA, 684 bp, Arabidopsis thaliana landsberg
catctcttgctcaccttaacgactgggatctgatcattccattaagggttttccctccaacaatctagctgtggctccagatcaatttgcatggagatcgatgagtttcctttatcttgcctccatgaagaaccaatcccatgcttatcatctgtcaaattcttcagctgggactgtgacaaagagaacaaaatgcttcctttttcagctcctctaaagatcaaaaacatcacaaggtattgaaaagcaatgtgtggaatcagagcatgaccttaagacgagtttggagtttctgggaaaatccaacgaatcgagagagtgcaggatcaaacacacttgagaccacatttctcttgtttctctctgtgtctgatcccggattgcccatttctgacctgcacagtgtataaggcaattgaagtaaagccgcaaagttaaacatttttaagatttcactaaactaaaggaaagcaaaaagctttactaacgaagaaacacagcccaataaagcacctgaacaatctgtaaaatcactatcagatccagccagagcagagaattaatttctgcagagcctttaagaaagagttttgttccacccgccaattctcaccaaatcgaggacccagaccagatcttacaatagcgatcgacaatggctaaatcggatggaagctttatgtt

SEQ ID NO: 43587 - DNA, 459 bp, Arabidopsis thaliana landsberg
acccattaaactttgatattattagatttcaatttcatgatcaatgagaattaattaggggaaaggacgggttatgtaaacataggcattgaagttacgagattgttgcatctaattaatatctaatctcgtaaacttgatttacatattaaaaaaaaaaaaagaagagtgagaataacaaaacccaaacctaatcacaatatctctcacttctaatctaaaataggttacatgcaaaccaaaaataatcaaaagatcaaggaacaattatagggtcaaacatctgaaaccctaatttcatgtcaaagcaaacatcggagatcgatgaatggtcttgtactctttgtgtatgagtgcatgcattagatataaatatagtactatgtatctagacagagagagtgatcaaggagacaacaaggcttgaataccaatgtcgttgggttttcgtgaaggagc

SEQ ID NO: 43588 - DNA, 532 bp, Arabidopsis thaliana landsberg
tatatctgaccgagttagctttgcattgggctttacaaaagttataaactggctaaagatgggctcataactaaaacagattgagtagttttatacacctgtaaactaacatgcaaattgtcaactaatcgataatgtatgacttttttctacaagaatagttaattgtggtaatggaaagtgaaaagagtgtgtcgcactaaggaccacctcacgaatttggtgaaaatgctctattggccatttcctgttcggtctacgctcgtttctaactcgcaatatcattactctacacatggttcccaattactggacaaaaatataagtatttaaaaaaatttaagtgaatggatgtcatgattttccttttctccttttttaattataaaactctaaaaaaattaaaaattaatatacgaaacacacgaaaagtacataaacagtccactgcactattattctatacatcaattctaaaactaaagttccattctcattttactaaaaaatagtcgttggcgacttaataaga

SEQ ID NO: 43589 - DNA, 1273 bp, Arabidopsis thaliana landsberg
ctaaaactaagtttgaagtagggttccaaataattaaatatccagtcccactcccatatcaaaatatcaatttcatataaataatcaaactcatttaccaaattaaatggtggcccacttgtttagttcatccaactcaatagagaatatgtgtacttttaaaaacactttaatttgattttacttggggagagtgtagagaccactcaaataaacgccgtataaaaaagttagaaacgatacggtcgcacttaattacaagaagaaacgatacggtcgcacttaagagatcaaagctttttctgtggtacgcatcccatgtccgtatgtataagcgtaaattgcgattgacaaattgagttagctctctttcactctcactacatatgtttttgtcaaattactatatttagatcataacgatcatgtgcgtcctacatttttatacgaacatttgtccactctgcatcaaatacggtgcacgattcgtttattgttaggtcgaccaccggtcatgattaaatgctgattgatacattttaattttggttcctttttataatggtataatgtgcagtaacagttgggattgaattacatacggttaaaaaacaagtggcgattatgaatgatttgttagtcgttcacaaaaacaacgacgattcattttttgtcattatgtatagggatcccttgtgtgaattatcgccacttgttttttgatgaacatatattgatgaacacgtgaattatcgtgaaaagaaggctctgctattttgtcatctaatcccctagctactttcctcctataataaaatgatttcataaatattttacggttttagtttaacataaatttagtgagcttaacatgtttatatttaatatttatggccactcgatagaaacattagaaaagaaaagagaaattggtttaatacatcccaactagatcgtaaatttaaacttcataaattctaagtgtgtccaacgctcatattcacaaccggacatttgaaatccaccgtctacaaccaaacttatcctagggctttaaatacaccctttgtttcggatgacaatctaaacccctggtttttagctactacgctactctctagataaatgagataactcttcattgatactcacgtcacgtacaaatcactcccaattacaaatcaatttatcttcttttcttaactttaatataattgacgaggttttttctcgagtctggccaaaaaacccaaaaaaaaggtttagttattta

SEQ ID NO: 43590 - DNA, 1027 bp, Arabidopsis thaliana landsberg
ccagaaaaaaaactggtttctttttactgaaatttaaaccttgtgatgttccgaatcatcataatatggattttgaccagttgccattctataggcttttcttttctgtatgctttccgaattgttcatagtattagtctataatacttcttattggaaaatatgtcgagattttgaactaaaaattgaccgatcaagatcgttaccaaagatattacttttacagtacttgtattttattaacttagccaacttcaatatctatataagaatatgatcttgtcatgttattctgagaatctaataccaaaaataagttatatggcgttcttttatgtttctaaaccctatcaatcaatttatcacatccgaatccaactataaccagtcctcctaaatgttagagtgtcgggatagaataaaattgaagtgcaagacaattcaaagaagatcgatcatgaagctgactgagacgaaaaatcaaaggtcaaaaattgagaagcttcctaaagagacaagtgtacaagttttgaccagttgtccatttgacacatgaggaggcatcactatcatatcactccttaaagtcgttgctctctccctcttatcactacctttctttctcacaaatccaggattcattcattcacgttttcctacacctcaaacaagttttcaacgtcactatagactatagtgtatttatggaacatttcatttcctaaaaatgatacaatctattatcaaaagagaaaaaatctaacaatttttggataagtccacttattcataagtactgcgacatgaaatcctattatttatctcagcatttagtttgtttctgcatcacgccaaaggagaaaatgtcaaaagaatcttccgtttattgcatcacaaaatttataaaaattcatatgcagaggaatattttatatgtcgaccactgaatactttctgatgaaggaacaatattagttacataaccactgatataacacatagtaaatcttagcctctcatttatttg

SEQ ID NO: 43591 - DNA, 476 bp, Arabidopsis thaliana landsberg
gacaggctgatgccgccgtcggccgcgcaactgccccacattgttttctgatcggcgatgcgcggctcgcccacgcgcaggccgagacgggccgcttcctcgttcatcagccgctgcgcctcctgccgcgccagcttctgcaactcctggcgcaatacacgctcaagcttcggccgctcacccagctgcgccgagggacagaacaccgtgatggcctcgttgtcgacccgcacgctgatattgcgcaggctggcgctgaccacgcgcaccggcagatcgcggccacgcaagggaatggcgttcgcggttatcccagttgagccgttgtcggatccagcggcatgtcgccgtggcgctggcgtagttctggcgatcttctggcggatccaggcttcgcggctctgcaggaactcgcgcgccgcgtacttgggcacgtaacgcgggatcaccagcacgacttcacgcggcgagagcac

SEQ ID NO: 43592 - DNA, 663 bp, Arabidopsis thaliana landsberg
gttcgtttatgtgttggaaaatatcattaagatagctcttatgcattttaatgttgaacttgacttatctgtttatgtgatatgtcatagattactggtatatataaaaatatatagcgaatcaaaaaataatatagatatgagaaatcaaaaaataacacaggtttaataaaacacataaaaacggttcttaaataagtttattgggctgattgggctgtggaagataccctagctaggggttctgaacaaaatcttgagatacagcgtactcaaggaggcgactcaatcccttctgattgggagaatctcgtcgatgaggaggtggaacatgacaaagaaatcactgaggaggatatacgacaaatgaaggaactcgaaaaggagatgatcctagatggaatgctcgataacgatgacttgcttggagaagaaatgttggctggtgaaactgagagttcaatcattgatgatgatagccaagagacgacaatctctgagcgggaagttcctatctctcaccgcatagaggaaatgccggcgacattccagtacccatcaaacaaacgcaatctatcacctgagcgggacaggagagattaaagaggctgtcagattgcgtgggcacacactggggagacatggccattagggcgcaaaggg

SEQ ID NO: 43593 - DNA, 879 bp, Arabidopsis thaliana landsberg
  unsure (1)..(879): unsure at all n locations
gcatggcgcgtgtccggcgttggttcatgtacattacttttcactcaactgtaaggttccactatcaatcagccatgccagtaccgtccgtttttcagatgagggtacaaaaccatcactctctgaattatctcctctgactgaacgccgcaccaacagtgtactcctaccatgtttgctacttttccctccatccacacggtgagaggaggaaccagttgacttttcagtttggtgatgcaaagggctttcactttttgaagttgtaccctgtgaactatctctgctgttgacctcattcttcactgacatgacatttcgctgttgtttatgaacatacctgtcatcgtttcctacttcatttttaatagctaggaaattccttgcaaaagtcgcttttccatcactatcactggcagagtgtagctcccttttcatatctttttcaatcttacttttggttttccttgttaactgactgagtatctcatctgatatcagagaaaatgtggaactatcgtcacaaggcttggcaactttttccccactatttaactgcttcagaagtgcttcataagccttgataatagaccaatacgctgttcccctgggacttatataaactgcatctaggtagtctctattcctcctaggtctgtagtcaatcgtccaccctgcttccagtaacatttccctaattcgctcacgtaatctttgtttttctgtgcctgaaccacgcctaatctttccatctctaattttggaaggcattgacgcttcaggtaatgtcttttctcctccagtgcttgacatctgagagggcttatgaggatgaattattctnttctgcaggcggcccgagctatcactatcttcaga

SEQ ID NO: 43594 - DNA, 1156 bp, Arabidopsis thaliana landsberg
aacatcgacgttaattctgttttttttttctctaacaagctttgcaacgtcaagaaaatattagcaaatcgcgttgctccccatcgcacaatatccctcctcttgatgtgaaatctcatcattgataaggttttatgatgagcataaataaaaacaataagacttttggcttgctcaataatctttgaaaacttaggcagcttagaaatggcttcaagcatcatatcaaccgtatgagcagcataacctgtccaaaaaatatttggcctcttttctttaagcatctttgctgctgcaacattattgagcgcattatctataaccacttaaacaacattcttcgcaccaacatctgcaatgcatcgatcaacatactcaaagatgtatatccctgtgtgagaatttgtggaagcgtcttaagaagacagaaaacattttcctcccttagaattaacacatagattcattatgctccttcttttcatgtcgctccatgcatcagtcatgacaccgttttgtttccatcctgccttttgagtctttaagagcactttaggtctttcttgttcctcctttaacagtggttcccttaattgatattgagttggaggaacccgtcaggtccaaactgtcactgagcctcacaaaacatcctaaaagcatcattatcaatggcattacaaggaataccttattaatacatccatcttgcacaatacatccatcttgcacaatattgatgttctgttgtcttatttgcgtaccaacacagcttcaggaccaatatatgttgcaaacttattcatcttcaagcttctacatatctatattcactttagcccttaggagatcaccttcatgttttttgctcatcttatttttccttgcttttatgattgcatttctacacttaatttaatcctcttttaatgacttcggacatgcaacaacatttcctgggaggtgggcaatgtgttctttaatccgatacactcctccagacatctctttcaaacacaacttgcatttaatcctatctggattctttggattacacacaatctcatattcccaaccaataccattcgagtttctcttaagtgatggtgttacgtctgaacctacatatgttggagctggtggatccataaatgtc

SEQ ID NO: 43595 - DNA, 780 bp, Arabidopsis thaliana landsberg
atatgaagtaaaatattgttcgatatgttatcgtgatgcattagaaattaaaaaagaaaatgatataggacacctattgtttgcccatatataatatttttgagaaaagttgctataagtgattatgaaagtgcaatgcaagaactaaattaccaatgaggaccatgaggtggtcaagcttaattgtatacttaactcgttaatattatcataatcatatctttacaaaagaaaaccatatcgttttatcaagaatatttataacatatttctcaccttcgagtaatatgatagaattgatgcaaagtaataaagtaacaaccatatctatatacacgtacacctagaaaaaatccaatacgtgcatcataatattgacctttggaatttaaaaaatggggacaaagacaagagacgagtgttttatcatgatatgtacacagtgaaaaacacaatgaggatatatgatatcatgaattcatgatagtggacattcgatcaacaactaacatgagctcaaactatatattgaatccgatccaaaccgacttgggtttgctatttttgtatatctggttttacagataagaaaaaaaaacttgcattcaatcacataccatgaaccagaaacatgtaaatattgaacaaaaggcctagtacgtagttggtttaagcttttaaattagtcaaacatgtggtgtggctttgtcattgaaaaactcaatgattaaaagagaaaataaggcgatctagggttctttgcgtttctagcaagtatgg

SEQ ID NO: 43596 - DNA, 709 bp, Arabidopsis thaliana landsberg
accagagaactctcctattcataattttggtgatggtaacagtaggatggactctatggtctctgtcgacaatactttcttgggggaagaggcatgtaatctggaccggatgcaagtgactgataatgactcggaaagcaatcaggataatcaggaagatccagatgccagaagcaatgctgttgttctttggaggagatgtgaattgcttactgcaaaaccgtctcaggagctggctgagcaactacgtcttatcttagaacccacgcttgctagcaagctcagtggtgactacagaacgggtaaaaggatcaacatgaagaaggctattccatacatagcaagtcactatcggaaagataaaatttggttgaggaggacaaaaccaaacaagcgtgattaccaagttgttatcgctgtggatgactcgcgtagcatgtcagaaagtggatgtggtgattttgcaattagagctttggcaacggtatgccgagctatgtcacagcttgagctgggaagtttggctgtggcaagtttcgggaagcaagggagcataaagatgttacatgattttggtcagtctttcaccacagaatccggcattaaagttagtggccttaaatctttcatttcccatgtgttcactgtggattgtcttctgattgcttacaaaacacatcttttctcgtttctgtgatgcagatgatct

SEQ ID NO: 43597 - DNA, 854 bp, Arabidopsis thaliana landsberg
agtaatagtttttcagacatgaattaaagtcacgttatttagaactaccatgcttaagtttaaatatgttgcagtttggatcccacatatgatcttaagaaaaattaattacaaaaatataatgatgacacacaatttaagtagttcacttcaataagggagctacgtatagttttttgttaatccggattttactaaaatcaaaattcgagtgaaaattatgcatatatctaaaataccaattttttaccgcatctataataccattaaatagctgtataatgaaatgaaatgtgttcaactaggtttgtttttcaaaattttatattgaattttcgcttcgatatggtttgttttcgaacttaaaagataattaaaaataaataaaaatactttcattcatatgtagtaaaataagaaatagtactgtataaactttggtgaatatattgcacttacatatacaatattactatatgaacacacatatgacaaatctactgcacttaaaaacaaatccattcatgtatttaaaatgaagaagtatggaaagagatgtatacatattatgttactgtacaattttgtgtcaaatatatatatatatatatatatatatatatatatatatatatatatataataatacaacaatctctagattctgaattgaaaaagaatcactaggctagtaatgaatggaattagatttaattacaaactatatcattgtcacagaaaaatcacatataattggctgctgtttatgaagatgttaacgataccgacaaagtaacataattccatataaatagacccttgttacacaaacaaacaatcacaatattaaacac

SEQ ID NO: 43598 - DNA, 708 bp, Arabidopsis thaliana landsberg
gcgttacaactcgatttacctatatacatgtagctattttttttaacttatcattattatgtgtagatttttctttcaatatccttaactgaccatttcttatgtcgaagactttatatgtgaacacatgcacattatcacatacagagagacaagggggcaatggttggaccgtaaacgattatgtatactttgactattagttaagagtaattcacgaaaaccaaaggaaacacatgaccaattcatatacaaaagcatctcaagaaatgacaaattgaccaattccttacaaaaactgaatctagctagacaactttcccaagaggttatctcagtgattcaatgtaaacacattccacgtgatccaagatttattaaaccccctatgaagcatacaatgaacttaatctaatatcacaatggagacattattgctgcgaggaagtgttgaatccacctgatgcagttctttaaaccttgtttcattaaggtcacttcccacgcgtacaattattgtctccagatgcaggtctgagcacaaattgcacaaacaaagacatgagctcaggcattagcttcgttaatccaagtgttgaagagattggaagatcattgatctaagaatcaatgatctgaccttggatgtcggaaaatgaacaccattgagctcgggcaggcatacaatttaacaaaagatatacggag

SEQ ID NO: 43599 - DNA, 1760 bp, Arabidopsis thaliana landsberg
ggtcaaaactcgtcaaattcatcaatttttatatcttttttgcgtatgtatttgtaaaggttgacttgacgggtgggagatgaaaaacgggacacgaagtaagatggtgacgcacaccgacaaaagatttgatcatattccataatgtacagttcaatgacagtcaaaactttcctttaaatcacaaaatatttcagaccacttatcttgtttttgttccaagaatgtgccaaaataaactgatccaagaaagaaagttgtaaacgaattaagtttcaatctcagaacttcaacaacaaaaaagctgtataatcatagtttactgaacaattttgtaaaagacgatttgagttttagcttccacatacatattgtcgtctatcaaaacattgatcaggtatcatagaaaatgtttcttaggaaactactctatttaatagacataacacaaacacatgctacacaacagacacaaaagctatataatttataaacaacactaaccagacgcttgcataacctcatttctcattcaacaacaagtcataataaaagttaataaaagattcaatagcacatagttatgaagaagacattaacttacagaaagatttttttgtttttttgcttactttctcgcaaacaatctctaatatgggattgtcttaaggaaagaaaaaagaagaagaagagaagagtattagtttgtttgtttgttgtttcttcagaaactgtaagagagaaagaaagaagaaatggtgttgtgaaaatgaaaaagaggcagcgtcgggaacggctacttatacgtaatcatatttctgtttttgttttgacatattcttgtggtatattcttctgacaacgacgtcgcttttatttcttctatttgactacttctcctccaccttatttttacttcttttaggagacactattggttctgttttgctgttaattttttttctgttttggaaattgttttactgtctattcgaattcttaagacttacggttacaaaaagtcgtttttaagtaataatttcgaatattctttggggaaaaaataagattcagacttcagacacatgatgagctgttatttttatttttttggaataagtgcagaatttgcaagatattattttgccataaagagtagaaaattggaaattgattcgttttataccccagtcttctttgttttcttacatacattattttgtataaccattttttaaaaacgttgaatttcccataagtatttgtaaatatagtaaaattcatattataaactaaagaagaaaatgatgacaaaataataaataaattcagtgaaatttaaaataaaaatgtaaaaaaactttaacactttaaaaattcagtgttatttgacacaaaatcttctatcaataggaatacaaattgttttttttttctttgatcgttcataaaacgacgtagtaccaatttacggttaaggaaaatagcgggaaccaacgtttagaatcggtttgagtgacgtggcaaatatgggcccacagctatagattgccttcttcttcttccacctcttgaccccttcctttaatgagagctcaaaaccctaatttctattagccgttacgctctctaacttcacatcacttccctaatctctcttttcagcaatgagctcgtcgtctaaaattgattcagagaagccagttatggttttcccgagtcactattttctaccaaagactcctaacaaaaaccgttaa

SEQ ID NO: 43600 - DNA, 718 bp, Arabidopsis thaliana landsberg
ggcttatgcatatagctttgctaaataaaagacaaagagtaatagttcttgtttcaaggagataggttttaatcttgtgtatagatgtaatcggtgtgagcagctactgttttcttcacaagacattcttcttcactgtctgaattcttgcactctactccatctctgtcacctttagtacttgctttctcctagatccaccaagaaaaaaaaagtagtgagatgatgaatcattataatttattcatttatatatatttttttttgttaaaaaattattcatttatatctttcaataaaatttctgtattcaatttttttataatcaccaatccaccatatgttgaaaccaatattacaacttataaccattcttatccaaatatcgttatcaaacatacatagctataatggtgatggatcgcataccacttattcatgttttcactctttcaaaacgttatcgcataacttctattatgatgcacagtaatcaacaagtattcatgttatcgaaaaataattccgctatatatgatgcacatatattgacgaacttacatgtgtggtgggagatggtttaagaggagcaaaaccatcttctttaaaaaaacacttgaagccctgcttagaagcaatacctgagtgaagaaaaagatcaacacttcacttttctttttcaatcattgctttttattttacttcttcttgctccttc

SEQ ID NO: 43601 - DNA, 694 bp, Arabidopsis thaliana landsberg
cacggtttaagcgtccaaacacgactttagtatccccataagaccttgcacagtacgtttcgtaacggtctcttctgtttcgttgctgtttgggtccataggatgtgccacgtggaatacggctttgcatccttcgatcgccggtttgaagctctccggttcgttgagatcggcggtgaatatttgaagcctctccgatgcaaatggtagctcggttaggtagcttatatctttcttattcccttctgtaatatgcataaaataaacaaacttatgaattattaacttcatttatatcttatggtccgtgattacttattagttattgatcataaaatatatggttgactttctatagaagatgcatggaaacatgacatatttacatagctatgaagcttcaagatcctacaaactgacagataattccagccaagtacaataaatttttcacatccataaaaatatatatatttttaattgtcgatccaaaaatcaactttaaatgttatctctctctatatatataaaaaaaactataatctatctttctatttatgtactttatgttaaaacggaccaatcagccatatatgacaacaaaaattttattggcatttgcttaatcagtgatgatgattcaaagtgtataagtaaagagaaagtgaagttaattaactcgaacctagtttaa

SEQ ID NO: 43602 - DNA, 812 bp, Arabidopsis thaliana landsberg
ctattttcgatattcttttctttctcagattcttctttctaaattgtatttattttcataagatttttatacaatcatacataaactattcagatacgatatagagtttgcaactaccagaaaagcacttgaaatattttttaaaagttttataaatgaaacaagcacatctatcaatttcatttgtcatactaatatatattgtttttacaaaatttgattttgtcagccaaacagattcataattaattattaatggaagaaattacatttcaaatcaaaagaagcgtgggctgctactctaaccatagatttcattttaatatgagtggaatgcacgttgctgctacgaattctatactgtattatattcattaatctcctccaatattaactgttgaatcaatttaatttcaatgcttcactgactccatgcatgagtatttccctatcagggcatgaactacttttaccctattcgataaacccaactttttatttttatgactatgctttgggatattttacatactcaaactactaagtagacgacttatacccgttattattcaatcttaaacccggactgcacacatataatataactacgttttgtcaaaaaaaaaaaaaatcacacaaatacgttttgtaattatgtgtagttattgaatattttgtttttaaaaattttatgagttcaaaatatgttgacattttcaaacttattttaaaaagtttgagttctcagcgaaccttttcctctttcttaatagcctcatggattattctgatattttgtaaaaacattctaa

SEQ ID NO: 43603 - DNA, 503 bp, Arabidopsis thaliana landsberg
ctacagttctacaccaaatctaagtttattcgctttgaggacctttttttgtagatttagaagctcagtgctcgttttgatttaatctagatccagaaagctgaagtctttgatctacgaaacgaaatggtaagattcgtttaattttgggggaaattagtttaatttagcgatttttaagggcatctaatatcggatcatggctttgtgcttgacttttgagtcttcttctgtatgattatagagatttgactgcaactacgacttgtctgttttggagtttgacgtttggtctaattctagtatgattggaaatcaaatttcatgtgattgaggttattatagtctgaaatcaaaagcaatcaaaaatgtagttttttaaagagttgtgattaccataaggaagcttgtgagagctcaagaagcattcttttagtgacacacttttgctctacaggttgctaacttcaatccatcagtggggtcatttgtgtgggtggagg

SEQ ID NO: 43604 - DNA, 648 bp, Arabidopsis thaliana landsberg
taaaacaatgatgatattcttttctcacattacaagctttcagatttgctttcatttccgcagtccctgaaacttactctttgtgatttttcattagagatttgtcgaaagctcgcaacacggaatgcgtggtctggaaacacgagttcacggattagaacttgctctggacgaaatatcttatgacttggcggtttcaaatgggagaatgagtaacggttcaagcagaaacaactgttgtctccttccttctggaagtttcatcaaatctaaattctggaagaaacacgattccaagtattcagcatcgagaatgtccacttataggaacagaaatgcagaaaccaccgagatacaaaactcgaggcatcggtttaatggctctcctggatttatagtcaacccattagctgaaattcgaccagataatggatctgcaggtaaacaacttgtgttatgtcgattcgagtcaatgtttttttgttgaagaactgatataagtgaataacattattaagagtatgattgtttgattttgtgttgccaggtctgcctcacaattgagggacgacgagaaacaaaaccttcaaaagcttctgagactttaaaaaccactgagagaatgtgggtgattcctactgaatagta

SEQ ID NO: 43605 - DNA, 675 bp, Arabidopsis thaliana landsberg
  unsure (1)..(675): unsure at all n locations
ttacatttatagcacaaaattcctcctaacacatttatacattcattttataagcttatagatatatcaaactttagtaatatctactgattattattttttccagatttatggggtaagttactgctagtctactgcatgtttgtcttaagtagcctccttaatttaagctttctcaaatgtaattttttaaagtacaacgtacgtaaggtcagagcgtctatcggtctattgtgcgtatttcttggacttagatgtaagtttgtagattacatacaaatgttaggacaaaacatattggacttagatgtaggtttgtagaaggtcaaccaaacattattcgagtatccatagatattcggttcggtccggttattatttttatctagtggatagtgtgattgaaattcattcgggtatttagtagtatccaaaaccgaacaggaacccattttcgatttggttcggttcattttttggttccggtttttatgctcagaaccactaggccaaaatctttcagattctctcttcgcatgttatggtctgctcagaaaactaattttgatctgtttttttaatattatagtcatcataatatctggtgccaggtcttatatataagcanatttgtaaaccaatgcatatttgttgattattctcatttttaccaat

SEQ ID NO: 43606 - DNA, 741 bp, Arabidopsis thaliana landsberg
ttcctttcttttaatatttatatgcaatgaacatgtgcttgtggaatgtatgacctgattttggtgttttttgcgtgtgaggtttatgaaagcctgaacttttcaagacattgaaccttttacatatcatgacgatttccataaacaaggtttatccacccacgtatgtgtcaacttataataaaataaattgcgtaaagtaaacaaaatttgattataaatgtgcatcatccaactttgcaaaaatatacatatagtttttgtggtcaagaatttgaaactattgatgggtcaacgtcctttgctctttgtgtattggcaactgtttaagcataaacaatcaaagatgcatatgtcatatgtgtacaaggtcgaatatccgaatctcaagcaggaatctttatatttaataatcaaaagtcaaacacacaaaaattgcaacaacaaagcctttgtacatcagcagctattgtgctttgtctcttacatttaagaatccttccatgtttagtttttgacatggtgggaaccggaaagattcaagcctttaatagatcgttttgacccaaagatgaaagctagcatctttaggttatgggcaaagtgttcggctagttttgtgtttgctcttagttttaggcccaaatgagaagtggcccacccagtctgtttctctgtccatgatttatactcacattcaatggccacaactagaacaaagatcgatcaaagaagcaaagc

SEQ ID NO: 43607 - DNA, 492 bp, Arabidopsis thaliana landsberg
ttgaacatatttcctaaggtaaatcctaatgaatctatattttgtaaaaaggggttttgttcattgttataaaataaaaagttggctaaactggttccattgtttcatgtgtgtcaatattacgcagtatagttcaagctcaggcttcaaaagctacgatactaaagaagatatagagaatgttttgatgaacacttttgatggcgccgaggcagcagtattagacctaaaacaatataaccccgaggaagatttgatcctcacggagctaatcgatgaattagcaaaagacaattcagagaccacgccgaccaatgtaaacatcagctttaattctgtcgcatattaattatctttaattatggttgacttattttttttttatgtttcattgtgtaatagactttaccaacttcagcatctggtatgtcatcggatatacataaagattacaacactgaagctttggctaatgcaagttctcaagattat

SEQ ID NO: 43608 - DNA, 772 bp, Arabidopsis thaliana landsberg
tctcaatattctgttttcttgatttcttggatctttggttcttgattcttgaaaactgaatcttttatttttggcttaattttgttgtattatacgtctatggttgttggcaggtggattaaggtaccatgggatggcaccattgatctcacatgtttatgaacaaggattcatggaagcaatttcaattcctcaaattgagtgtttccaaggtggttcttcgatcgctgaaattcctcaaatctcattaacttttgcatttgattgtaatacaaacttttcatgtttaattgtctttcaggtgctattcagtttgcaagaacagaagggatcatacccgcaccagaaccgacccacgccattgctgcaaccataagagaggctctccgatgtaaagagacgggagaagcaaaagtgatactaatggcgatgtgtggacatggtcatttcgaccttacttcttatgacaagtatttaaaaggcgagttggtagatttatcattcagcgaagagaagatacgagagtctttgtccaaggttcctcatgttgtttaagctcgaatggctccataacctcgggaaaccaatgtcccatgttccaaactagacgtgagacagaagttaggtttaatcttggcttttgaaataaagagtgagagagaggcaacttcaaaacatgaacaaaattatctcttgaaataaaaataaaaaaggcatttacagaaacaccacatttcggggttaggtctttatttttcactctatatatgga

SEQ ID NO: 43609 - DNA, 475 bp, Arabidopsis thaliana landsberg
tactatatcttgtgaattgcgatcatagactaaatttcttatacacctacaacatttttaatctcttggttatctaatgtttgttggcgttttattacatgctatgatatagtgtagggaaattcaaagaaatgcagagaagtatggaaatggagttgtcgagataattaaggagaagtaatgagcttgataaacttcagtctattataattttcatggaaactttttgttttgacattattggatcatattctgtctaaccccacttcaggtcaaagaagaaagcgtttacacaaaacttccaaaaatatagaaaaaatatgtattcaaaaagttgtgtgaaatccggaagtactcgaggaaagggaaacaaatattgtatgtagtcaaatactaaaacgtaaaatgagaaaaaggtaaataaataaaagaaaaagaaagaggatagagtcaagagagcatatattcccaacta

SEQ ID NO: 43610 - DNA, 692 bp, Arabidopsis thaliana landsberg
ctttccggtgaacccgggtcgggccaccgtcaacggactggaatgctatccgagcctcgccagcctgccggagccttgcgaccttgcggtagtggcggtgccggcggccggggtggccgaggtcatggcggattgcggccgcgccggcatccactatgccatggtgctgagtgccggcttcggcgaagcgggcgcggaaggcgcgtccctccaggagcgactcgtcgccgccgccgaacaggctggcgtgcgtatcatcggtcccaattgccaaggttttctcaatctgcgggagcgcatcttctgcggcttcggcaccggtttcggcgaacacgacgcgccctacggccagaccgcgctcatcagccagagcggcctgatggggctgaccatcatgtcgcgcgccaaacgcatgaacatcggtttccaccagatcgtttccagcggaaacgaatcgatggtcacctgtctggatctgctcgagtttttcctggagcgcgatgacctccacagcatcggcatgtatctggaaggggtgaaggacggccggcggctgcaggcgctcgggcggcgcgccctcgaacggcgcatgccgatcatcgtgtggaaaatgcgggaattcgcgcagcggtcaccgggcggcgatctcccacacatccaacgtcacagcgaatgccgaaatataccgggcg

SEQ ID NO: 43611 - DNA, 525 bp, Arabidopsis thaliana landsberg
ccttcatttcccgccatatacacatgaaacacctaaaaaatgataatacactccattagttaccaaaaccaaaaactttctagaaacttagatatcaaactcgttaaacgttacatcatcagagccagtgattgatatatcatcttctttatcaaaatagcttttccattctacaggcgaatacttctccgacgaattcctgaaacaacaaaaaccaatttcacgatgaaaacgagatcggaaggagaattgagaattgaaactgaaactaacgtagaaggaggacgaagaggacgagcggcgaagacagacgccggagcttctatgggttctaaatgttcctctgaggtatcttcaccaagaggattcaaatttgaagacgaatccattgttgaaagctttttagaaactgatcaaaatcgaatataataatctcacagatcttctcagtatcactcttcttcttcttcttctacaatctgcttttttcagttttcagtcaaaattcaataggaaggtgacacc

SEQ ID NO: 43612 - DNA, 627 bp, Arabidopsis thaliana landsberg
ttttttttggcaaggatcatctatagagtactgattttaattgcttaatcggaaaagttcatggcttacatttgaagcttggtttaaactttaaagtggttggttactggttaattttagataataaattgatgtatgggtttgtggcctattgggcctggtcttttatttggagtccccttgacagccttgggtttgtttgttcattactttaacattaatgtctcattataatgtctaaaacaacaagatataaagactcatgatggcaaattggcaactcaaaatgggtatcctctcttgtcccattcatctaatattactaaatataaattgtagagatttctaacttttggggcataaattccaaatgctctatctcttagtagtttggaaaatctatgtgcaaaaactattgaataatagtagaggacttctaacttttattagaaaacttcagtaccagactataattaagaagtttcttagtctcttaaaaacgaataataattaagtaaacgtgtattgattgttttacactgattgaagagagtattttgtgtgtggttctttatctctacaatacaatgtaacttgaaaagttgaaatcataattctagggtgatt

SEQ ID NO: 43613 - DNA, 690 bp, Arabidopsis thaliana landsberg
aatcgatcttctctccagaattccattgtgttagaatgctccgatcctttttttttaaccaaaccaaagtcgaattgattcttgaactttgttgaattttaatgagcttttcaaatgcattttcatgggtcaaagtttgttgatcatttgggcttgtgagatgtttgtggaatccaagaagagagcccaaaacaaaaccatgattttccatagtggtactgtgaagtttttattttgggccattctgtttctttgatataattttatttttaaaaagtctattttcttctacagaaaaactttgtgttggttggtttttgtttatggatagacatcatttaattttactgtataactttacgaataaagaaactgatatattttcacctttagggtaacgaattttgtccaaaagaaaaaaaaaagtaactaattaaatagccggaaaaggttggtatgatttggagatgatattttacttttttttatatgtattcttcaaaaatcaaaattcataaatcatgatgcagtcggacagggtagcttcatcatgttaatttatgacctgagttggttgagttggtagatctcttaatttcacttctatctctctctcttcaataattttaatttatacagaaaattacttagtagtattaaaatcaagacaaatgaaagccttcttttgat

SEQ ID NO: 43614 - DNA, 272 bp, Arabidopsis thaliana landsberg
gatgacccaaataaatgtagtagcttctgtgttaaacaacgattgcagtctcggagaagttttgaacaagttctcttacactgcgagcaatacatcattctcggatataggaggaacacatcaaaagttggggaagaaaagttggcataaatcgagagcatactagacgcaaatgaaatggagaatatgtgtactagtgttttgaaaatgtcttggtagaggtataatacaaacaaaaaaacgtgttacaaaactttctccatacaatctat

SEQ ID NO: 43615 - DNA, 373 bp, Arabidopsis thaliana landsberg
atgtagattactatggcacatgaaattctcaactttgatcctcagaatcgaacccgacccagaacgttgtttgatgaatgaatcactggctcgagcaccagattttaccatggcttttcgcgttctagggtttcttctctcactcggttgaaacaaattagaatagagcaagttccattgatgcgactgcttagggcgggaaagagattgctattgtacgtcgcgtgtactatattccgctgcctttaccgtacgatgatgatgatctcgagatcttatgaccgaacacaaatgggccttaaagttccccctaatatggcccattagctaccagttgtttttagcccaatagaccctgtttcttttggccaac

SEQ ID NO: 43616 - DNA, 816 bp, Arabidopsis thaliana landsberg
catatgttttgaagagtatcagtacaaaagctttaaccatcaatctcctatgtatttttgatagaatctgcagagagtgacaattgaacatccacttttattagctttcctctcttactaatctgcagagtcatgcgtttgctcagtgttttctgccttcatatcgggtgaatgttttgcagggacaattgatgcagataacaatgatgacaactccagacatgaacaaggagcttcactacctgaacaaggaagacaaactgctgcgctggctcttagttaaacaccgtgacatcaagattggacagtcggaaaaggaagatagtctgactgtgcctaacagactcactagtgggagcttatatgatggatcctcctcggacgaagatgacaacaacattttagggttatcacgatgaggaaatcgatttctttgaaatgtttactcagacaatttcttcatgggagtccccttcaatggttatgaatgtttttggttacatgaagtggtggtatgcgttttgcgtagacaatgaaataaattaattttatgtaataataagttttaggtgaattgaactaaatttcatgtgttttattgttttcgctattttcctagtggatattcaacgtcatcaattgggttgacaaccccgaattaaatgccacgtgtattgacacgtcatatttgcatggggagagcgtttctctgtttttaggacttggaaaaattatcatttctaaaaattaatattgggaaaaaagaaggaaattcaaatagaggtggtggttcgtaaatgagctaagaacaaacac

SEQ ID NO: 43617 - DNA, 649 bp, Arabidopsis thaliana landsberg
gtacataattttataattccactcatttttgtaattaccttgcctacaatgtgacatttaacttaaaaataaaatgaaacagccaatattttttgtgactactttgattttagcaaaataaaatgataattaaaaagctaatcaaaattttgtgagcttatatctttaattacaatatttctttattgtattcaagattttatttttaaggaatttttaatgttttttaaatttctagctttaaattagttttcttgatacaaatctttgacttcatacagatttttcctattagaatttttatatttttgtgaccattttctacttctattatttatttgttctctaatactttattggaaaaataaatttaactaattggaaaaaaaattgtgaatgaatctcaatcttttggtagtttgaaaattaaatttttatctaaaataactttttgaatccagactagttgggttcaccaccagtaaaagtataaccatcaaaataagccttgatcaagcccatgggccattaactatgagtctttgactactcagaaaactcaaatggctctgtttttcttttaccgtatcacaaatggctctgtttttttctctgttttaatatcacacaaaacattcaataggttttg

SEQ ID NO: 43618 - DNA, 696 bp, Arabidopsis thaliana landsberg
ctaaaaattgaagatagttaagtattaataatgtatctcaattattatctatttatgaaaattgaaatgctgacaccactgtattagactgatattctgttagttaataaggctaaagttaattgacataatgtgtatgtttacctctctagatttacacaaaaaaaaaaaaaaaaaaaaatgtttacctctcaacagaactaatcagttatcgctactgtaaactaagaaaacgatttaattattatcaagattttaaaattttatcaaatattccttacaaattatttttttgttttgggatatcattttccttctcccatatttttgggacatctatttgataaattcttgaatacaaactgaaattaacacagttgtgttgtagtatagataccaactgattttagtcggcaatattagttaagaatatttaaccagaacatgaaaagaaaaagaaatcatttaatcctttgaaaaatatttaatgcggtattcaggtgagtatcatatttatcaacaattattttttatagcatgaaagtatttccgaaaaaggagtaacgggcatataaccaacgtggaacaataacggtctcaagaatgcaaaacccacaaagatattattaattgctgattctttgacagtgacagctgcctccgcaacttttttagtgaacgtgtcgattttgttat

SEQ ID NO: 43619 - DNA, 538 bp, Arabidopsis thaliana landsberg
ttgacacgtcagcatctaatagctcgccacgtgtacctattaaaataaacaatttaataattaatcttctctaagtaaagccaggatttaatctacataaaatctcatatccacgattatgcatttacgaagtactcaactattcatgattcatgaataatatttggacgtttcaaatacccaactattcttatccaaacttccccaagagcatgatgtatacaacttattggtattaatttcattttaatttttaataacttttaaacttctaatcatatccactttatatgttacataacgtaaatatttaattagctcccatataaaattataaatacatgcatgtcttacttttcaatctcttttaaattatttcttgggattgtaagagtaaactaacatcatatattcatatgttttcttttttcagattgcaaaaacaaaatcagctacaatcattaacatgtgctacatgtggatggaggagaagaaactgaggtatatttatctatggataattattaatatatcatga

SEQ ID NO: 43620 - DNA, 693 bp, Arabidopsis thaliana landsberg
ttgatatgcagtaggtaaatgcataccactagtcgcagctgtaggcagcgcagcaggcgatgaatctttattaagaaaacaaacatcaatatcagaacgcgtatataatctatgcaattaatacaataatcacacattctgattaaagctaataagagataaaaagaactcacgattagtcttgttgcagactgacggatcatgattaataccacatgagtcggggattttaatagcgttctctttggtgagagcaaggaacctgagcaagtctggatgtttgaaggcggagcatagacacgacacatccttctaggcgatctgtatgatgggattacaacacaatggcggcggaggaatcgacaagtgaatgtacggatgacatggcattagttttgctacgcatctcattgcctgttgaacgtctccgaaaaattgtgctgtggcttgcacggagtagagaatgacgacggtggtgactacaccgagaattcttgtgatattcattttctttttgttatgcagtgtttgttttgctgagtgtattttatctcatataaagagaaaatattggaagggtttttcttttaacctagctaggaaatattggtggatacaactattggacagggctagtctaacatagaggtaaagctttgcttcttagtatagcagctctctgtaggctactgg

SEQ ID NO: 43621 - DNA, 630 bp, Arabidopsis thaliana landsberg
catctcagcctattaaaatcttttatcatttccagaacattagcagaacattagcagaacattagcagaactagtacatatagacctagtagagtcaatctcaagaaatgaagaaatattcgtccatcgtgaccccaaaccaaatatctcggagttaggataataacttggagaaattgattctacgtaatgcagaggaagaatagacacatgattttcatagttataattatcccatgtgcttatattcataccttgatcaccaccaaacccaccctgactgatccaagaccaacagaccatccaaagtcaatccaccaccaataggccctccactaggagatccaccaacaacaaatgctttacctaaagacttattaccaccatttccagaaacatcagattttacatattcacttccactattgatgccagttactcgcaagctgatcatatcacaaggattcatatatttatgaacaccggataaccgctccatttatcgaattttattctcctcacttcgtaactttataaatccgtcacaaatatcttcatcgttcattagcaaccttgttgcttcccatcaaaatgtattcattggctcacctgggcaatcgtccaactaat

SEQ ID NO: 43622 - DNA, 801 bp, Arabidopsis thaliana landsberg
atgaatttaagagtgagaatggcgaccccatgggattgatgggcttagacgttagagatgaaaacgacatatacattgtgtgaagccactagggacatgatctttttaagttctatccagactcaagaggatactattaatttttaaaaattatgcggggtacatgagtcattaagaacaaaaacaacaaattgttatagattgattgacaaatctacatgcgagtaattcaccacggcatacaaatgtaagaaggcggtagaatttgacaatagttagctacaaagaaaagaaactatacgagcttttttggtctttttaagcacttcctagtctctacaattttgtttttgttttttttattgacctgtcttcaagctttttcatttgataacacttttcacaactatcaattcaaaatggtttaaattgagtgacattataatcgaaggtccatataaatacacaaattacatgtgaaagcaaatcattgcacacttgtcaaaaccggttttaaataacgcaggttgtgtactttgtgtcatcaaatatttttaacgtaccctaacataacaaaacaaattaacaaaccttacccttttttgtcgcgccttacctatctttaaaatctaagttttgtgaagaatatttacgtagaggcaaatatgtatatgtacaattataaataagactcataatattcgtgagccgcctctgactatgactagatagaaaaaactgcaacagcaacataaaaaattaataatatgacattgcccattcggatagagcgttaggtcg

SEQ ID NO: 43623 - DNA, 316 bp, Arabidopsis thaliana landsberg
  unsure (1)..(316): unsure at all n locations
actcgggggagggttgaattctgcttataaatgagaacatttgtttggaacgactcacacggccatgctgccttccaagnnnnnnnnnnnnnnnnnnnnnnnnnnnnnnnnnnnctgctaaccgcggccgagttctcactgggatccggcatgggatcgccatcgtcttcctctccaccatagtcatagcccgagtcatcacaagtttcttcatccctgggtgcatcacaatcgtgtgcgcagcacagaagtgagacgacagcactcactcagtggaggaacattttggttgtaagcacattccacagaggcttct

SEQ ID NO: 43624 - DNA, 362 bp, Arabidopsis thaliana landsberg
aaaccatccaagtactctacatgcttttgtaagtaccctttatctgtctgttgattggatgttgatttttcgattgcacttgtaggcctattgctactgtttatttgaatctttctatctgaccaatatcatattggccatagtgcactacagggcatggaccaaaaactcgcagcacaaatttgaggatacatggcatgagcagcaacctattgaattggttcttggaaaaggtatgtggctgtcgaatatgtactctacacctccatttcgttagatgaatcgtcattggtaaataggatgagttagcttgtgtattatatgaacccaatgagatggatattcgggacggaaaaccgatt

SEQ ID NO: 43625 - DNA, 481 bp, Arabidopsis thaliana landsberg
agcttgtcgttgtcggaaaaacatactcgatgcaatacttctctctatagcatatgtggtttttacattgggggcactattaaagtttaagggtgcatttctataaagtcactaattttaaccaaggacaaatcagatttacagttttaatccaaaaaggttttaaaacattttttaaattttgaatcaacattaaatgggaaggggataactattatttagaacacccacacattgttttcttatgatccaaaagtttcacaagcccatgtaccagtccagcccattttccaaatgactaagcagttaaaaacgtcatgacgccgtcaagtaacagctgttgacttttaacagttcttgactttttttctaacagactcccctccgacctccgtatcaatgccaaacgcgggttcgacattaaaaaccttaataacctcatcagtgaaaaaactaagcttttatcttctgcataccattt

SEQ ID NO: 43626 - DNA, 386 bp, Arabidopsis thaliana landsberg
aaaccaaatttggggggtcttttttaggttattaccctctttttttgggtttggcccatgaaaccaaaggcgggatggagacatttgatccagtgttgttttaaatcctgggccatttggacctttaagaggggatggaaaccccattttctggggaggctttacagaaaaagaccgtttggccttcgagttagggggctatggaccagatgcccatccactaaagactgtttttttgggccctacctactggaagaatatgtatctactttctcctatcgaagtaagactcaggaaaatgctctgttttttacaaaccctaattggggcctttgtttttgatgaattgtttgttttgctgatggttaggattataaatgggccaa

SEQ ID NO: 43627 - DNA, 894 bp, Arabidopsis thaliana landsberg
tgtttcagtaactacaactttatattttttggttctcgaagaagttaccttctttttatagaggattgttgaacaagtcaacagagcaaaattaactgcttaatgaagagaataggaaagcaaagcataattctgatttttgagatagtcagatatatgagttattaattaattcgttttgagtatagatagaaatgacagatatataattcgctttttattaagaagtcacccttacagaataacaatattggttcacatatatattgtcataaaatttatataaaacttgtttagtgtactctttttactaattttcttatattgcttcagcaaagccgatacttggggttttaacatctccataatcaaacaccgtatggaacttcgtcatgaaagcctcacccaagaccctacatttaaatccaatggttattttcttaacatatgggttagagaaaattttattacaacaactttagagcctattaccagtctttacgacgatttttagacttcacaatacgaagtctgcagctttttttgggatttgtcttcacctcaacgtactgaaaaaaaaaacataaaagaaaaaaaggtcaagaaaaaggctttaaaaaacaactcaaatgatagaaaaacctgatcgtacatcatgtttagtgaggcgtagatgttttcctccaatttcgaagtagatatccggcaaagcaggaaactgctcgcatctaattattactttggttgctccaatttctttatagattttaccgacagcttcctaaacagaatgaaacaaaaccaaatattttttaccaacttatgatacaaactaaactatatgctcactaaaacttaatttttttacatccgggcccaaaatgtcagtcgatc

SEQ ID NO: 43628 - DNA, 733 bp, Arabidopsis thaliana landsberg
ttaatataaaaaatgattaatcacaaattaatattttaagttagatatcaaaaatcttatatgtttattttgattaatcatttttaaaatattaataatgtgtttttgttttaacaatttaattaattaaattgcataaattttttaaggtaacaaataaatatttaggtaactgaatatttgattttattgttaaagaaatctttctgttaccaagtctttcattaataataatttgacccgtatgaaaacccgaaaacccgcgtgattagtatatgggttaaattatatggttacaaatgtttgttaatgacatctattaatgtatatttgttacacgtaaaggttacaacttaaaattgtactccccccaaataatagtataggatgcatgtagattacgttgctatttaaaatctggaattaaatttgtaaagaattaagctacatgcctacattaatactcagtaaccttgttaaatcaatcccttaaaattcttaagaaatttcgaaaatatagaaagggcaactgccccacctattagttaacaagttctatgattaatcatatacatcttcctactgtaagtcatctgagccagctccagaacccactcacctcggcccgtatttggcccataatgatcatattcatatccaatgtttttcttttgtttttcgaccgtttgtgtatttatggcaaatcgccaaaatgaaaattaatcacataatc

SEQ ID NO: 43629 - DNA, 903 bp, Arabidopsis thaliana landsberg
agattctcttataaattatgtttattgttcagattactaatcccgataatggtagtaaaattctttattaatacatctcaatatggtgccacaaaaagttcatcattcgccactcaatcactaatgactaatgagtaaacatgccgccaaagaaaaaagaaatattgaaacggaggaagtaagtggatccaatctcattttgaattcataataattaccaagtttgattaaaactacatgcgcgtctttgtttcggacagcgcaaaagagattatgccggtgtgaggattaaggaaaattcatgattaatttgaatgtgagacatgtacaaaagtgttttccatttttctttttactttttcgtttttttttacttgtctgcgaatgaagtagaaactcagacgtgtgtgctacataaaacatatgcagatattatgaaataaaatacgtttaagtgggtttagaaaaatagaaaagttaaatagaaaaatgagaaggaagtggagatgggagggcaacgaaagattgaccaaataaagtgtatgcaaattaaaaattgcaataatgaaagggtccaggcactattcttttttccatatatcatctccctttcacttcaaataaacttgttttttaacttcttgtttttgaaaaggacaaagtaagctttagatgtgaagacaagccatcatctaattttgtttgttaataaaaaataacattttaagttttcaacaaaaaaaacaaaaaatagagggttaacagattttttaactgtttttaaactacatatttcaagtttttatttttgaaaaatcaatataaattaggttttggtttaataataattaccggttaagaaagttcaaaattgtttcaatttccaaaaaccttaaaaatttt

SEQ ID NO: 43630 - DNA, 746 bp, Arabidopsis thaliana landsberg
gcggacgaccataatttccgactatcgagttgtctggaacattataaaccctaagtaccatcacaaagtcgagtgtttattgctccttgctgacaaggagaggcacagccatgttacaatgataagagaaaaatgtagattggtatcttgatcaaagattatatccaaagagatgccataagagagctaataatcagtatgacgaccaacttaagagaaaataaaaaaaacttcgaatgatacgggagaattctataataagaggctatgaaaattttccatagctcataggtttttaaagattttgttctcgtaatagtttccatttttttgtgcatcgatagtttcatgttacccaattaatcaattcatctacaaacaaaatagacccacttgcggctatatatattggtgcacaaagttcttccaccttattggctcctctctccaaatccatcattaatacatcaaatagttgatttatcttaactatttgaatgatgtgactatcacagaatttcttatatacttgcggattcagattgtatatatcaaataatattctttaaaaaatgacactaataaagcaaccagacaatataaaaatagtggcgcgtgcccgatgtgtgtgtagacataatggagtcattcttgagtgttgatgtctttgtaattaaatcatttccgagagacgtcaagtgcttttctatgaaatattaagtcatggtacttttgtactttttatg

SEQ ID NO: 43631 - DNA, 605 bp, Arabidopsis thaliana landsberg
caaaggtggagaaggtccgggaagaaattaaaaaattaattttttttctctctacgattctaaataataccaactctcttcaaatgcaagtctctaaagttctcggacaacaacaaggagcttcgtctatggagctagaccacattgatcgtcaagatgaaaataacgactatgatgtggatatatcacttaggcttggaagatcagagcaaaagatctctaaaaaagaggaaaataaggtggacaagatttctactaaggacgtagaggagtcaaaagataaaagatctgcactgggttttggatttcagattcaaagctatgaagcctcgaaactagatgatctttgtaggcaggttaagcttgcaaacgctgaaaataaatgtgtatcatcgaggaaagatgtcaaaacagttagaaatgaaaatcatcaaaatgttttggaggagcatgaacaaacaggtttgaagaaaactagggtttgggttaaagcatcatgtgaagacccataatgcgtaccaccaaaaccatacattacatatgtgtgtttatttagcataggacatctaatatgattattggatcatatatatacgttacatgaa

SEQ ID NO: 43632 - DNA, 704 bp, Arabidopsis thaliana landsberg
ctacaatcatgaccagtaccatcatcaacaaccgaatgttgtgacggatgaagagaagaggttaatgagaatggcgtctaatcgagaatcagcaagaagaacgcggatgcgtgagcggatgatgaaagaggggttgcaaatgcaagtaaaacaactcatggcgtacaatcaattcttgtataacaaatatattagcttgttggagtacaatcaccagatcttgcaagagaattcacagctcaaagagacagtttcatcctttcatgatcaatatactatatcttatggaaaccatgaaggtatacttggaaacaccaatgatttcgatttaaaccaactatcttcgtatcaaccatcttaactggtaagtcgaaaaatattatttttagtggaaaatggttctaatgtaattagcttcttttattatttatctctctactggattctatctatacagaataataattgtcaatacatttgcttcatgatttctcaatatatttctaggttccttatttttttcgaggattctggcttcggttttggctaccccttaaaatttctacttttcccctttggggttccttaaaagcccttccggaggttttgaccaacaaaaaaaacaccttttccgcggtggagaaaaaaaattttggttgggattttctaccaaataatgggtcaaagggggttttttttttttt

SEQ ID NO: 43633 - DNA, 523 bp, Arabidopsis thaliana landsberg
ccttactatattaatacgttgatgtgtatcctaagaatgtcgaataatctttaaattttaaggttaagtgattagaaaatattaaaaacattccacgccgtaacacttggtaaattcaataaatatacaaatcatattaagacgaccaatccaacaggttttttttttttttttttttttttttttttttttttcttgggggggggggggggtgaaaaactcccacttccaacaaattctttttaacataaccctgcctaacctttgagctttgattaactccccttttttgggcgttaacctttgttacagccctaactttaattagctgactttttaagctaaatcaatacactgtctatttttagtttaaaaccaccctttaaataacacttatttaaaagccaataacccttcttaacaaagcttggatgataaaaaaaacaatctgatattttaaaaaaaaggagttttttttgggtgaatacaaaaaaaaaaagttttttttttttggccaaaaaaa

SEQ ID NO: 43634 - DNA, 330 bp, Arabidopsis thaliana landsberg
aaatgttacaaatcagttttgtttttttaaattgttgcatagaaaattgagatcaacatcttaattcgtaccaaaaatagtatttttttagaacatcaattattttgaaatagagaaaaatacattcttgtagagttcaaatacacattaaaaatgatatttttcatatacacatatatacagttaaatttgaatatatatatatatatatatacatcaacaataatacaaaataataatctacaagatcttgttaacaacaaaaaaacgagttaagttgtgtattacataacctcactataacatttgaaacttggtaaaacactaaaa

SEQ ID NO: 43635 - DNA, 1005 bp, Arabidopsis thaliana landsberg
gggggtgaaaattcagaaggagagaggggaaaaaaataaaagatccatgcaaaataaaagaaaaggatgggaatatgatttgatgtaaagcttgtgccaactctcctttttaaatatttttcaacgcgacgttaccttattgcagacatgacgcgtctatatcctatccgtccattttttttcttcagatgttgatggatggatgtgatttcttcttatgatttgatgcatccatgcacctctttctttcttcatatttgtttttttctctctaataagttttggattaaatgtactaatgcgtttagaattatcgttaaaagtatcttgtaaacagacaaaatccaagtagtatccaataagctaaaggtctaaagtgtttcataaagttaaatttatcgtctttttctttaggctgacgtagaatcccctgaatttcacagtcacgcacgcattgcatgctcaaaagacaaatgtcgtccaataatatcatatagatcctaaacaagttttagcaaaattattacaatcctatacacacacatatatattcgttttgtgtgatgtattgtacacatcaacatcaactctatctgtcactagctactgtcaaatatcacatcagttgcttgtagaacaggagaaacacagatcattaaaataaaggaccttttttattttcctcttcttttctcttcctttatctttcaacatttgggaactctagggttttgttatttttagagctttcttcttgtgccgacaatggatgttgatgtgtttaacggttgggggaggccaagatttgaagatgaatcccttatgccacctgggtttaggtttcatccaactgatgaagagctgatcacttactatcttctcaagaaggttcttgactataatttctcttgtgccgccatttttcaagttgatcttaacaagtctgagccttgggaaccttctgggtagcccatttaactaagtcaacccaccttttgttttaca

SEQ ID NO: 43636 - DNA, 497 bp, Arabidopsis thaliana landsberg
cgagcagggcgtcccgatgcgggcacccgagggcccgtgggaactgtgcctgaccgtcaacgactcctggggccaccaggcgcacgacgaccaccacatgttggtcggccagctcgttcgggacctcgccgagaccgtctgcgccggcggcaacctgctgctgaacgtcggcccgcgcgaggacggcacgatcaccgcggagcagaccgcccggctggagggcctcggggactggacggcccggcaccgcgaggcggtctggggcacggtcgcgggcctgccgcccggccaccactacggccccagcaccctgtccgccgaccgccgaacgctgtatctgacctgcttcgacgcgccccgcgagaccgtgtcggtgcgcggcctgcgcagtgccatgcgccgcgtgtcggtggtcggtaccggtgccgaactggaccaccacgtcaccggcgggatgcacgaggtgccggacatgctctggatcgacgcgcccgccg

SEQ ID NO: 43637 - DNA, 500 bp, Arabidopsis thaliana landsberg
ctctaaagaaggacaattgttgggtcgttgctatatggttgacggctatatttgggtttattttgaaaagattatttgtttgtatgtttttatgttagaagatttttttttttttttaagtctaagggctatttagcaaaaaacctatgaaaaacatactaacaattatcgagaggtgtttggaaagaaatgatcagaaatttgtctttctctctttcttttgtactttatagatagaaacattttaacaactgcatatataaaagtcaatgatccaaaggcaaaatttctacaaatggtaaaacgtcgtgatttatgcagatatggtaaagtgaaactgttgcagaaaactgagtaaatcaatattagaagaatgttcatgtttatttttgtaatgaagataaatctacgactctatgtcttaagccttttaacaaacctttacgcagcagagagagataagtctatgatcttgtgcttttggatctcttgggctactc

SEQ ID NO: 43638 - DNA, 666 bp, Arabidopsis thaliana landsberg
aacacaaaagaacggggaaattaagaagatgagagaagagctgtctgtttttggtgagacaacgatataatctctccctttcgtttcatgtcgatgggcctccttacttccatcacttgcatgtatgtccctacattatatatacgaaatttaactattattgttattccccttataaattattacgacaaagacattatattaccattattaatatcgttatttcaacaattgtagatgttgtcactcacaatagtgtaatgatatgttcacatacgcacaccaatagaataaatctctaacaaaaaaaatatctaaaactagctaaaaatccaagaaaatatcaaccatcatacaccgaaatatcaaaatacttgactgaagttctattaaatcatttaaaaagttatatttgaaaaagacaacacaatatccaatctacaagaaaatagtaacaacaaaatttaaaaactaaaactttaattcttatgtattctaatatatacatgattccatacaaaaatcgaaattgtacattagatgcagtttcaattgatgctacaacttttaaccgcaaattagcatcaataatgaagacgcgtgaatgttgagacagaattgtttattttggaccgtcaaatttaaaaatatgatggggacaatcct

SEQ ID NO: 43639 - DNA, 479 bp, Arabidopsis thaliana landsberg
aaaacgtaagttatctttgctcatattttccccaagagctttctgcttacgatcatagggatccagtttttgggtttgttccttcttatcttttgtagaaaattgacaagctgactgcatcgctgcaatgtactggggatcagtcaagccgtacacatgtttactatgcagaagacaggttaatcccaacttttagtcctttctttacttggtgtagctttcgtgattttctcattcattttgaatgtgtcatatggacactgcaaaatttgatcctccttaccttaacatttaaaagacattaccggtaccacattgtttgggtattcttataatcttcttttttaactctgttgttcctttatcagagaggaggctagagaactggaggtacaaggttgaagcaaaagtgatatctctacagtagagattccgaaagatattaaaaagtatgtatctgaaatgaattagatgttttc

SEQ ID NO: 43640 - DNA, 152 bp, Arabidopsis thaliana landsberg
agatccccaagaatcacagctcaacaaaaaagcacttttattgactctctttctccctctatctctctatgatatttataacaagctttctttacacacacccactttttctctctctatctcctctctaattcacacatcaagattcaaga

SEQ ID NO: 43641 - DNA, 627 bp, Arabidopsis thaliana landsberg
  unsure (1)..(627): unsure at all n locations
gcgttgaacgggcttaaatctttgtcaaggacgacgtttatgaatccggtataaattgatcgaagaagattaaacccacaaaacgaaaaggctaaagcttgaggaaaaagtagcaaagtgaccaagagtcccatgatttcatgaagacatgaactatatatatctactcattgatttgataaatacattatatttgatgttacatatttttatttgagatttctaatatatattttcagaatgataaattttatttttattttcatatttatcttgaactgattttaagaaaaatttacaccgaaagaaagagaagagttaaaactttttcataatcttaaataaatcgaaaaataaaatcagaaaaaaataaatgataacagtatatcagaccattgttttggacttttgggtccggatacaaattattatccaaaagagagttgtgagaagtggagccgacacacgtcgacccctagcaccttaaggacaccccatgtggttacgtgtaaacgccaaactaacattngggttnggttttttgagtataaaaaaaaaaaagaagtctaatctcagagaacagacaagagagaagcgagagttagcctcttctttagttgtttgttg

SEQ ID NO: 43642 - DNA, 517 bp, Arabidopsis thaliana landsberg
acaccgctcaacccacggcttggatgagattattctagtgcctcggcgctggcaggactggggggcattttattcccagttcttgttccagaccccccgaccggtttgatccatgttcctgcacccacacttcagtaaatttcaccggccgtgccctgccgggccggtccactgtcccggtaaaaacggatcgaacagcacatgtttgatggccgccccacccagaaggaatgattcacgggctgccacttccggttcaagcaaatggtgtctatgaatccaggtggacatctttttttgaaagtgtgcgtaatttttttcaatttcagcgatgttccagagccctgtgatccggccttccagcgcctgatcgaactcgctggcaaagaacacgggtgccgtcttttcaagccccagacgatacaggctttgtcgaacatcggccacgcagctttcgatgttgtcggggcgaatgagagctggtcattcaagggccgaaaacccagcatcaacaggg

SEQ ID NO: 43643 - DNA, 605 bp, Arabidopsis thaliana landsberg
gggttacccgtggaatgtgctgatgattttatgatcattgaccgacaattcagtagtggcaaggattatagtaaaagtcgtaaactgtttccattgcattctaagaaattgtttcaactatacgatactacaatatgatagttgaggtcattgatcataaactgtttgatactacaatattttttgatacaatatgaaaaatacaatataaaaaattgtttgaaaactctacctctttgtaacaaatgacagtaagagtgttaaaaattttgtttcatttttctggttaatataattcaactgcctttttttttaagaaataggaaaatagagactgaaatagtaaattacatataattttataatttgtgaaggagcgtaaaagactcaaaagaaatggtaaaaaagcattaaaaaacggggaaatagtttctttaattattgtattaacaaaaaaaagaaagaagtaataaagtcttatttatttccagaaacaaaataaaataaaataaatcccataaaattgaaaaaatcaaattaaataaaatcagttacagaggaggagcacatcatcgtgttcttcttcgactcggcgattccaaaaa

SEQ ID NO: 43644 - DNA, 125 bp, Arabidopsis thaliana landsberg
gcatactatccgttcgagcaggcaaccggcgatagaagccaactggaacagaaggaagccgaggggggaatctaggacgccttatcgtgaagaacccagccaatgctacaacaatctgaatcgga

SEQ ID NO: 43645 - DNA, 947 bp, Arabidopsis thaliana landsberg
gcttttttgtttgtttgatgattgacaatcttagcagtttagtttagtttcttcttggacttcagcctaaacatttgatttatggatgaacatgaaagttcatagaaagttttgagagagtaactgtttttgactccaatccctatatgccctggcctcattggtgactttgattttctctaatcatgttgaataagaaaaatgagctctttttactccaaagggaggcgcttgatcagaataagaactccagtgatcactgatcacttagcttagaactatagctgggcagttccttttgctaagttccataacatcttcttattttggtgtgaatccaactgcctagcctcgttgtcaaactgtgtagaaatgtagggtgaataattatgatgtactgaaaaatttcttaggttccccttgtcatgatatattttggctcgatggatttgttaaaggatcactacctgagttgtgaatgtgatatgggtgaagcactagtatgtaatgttataatgttcctctcgcttacattaaaagtttcaaaagagcatttgaatactgtgtttttctctgatgtttgaaaatgccgttgctgcggtatgtctactgtttcattctcgtaaattttaaaaatatatctcaattttatttgtcaatagtgacacagttgcctttcaattggtgcatgattagcgtcacctactcttgctatctatgtctgtagatgtggacaatggatatcgattatattggacttagatagttttgactttgcttattgatgcgtgtatctctactcaaatgatctgttgtactaatcaggcttcaatgatgcatttgttctctgtaggtttttggtgacaagtcttttgaaaagtttgggaagtatttcatctcaatgcatttctcggatcaacatcctggcaaacacaggaagatgctgc

SEQ ID NO: 43646 - DNA, 374 bp, Arabidopsis thaliana landsberg
ccactttaaatgtagctggtacttaggggggttttgatgaaataagcagaaacgtaatcggatttcgaccacccgactggcgtttagcttggccaagacataactgaataggtaacatgataaagactgacaatagctaggacctcagaaataaacatgaagcagactgtctgatcgataccttacgaaatacgattcggaacgcaacactgataaaatacaggcggctaatcgattgtgttgcaatatatgatcgcgttctaaccaaaatggttatttatgtggaatggtcaacgaccaaagttcgaaccaaactttcaccgtactacctactaggtcccacgttgagctatgacttgatacgaatgtggacg

SEQ ID NO: 43647 - DNA, 395 bp, Arabidopsis thaliana landsberg
cggctggcccgggagctgcccggcggcacccggatgcgctaccgcctgcacccgccgctgtttcgcgcgctcggccgcgacgagaagatcgcctgcggcccctggctgcgcccggtgctgcgcggcctggctcggggcaagcgcctgcgcggcaccccgctcgacccgttcggccgcaccgaggtccgccgggtcgaacgcgagctactcgcctcctacacggtgatgaccagccgcctcaccgccggcctgaccgaggcgacgtacgacaccgccgtcgccgccgccgaggccgccgacctcgtccgcggctacgaggacgtcaaactccgcacgatcgcccgctaccacgcccgcctggccgaactgggggtatccgcggctcagacgtcgga

SEQ ID NO: 43648 - DNA, 678 bp, Arabidopsis thaliana landsberg
  unsure (1)..(678): unsure at all n locations
tttaaaatttacacataatttcaagacagtttaagaaatcgttttaacatgcatccggttcataaattttacacaagtttaaattatactatacaaaatattacttggaaaaaatgtacattactgtatatcgtattattctacaacaaccaacaaaaatcctaatctctctagtggaaaaatcaaattgacttcgcttttgctttcaagttgatttattttaattttgtttgtattaggacactataatagaatatgtttgaaaatctaaaccaattcattattcatcactatacgtctttccttttcctccttcattcaaggccttgattagtgaaaatctgaaccaattcatcactatacgtcttttacttttctaggtgatttatccacgcattaatacttggaattgttttgattagcctcacgtaaattttagttttcaatgcggaataataaacaaacctctcattttagctataatattagttttagtgtgatcaagccacatataaaacatattggattagtttagtagtggttcaggttgatgtttattggatgggtnagttatgactcaattacttgagtagtgtacagctggtttatagatattttagagactaaatttcactcccattcacgtagttacctaacttgttaacaaaaaggttccct

SEQ ID NO: 43649 - DNA, 753 bp, Arabidopsis thaliana landsberg
  unsure (1)..(753): unsure at all n locations
tggttggaaaggggacacagagtcgtagctttagctttgaattcaaaaacgcaattagtatgttccttcttcttgcatgatgcctatcactttttctttcacttctttattctctattctaggttttgtctctatctttttgtttttcttacttaaaattttatgaaatatcttacttaacttgttccattctttttttttggtcaaagtctttgatccctatgtctcaagcaaatctttgtagactctatcttanggttttggcnnaaaaaatgaaaccaaacacattaaaaaaaacaaaaatagaggaataagatgggggggttttctttatcgaaaaatatataagnnctnnnnnnnnnctattttctgagcaaaaaggggatgaaattgaatcaaacttcaaacaaaatgaatccttaaagcccacttgggtttcttatgataatataagaacaacatgaaatctgtgagagatgggcctcaaccatgtttttacctgggcctaaaataggttaatatgacacactgggctcaagttgaataggcctgttacggttggttttaattgcgttttctgtttttaagtttttgtcttctgctaaaaggcttttttttttcctcaggtttgacgtgttatactgtatatagttccgagagagatagagagattaagaaaaagaaggatattggctagatatagaaaagttcgagtcttcgtttagagagtgttcctttgatttttcttattat

SEQ ID NO: 43650 - DNA, 713 bp, Arabidopsis thaliana landsberg
aaacccagccagaaatataaaataagatcttattaataagttagtactttaagatctctctttttttttttgttgcatcgtatcgacgaagcactgtctattctgcagagacacgtagacgatagattcgacctcttatcacgagagtagaaaactctctgaaacaaatcacatttttcttgttgtaaaaagtgtttttactctgcaagattaaaaagaaaactcttactttttacagtcctcctgccatattttctttgttgctgcttttcggctttgtttctttttattatgtattgccattcaagatgtcagtttccatatttagaatattagtccgatgcgtcttattgcccgaagacatcgataggaaaaaggcaaaaaaagtaaattaatttcgaggaaaagagaagtgtattgaagatgtaattgtttttttcttgcacaatttagtcatatctttgatctattaaaacatattcatgattatgccgtttgaaatttgccacattctcgcccatcatttgttgctatcttatgcaactatttcgccatcttgttgatttggtagttctgaagcggtatatttttttgttttattttgctgccacagaaagggatattgagctttgtatagtaaattcaagttttttaaaaaatatttcctgattttttggggctggaaaaattctcttaatttgggggggaagtgg

SEQ ID NO: 43651 - DNA, 546 bp, Arabidopsis thaliana landsberg
aaataaatttagccaacatagttaaccaccacatactaatggaggaattctgaatatttactttttaaattctaggctgctaaaattccttttaccctaaactcgaggttactgtctccccaatttctatattcaatgactgattatgttgttcctttccagacttgttaatttacacctacttcagtaacaattatatatgtccaattccagctaggaagatatacccactcataacactaggcgacaccttcaaaagcatcataatagcatcacattgggcataagcgcgtacacagcatcaattgcaccattttggtccaaaataatgtaaaactactagatatggataatgtaaaactactagatatggatataagaaatttacctcaatggctaaagaggttagccagctcctcggaagttgtcgagttaaatgctcatcaacaattgcaagtcgaggagagaataaaagaaatgcactctcgattgccacagcccttgatggaaacacgacaatgttcttgcaaacaaaaagaagcatgt

SEQ ID NO: 43652 - DNA, 695 bp, Arabidopsis thaliana landsberg
atgtacaaaataatattggttaggtttaaaaatgtttaagcaccaactggatcattatattaaattaataatccaagtggtattaattacaattaaactttcttatatgcatttcttataaaactttccctcgaatcttgagagtcattttagtaattcgaaaggaaacttagtttaacaaattttcctataaagaaaaacaaaaccgatttccttgtacatttgcggatgactatttctacaattacagtttatgaattcgttcataaagccttttggccatacaaattttgtataactccaaattttaagccatatttaaccatcttgcttaagtaatgaccgtaaagtcaagtacatatctgtccacatgggaacatggatgcttctaagctagtaattatccacatgatgttgcaaaggcaccgttttatacataatgccacacatgtaaagcccgcaataatatgtgatatcttaaaccatcacatacctccctaagatttgtatggaaatatataaaaattattatgctacaaaaattaattcgtcttgcaatgaaaagcaaaaatgtttaaacgtaccttttagaaaaaaaagaagaagagaggaaatggctatttacattactggtttttttatttgcattagaaatttttgttactaggcgccaatacactttaaaaatgaagaat

SEQ ID NO: 43653 - DNA, 924 bp, Arabidopsis thaliana landsberg
acaaaaatcgatttcagaaaattaaaatgttctgaaaatccctcaagaaagaaaatcagtatttaattgaacatatgagctcagtggagccattagtatttccaagagaatatgcattacctatacgaactttgattatgattattgacaattgatgatggtgtttatatttagtacattatatatagttttcatatgatctctttcattccaatttggatgaataatactattttttttttcctacgaaaatatataaatacttcacagaatcagattcaaagttcgtttttatagcttttggggcaacacctagctctctctagctagctccatccaaaataaggacttggtaatatatatttttaggggtcaaggataaggttaacatatatggtcaaataattttcactgtttttagtaaattcatattatccccttattaatatctgcaacaaaaatattaattctagaaagaaaaaaacaaattgctcatatgggatggatggtggtgtgtatatacagctgtattggttaggctgatctttgaatagaatctgtagaataaatgtgtcgcaatgaagcatatataactttgttctgtaatgttcttagctttctcttctggtgtcaaatccaaccactcttgtaacaataatgttaatttctttttctcttttctggctacgtttcttcatttaattcaacgaatcacacaaataaaaaatattcagcgtcaattaaaaaggtagaaatgctgctaataattattggtgcatttgtgcccatgttaattaaaatttaaattatcaaagactcatagtatgtaaagtatggaccagaaacaacgtaaaacgctttgcttttggcactctaaaaaaaagactttatgttttttccatgccatgacgccataaaacatgc

SEQ ID NO: 43654 - DNA, 594 bp, Arabidopsis thaliana landsberg
atatggtctacttggttctctccttgactgacattatatagtgctttctaaataaaataaaaagatatttatttgagaattgaaattgaagatgatgatatatattagtcagcattaaaaagttttcgttaggtcactcatatgggctgttgggagttttatatattttgatgaaacaaaatgcaacactcctcccatacgtaatattttccttcattgtgaagaactctgagacaaaaagacgatcacaaaattaactatctttcgttttttttgtttctctgtggaagagacctctttatataacttctaatcttcgatcaggtttgtatgtacgaagtgtccggttagaatttagattttagatttttgactctaactaaatttagtggcttatttgaataaaatcgaagttagggtgattttggatggcttatataaacgcttagacatctgaaatttaaaacatatgatcttatgtttcaagttttgcatccccatgttgaaatgtgtataaatcacatcaatatttaacatatggtattaaggcggtgaacttaatactgatcccgttctgcattgtggagagtgatt

SEQ ID NO: 43655 - DNA, 602 bp, Arabidopsis thaliana landsberg
gatttttcttatggaaaatgaattactgacagatttgattttagattgtcgtacccagtccggatgtccgtggacgcgaagagattttggaactctacctccaaggcaaacctatgtcagaagatgttgatgttaaagcaattgctcgtggaactcctggattcaatggtgctggtgagtttcttaaatctataactacagtttagtcaccctgaaattcagaagtgtcttcttttgtcactaacctatgaagattcaatgactcaccacatttttcccaatctcaccaaacttttttccagatcttgcaaacctggtaaatattgctgccataaaagcagctgttgaaggtgctgagaagttatcttctgaacagttggaattcgcaaaggaccgaattgtcatgggcacagagaggaagacaatgttcgtatcagaggactcaaaaaaggtatattccaatatcttaacaacatagaagtgtttggatgtggagttcaaacatgatatgacctgtcacttacttctttgcctctttagctcactgcataccatgagagtggtcatgctaatagtcgctttaaaatccaaaaggtgcgcac

SEQ ID NO: 43656 - DNA, 924 bp, Arabidopsis thaliana landsberg
  unsure (1)..(924): unsure at all n locations
ctcctatttctccctcaaatcgttttctccagttttctggggataaatcttcctcctttttgcagaaccccatgtcggtgcgtttaaatctcctctctttattatatacatatgcttgagaacagttttgaattcgatttgtttggttttgagaattttagtttcgttttggtgagttagatgattatatgtttccttttgattggagggtttttgttgtttcttttatttccgctgaaaatcttagattaaatagaaaaacagatgtgaaattgtgattctgatgagctattgtcttgttgttgaatctgataatcctgattctggatctcgggttttattcaagttttgatctttttctgaatttgattgattaagcttagatttttgattcagggtttctgattttggatttgagatgaaataaaggtttgataaagagaagttgttttgttgtctttgtgttagcttatctttttttccccagattgttgttctttgattttattgatagtgaaagaggcatgaatattgtgtggcattgtttatggacaagcaaaagttctttttgccttgtggatttgtttgcttatttagagacacaattgaaatccactagtttcaaacttttggttttattattttctcacctaatcaaatggattataaagttgtttggaactttaaaatttctcttatggtttggttttggtaatccttttgacttgtgctctatattggttgctacaaaatggaattataattagtttgggcaaattgtacaaaccattttttcctcgttattgatgataaaaaggttccattcttaagtctcattctattactgggtgatctttttcggntatcttgctctctttttgatggctccactagactgctactataattattactggagatgac

SEQ ID NO: 43657 - DNA, 639 bp, Arabidopsis thaliana landsberg
aaaaagggtttactctgtcttcttcagacttctcagtgatcgaagctatgatgacgacaacaaccaatactatggctatgcttcaaaacctcgtcttctctgttccaatctctcgtatggtagttcggcgtcactccctcgctaccaccttctccgctgccgccacaaccgtcgtaccgtctcctaaaccggtatcagccaaaccggcgcgtactccacacgtcgactcacatgttctcatcggaatgtcagagcctgagcttcaagagcttgctatcaacctcggtcgagtaaagatctgatttttgcatataagattcgagaagaaggaatttggttgattaagctgataaagttctgatttttcaggaaggatacagaggaaagcagctccatcatcttatttacaagagaaaggttaataaagttgaagactttagcaattgtgagcaaattcttatcaagttctatgttttttgaagcgtcttcattgacagttatgcaaatgatttaccaattatcttccaattttcatgatgctaaaagtgccactgacgttttgtaaaggacttgtggatggtgaatatatagtggctagatcacccattcaacagactgtagcgtccaatgatggaccac

SEQ ID NO: 43658 - DNA, 557 bp, Arabidopsis thaliana landsberg
  unsure (1)..(557): unsure at all n locations
aaaanaaaaaaaaaaaaaaaaaaaaaaaaaaaaaaaaaaaaaaaacaaaaaaaaaaaaaaaaaataaaaaaaaaaaaaaaaaacanaaaaaaaaaaataaaaaaaaaaaaaaaaaacataacaaaaaaaaaaaacaaaaaataaataaaaaaataaaaaataaacaaaaaaaaaaaaaaaaaaaaacaaaaacaaataaaaaacaaaaaaaacaaaaaaaaaaaaaaaaaaaaaaaaaaaaaaagaaaaagaaaaaaaaaaaaaaaaaaaaaaaaaaaaaaaaacattcacacaaaaaaaaaaaaaaaaaaaaacaaaactagtccacaacaaaacacaacaaaaaaaaaaaaaaacaaaaaaaaaaatcaaataaaattaaaaacaaaacaacaacaaataaaaaaaaaacaaatacaaaaaagaacaaaatataaaaacaaaaaaaaatacgaaaacaaaaaaaaaaaaaaaagaaataagaaaaacaaaaaaccgaacataaaaaaaatcacaaaccaaaaaaaaacacaaaaataacaaaataaataaaaaaa

SEQ ID NO: 43659 - DNA, 400 bp, Arabidopsis thaliana landsberg
caattataacaaattttctttaaaaacccatagaaacaaacaaataatttattttaacagacagaaaaatttaatatttaacttttgattctcgtccaaatttcttaaaagctaagaatatataagcaaaaggcccatattgttatatgggctaagaaaaaggcccatatatatatacctctaccctagggttttcaaggtatatattcacagttacgctacatttccacttcttgttaccgtcgccgtgaaatcgccgattagggttctgagcaaaagagtttctccgccatgagagctaaggtattcatctttcaaatcttcaccaatacattttagtctatcaatctgctacgtctcttattgttgctgctaagtttctgtatatgcgtggtttcgc

SEQ ID NO: 43660 - DNA, 430 bp, Arabidopsis thaliana landsberg
acacacaactccagctcgtcctgaatatatatactactagttgagattttaagatatgatttccaaatttacatttttttgttttggataaaaagtaaacattacgttgaaaacaaaacttttcagtaaaaaaagctcaaaaaactttttgtgacataaattacacttaaaaatagaggaagagttgggtagcactccgctatgatttcgtgaaattactcacgtttatataaaactatatctcatcatcacttaatattatctttgttgaaacagacaactatatcaatgtgaggctgataaacatagataatctaatagcaaaataatgatacgaccggattgcttcgccatgaatataaatcaaaaaggtaaaaaacaaattacactgaaatctgtatgcctgactatatataagccagaaaaaata

SEQ ID NO: 43661 - DNA, 600 bp, Arabidopsis thaliana landsberg
agttaaggggtccattattttgttgttgtttattttctttaatacaactttaccacttgcataatctatgatcctaaagcaatgtcaatggtaaacagtaaatgctaaaatagttgattagtaaaatagtatatggtcaaagaaggaagagttgaattggggttggtttcatgaaaagtagataaagctaaactagcacaccacatgtcttttctttgcattctttttgtctaaatctcttaagtctagtttttttcatatgtgatagcttcacaaagtataagactgttattcaaattaaagtcttagatcttttaataaaaactaaaagtctaagaagcctgaaacggtttgtttatctatgaattcatttaattacgcttggattctgatcaacaatccattgcatcatcgttaattctcaaaaaaactaaaactggttttttcagacttgacatggttttatattttgtttacattaaaagaatttgtatattttttctttccaaagtaaacagtagtgagtagacaattattgtttttcattaagtttaatactttctacagtccatataattgctttcattggtaataataaac

SEQ ID NO: 43662 - DNA, 688 bp, Arabidopsis thaliana landsberg
ataatcatgtaagaagaataagagcaaagttaaaggaaaagtttgtttgtttttttgtaaaagactaaaagtcatattaacattcccatgtgttgcctttgtatattccattgtcaatgttcttatatacagaaaacaacaaaatgctggaaaactactttaagaacaaattaatccgtgaatcaaaatattaaacattgacaagaaagaaaaaaaacgagaaagcggaataaatagagtattggtagggtttccaagatcaattgtcctcataatactcaaaacttggcatcaattgtcctcataatactcaaaactctattccaaactagtgttgtatatctcgagatcttgcttaaacatgaatgtatcagctaaaatataacgctagcaaccaccaaagttatggcttttgcttatgatatctttggatgataacctgcacacattatatttatgttttaaggaccctgagagcaaatgtaaaagactcttccacaaatggcatttttgcggtctgtaacaatgtattaccaaccaataaaattttctgttcactgatgagagaagataggaaagtttctccaaagcatttgaatattattctccacaaagaaatgtgttagacttgtcaacttggaattctgtcacttagccggatgacgtactttgaacgaaaataagattc

SEQ ID NO: 43663 - DNA, 827 bp, Arabidopsis thaliana landsberg
actgaaaacttaaagaaaagaagaacacagtgctcttgaagattctttaaaccttttcttttggaaaggaaagagtattctatttgtactaatttcaagattcaaactccaaaataaaagaaatttaatagttttggctcatggtgagtctttcattatgcgagtttgttgctatttgcaaagataatcgatgttaccaatacatttggaatttatggatttgtaatttagttatatacaagaataaaatccgagagaatgtcactgtcccttttgcccactccctctcttaatttctcggtcctaaatgattgcatatattcatcgaactctatccccaattttcttctcctttatttcagtcactcataatttttgcattcaacaaagtacaaaccctcacatacattaagattgtcataacaagaaaaccattaaaacatccaaattgatttctgaaatttacagcttctagatcaaatttaaagttgtcttttatactctatttcatagatacacattaacattgtttacaatacggtgaagaggttggatagatgattttgctgattgtttatgtcaacaataactttcatccatttcataaatacatgtattttttacaacctcactttcattaaatgtattctctcttttacacaacagtgggtatttccactaggaaatgactatagtacccctcttcttattagtcaactctccatatccttttggaaaatccatgaactatcttcagatttttactttgtctgtagtttgatattctgaaacaactgaaattcgttaaaatttggaatgattaattg

SEQ ID NO: 43664 - DNA, 633 bp, Arabidopsis thaliana landsberg
aattgattgacgttcccttagcgaatatacaccatctatctgacaagatacagagatacggttttgtccttttcgaaatgtagttttgatatatatcgtgacgcgtaaatttattttaaactagatgtttcatttttatcgttaaaacattctatttagtttaataatttctatttaaatttaagttgcaatgtcggcggattacaaaccatctatccgacaagatatgaagatatggttttgtacttttcaaaatagaattttaatatatatcaggacatgtaaatttatttaaactaaatgtttcatttttatcatcaaaacattttcaagatactttaataaatacggaaatttttgaataattcctgcattttttttccaacataaaattttcaatataatataactgatatgatctagtatttatttttattttagttcaaatagccgatgctttcaaattcacttgttcgattacatcagtgaaaactttcaaatgtataaatatgaaacgtttgttcaattttcggtgatatatagaggataaatattggggtgagtgtgggcttccacttgtatggtcacgtggataaaaaaaaaaaatccatgtttttcaacattttttattta

SEQ ID NO: 43665 - DNA, 524 bp, Arabidopsis thaliana landsberg
  unsure (1)..(524): unsure at all n locations
gtgcttgattttggtttggttccgcccatgttggtttacattacgaatgacgtccacaactgtaaactggtttgctaaatgacacagctgcagtgtgataatctggaacagtcaggtatgaatgatccagattgcgtcggcagcttagtgatttgtgatgtcaacannnnnnnnnnnnnnnnnnnnnnntccacaagctgcgcaattccagaaatagcaggtgtggtaataatcgctttcctgcactgctatatactccgtgtgttggcagatagattgcaatgcgttgcgttctcttgtcaattgtgcatgtagattctgcaaagacgattccagttgatcgatgctttattgcagtgtgtgaacacgtgccaattgctctttcatgcagggtgtgttacaaagcagtgttgctatgtatcactgcatgcgcaatattttgttgataatggttgctgtcgttcttgatttgattgacgaccgcagtttgcgctcttgtagtccgttgacttgtcaacaagcgc

SEQ ID NO: 43666 - DNA, 510 bp, Arabidopsis thaliana landsberg
tattgcttgtataacaagttttttttttataatcttgataactttttttcattgaacttactttagcttgttccctatgaaattacagacaaagatgtttcaaatgcctacttttgcttgcaatatcctttaagctcttttaagaatatcttgacctgaaaccttctgtaagaggaatgacttttgcggatactttcgattgcaacttaagcacagcttcacggatttcctgccattgcaaccacaagtattaagatgaaatacaacataaggggctaaaacttttactaagaacatgaaagccaaattcagactctcacctctacatggtaacgtgatgagaaatgcgtcaataatacagttttgctccggatccactttgcattctcaataatctgcaatttgttcatggaaaattcctcttacagtgtgctttttacaggtgtgtttgaacataaataggatcgtacctgagatatatgagtatgaccgactgctttcccatgctca

SEQ ID NO: 43667 - DNA, 718 bp, Arabidopsis thaliana landsberg
  unsure (1)..(718): unsure at all n locations
tggccccggacgcgtttgggacgttaattctctcttccttggatctcattaaggatatataccattttctccaccagttgttctgttacttgagggactaagcaacctttttggtcgttgatttgccactcccaatctttatcttttggactgaacaactattttagtcgcatatactacatttggattggagtaaaccagtattgttcaaaatatcaaatcataaagcaaaatgacaatcgaatttgttccatgcatgaaaatcatgataatttgttctcttgtcgtttcaatgtaaagatacatgagtgagagcgcttgatgagagagttgttgccatcacgagtcacgactcaagcaacgttttaaacattctcgatatatttaaaatattttcacaaagacagtttccggaagttcaaaaatttacaagactataattcttttttgtccaggaattgttttttttgttcattgctgaccgatccgaattctaattatgattcccaaactttactcattatatattcttacttctaacaaaaaatattcttgattttatatatacttacaaactttggcttgtatttctgtcaagtagaatcagttttaaggggaagtttcctaattataatcctcaatcactttaattagtaattaagttatgtnntacgtatcttacaatctttacaatcgtctaagctatatatatagaaat

SEQ ID NO: 43668 - DNA, 736 bp, Arabidopsis thaliana landsberg
cttgaaaacaataaagaaaatctatctcaatccgtcttagaaaagtttaatactaaatcttatgtttgtagcaattagtccgtgtgcaccttgaaaattagtttaaaaaaaacaaattaagcggaacacacggcagagtctgaggaacagatcaacccttaaggtttgtatttattaagttgtgttttgggataaatttatgcttagttaagcacaaatatatatcctcaccaaaaacaaaatcaccaaatttatatgattaagatttctcttacttctaactaataaagtgagtaatatatttatgtaatgtgtaattaataatgaatcaccaaactatttgttaactttttggtccctctacatttagctacccaaatatataaactcttaacgatatccaaacctcgcgcgtctagagaaaaagagggttagcaaagaaattaattatatgtacgaacattttgttaatccccaaaaacactatactatcgttgacatctcgtgatagcaagacaacgtactattaattaacaacacttcactatttaatcgacgacagcttcactcaattgtgggaagttagagctcaagctttcaaaatccccctctcaagctatggtctttgcgtgctgatgaaatcgagccatgctcttttcccctaccagaaatcagattcatctgtgaactgtgatatatggattgtgcatgttgtggtcacaattataggcataaa

SEQ ID NO: 43669 - DNA, 813 bp, Arabidopsis thaliana landsberg
cggtaattaaaatcataaaatgtatccagaaactggaaaaatgatcagccgaaataaaaataagaaaatgaaaaaatgatttttattctttttgtcaagaaaaaaacaagaaggggggaatattatacagctgtgaaaggaaagcgtgatgacgtggtgtaaaccaatcaagtaccaatgattggtcactactgccttctcttcttccagatactttattcccttccaccagttcatgctgacgttgcttttgcgtttacgaagcccttcttataactaaacttaaccaaacaatttcaatcctatttgagctttagtttttctccaatgagatgaattcatgcaacgcatcttgtcgagaaaaaaaaatggcgtaagaaaaaataagtaacgataagaaaagtcatacaaataaattaaaaaagtagcttaagaaatgaattgatgaccataagatgcggttaattaaggtaaaagtccattttacacgtatgatataataccaaccagaggaagacacgtgtaggaaaaagataagccagttgcaacgtcgggtacgctaaaaccacctgagacgcgtttttggttggtttatgaatcaaaatccggaagatactaacaattaattaataacgaaaaccaaaaataattacaatatatgtgacaatgtttttgtctttcattacatgatcaccattagttctccgatccttacattatagtatatctttaataagccacaataaatgatttgaaatgtaacatacgaattaacgttaaaaaacggaagggatgattctagtcatatgaaga

SEQ ID NO: 43670 - DNA, 722 bp, Arabidopsis thaliana landsberg
ggagagaccatatttgggtatgatgatgcatacatacttagagcttgtttcttgatttcttacacagatcactccacactaatgtggctaatctttttacgcctgaaaaaggcagtttttctcatgggatgaaggtgcttgctatgctcctaaagagatatggaatagcatgatgctagttcactggggtaacacaaactctaagcacaaccattcaacaacagcttattttggtgataactgggatgatatatctgatgagaggagaggagatcatccttgctttgacccccgcaaagatctcgtgattccagcctggaaagttcctgacccttactcaatgcgcaaaaattactgggaaaggtatattctctgatagttcttggacattgtttcagtcatgttcgatcgctggaaacaagaagcctgaaagttgttgtcttgttccttattattaggccacgggagaagcggaaaacattgttttacttcaatgggaatctcggacctgcttatgaaaagggaaggcctgaagattcgtaagtcttcaacttaaagactcatgttgatatcatttgggaaagtcgagcttgcttcaaacagcattcctaatggagatgtatataatggtcccataacatctaatgcaggtatagcatgggaatcaggcagaagctagcagaagagtttggttctagccctaacaaaagaggtaagcttgg

SEQ ID NO: 43671 - DNA, 688 bp, Arabidopsis thaliana landsberg
tttgactcgactttagtgatcttaattgtaagttcaaaagatacatttatttctaactctaaaaatcatgaaacctttatcattttgaagaggcaatagctgacttgcccgattgcagacattcctcaaacaaagtgtaagtctaactcgatatgcttagtttgttgatgttgaccgaaatctatggtcactggtgatagttgctactgtgtccctgtctattaatattctgcttcagcactagaacgagaggcacttgaattggttatgtgtaattaattgtttgcttagtttttttttttggctaaacatagaccatcatagtatgtgagtgaagttgtaaacacttttttcattatgacgaatcttgaatttattagtactagctaataaccctacatccaacaatatagttctttgtctctatgcatctccatcaaaaattaaggaattatgatttcatttcgagatatcattgtcaaaatccagagcataccacaaaagaccaatcagataagacagagataaatgagattttctttctacatctcgcccctgtcattttcaatgtgaatcatcacgatctggaatcagatccatgacaacaaaaaaatatgagtcagacactaaatctattcagtgtgagttggcctaaattgggagatacaccatagtgagaaataagatg

SEQ ID NO: 43672 - DNA, 546 bp, Arabidopsis thaliana landsberg
  unsure (1)..(546): unsure at all n locations
tgtggccagcaagcgctggcatcgctgctgtactaccatgccacctttattccgccgccggcggacacgctcaagctcatggaacgcttcatctgcaactacatccagcggccggcgcagggagatgcggccgggctgcagcgctgcatgcagcacccgtcccgtgccgccgccgccctgccggtcaaggacggcggcatgggcatggtggcgctcgcggtgcagatccgtgcaaaccaagctaaggtgggcgcgctgctgttgcacccccagcggcagccatggaaagctttcatgcgtgcaaacctgcacgatgctgcagctggcgggcttggtggagctctgctggtccactggccgggccgacggccgccagacatgctgctgcgtcactatgcctacatcgctgncatgcgtgcaacccatccgcaccgggctgcggattctcagctgcacttncgcagtgttcagcgggagccgctgcggcacaatgctcaactgcagcctccgctgagcgcggcccaccttgctgtcctcaggggctct

SEQ ID NO: 43673 - DNA, 305 bp, Arabidopsis thaliana landsberg
ggaggtatcgcttggactcactaccatgctcctttccacgcgattcacaacagtttgtgtttcatgtcctcaagctcctcatggataattgggtgggacatatgatcgactatttctaatgaggtatacgtttcagctttcaattcatttgttgtgggaagaaaaaatcagcagaagacatggtgaaactgctattccatcaaacatactagtccaacgactagatatgctgattcataacgtgatatcgactattcaagagcagggagattgaagatatgacagatgtatgacggcttggtttg

SEQ ID NO: 43674 - DNA, 1851 bp, Arabidopsis thaliana landsberg
cgatgacgacgagaaggaagaaaacggaccacgaaagcagagccgtaccgaaattagactggtcgaaccagagcacgagggacatgaacgtgaatcgtgacgcaggaaactccggttgttgtttgttgatgatcgcgcttggtcttgtcgtctccgggagaaaatgctccgatgatgcgttcgtctccatgagaggggtaattttgggaattaggggtattttgagagattcaaaagagggaaaaaggcaaaagtaatgtcgcgttgattggttttgtaagctaaacctgtaatcttgtttaaatactaaagttttgcaaaattttatatgtttaatataaaaacacacacgtattaacataggactttatattatttgttattttattagttttctgatattatgtgattgcatcttttttggctgatatataggtaggtgtaaagttttttttttttttttgcaatttctgtttaatatctaaaataatgattaaaaaggatgtagtagagtgtgaagctcaaaaactcaaaatggtttaagaaaatacaatgatttaatgagtaatgactgatttattaggtgtttactgttttaggaatttgtctctgtatgactttgagcttccaactaaatttgtaataaaaaaaaaatcagataaacagaaaagacagatgatacagtatggttccaaaattttattactatttttgagtttttttttttaaaataagtcaatttaaacaaataatcaaattgagttgaattagttaattaattgtcaatttttttttttcacattcttaatcatttttttttgaaactatacacgtcattgaattcacgggattatatatcaatcagtttccaagtcagaaatgttagcaattttcacgggctagaaaatcagttgatagttttaatttcgaattatttcatacaagatggcgtgacgtgtccccatattcagggccttttagcacataagctattattctaagcccaataagttaacccgggtcggatcatttgacttaatcggatcctaattttggtaggaaatttctccggccgtgatttgttggacgcgtcgacgtcgatggggatgagaagtagtggagaatccgctcacattgggattcgtcattcttcgtctaaaacccgcaaaatttctccatttctaccataaatatccaacttttacttttctttcctctgaaattatctgctcaaatctttggttcacgacggagatggcggcgatttcaggcatcttctctggtacgttgatgatttcacggcctttggttactcttcgacgctctagagcggccgtttcgtacagctcctctcaccgattgcttcatcatcttcctctctcttctcgtcgtctgctattaaggtgtgcctagctacagctaatatttaattgatttgttcacacgtgattatgaaaaggatttgaattttgctgtacttttgtttcgtccatttctagtttgctgaaaattggaacttttttgaaaacttcaggaacaatcatcgagtccaagcaacgattttgcaagacgatgaagagaaagttgtggtggaggaatcgtttaaagctgagacttttactggtaaagaaccacttgaggaaccaaatatgagttcttcttcaactagtgcttttgagacatggatcatcaagcttgagcaaggagtgaatgttttccttacagtaaggttttataactctattatttacctgaaacgttatgtcttactagaaatatagattggttggttgtgttattttaccggaagttatttcatgtcttctgattgaagccttgttttcgtttctc

SEQ ID NO: 43675 - DNA, 338 bp, Arabidopsis thaliana landsberg
atgtccattcccctaaagaggtttcccactctctctatgtctctctaactccctttaactagatgcatgttgttagcttattgggctctgtaatactaaacaagtgaaacaaaagggattcaggctgagatatcggcgcgctacaaaccattgatcaacacgagtctctagatacctgaactgaagcaggttcaagagatgaccttcaaaagcacttgcttactttaacaccacgcggcatatcttcctctactacaaataagttgccaagaaccgtaccgatagaacactggtatctcacaagggtccattctagctccattgcacacacttgagcc

SEQ ID NO: 43676 - DNA, 637 bp, Arabidopsis thaliana landsberg
aatgtttactaggtatcaaaatttataaaatttagttgaaatataatctcttttttttatgtatgctatgttaagatgtggattcattgttcaacttgtatcctttccgtaaacagtaatgtagtttaactacctatatatatatagttgaaaaaataatactaagtgataagaaaccacattatacaaacaaatcaattaatactggcatacgactctcaacatacactttgaactatactatatcaaaaaaagaatatagagttattggaatgcgttggccaaaaaaaagaagaaaaaagagaaaatcggaatgcatgttattattttttagaatttatgttgatagttagaatttatgttgatagtattatttaaagcggggcccacttagagggttattttattttggcgtgaacatcgtaacattaaacaagaaactaaatgttggttttggtcctccattacgcaatataaaaattaaatcgttggtctaatcatatttaagagcacaagagatgttatgacttaaatatattaacttggtgcacattttcttgccattaagttatcatctaagaaataaaattagttaaatctcctaacattgtcactaaacttaaatcttatttttaat

SEQ ID NO: 43677 - DNA, 782 bp, Arabidopsis thaliana landsberg
ggtttagattggtctatttgtacaattacaattaatttttctattttgttatataaaacatgagtaagaagttaggaagagggtgtcattgtctaatgatcttgaacagaacatattattctttatgtaattaattgatcagtttaatagtcaattttaataattaagtatgattaaaattagtttatatcaatcatttaagaggaaagatgaaaaagcaaaactcttgcttagccatgaaaataggtggagacaatgttataattagctctctataaaacaagccctaaactcaaggtcaagacaccaatttatttaattataattttagatcttgaaattttattattattatttttttcccttatagttttattatttgttttgcttagatccaccggcaaaatcactgagaacaaaaaaaaagctcgttgtgttgttattcctctcatttgtttcttcttcttcctcagctcctttgattttgaatcttgatctgtgaggaaggctctttgaaatatcttcacaagacgtgaatttgaggcgaacccttttggattctcgtgttcaattgtttgaagcaacaatctcccagaggagtaaggcgggaatctcaaaattcggattgggtggttctgatatccaaatgcggtctgggagaagaccacaaggaagaagaatagctataaggaacgaaacagagacggaattgagatcgagaatcgaagagaaatcaggatcggagaagcggaatctgatcggatctgatgttgggtttggga

SEQ ID NO: 43678 - DNA, 543 bp, Arabidopsis thaliana landsberg
aaacacaaacccaatgttttatcttggtcacgtagagctcctttatcttccctgagcgaatacgtcttctacgttttgtgaaatccgtagattttcttttcgccgaggttaggatatttagtaacattaataattaagccatggcagtatgaaagagtgggattcatatcttagcacacttttgaaagatgtgagccaaattttgatgtagagagacaacaaatgaaattaacgaatttgcatttgaaacatatatagatcgatccattgataagctttaatgatatgtagaacacattctctaattctatgagatttgtaatgaagtgataaaccatctttacgcaaaacacattgctgtaacgtcgacaacaaatgaaggatggctttgttaaggtgagttaaaaatgatgttggcgcatcatatgtttctttaacattaatagacaaaaataagtaactcaagttacgttttgatgaaaggaaataaagtcgtaagcatgcatctctttgacatagatgttgtgttgcatgataccaaac

SEQ ID NO: 43679 - DNA, 468 bp, Arabidopsis thaliana landsberg
tctaagtacttcctgttaaccgttgttgctcttgcaatgtcgtcattaaacttgttgcattttgagtaaaaccagtcatttctactcaatataatagtagtattctcatgtccttggtagaattttggcaacgaccctgtagaaataacgaaatccggtttaactatttgaaccaatttaaaccgaccaaacgaacagattttaatttttaacgtaccattactgattctggtttgcatgtacaagacactaatcttgcttccatcttcatagtaaattccaattttctcgttgggatttttcgcggttatggtaacgttaaatgcggtggataaactcaagtcttggtttagttgaaaccgggtgagctgtaaccggtcaatattgctatccggaaattttggtctaaatacaaggtagaggataccaacgatcgcttctacgatgacaataaggcgaaagaggact

SEQ ID NO: 43680 - DNA, 590 bp, Arabidopsis thaliana landsberg
attttgatgaatctaaaaaattatttattttcaaattaattttgggaaagtaaagtaggtttataaaattggagaagaaacacccaaataggaaaatgaaattacttaagagcatcaccaaaaaaaaggaaagtgaaataaattaagagcatcttacataaattgaaataaattaagagcatcttacataaattggagaagaaacacccaaaaaggaacccaataacaacaacaaacgagaattgatatacccaaataggaaagtgaaattactatctataagccacattggagcaatcgaagcgttgagattctagtggatttcgtgttggtgacaatgaaaaagcgttcgagacgaaatcacgcaaatgattttaggtgaagttgttacctaccattatttggagatgttctctaattataaagagagcttgtgttaaaaagactattttggtgaaagggtcggatgaaagaggaatttatatgaaaatgaaggtaaatcaatagggagaagactagaacatgaggagagagagattgagagagaggaaaataaaaattaacatgtcaggaaagggcaaaatcggatc

SEQ ID NO: 43681 - DNA, 1093 bp, Arabidopsis thaliana landsberg
agccggcggtggagaaaaaagggtcttcgtttctcgatttgaatagcttcattgttttgactttagtaagaaattgaaaagtagttcgattctgcttagtctttgtcttggagataagagtagacctgtgctacaagaaacatatatgtatcaaatataccatttgtcttcagttccgagtctcagaaatgttactcctaaagtaacaaaaattgcttctgaaaaccgaaaattgacagagaatggttacatatatacttatatcaatggaataaatagatttcgctattaactatggcagattcagatctgctccatcactgctgcttcctagctatgtagagttctcggtttcccgtttgatctgcagcgcagcccttacaacgtttcccctttgtaaggatcccaatcttcttgcacggaaagcaaaaagaagtgtttagaaactgaaaagatcagaccaaaatcaaactgcagaaagaagaagaattgggatgcttaccagttttccatcagcatcaacaacgggtaatcttcggaactttgtttccagaagcaacctgaagaccaaatggttacagttcttgtaagaacgttgcttataatgtccccagaaaaatcttattgaactcattcctcctaagcctctcaaattaatgtttgcaaagcgaaaacataaagaagaagatacctggctgcatcttctaaattggtagaatcacggacaacgagaggagacggtgtcatcaagtctccaacaacttttccatatgtcttactgatcagtttctgtagttcgttaaacgtctggccaaaagagaattcaagcattatataagtaaacctcattccaaggaaattcatgcaaatgaaacaaacaatagtcctcagataaagcaaaacgtagataaacagatagggagaaacatactttccaggtactgtcgacatcagggaacaagtttgtatcattttgactgcgacctgttacaaaggacaagaggttaagttgttttcaccaaactgcgccatacaaaaccataaaacgttcatgacaacaaaactaaacatgaaagctatggtaccagcaaaa

SEQ ID NO: 43682 - DNA, 860 bp, Arabidopsis thaliana landsberg
caatgtgttcccagagcttgttttgggaagttttgctggaatagtctctctctctctctctctctctctctctctctctccatctatctctttctctattaactttcaaactattttcatcatactctcgcttttagactgtacaatttagtgatttctttacattattatcctctgagattctttgtaatctttatttattttattattccgctttctatattccgtttcatcaaaccatcactttcattgaagcttaatgcctaatacattcaccagatccttcattgcagcttcctatacataaattttagtaactaaaagaaaatcactggagatctgaaaccactgaaactgtattgtctacgtaagcaacataaccgctatagtaaactgctactacaacgacaacaacaaaatacacgaaagttcggaattgccgaattggtatgaattgcgaagaactaaaagatcaaatatggttgtaaaaacaagaaagggttccaaggaaaattgaagtgatattcataaacaaattacttggcctctctgatcgatgacagaaacagaagccaatgtggatagatcatactttactggctacttttatctatttacattcctgctgctgcgcctttgttcttattgtttttctcaaaatctttcttgtctcctttatcagggaaaacgcaagaacacgcaatttcttgtctttagcttcaaaaccatcccaaccaattcattaagctgtcctcagaagcaaactgcaaaagccgcaaaagatcttagttttaagtttctcatgattttctaaatatataaagtaagtgtgtgtgtgttttatgttctcacggaaagta

SEQ ID NO: 43683 - DNA, 626 bp, Arabidopsis thaliana landsberg
ttgtagaagacgcgtccctgtgcataactacgaacgcaatgaatagtggagaagaggaagaaatgtaagttaaaaacatacaatcgcaatcataggctttgttaatggtatttttcttttcgggttgatgggtctcgactcgagattatgtctgaaacttgttgatgttcgatcttttaggtacctaccagacacgatcgatgtcggaaccagcaatccacagaggtcaacaggatgtgaatgctgaaagtgttcatttgacctatgctctctcatcagttatcccactctgaggttttttaccatattgtaaatctgttgttctgtggtacattaatattttaaaaatttagaaccctaataaataaataattaaaaagccgaattgggttggtcggtgtttgtgggtggccgtatattatggatctctctttttctctacactaacgttatttgttgtccactacatttatgaaaagacttaaatggtttcttttttcattcttgtttcttctcatactttgtctacctttaaggatgacttatttataattgatccaatgtagatttgaagacgactacagcatatggatataacggcatattttatgaatgaataatattat

SEQ ID NO: 43684 - DNA, 219 bp, Arabidopsis thaliana landsberg
aagcatcatgaccgtggattgaggatatttgctggcagacatgagaaatgaggatccattgtggacactaatgcgatttatgcctaaaaccatgagacatttgaaaactacttctttatctggaaatcctccatggttatgcccaatactggatcagacataaatgcaaaactgtttcaagttcatctctgggacacgtgccttggcctgaaattgatg

SEQ ID NO: 43685 - DNA, 928 bp, Arabidopsis thaliana landsberg
cccacttatctttatgtactgatcaaaaaaaaaacaatcagacgtgttcttgatcacttggtatataacattttacgcctgcctttccatgaagagtctactctactgctgcaggaaaagtatgtacagtgaaactttaggtgtgaacttggccgagatttgtttggatttcggtttggtttaacaaaaaggttttgtaattgttgtcatgatgtatccgcaactgattaggatgggaggtcgaagacagaatcaaagagtgcaaacaaaaaactgtacaataacgtttcctctctttgcatctctcctcatcttcaaatgaatctatgatctaaatgaaactaataaagagaatttacagaaaatcatattcacaagactattatacaacttaattctgttttcttaactgcatatatttgttattttgaatttcatgataagttaaaaaagaaaaaaagaacccaacagctactaaatacgaatatatgctatttttagttaaatatagggagatattatatcaagtaataaagaaatattaggtttggttttaaatcaaaagagaaaaattaggtttgcacacgaacgatggtggagacatgaagaacatgctggtgacatcattgatgatggtgatgggttacacgtggtatggtaagggagttgctgagtcatcatcccttgggatttgatgtattccgctttatcttttggcaaaactttgttcgcattgggaacaagatttttccaactactttaaagtgtcatcatcagccaataatattgattattcaaatagcagattaaatatttactagtttatggagttaacatggaatttaatattattaaatgggggaaaatatgatggtcccccgccttaagtgccatcctcttagtcggtaacaaacatgacagccttaga

SEQ ID NO: 43686 - DNA, 634 bp, Arabidopsis thaliana landsberg
ttgtcaactctcttcacgatcttattactttccaattatatatttcccaaaatatcttcccgaaattttgaaattaactccgacgaccaaaagaaggaaactgaaaaagacaatgagcagcagcagcgatactcatgccggagaatctcgtcatcgccgtaacccgatccggtggctactcggtttcggtttcttcgtacaaggattcagaggattcccatggcttggagccaatttcttcctcacagaacagctccgtgttaatccttcagttcttcagcttcttcaaaactcagccaatcttccaatggtcgctaaacccatctacggcgtcgtttcagactctgtctacttctttggccaacatcgaatcccatacatcgccgttggaggtataagacctaaccacaaataaaattgatagagaaagaatttggaattgtgattgagagagatcatttgttgttactattgcagctttgttacaagcaatctcatggctagctatagcattcttgtcaagatccaatgtatcaatcttagctctatcgatatatcttctccttagtaatctcggcgcttccttagtagaagtagcgaatgatgctattgttgctgaatccggaaagcaaaa

SEQ ID NO: 43687 - DNA, 884 bp, Arabidopsis thaliana landsberg
caaataaaagatatgacacctaatccatttattgccaattaattttgagttggaagcttatattttaatatagtatcagagcttgatccacaagttgtccagttggatcctcaatcgactcgacccaattttattcgttgttctttggtcaaaatacaaagatcaatagtttgaaaaccatcatcttgaaggagcgtattaagaataataaaatctcacatcaaaattggacaaagatttttgacattatataaaaatatgagctaataatcattgctaactgattttgaactggaaatccatgtaacttattagtataggtaaactctataaaaaaatattatggatcacgagatgacttctattaagtacatgctattatttttattttttggttttcttaattttatgaagaactgttgatttttaatagaaaagttgattagcatttacataatagaactctcaaacgagggttaggctgatagcctgatacaatcaaatggcatatcataagatgacaatctgataaatcaaacaatgttaacgatgaacgatcatgcatatatcattcaaagaaaactatagctccgattatttgtcaattcataattctcatttttatgttgaagagttctaaaatgtactatataatttttcttttttcgtcattccactagtttttatttgtccgccgtcactaaactaataattagttctgagattaagaagattcgaatcctaacatagtacattaccacttttacaaaaggaaaaaaaacattttacagtagccattactagataaataccctatgtcccattaccacttgtaccatattggagtgaatcatgcacaaacacaatagtcatgactatatatt

SEQ ID NO: 43688 - DNA, 967 bp, Arabidopsis thaliana landsberg
cttgagttttcagaaattctctcgataatcttcatcattaatactctctgatttctccgatgatcatctttattggttcttcgcaatttgttttcggttctgcatcattacttctctgtctcctttcgtttcatctattttttttattgttcgtatgaatttcagctcactttcacgaatcacgatttaatctacgaatcctgtcttttctatatcgtcaaacattttaattttgtacgtcgaaccatctttgcattccattgctttctgaactacaacacaaacatgtcactcaaatataacgttacggtttatatcctaaatttgatctttaaaaaaggatttaaaagtaaaaaggtaaaaggcacacgtcatttatactggtttatcataaatataagagctacgtcaacattttgtcgcgtcggattttactatgtataagaaaaaacagtttcttaatgtttacttattactctctctttagcctcatctagctctacaacccaagaaaataatgacaaagaataaataacaaaaagaaacctaacctaaaatatccttaatgaataccttgattaaaaaaaactagatataagattccacatatcaacttaaaaatggtataacatttttttggtattttttgttcacaaaatatattaagataacatttattttatattttcattgtaattccatgaatataatagggaaaaaactatactagatatttgaatatatcattttaatgttttttttttaccaagtgtcaatatatagctcaagtggcaaaatatctcaaacaaaacctacaacccgctggttcaagtagcacgtacgagaaacccatataaaatatattttcttcggcttgagaggatatacaagtatagactcagaacctcttagcaataaaatggaaacaaagaataaatttctttttcttttttcccaatttttttgt

SEQ ID NO: 43689 - DNA, 515 bp, Arabidopsis thaliana landsberg
aggttttcgcacttgtacctgggattcaagctcatttatctgtcttcttagttctgaatagcagaaacttagaatgagaaacaatgtgacacatttcaggggaaaagagaaaacatcgtgtgggtttcttaccacttagattggaactaatgtctctgaaaacttgaggcataccattctcatccgatacagtcacgtcaggtgttgaaacctggctgagataatcgacatttctccagaactcttctggtgtactactgcagactgatgcagggcttggaggcacttctgttgaattctcctgagaaagacagaacttgttttagtttagactataagtaccaagtcattgatagaagagagagttaagaagttcttacatttcgatcgtaaaagttgttaaacttcgatccggtcacgaagtctttgattgattcatcctcgaaactgtttgattcgatcattgaacgtatcttcttaccaaagattcttcctctaagagttgatctaaagct

SEQ ID NO: 43690 - DNA, 718 bp, Arabidopsis thaliana landsberg
catgtgtaatctgctctggacaggcttgttatctaatcaaaacgaaagtgcagacacattattgtgtcttcttgtttatatatcttcccaagtatgaacaaattccattctttcaatggttttagggttctgctagctgtaacgattgcaaaggcacggggtttcgtgccaagtggctggaaaaacctccagtgccaacatatctgatgaacaaaagcaagttaagctttttggtctttgatgatttcttatggaggaaaaatgtttatatattgatacaagtggaacatgaatcacatatgcctatatctttatacatgtgttaagtatatatatgtaagttcatttattcatttccccttgttctgtctggacaaccaaaggcctacacacgagttcttgttatgagcacgggagttttacgatttcgatcattggagtagctcaacggaagaacattagtagcacaggggcaccttcgtatttcttttgatattttctcgttgtagggttaaatcatgtgcatcttccttacccttgatgaatctggatatggcgtttctctaatagaattgcgattatcatcatcttagatacagtttgtgcctaacaaatccaacctaagctagttacctaatcattttctttttgggaagtgaaaatggcatttgatttcaggataattcttaaccaaagctgctaagtgaagaacttgtgt

SEQ ID NO: 43691 - DNA, 249 bp, Arabidopsis thaliana landsberg
caaagactctgggatccactccgatcagtgcctgactaaaacattgttactcgcctggtggttggaagcaagtcgacgacaacaaaggcccctcagggagccagaatcttggtagccagcttgttcctactgtcaatggtcgtggatgggtttctatgacgcatgagatcacaaggactgcgagtaacctgaacatcaatctcgagatgaggcagaagggtagcagcgctcataatctgatgaggcaca

SEQ ID NO: 43692 - DNA, 701 bp, Arabidopsis thaliana landsberg
agaaaatggaaacgctggtacaatataactttggacggtcaacaagcaatggcatttggatgaagatggactgatattgcataatgtataatttatgaatggctctcaaaatagttgcttaggttttagtatctttgacaaggcccagtttaactttacataggccttcttgggacttggggtttcttgggcctctatcggactctagaaacaagttaaaacatgatttgtatcatcgaacgtacattttgacatcatccaccaattcggccaaccacttccataaatcagctccttgtaatttacaaatgtatcctgctaaattccaagatcttacccactaggtaagggtaataaagtaaaattggcttcacacgtgagtaagtaagttccagttggaagatctaaaaacatgtggaagaatgtgagagataggacagatggaggactttgcttgaaagcaaggaacccacaatcttacagttacagccttttcacattttcttactgtcagttacatttgtctgtactttataatcgttctatttctttctatatttatctctttccaaaacaatttttacattgttttcttaacgcagcttttagcttattttgggtaatggattaataaaatgcagtttcatttgttgtcacacacacaaaagaggtcaaacgcagtttttttttttggcagcttg

SEQ ID NO: 43693 - DNA, 628 bp, Arabidopsis thaliana landsberg
tattattatcaccaaatttaatcccaaatctatctctctctctctctatttgctaccacatttcgttatttcacttttataaactcccttattaacaatattcacatcatatcataatatatgaccaaatcaccacttgttttcactgttttttactttagcgataagtttcatgaattatcatcattattctcagataacatgatttttatttaagagatcataaagtcattatatgattcaaatatctttactttactagtgatatcaaagaaaatgttattaaatcaagttaattcaaatgcgtttttgttgtgacctacttcatgttatgaagaaatcaaatatttttaaatgatttccatttttttaatagctaattgtttaggtataacaaccaattaaaaaatgtcattcatattacgaccaaacaaatttgatattcatatatatatcacccatgtctttcgatattggtcttctcttttaatattgtctaatatgccgcggacaaaaaccgaatatgattttctctgattctctcttctttcattaaaattacacgtaatacaattcaaaaattattaacggaaaagcttatctaaaatgttttttattcaaaccaaac

SEQ ID NO: 43694 - DNA, 542 bp, Arabidopsis thaliana landsberg
ggagaagttggtttctaagaagaaccgggttgcttatgcttctcttattagtctgcatgcgaatttgggtgacaaggggggagtgaacttaacctgggggaaggttaagtcttctttcaagaaaatgaatgatgcggagtatctcagtatgatatctgcggttgtgaagcttggagagtttgaacaagctaaaggtttgtatgacgaatgggaatctgtttcgggaacaggagatgctagaatcccgaatctaatccttgctgagtacatgaacagagatgaggttcttctaggagaaaagttttacgaacggattgtggagaaagggataaacccgagctattctacatgggaaattctcacatgggcttatttgaagcgtaaagacatggagaaagtattagattgttttgggaaagctattgattctgtgaagaaatggactgtgaatgtaagattggttaaaggagcgtgcaaggaacttgaggaacaagggaatgttaaaggagcagagaagctaatgactctgctccaaaaggctg

SEQ ID NO: 43695 - DNA, 600 bp, Arabidopsis thaliana landsberg
  unsure (1)..(600): unsure at all n locations
tagctacatcttcaggacgtacatcgctaggaacgggacaattctccatatcccagttatatggctttaggaccatctgtagaagaatgtctttgtgttgcaatcatgtttaaatccgctaggtatttgattcttctttgttcatcggaatcaatagagactaaagttgttgctgctgctgatggattataataacttgacatagcgttttgtatcatcaaaggttcctggaaatggaaattaaacagatcagtgaagattatgaaaggaagttcgagaaattgcgatgaaggagaaagtagaatctattgatttcgtcatttcgaaaccaaatttaccagattcaggggagagataaggatctcgtagacgatacgaagacggaatttggaaaattcttcagattagttgttgattcttctcgatcttcttctccgacggattttgggaatttttagggttctacaaaagtttttgcgtttgtccagagaaagcatataaagagagagtcggtggtattaactagtttttattttgccaaaagaatatccaataatanatgtnttgatctttatgaaagagaatagttgcatatatgtg

SEQ ID NO: 43696 - DNA, 631 bp, Arabidopsis thaliana landsberg
  unsure (1)..(631): unsure at all n locations
cagcttcctgtaaaatccaaaattaaagttataaccaaatatgtgaaaatggctggttataaattataggttgcagaagaagaagtttacttgtatattccctatgtcacgtaatggttgtttatttgcgcctttgtcgtcatggctaattccagcaggcttcttaacatctattggttccattggtttgtcgggtttcgcactttcgtctctgttgctacatttggaagctaagcagccacaagagtccccacatccacttccatttgccttgcatttgcaacttttggtcttgcacaaagattttttagtgcaagagcaacacacttctgctttgctctgttcctttttgcaaagtgtttcctcagaagtttccggttgaaatggctccgagtttgattcatcgtcgatattcttgctggtgatagagcgttccactggttcgctctgatcacaacaattggaatcgaaaaatcagacaacaaaccaggagaaaaattggcatttgttattaaggtataaaattaacctgaactttatcagtttcactgaattgtgatttggtcatttccatctggctgacaagagtactcagtttgttaaattcctctttgagttctttagntctgag

SEQ ID NO: 43697 - DNA, 1863 bp, Arabidopsis thaliana landsberg
caacagaagctatagtcttttgcttttccaatttaaataactatttactaacccaaaattgctggcagaaagcaggaacaactaggtgaatctaaccaaacaaacatttaacctaactataactaaaaggcaaaaaatataacaacaatattgattacatgcaaaatatttgagatgtttacaaacgcccaattgatcagcgttccatataggacccacacggtatctgaatttgattctttgtcacaaatgtttttattttgtcttagcggcgaccagattttggtttaagggtttcaatttatatctctcttacgtacgtaccaaaaccggcatgtattaaaggctttctttcccaaattacaatattacaaccataattagtagataaaaaatttttattatagctccaatgaataaacagcaattatgctaatcaccattcgagcatttcttagcaacaataaggaagatcactcaaatcagaaacaatacggatagttcccaaaaatgcacaaaattaatcaagacattgatgtttaacttacattccaacttcactatcatccaaattgaatgcttcaataagttggtaggtctaacaatcataaaggttatgaaaaaaactccacgcttcattttccatttgcgtatggacgaaaccaggtgtattgtatataatatagtctcaaaaatttcaatcttaacttataacagcaatatatctcacacgtctttttaaaacgaaataataaagaatgtttttatttccagcatttcagcttctttgtagcgtctatgatgctttgcttcgtttccaatctctggcacttgagcaatccctccagtataattgcagattctggaatatcgttctcgctgattacagattcagagcaaagcccaaagagcactacgtttacgtcatcttcctcctctagttgcaggccaaataaatgatcgaaaaccttggcaaaaaacaaaacaatagagatcaattctatgactcaatttccgtgcaatagtatcagatcagatttgtgaaaatatgcagagaatttacaaggaatgaatcacatttgctttacctttttcattcttgatactaccatatctttgacggactgtgatctcgtgaccaaattcactatgaaaagaccgtgctgagggagagcttgcttaaccgaaagaagaaatgtctcttcgataaaatcagatgcagggcaggttaatccgccgctgcagacaagagatcaaacaagaaaacaatcaggcttaccatgtgggtaaattcatagatatgtgaatttacttgccatgtcttttaccttgaatctgctgaatccacatctataattaaaatgtcaggacaaattccaccttgtgtattgtgagtggttgaatctccatttgagccaatgtttgacgattcctcagacgaagcttcagagtttgttatatctctaatgaatttgatcccatcagcaatatgcacctattataagaatgcgaacgagctgagtgatggtgcatataatagaatagaatataaacatgttaaagtttaaccagcacttttgttgtaaagagggagaattttaccttcaagcgatcattttgtgtgaaaccaaagtaatccttgccaacactaagcattactgggtcaagctcaaccgcctattcaacaagatacacaatatgagtggcgatagaaaatactcaaccgggataaacccttaaactaaatcccctaaatactgaaaaaggcaagcatccatggaggaacatgggaagtaatcctgctccaagaccaattacaacagtcttaacctgaaaagcatcagaacatttctggatcagtac

SEQ ID NO: 43698 - DNA, 145 bp, Arabidopsis thaliana landsberg
ctagctgaatttaaaaatgcttaggagataataatatggagatttttaatcaacctaagaaataaaaaataatgggggatgttcttgtctgtattgggaaatgaatatgatcaataatgcaaaaacaattctatcttaagaaaaa

SEQ ID NO: 43699 - DNA, 811 bp, Arabidopsis thaliana landsberg
  unsure (1)..(811): unsure at all n locations
gttggctgacgttgaagctgccgcttgtctgtgttctgcttttaaaaccagcattctcggagttaggcctgtgtaattcccgttgctctcactctccttctcaactcttgcggcaaaaatgttcctcagggattcgtctgctgatattattatgtgtgctctgtctcccttaatcaaagaaagaacgttccgagactcagagatagtgccttgtgttattgtatttgtttatgcaatatttgcaaaaaagagttatgttgtggttaatttgaataatacagtcctaaatctttgtcttaatcacgtaccaagtaattgatgaatgattgtggtaattgttaattacttcccgccgatcttggttggtttttttatcataattattattactttggctctaatgagatgaagaaatcttctctatttttctttatccttatcagtcccatgtgatctcctaataataattgatcaatttttgtctaatctaactagtcattatcctaaaatcttatacaaaatgaacgacgcaatcatttatatatggttatatgcatacaaactctaacacgtcatccttcaatataaattaatgtttgacaagattaatatatttagctgacttttttgtttcttcctctaattatggcaaagcacnnnnnnnnnnnnnnnnnnnnnnccgatttaggagaacaaattagctgaaatcttcttcattttataaagggttgtatgataatgtaaattttctcctagctatccgattgagtggggttgggtgtgttgcttgagaacagagaaaagaacatgt

SEQ ID NO: 43700 - DNA, 1720 bp, Arabidopsis thaliana landsberg
aaatgtgttgtcaactaattgctgtgaaaggatcacactgaacctcgagctagctggacatatgccttgttctagtatgaacgaaactttctctgcaacgccgagaagcatgaccatccatagatataggtagaaatctcctagttgattgattgtagatttttttttgctgacatgtgtatgcagtctaagctaataagacaggtattttgttggatgatgtgatcgtatctgtttaggagaatcgaaggctgccctctctagttttcatcatcttttttttttttttgtaatctattattcagtttgacagaaagatgtcttacagctgttttattggaatttgtataggatgaaaagaggagcccttagacgaagggctagggatatctctgttatgcttgttgtacttgtttgtgcaactgtagtcatatggacatgggatagaactccaacctcggcctttcttccacctgaaagtcactatctaaagctgcaatcaggtttaactatgacattaagctctctttctggcaacattttgttaggccgtttgaatactggaacaatactatagagactttgtttaatttttaaattcattctgtacttgacagcgaaatgtgtcacttctagtttctgctgtttatatttctcaggtcttgaattgttttttgtccaaaagtttcaatatttttttctttcacttgttgtttctcctgtttatgtttcacaaattactgtagatgtttatgaaaccaattgtacaattatattctggggtacatctgacctaattctttctcatttgcagaagaaaaggttgagaaattacctactgcgctgaatactgaaactaaagacagctactcatcagctattccatttgtaaacaaaggtattgttcaatgcatttacagaagctctttcacgcatcttgtaagctgctcaaaagtattttatgcaccctgtctgttgtattctgaatcccgggaactacgcttggcataaaaatcctccttttcctggcttttctatgacagaggaaagcaaagaggattcatccgataataaagatacagaagaagaagaggagaaacaagtggaagaagttactgtaagtaatacgaatcgagggaagataccaacgattgaagaaaaaaagggggaacatgaagttattgcaagtgagccaaaatatcggaagacgccaactagagaagattttaaattagaaaaggtgaaacatgaggttgctgttggtgagggcgaagctacagagacaacacatattaaagagactaattcagatccaaagagtaatattcttgcaacagacgaagagaggactgatggtacttcaacagctcgcatcacgaatcaaggtagagaatctttgtttcacagatcccagttttatgatgcgtgaaagtatcttacgagtgttcattattctgaaactggacatactttgtatctcggtgaaactattagttgaaaatctctaccccgtattgctgttattttagtatgattccctcctatttgaaataacatgttgttttatatttttttcccctagcttgcaattatgcgaaagggaaatgggttgtggacaatcaccgtcctttgtattcaggatctcaatgcaaacagtggcttgctttaatgtgggcatgcaagttgatgcaacgtacagactttgcctttgaaagttaag

SEQ ID NO: 43701 - DNA, 679 bp, Arabidopsis thaliana landsberg
gaaggtcacgtatcgtgatggctttgccatttataattttgttgaattgaaaatggactgtatgttttagccatttcactattattaatgacaaataggaatcaaataattcataattgttagttattccatcgcaattaaagtccaagtaaacgtacatatggtactagagttaatccatcgtaactttcatatgtttttgcataatataagatgtttttttaatccaaaaagccaaccctcaaaaaaaaaaaaattaaacagaaaaacaatttgcacaatctataatggttcacaaaccaatgtgaaacatcatattgagaagtaacttagcatcaattctaagaatagatataaaccagaaaactataattataagaaaattatgtagatgataacatattgataatagataatcaaaatttataagatcagaatccaaattgtgtaagaacctctaaagtgtataaatttaatatggtagcagaaaataataacaaaaaaaatcagatttgaaagaaacttgcccccaagaaaaaagaaagaaagaacctccagaaataaataaaaagtgattccattttttgtatatatttgttccatggataaaataagggaataaaatacagtaattggtggatgggaaggataaaatatgaaggtgccttttaaaaaaaaa

SEQ ID NO: 43702 - DNA, 819 bp, Arabidopsis thaliana landsberg
aaaaaaaaaaattgaatatcataatcaatgaccttttttttttgggtttttaaataatttggttgaatttcccgcccgttgtcctatataaatgccgtctgaaggggtcccaaacccacgagtcgttataccaaacagtctagagtttatcaaacttgccagctatatatatgttggttcattagttgaatttgaaaataatgcaaagaataaaggaacgagaaagtaacgaaaacaaaaaaatgatcaattcattaattaagtaatgaaaggacattgactaaggaaaccaatacatattaaaaaaaaaaaacggaggagatgcaacaaattacaaccttcaatcttgattttaacttgagaaatcttttcgctttcttttccttgtagatatcagtccactttgcttgatttgaactaaacttggaacatagttgcatagatatgtcctacctaatacgtatgattctggaaagtagaattctctgtagactttatccttcccaacaattaataccaatgacttgtaggtattttctctgtgtttatcataacacaaaatgatattctttttctcatcgatgaagaaacttaggggagacttcttcatcatgctaataggatagtctaacctattgattaatctcactgtgaagaacttgctccatgaccaatctgtggtgtcatcaattttattggtcacccatatatccatcttttctgtatcaaaactctgatgtatcaaatctcactgagagttgttcttctctaaaggctgatagagccctagaatcattgtagtcacatatgccaaacgga

SEQ ID NO: 43703 - DNA, 502 bp, Arabidopsis thaliana landsberg
agaaaattaaagtttaattaataatcttgatttgtactattttatataaattaatctgcagacggcaccatcattcttgctacatgtcatgttcatatcaaaagcaaagcaaaaaagctgacaaaaaagtcaaatatattttttactaagaaaattcctcatttctttattgttttgttttcttataaaccgaggaatttccgccatctctctttctctctttcatcgtcctcaccggaacgcgcctactctctttccacatcgtacgtttcctctctctaaattcttcaactttaaaggtgataaaaattgaatctttcccacaacccacaagaaaattcgaatcctttctctctttctatctctaagacacgctttcgatcagcaatctcctcgaattctggttggttccgtctctgttttctgtacacaaagccctgctgctgttgatacacgtgagccgacattaatgcccctgtgttttcttctacaggtacgtttt

SEQ ID NO: 43704 - DNA, 922 bp, Arabidopsis thaliana landsberg
cttaacatcactcacgttttaaacataaattcacaaatacgaatctgtaaaaaaacattaattcatgatgtagcacgggggtaatatatatgaatctagttatcttataatttcaaagaaatttacatgtgtatacacataagattttgttatttttagtacatctcatttttcaaattttgatttgaaaagatgatgacttgctaaaagccactttgctaaagttccaaagcagtcgttatattttgttggtaagacacgagattggttcatatcacagagtgggagtcggagtcgtgaaatatcgtctatgatgggaaatacattactagattgcttttagtcaagatgggctgccatattatcatatttcaattagtgaactgctaattaactctttctttttatatgatagttgatatgtttgtttttgttcttactaaaaaaatatataaaagaaaatgttcattttaaagaatcatcatctgaatagccattttgagaattataacattatgaacaattaggaaaaggtataccacaagcccttatgacccttttagcatttccaatatattgactaatcgatggacttatcaagtaagcacacaaacatgattgttgttcttttaacttttcacaacattcttctgacggtggacttcctgttattatttccggcttgcagacttgaaattttgtgaaatcgcatgtcgctttcacttcttcccccaaaatcaacgttttggttagagttacagatgacaagatggagacaatgaatactagtgtaatgaatctcatgtcttgtaaccttcacgactcccttctatataattctattacgattgcttgaaaatgtttgaaattttaataatgagatgtcaagaaggatggtgaagctatatacaaaaagtattaa

SEQ ID NO: 43705 - DNA, 657 bp, Arabidopsis thaliana landsberg
ccgataaattaaactgtgcttccttcgtttttaacaaatttatacgtaaaaagtcaagaaagagtttgcactcacccatatctccaagcaatttattataagaaaatccttatagccaatagccaaatcaagtttttaaaaaggtttaaagctagaatacaagtcgctgtagacgcagccaaatacgatattatttactaaaaacaaataaaaggtaaacatgcagaacgagttagtcgatttgttggttcactgccaatttcaggttaagttcaatttactcaagtaaaagaaattagttgtcaattttatctcgtgtatgggcttgcttggttcaaccgcaaacaaaaagaagaaaaaagtgagtttagatattaaaatggtgtatttacatttgtaacacaataccgtaaaaacaatccatgttgacgtaatggtttcacatacgataaacacacttttagatcatgtaaaatacaaatgcatgtaaacgtagattttaaaacacaagtccatattctctatcaattttgtgttatcacgtttacaaattatgtttgataaaagaaaactaaccgcattttaacatataaacacaaaaacaacacattcaaaagacattcaaagtcgttgtatagtcttaaaaatttttacgga

SEQ ID NO: 43706 - DNA, 578 bp, Arabidopsis thaliana landsberg
ctctcgtcgcctccactcgcatttcactcttcgtttctagtctccgacgacttgcaactttgtttcctcttgcagcttcaccgagaaatcattatcaggtaatttctagggttactctcctatattaggttgatctctttcaccttatgttttgtttgcctttggatacaaaccactgttatgtagtgtgaatttacttccatttacagtctataaatgggattgtatgtgaatttcaaatcagggtctataacttagattgtttgattgaattaagttcgattttccttcggtttatagtgtataaatgagtatgtatgtgaatttttgaaatagggtttataactgagaatctgagattgattttctgatttttttttttttttaaaaattctcatatcatgtctgaaactgaggatgcttacgagtataaaatctgataatctgccaaggtgttttattttatagatggactctacaaacccgaatgaaaaatatggaaatgatcatgcctttgatgagggaatctaaactgaagagtgtcactctcctggaaaatgtaagcaaaacgaaaggga

SEQ ID NO: 43707 - DNA, 700 bp, Arabidopsis thaliana landsberg
  unsure (1)..(700): unsure at all n locations
attatttaatacacatagattccattattgttatggctacctcattctattctataaatcatacatacgagaagaagaagaagaaaaatatagnctatgtgaaagataaatgaatatttcatatttgtgagacaaattaattagattagaattaacattttgtagtccatattagtgataaatttccacttataaagacatttgttcctcttttgtttttttatacgtaagcttgtcttcttattggctaaaagtagaaaacaccaacttggacaacatcatttaaattataaaaccctccaataaataaaacttggtttatccaatcatcttatttctctgtgctctccaccattttacataaaccccaaaatctctcttcatcatcatcattcatcaacatcatctctctttctctatctcgctgtccctccttctttttctcattcattgcaatgggcagaagatgctcacactgtggaaacgtaggacataactcaagaacatgttcttcttaccaaacaagagtagttaggctctttggtgttcatctagacaccacaagctcttctccgccgcctcctcctcctccctcgattttggccgctgcaataaagaaaagtttcagcatggattgcttgccggcatgttcctcctcttcctcttcctttgctggttatctctccgatggtctcgccca

SEQ ID NO: 43708 - DNA, 880 bp, Arabidopsis thaliana landsberg
tgatgtcgaggtatcatgtttattcgagctagagtccctttttcttctctaattattttttgttttttattaaataccaatactcttgatgtaatcacgacctcttgatcccttttattttgaattcaggttcatacctatgagaggctttcaccattagtccctttgaaggttcctgtttcatcagtttccagtattaaaactggggattgtcttgtcactttttcccgaaaagatatatatgcgtataaggttagcagttacttatcttgttctctcttcctgtattttgcttttttctgcttgagtttgctgcgaaagaaatagaacattttggcatcatattatatgcatacatagctctattctctacgcgtcatgagtattgaatgcttccatacatattctttactcttttttttggtaccttttcgtagaaaacaattgaacgtgcggggaagcatctttgctctgtggcttatggttcgttgcctccagagactcgcacggcacaggtttgagttccttactgacttggctataggcttaactggatgctctaagaattatctgtttttgtttccaaatgctttaaaatctgcaggcaacaaggtttaacgatgagaccaatgactttgatgtgcttgttgccagcgatgcgattggcatgggtcttaatttgaatatttcaaggattatcttctcgacccttcaaaaatatgatggttccgagaccagagacctaacagtatctgagattaaacaaattgcaggtaaattttcaacaaaaagcaccaaataatacatcaagagtattggtatgtcctctctaatgttctgatgatcctgttgtagggagagctggcaggtttcaatcaaa

SEQ ID NO: 43709 - DNA, 293 bp, Arabidopsis thaliana landsberg
cggcggatggcggcgcacggccttcacccacggggcggcgttgcgtgcggccgacgaccagtcgagggcgcgttgcagcgcctgcaggcgctcggcgacgacagcggattcaagccggtagggcgagggcaggcgttctgaatcggcgggcatggccttgcagtgtggactgtctgcgtcgcggtcggagtggcgcctaatttctcgctaaaggtgccgacatgagcctacgaaacatttgcccatgagcgaatcgacccccgatctggaccgcatagaccgcaagatcctgc

SEQ ID NO: 43710 - DNA, 624 bp, Arabidopsis thaliana landsberg
attgacttttgttggaaatgctttttctactggcgcaagtaagagccgatacatgtttatatcagaaattccagaagagagagagattgagagcaaagtttcatttgttgtgtagccctttgtctctcgcatcctcatttttcaaaatctcactctctctttcctctctgctttcatttgctttctataaatccaaactcttaaacaaaagattttgtctttccatcaacatcaactccctcataaactcccacaaagactctcactttaaaactccttcactacttcgtgttcttcgtctctttttctttttttctttcacttttccataagcaaagaaacaaaaaggatgagttcaagagtgttcagagcaacaccagataacaactatttggtccccaggagatccaaagaccaacaagacaccagtcccgaccgtaaccgaatctggtctgagcctcgtcttaaacccgtcgttaaccggaaagtcccagtcgtctattatctctgccggaatggtcagcttgaccatcctcatttatcgaagtcactctctcttcccacgatggtctttatctcaaggtaataataaatcaacccaaaaactgatgaaaacgctttttc

SEQ ID NO: 43711 - DNA, 665 bp, Arabidopsis thaliana landsberg
  unsure (1)..(665): unsure at all n locations
cctcatcacagcttctgcctccattgccttcctcttagttctgataatttctgtgctcctctgtttcatatttcacaggagaagatgtagccaagaaccattcagactaagatcaaagctttgtctacctttatcacacattcccttaactaacaaacaacagattccttataaccgttgcggcgacgatatagagagccagagaatctctcaggttggttggtcctctgctcgtctttcctactacacacgcagcttctcctctaccggcagctttggaagcttcaatgtgtttacgttcatggagatcaagaacgtgacagatagttttgcagatgataatnnnnnnnnnnnnnnnnnnnnnnnnnnngtgtatcgcggaatcttgatgggtacagtcactgttgctgtcaaacgattccttccaaggtttttacatttttgcttgatgtcctcgtatatcttagaatcttaatattttgatctgagataaagagtaatagcaggtatgaagataaagatttcattacaaaagctgagatgattgcaaatgttaaacacaagcatgctgtgagactccttggatactgcatagaaggaaatgagaggtatatagatatataacctatgatgtgtgacccccgttaaaattaatttagactcat

SEQ ID NO: 43712 - DNA, 693 bp, Arabidopsis thaliana landsberg
gactcaacatcacatatttcattcatatcagcttgttgttccactacaacaaaggcttataagcctcaacttatggttgcaagttgtaaccaatctgatacaaaagtactgaaccaatgattgaaaaagtcgtctatttttacctatttacgtacaaaactacctagacggctatgtattaggtaatctctggaccagtgcacatgaggtcctataagaaatttaataagtgatgctccattttgaagagtacatataaaaatatcttagatagcaatataaacactaactacagtaagaaatcaaaatttgaaaaacataatatgtcattttaagaaacaagtaagaacaatctttgcttcaattattcatggaaatcaatgagatatctctttgagaaatctaaaaaacttcttcttattcttgttcttctttctcccatggtagactagaaactttcttcccatacattactttttgtaaaatgaacttcttaaaaatgcttttcttttttttttactttttaaaaatgtttttatggtgatcatatgaacaagtcatttgatatattgtgagatgggaatggacagagaaaattaaagaagtgattaaaagaggatgagaagtgagaacatattgattgattcctagcaacttgcatcaaatatctgtagttgatgcatcaacctcaca

SEQ ID NO: 43713 - DNA, 794 bp, Arabidopsis thaliana landsberg
  unsure (1)..(794): unsure at all n locations
aaaactatattctaagggattagactctccgaattgatggagaaatggagaagaaggaagaaagggcacttcgttgtgtacacgaacgaagggaaaagattcgttttaccattggattatctgaatcatccaatgttacaggtgctattgcaaatggctgaggatgagtttgggactaccattgatggtcctttaaaagttccttgcgatggaagtttaatggatcacatcatcatgcttgtgagaaggagcatgtcccatgattatgatgatgtggagaagtcttccacgagcagcacctgcaagggagcttcaatctcttctctctttcgtggacagagccagcttcagtcattagtttcctaaccatttggagtaattgttaactttttttggagaagggttgttctattttgtgtataccaacatgatcttgtaataaattaattattgtaatgtatcaatgatacagtatcatcatttgattttgagtctttttttgacggttaaaacaacgatttgggacgaagttatagtacttaaacataagttttcaattcatgtatccaaacttcttaaagggcccaaaaaggaagaaaacattgtgaaagaaacagatatagaaatgggcctttggtctttaaattgggcctaagccttttaattgaggccttactaaagtgtcgactacatggttgaataaaatctcaggtagtaaattgtcaaagctgaggagaaagaaagctttttcggtctgaaattgaagtgcgaatcggngaatctagggtttcgag

SEQ ID NO: 43714 - DNA, 654 bp, Arabidopsis thaliana landsberg
caaaacattcagagaacactgcatctggtccttggcctgtctcagatttacatccaggacttgagattttagcaattgttattcaagactcttcttcaaacagcaaactctcgagtcgtgagatgaaagtcatagttccaacaggaaaccacggtttgcctgataccgaaaactcgtgtcctacgccgatactgcaaagatggagatcaggtggaggttgtgactgtagcggatgggacatgggatgtcacctttttgtccttgaatctccagaactcatcaacaatcatcatggtttggaacttttcatagaggtaagaatttgttcattgtgataccaaaatgtgttttaacttgtctcccttaatcttgaaatataaaaattctatgttgcagagtgggaaagagatcacaccagcaatgacaatgacatgtatcagagaaggacattatgaggtaaaatttcacgcgaagctctcagcattacaagcattctcaatctgtgtagccgagctgcacagaactgaagtctcaagaggagaaagaaacatatctttgtctagatgcagttcactcagagagcttattgaaatggaaactccgatgaatacaagagaagtccttccttctttcatgcctaatgtcacattctct

SEQ ID NO: 43715 - DNA, 1113 bp, Arabidopsis thaliana landsberg
gggccctcatcatcatgatgaccaccttttggtcaggaggatccacaactcgaaactcgctcttgtgatcttctctgaccaatacgcagagtcacaacagtgcttgaatgagctgacgacgatccatgagcgcgtgtccgaagggaaactcatggtgatccccatcttctacaaagtaaacatcgaagaagttaacaatttggagggacgatttggtaaatgttttgatgaaatggtgaggacacaagggagacagaatcatcagttgacccatcacatcgttggatgtctaaggtctattgctagaaagcctagcttcacgtcaggatactataggtaaaataaaagtattccaactcaaaactaattaatgcagtcaagataccatctcacttccaatgtggaatattcctaactagctctaattttcattggcagcaacgatagtgatctcgtggaggcgatcattcagggtattaagaaaaaaataccttatatatcggcaaaacaaacgattggagaagaagtttcggcagagcttctttctgcttcggttgttgcggctttgtgtttttactttatccctatttctgtgttcccggatttgggtttcttcattagcccacgttggtatctagctgttatgttgttgtttgttgtccgacatagtctccgatctattcagaggtgatgggtaataacagtggaacatatgacacttgactttcaacgtacgccatattttgcaaatgatcgatgagctcttggctttttatgcttttatgttgtatgtatatatctatgtttttttctttgttcatctcattaaggttgaaagaaatgattaatagatattatactttcaatctaaatggtaaaatttgaggtaaatcaattattcatccatttttctctccaaaagtgcaaccatttgcacctttaccttctatccgtattgaactcattagtaattttttagaactatactccttctattcctttttaattgatattttagaaaaaacacccaaattaagagaacatattaaaactggttataaatgtattaatggtttgtgaatttacattttttcctataaatttaggaaaacc

SEQ ID NO: 43716 - DNA, 678 bp, Arabidopsis thaliana landsberg
tcggcaactttttaattgacaagcttttggcatcgcgcattttgatatggaactataagatttagttcatggtgtttgcttgagattcattactgagttcaattttgagcaattcgatattcaaatctgtgagctcatattcatggcaatatctagtggagctgcttttggaattaattttgaaagggaatttttgcagtttaagaatgcaaaaccggtgggaggaatcttttttggtactcagaagaatgtggccccgatgcagcagagtccattaacatcagcatcattggataaacagagggctgagttagctaggaagcatgtgagagctcttaataaccaatttgtaaggtgaacagttgtgtttttgaaaaatattatctttgcgcttgttgggtattctatatagtttatgaaaacatatttgacttgttttgtttaaaacttcaataagaaattgcttatgctttcaatgtgaaaacagttgggtgcagttacagctgaagaatcatcctgatgaactttgggaagatgggatgaatgactacattacgcatgcttcaaacattctggtaaatactataattacatgactcttcagtaggaaggttttgattgactcaccaagaatgctaatcttctaatatgtcttcagtctcttacttgttttgtgct

SEQ ID NO: 43717 - DNA, 618 bp, Arabidopsis thaliana landsberg
tctctccacccaaaggtatgaaatatgaatagtgtacttttttgtggatagattcagtgaatctggttttgtgtattgatatgttttgttttgtatataacagatatgtcaattggctgaaacaaacccaaatgtgatgtttctgaaagtgaatcaagaagagcttagaacaatgtgtcatggtctaaacgttcatgtgctgcctttctttaagttctatagaggagcagagggtaaagtctgtagcttcagctgcactattgcaactgtaagcaaatatatctgatgatcaaataacattgtgctggttttaatatcattggcacttgggtagtaaactgaaactctttttgattgaatgtgcagatcaataagttcaagaaagcgttggataagcacggtagtgaaagatgcagcctcggggatgcaaagggattagacgagaaggaagtcgcggctttggcatcggttggtgaactgaaaatgaattctttaacaaagcatcaagctagcaacattggttataaaacagaggagcaatatcaaacgatggtgttataaagagatgacttttttcattaaggttcttattgaattgtagatattagtattatttgt

SEQ ID NO: 43718 - DNA, 1553 bp, Arabidopsis thaliana landsberg
gaccaaatatccgacccggaacagcagatcaagaacgagaaccagatcatagctgatttcgattccttggctcccaaacgacgcactaagcccactcgaagcgaaccgggacctcctggatctttctctgcttccgacaaaaccaccgaccatcctgaagctgacaaattccaatctctccagtcacaaactcatgttcggttttctctaaaactcactcttttctcttcacataaaccaacatttttcgttatatttgagattttggtttttcagggtaaagttctaggtgagggagattcatctgcagttcaagatgagttcctggaaacagagtattacacaaatctcaccgccattgataagcaacatcacacggttacaattccctctctttctcactcttgcttataaaatttcatcagaagaaatctaattttgttttaacgtgctctgtttctgagattagaccggaagagggtttataaatgtggtgaaggaagacaacggtgaagaatccgaggccgtaaccgccgccgcaatcggagacggaggagaaaaagcggtttacagaagcaatccggcgacgaacgaatggattcctgcgacggagaaagattttgattcggagtcttcatctaaaccaaaccggagcgagagttcttgaactgatcttttgaaaatgttttatcttcttgtttcagatgttctgtttcttgatattatggtaataaaatattaaataaataaaatttatggttataataatttaatagtgataagaacaactttataactttcaaaatatccatgataagaacaaatttatgtggacactgtttttttctcaaccaacattgcatatgacataacatgattacaataaagtgataaacacagcagtcccaagccagatggccaaaaaaaaaaaaaaatgtctccaaacattttgctgctaattaataaatcatgaatcatatatgcatgtaataatgtattaacttacaaatttataaaatcaaatctagacattcttattgcttggctctgatccgaagaacaacaactcggaagccatctcacgtggtctgcacgtgacaaccaatggttcagccttaggcaaactaagtcctggaccttcagtcatatcaacctgacctcctgagccgctttcccactcaaagcactgaatcatcgaacccaataataacccaacaacccggttagccaaactcaacccaggacaagcccgtcttcctaacccaaacggcatcattttaccattgtaatgtccaaactgatcactcccttcaaatctctccggcttaaatgacgttggatcatcccacacgcttggatctcgatgtatagcccacaagttaaccaacacgatcgtatcacgtggaacgttgaatccaccgattacacagtcagaagatggcacatgaggaaccataagtggtgccacagggtaaagtcttagtgtctccgacacaacattttcaagtagttcatgtttaccaaatcttcttctttcaacaaacgacgactac

SEQ ID NO: 43719 - DNA, 178 bp, Arabidopsis thaliana landsberg
  unsure (1)..(178): unsure at all n locations
gtcctgcgaatccatctttaaacattccacttacattctctgatttaagttgtgcaagctctcctttaagagtttctgcagcagcccnnnnnnnnnnnnnnnnnnnnnnnnnnnntgcctccatctttgcaattttagattccttctctgcaagcagtaccttaaagaggtgtatact

SEQ ID NO: 43720 - DNA, 237 bp, Arabidopsis thaliana landsberg
agaatggttatgaatgccttcactaacttgttttgcgatactgaacgatttgtagagcagctgattgatcgtccggctacaagacggaggagcgggtcaactgacatactaactacttatgtctcatatgattcgacttgatcacagtgtctatataccacccaccgtgcatgtgctgcgtatagaaaaggcgtatgccgatccactattcatgagaaggattgaacatacaagagg

SEQ ID NO: 43721 - DNA, 467 bp, Arabidopsis thaliana landsberg
gagagctttgcatttgatggtaggatttgcttcataagtctccttacattggctattggcgacaatctatcttcgtctgtcatttttctcttttgtttcagtgaatctatcagctctcgcttctcttataacctttttatacaagttgtcctatatgaccctccctctctctatatatagattatatagggtgtgtatgtgtatgacagagtagatgtacgacttgaacctactcttagtttattacatcctatatatataatatatgtctaacattctctctgtatatttgcatgtgaattaagcttatataagctatagcagaatcgtttatacctgtttggtgattgtggcttagctttgatccatatgcatcatcaatccgtctaatacatacggatatctacgtacagtactgtatatgacaagttatactaaattaatatctaaaattaaaacttaactta

SEQ ID NO: 43722 - DNA, 580 bp, Arabidopsis thaliana landsberg
acctttttgcgtcaatagatttcgattgatttgtttctcatggtgacttggaggatggcggtggttttgttctgttcaaagcataacaaaacaaaaaaattacatgtagtatggatattcttttattgatctcgcacccacatgtgtctcgcaccgtatcgtctgcattcaaaggctgtgcctatgattatcgagtgtacatcttattatgatgcactatagaatgtagactacctccccttaggctaggagcgttagttgagactcaatgttctgggccatatatgcactagcgtgtaataaagttctaaaatactaaattatgattcgatattcagtcatattatacgtttcacattaatacttttcattgaatgtataaattccaatatcgtcatcagtgtatgtctacacgcaaaactattgatgagttttttcttttccaaaactctaaattacaatattatttttttttattttgataagtataatatccgatgccactagaatataaaaatttttattaattctctgacgaaaaaaagagagcaagctctattgtcacaagctaactcttgga

SEQ ID NO: 43723 - DNA, 505 bp, Arabidopsis thaliana landsberg
taaaagcctatttttggagtatatttgtaaaataatattttgtttatatcgtaaataagtgaatggtgtgattggagtatgtttttatgcaaatgacttaaatttaaaatgcatataaacaagatcgaattatttaatccatgacacattgtttttcatgttgccatatatcatttgataaaagtcaatatctatttgtttacgatttcttaaccatatcatttttgtaaataaacctcaaaaagactatttacacataatcagccaaaaatatacacgtcgtgattttagtgtaataagcaaattgtccacaaaataagcacaattggtgattttccactctatcaacaaataaaaaatcatgtttccttaagcttattaaaaacagccagtccatcgatctaaataaagtttattaattttatactttgttgacaaataaaagttttatactttttaaaaacattatacagtttagttagatcttgtatcatataacactcat

SEQ ID NO: 43724 - DNA, 754 bp, Arabidopsis thaliana landsberg
gtccattgatttgagttttaatttttttatcttgttgctatcatttctgtactacataaataatggtcttgtctttaaaaaaactgattatttagagacaaaatgagaataattcggcaaaaaatagatactattatactaatgttcataatgcaattaatagactaaaataagtagtagttgacaaagaaggaaaaacaaataaatgttactctcaaaatattccaaacaaatttgtttttttcgtgactggaattctcttaattacacaacgtaaatgttagtaacgatcacttgattactagaaaacgaattctcaagtaaaatttgcagagaaaatgccatttaaaataattctaatgataattatggaggtcaaaaaacacaatatcagatcacatgatttaggcgccaaaaccacaactaaacaacaaactaagtcactcaagaagccgacacgtgtcgtctcttaacgtaatcaaacaacggtcaaaacaacacttaaggagtagtaatgagtggaaccttaccagaaattgataaaccatagcctttaagaccaacgtaatgtgctggattattcgtcatcaccttcatctctctaactccaagatcccttagaatctgcattaccaatctttgatcacacttttgctttttaaaataaacagtaaacatagtaaagattcaatgtttttgttattacttgtgctccaatgccgtattcccgtgaagcaacgggaaatgaaacacc

SEQ ID NO: 43725 - DNA, 614 bp, Arabidopsis thaliana landsberg
ttatgatcggaaacctgatagtttttatggcaatcttgtatattaaaattgtaaatttcgatagaacttcgtatgtgagatctaagcttttcaataagagaatgatgtgcaaagccttgtattgtattttttttttttgaaataaatcaaaatttagataaataaataagggtgtagttaggaataaagttttttcaaaaaaaaaaatattttttcatatatatatataaccaagctttattgatataaatcctcctttagtaaaaacatgttttagagtaatcttttattcatcaaccagatactagtactacttttttcaatacttaagaacataaaacatgatgacaaaaaaaaaaaaaacccataaaacatgtttctcatgttcaatacttaagaacataaatcctattttagtaaaaaagtatgttttatagtaatctacacatttactttgttagcattattataagtacttctcttaaattatttatcatttaacttcggatgcaaaacttgtttatatacacatcaaaatataataaattgaaaactagtttcaattcacaacaaaaaaattaaaataaaaaaatacatgtataatgaaatgcgtt

SEQ ID NO: 43726 - DNA, 749 bp, Arabidopsis thaliana landsberg
gaaagcaagacatttggtgactaaagcaaaaagtgtttatttcctttgtgataagcttgatcgaagtttgttcttagacgtagctaagagtttttgtgcacgtgtcaaattttcttagccactcacattaaacctcgtgggttttatcaaaataacatttgaaaatcgtgcctatttctcctccatgctcatgcgtcagcgtcgacatggctagatttttccccaatatttttatttttatttttttgaagtatataagtgtgtcaaatttattcaagtgatttcccacgtttctggaagatatttttctttaatttatctatgttttttattcgaattctatttttatttgttttatatgtatatagagctggaaaatatggcccaaagtacaaggtacatgattctctaattcaacaaattaaatggtatattttgtttttaagtaagtgcgaatagacttacatattttatcatctaaactagtatagttatatatatatatatttttatagtatagtttcatgttatctgcaattaactaattacgaatttgattcttattatttaaggtcaaaattttatcaagggaagaaaccaaaaatattcatttaatttgtattttcataattcttttatttaaattttcagttattttataagttactctttttgggttggttttaaactagtttcattttcctaatctctacagtttaattgacatctagcttttatcagttaatctt

SEQ ID NO: 43727 - DNA, 619 bp, Arabidopsis thaliana landsberg
tgataaaggtcaagaatcaaagtttggtagccaaattaccagcaaacaaaaaaatgtttaagaccattaatccatcgcgtatactcattgtcttatgaatcttaaacaataatattatattatatacagtaggtccataatttatgtttctttacctactctatttaccaaaaacatacagtttttatctgacttacacaagtgtactaatggccagacaagattgttacttgttcaagtaaaattgtgttaccagatattcaactttctatatatacatatagatttgacaactattcgactttctatatttaactgaaagagttgtatcactgaaatttggagtattgttccctgtaaataatccgatttgtttccaaaacgctatggaacaggccttgattttgatactctttcgtgctgacacttgaaacggcgtcgtatcaataatagaagaaaaccttactgtggaaataatcaaattgtgaatcttcaccaacctcaatgggtcccattgccacccactaatctccccacgtacaccaactccccttcacgttttaatctcttaatatacttttattataagtaatttaatgatttcaacctaataatatta

SEQ ID NO: 43728 - DNA, 395 bp, Arabidopsis thaliana landsberg
ggctgtatggctgccaccgcagcgcggggaccctacccgctttattttgcggcggccagccgggtgccgtcgggtgggactcgaatcgaggcgaccgggcgcccgatgatgccgggcacgtcgatgacccggtcgtggccaccggcgactacgttgaccacggcgccagcggcagtgcggtcaagcatccagaggcggccgaagaggtcatagccggggcgcgcgaggtcggtgccgttggtgatcagggtgcgcaccctgccggcatctgagccagcggcatagaccaaggcgccggactcgctgaccccagcgagggtgatcgccggatcgagtggtggccaccgagcgcatcacatagccgggtcgttcgagcgcaccccgcaccggggtgg

SEQ ID NO: 43729 - DNA, 415 bp, Arabidopsis thaliana landsberg
  unsure (1)..(415): unsure at all n locations
gcatttccggtttttttttttgtagctgcttagtgtatttgtactggcttttatctgatggtatgtgttggtaggttgatcctgtggtttataannnnnnnnnnnnnnnnnnnggcaacattagttactcagctgtgggtggtttaggtgatcagatcagagaacttaaggaatctattgagctgcctctcatgaatcctgaacttttccttagagttgggattaaacctcctaaggtacttgatctctctccagtcctttcttttgttttcacaaactatctcatgattcactttttatgtttccctgtgccgtggttacctgcatgaatggctaaaaagagttgaaacgcacttcaatttccataatgctaattttcatttctctcattccagggtgtccttctgtatggacc

SEQ ID NO: 43730 - DNA, 361 bp, Arabidopsis thaliana landsberg
taaggataataaacttacgccgcaaacaatgctattaaattttataatgtcagtttgtcacattgacattaaaatatttccaaaagtaaaatcagttggggttttttccctcccacttggaaagacctttcacatgatttgctctttggaattttcagcaataaaagtgttactgctttaatttctagttatgtgaagtctttgattacttcttatcaagaaaaagattctttgatcttacttgtgtccaaataaattggcctaataaccgactaatactttactgggtaagtagaaatgtggtagcacgtctctcccagaaaattccaagttttccatcattacgtgagcctattacaag

SEQ ID NO: 43731 - DNA, 878 bp, Arabidopsis thaliana landsberg
aacccaactcttcttaacactacatcaaaaaaacttattttaattgcataggggaaatgttttttttttctgttttggagctaattaaaatcttctaatgaattagttatcttaaaaattataaaagtatcttccaacaattatgatagatcatatttgatagttgaattgctagacttcaaaagaaataaaatttattaaacaaaaaattggaatctttaagaagtgtggagtagatagaattggatcaaatagttttcacaacgtgctataaacatagtggaaatcaaataaacacaaaaacaataaaaacaaattcacagtcgttttctttatgggccgccgtaatagtaccctctgtagacgacaacacattccttatcatacagttttttcctttttttttttagtgatatcaaattgatagaagaacttaatctcaagtgttacataattattttatttttatttgatcttactactgtttaaaacttcaaactttgaaaatttgctatcttttttttgaaatttctgttttaaaaacaaaataatgcttgattctgacctaaaaatgattttttaggatgggaaaagtttatctgacgaagcttataaacgtgtggaccacctaatttttgtaatagcagcatgaataatgtgcttctttatctaaccacctttttaaatgtatatcaactcttgaagttctccaatggactcaaatttgaccttaacctcattatgagatatattagcctagtgagacactggtcaacgtaacttatgtcccaacatctgtgtgtcagaataaaattataagaagtttatttgccaaattgaaagtgtcataaaggtcttatacttccaaatacggtatc

SEQ ID NO: 43732 - DNA, 643 bp, Arabidopsis thaliana landsberg
cctcaaatctacatgatgagctccttccattcaaagatgttatagcaaaggttatctacgacgtaagttttttaatgttcctttcatgaaagcattttttttataattgcatttcgtgtcctgacaacaaagacatctaacgttctagcgggtctgttatatttgtagaaaaattatccaaggatcaagacaattgttaataaagttgggactatcagtaatgagtttcgagttccaaagtttgaagtgttagctggagaaaatgggatggaaacagaagtaaagcaatatggggctagatttaagctggactatggcttggtttattggaattcaagattggaacatgagcacatgcggctttcatctttgtttaaacctggggaaaccgtatgtgatatgtttgctggtattgggccttttgctattccagctgcacagaaaggatgctttgtgtatgcaaatgatttaaatccagacagtgttcggtacttgaagatcaatgcaaagttcaataaggttgatgatttgatttgtgtgcacaacatggatgctcgtaaatttttctctcacttgatggcggtgtcaacttgcgaggataatttgcaatcagtggctgataatgataaaacaaaggaaagca

SEQ ID NO: 43733 - DNA, 512 bp, Arabidopsis thaliana landsberg
tacatatgtagcacagacataaacgctgcaaggagcatatagaagaaacaaacattatgttctagcctcggaacaacttttcatttggtatccagatccataattagtgataaacacactaaaaaaaaacaagattcgattctcaacaaatccaatatctcgatgactgaatcgccttttgttgttaagagttgaactatgcttctaatgagataagaaagagtacatattcctcaaacacaactatttcgtcattgttcttcttctgcacacatctcaagtgatgttcacaatcttactgtcttctgaagaatacaaaacctaatgactagctcttaatgctctgctcaatgtttcttgcaaatattataacgaactgaaactacaattacaaatagatgcacttaccaaaataaggcactctagcaattgtctcaagaacaaagaaccttgcatatgttcggtcacgatacatagtgtcaagcttcttaataaccgagtcctgcggagaa

SEQ ID NO: 43734 - DNA, 773 bp, Arabidopsis thaliana landsberg
taaagcttgctatattctttatttcaccacaaattggtcactgtatgccaattggtttcccttctataggaataaatctatataaagaaaaagtgatggggccttaggaattggcaaattgtaccatgggttggttcaaatgcaatggacaagaccgaagattggggaagaatgagatgtggcatgaaggtgttgtagttgtctcattaaccaacaacagtcatagagagagagatgtgatgtacattgttcataagggggtccatattgttatatttaaaatttgttgaatatatatgtaacgtcaagttctctatctctatatattttatcatgattaataaataaagttagaatattatgagggtgaaagagcacacaacaccaaagaatgtactgtgacacccaccaacatttcgtaactataatacatatattgtacttaccataccgactaggttccaaaccataccggttttttaattattcttccaacctcatgtctcggttctatatttattaactttaaatttaagtttgaaaaatatttggttactacacatggaccgatatacatatgtataggtcgactcgttatggtcaggtggcgaattgatttgggtaaggagtttaaacccttatgcattgagtttaattctcgcctagaacaaagtcatggcacgttttgaaagtcgggattgatagcgtgtcatttgattcttgtgttgcaaattgaaccttggtccctcaactaaatatccgatggacgagct

SEQ ID NO: 43735 - DNA, 413 bp, Arabidopsis thaliana landsberg
  unsure (1)..(413): unsure at all n locations
cattcttgcccatctgcatatcgtattgcgaatcacnnnnnnnnnnnnnnnnnnnnnnnnnnnnnnnnnnnnnnnnnnnnnnnnnnnnnnnnnnnnnnnnnnnnnnnnnnnnnnnnnnnnnnnnnnnnnnnnnggtggcactgaaatttcgggacagcccggacaactgcaaggcagtgtttaagccgcggcggcctttaccagtggcaactgcctgtttgcagccttttttatgaagcgctgcaatcgtttcggcaatgccggcaaacagcaaaatattgttctcaccggcgtagtagtgccggtgatagtgggcggccagcgcctgtgcctgaaattgtggaagcgggccatacaacactttaatggattcacgcagccccagcccgataatgctgcgcgcacgctcgtca

SEQ ID NO: 43736 - DNA, 755 bp, Arabidopsis thaliana landsberg
aaaattctttttaaattaagtaaaaggtccaaaaggcacaaatgaggagggccaacttcctccatgatttttttttaagaaaattagcaaaataaggggcatatagtaggtgattaaataataagggcttaacaatattgtcacataatccttttaattatgtgtaacacgtatgcaaaaaaagacctcctctctcatcataatagtgaaaaaaaaatctctaacggatggtttcacctaaaaaagcctaaaaacaatggattatgtcgttgatcaaaacccttgaaatatccatgtaacactaacaatgaaggtggattttaatagtcatctttcctgttttctctcactctgacatttttttttttggactaaaaacgtttattttggaaatgtaatatatattttttttactcatgcgtagaagaaaatttatttttgaattattttcacctaaactaatttcaagaatcgaatctgtttgttaaccgaaagtcacgtcggtgattttgcccgtttgttgaaaacaaaacctaccctactttttattatcctaattaatcattttgtccaactaaacgaaatggatttggttaaaaatcctttgttttaaaaagttactacagtcattggcccacttggtttttcctaaacagtgaatggagacaatattcgcagactacagagaagctactacgatcctgacattagggttaacttagctactacaccttccatgaccttgtcccgttgaa

SEQ ID NO: 43737 - DNA, 205 bp, Arabidopsis thaliana landsberg
ttcaggttgaagacatgttgggctgtgggttattgtgcctaaaaatgtacgacatgataaggcctatcacttttaccgatgaatcataatcttatgttaaaaaattacttatcgtatcgtaaccgctgattacaggaacgtgaacgtatcaacggacgatattgattcctagtttgtcacttgaaatagaaaatagatggtgcct

SEQ ID NO: 43738 - DNA, 654 bp, Arabidopsis thaliana landsberg
tttctattatagctgcaataattttggaaggtattgttgtagatgcatggatctaactaactaaagcataacacatatattatagaagaaaacgtgtcgtcgtctactgttgttgtctcttatgaatcattgagaacaatggagtatggacaaggaccatgtgaccagttttgatcaaatctaacttacactaaaaacataagtccgtaccacaacaagaatattccatccaccagagctaaacctcaccggacattctcaataagtttttattctctcataaataatgcgcaaaaataataataatgcgcatgcttttgatttattttttattttttcacagcgcatgctattgatatgactacataagtagacaaaaacaaattaaagagaattcagctaggaatcgaaaggttagaaaacgaaactatattcatagtcatgactcatgaacacttcaataagcaaaaaaacagatgaagttttcttaaggaaggaggtatttaacgaatcaacaactgtcttgaagtaaaccaaaagggcagggattgttatcttgaagaacttaaccaagattatattgggaacacaaaaactgggctttaaaccgaaagaagagtttgagttaaagaatcattccagtttaaacttttt

SEQ ID NO: 43739 - DNA, 432 bp, Arabidopsis thaliana landsberg
ctctcagaaggacctccggtaacaccggattcagtgacaggtaagattcggctgacatctctactccacaggcctaagatagagttcctgtatcaatacagctatcagttctggtacatcaaaacagggggaattaagatcttcaggaggacgaatgaaacacaaaaacaataatattgagaataacaaaatcgttccaagtaaaactggtgaacacaaaatggacaaaaaccagctcaaaaattctttagtttcattgcaaacatacagtacagtaagtgttcaaggtttccaacaaatgaagaagccaaaaatgggattgacatcttaaagcacacccttcttataagatcgtaataaaaacatattctatacaaaataagaaacactgaaaccaagtatttgaatacataacagctacaaaaaggaaac

SEQ ID NO: 43740 - DNA, 1215 bp, Arabidopsis thaliana landsberg
cactagtagtattaaaagaattgaataagggttaggctaagaatcagacctccgctagtagccgaatgtcatttttaacatattttggatcagccagttccacaaattgtgaatagtattactgtttcactatacataaaatcattagaaaattgttaaactaaccgctaggatcatattcataccaacaagaagaaaagatcaagaaatcgttggtgtgcttagcacgtgcgcttgacgacctcctaagtcacaactaaatctttaacatatgtagacaagtggtagacatacgtagacaaaatctaatctaccacaacttccctctccattcaccaatgtatatattcaatgaattaaaaatatatctctcttccctgtagttttgactcaaacatggttgtccacttgatctctctcctcacacaaaccctagccctaatcattctgtctcttccctctatcatcaacacttctcaacttgattacgacactcttgttttcaaacaatgcgatcaattggacgcaaacatcctccaaaaagcaacaacaaaatctccaaattactggaatcagaatctctttcttcgtgcacaagcccttttttttttcttacgcaaactcgaatcagaatcctctcgatctaaattcttgaagactctagttggtaacgaaaaacacgctgtctctggatggttccaatgcagagaagattatccgagtgagatctgccataaatgtgttggtgatcttcgtgaaatttcgtctagattgtgtggaaatgctacgtcagctcgtattcatcttcgaggatgtcatttgatatacaaattcgaacgtattgatacccctggtgctcgtaagtattcatctttgttgttgacaaaaaatcataaaatcgtgtacagaaaaaaatggttggaaaaatttcttacttatttggtcttatagtaaaatttcttatacttttatcaaaaaatatattatttcttaggtatataaattttccactcgcgagaaaaattgaaggatagtgataaacaaattaagttgaattcacattaaagtaaacgattgattacgtaaaataaatatgattcttgttatttttggaagaagttaataatcatcacaactacaagttatttgagaccccggaacacggtctcatccacaagatatgcgatggagctaccgcggagactttacccggat

SEQ ID NO: 43741 - DNA, 463 bp, Arabidopsis thaliana landsberg
attttcatgcagactaataactttttgttaacaatgagcatattgggatgttaaatagctttacgaatttgttacagcccatgggcttgcttcagcccgtaaagaaactttcaaactttaagaagtcaatatttgttccatagtgcgaatccaatgtgatttaaaaaaccaatcaacatcattaacataaagtaactttgaatgcagtaattaatgtagctttctattttaatataaacagctgtcacgaaacgaactgtatctagatctaagatctgaaaccattaatgtattattatcatatgaagacaaccatgtgcaaagccacgttgagttttgttatgtatagtatataaagtaaagagaaagaaggagaagaacattatcacaaccatccaaatcttcaagatgtgataaattagccaagaagttcatcttgtatactcttataaactctcatcta

SEQ ID NO: 43742 - DNA, 831 bp, Arabidopsis thaliana landsberg
tttcgtttagtattataaaatcatttgttatagagttcaattctattagaaaaccaaatgacatcatatatcactgaaaatatacttccacgacagaatgaatagtgattcagtttaaatgaactcagatgttttgaaatctgataaacttcaactctaatggagttgacttcaacttcactaaccaataacaccaccttagtttagtggaggatctttgagacacatgcggttgctaaaaataactacaagaattttgaatcttttgaatacgaattttatttaaaatttaaatgaaaattaattatagatttttgggttgttcaaaatgtatttgtagtttctaagagaacgttgaatcatattacatcactttatttcatgacaatatgggtatgcaatgtatgaattgtttatttttaccagcgtctatcttctataagacaagagtttcaacgtgagatatgctaacaacgttaaaactaaagataatacaaaattaaataattttaaaaagattattatttattggtacgacaagagcacaaactcactaagatatgaacacttataattgtgacatattatgaacacctatattttatctttatcatcactctattattctacatatctttgggtatgcaatgaacaaatttcacacatttactttaatggtgtattggatcatgcatgtggaaactaaaaatagtctgacaactcttgaatcacccgaatatatattaattttgtttgatttcaaataaaaagtgaatgataaatttttgggttgttcaatttttcccggtgataaagacagaaagggggtta

SEQ ID NO: 43743 - DNA, 1018 bp, Arabidopsis thaliana landsberg
  unsure (1)..(1018): unsure at all n locations
aaattaggttaaaaaaaaaattatttggtggccaggttttttcaatccacttttgattcctcaaccattttatttccattcctcaatagggggtttgaccaatagttgatacatttaaagggtggcaagggtgggttggggctgatccctaaaggtgcccagcctggagatctttatgttactctcaaggtgactttactaaagtcaactttctaacggacagtcatagttaattatttacttgcgtctcaattatttggctgtattccttttcaggttcgtgaagatcctgtgttccgcagagaaggatcggatattcatgtggacgcggttctcagtgttacccaggtgaaataacatggttttgtcaatcctgtctttaaaagtttatagacacttttgccttcagcatctattttggacttctggtgcagtatccgtgagttcgtttaccgtttatgtattgttcatgataaccgagtatatttttcatcttttgtcaggccattcttggaggaaccattcaagttccaaccctcactggtgatgttgtcgtgaaggtatatcaatttttttcacatttaaaaaaatgctttaagattttgactctagttctatcaacaatgaaacatgcttgccagcaaactgaacaagctcgacaatgtgaaatagaattcgccatccaatgattcgaaaatgctttgattctaaactttagattgtctttttctttgatgaaaaagaagatcagattttgcttgctagctaactgatagttaattccagctctgggtttctgctcccacttgttgtcgtttaggacctggtcttggaacttctccagcattctaacttggaaactctnttgttgcaggtccgtcctggaacccaacctggtcacaaagtagtgctaagaaatgaaggtgagctcttttgtttatgtcgataagttcagtcgtagaatacctgtaagatgaaagaaaactgtgagtatgattgtcttggattgagctaatag

SEQ ID NO: 43744 - DNA, 1147 bp, Arabidopsis thaliana landsberg
aatacgtaatcgattcgagcggtggatagtgaaattacggcggaggagttgaatcggatcacggtggtggtgtgtttctgtatttgagtgaggaggaaggagaaatataaaaagtaggtggagactcaggtatatgaaaaccctaagttctttgattactactgctctttgtttattggttcaatcaaggagagatctgttttgcttatggacgtcaatggaagatcccttaggctgcgatacgcttcgaatattcttttcgccatggaagatcccttaggtttctgcaattttcttgggagatctcttaatcatgagaacgatttctttttaactcatcttcctcaggaacttagtagacatgagtctagcctttacccttctgatttggcgcgtctatatacgaccggatatgatagaattaggacacgatgatactctgattttgggggggatgacaaaaggtttaatggatcttggcttcacagaatcttcgatttggccaagggcagtgatctgaagtcagattaatcagactagaaacatgattaaatgcttgttttgtatgattttaatgccaaaaaaaaaaacgcttgtcaaaactctggaggtttttttcagacttatagcgcaatctgtcttaaggtaaaggctcatagagtctttaacttgactgtctagctatgaagttttttttgcctgcagtgactctattattgtatactagaagtaggcaatagctcttgcttatgttttttttttaatatggtttactaatgaaaggttattgcttgcaggtgaggtaagcgttcataaaacaaaaatcaagttttgtgggagtgcattgaagcatgacaagcaataaaggtgctatcatccctccagagcttccttggaaaccggtggctaaaggtagcagaagttcaacaaggcgtggcaagaaactagttaaacgagttgcagcttcagatattgagtcagaagacaagagttcaacacacacactagtagcaggagaatcaaagcgtccaaaggttcctcttttactttttgtgctttctttcttgattttgttaggaaatttctggtctcttgattttagtttttattctttctatttattgcagcttggcgtttctgttctagg

SEQ ID NO: 43745 - DNA, 213 bp, Arabidopsis thaliana landsberg
aaggcttattcaacacgtgtcctgacgtttctgatattgatctcgctaatggcggtgacactgaacctttttcccacggtagaggcatagaagcggagtagagatgctcctatagtgaaaggactttcatggaacttttaccagaaagcatgtccgaaagtcgaaaacatcatcagataagagctcaagatagtcttcaagcgagatattggt

SEQ ID NO: 43746 - DNA, 704 bp, Arabidopsis thaliana landsberg
taaacgaaatttaatgattttttaagaatattgacatttttaattatgggccagaagctggtgtttgatcaattttctaatttcaaggccgggtctgcctaacccatacacacatttctcatattatatagtgtaatttattttcttgaccaacatatagttatttttgttttattgtttgttcaacatatatatgagttatttaattgttttaatatatagaaaaactatttggggaagtcaaagtaatgacagcaaaagattcgtcagaaccagttactacgcttactcaattcaacaatatagatgttgtaatcaccgattaccatatgcctggtttgaatggtgttcagctaaaaaagagaattgatgaagaatttgggaatttgcctgttattggtatgtgcaatttttttccacttatttgacaattacttattcttcttccctttttttaaattaatttaaaatatcatagtataatattgatgtaaaagaaaaattcctatataaacaaggataagtgatgagcggtgacagattaaacaggataactattggtcattgttatttttaattaaaaagggaagtaatgagtgttgacacagaaatcgaataaaatttattcttgtaattatgattggatatttagtatgaaaccttattagttaaaaatgacctgtctttaaaaatattagcaaata

SEQ ID NO: 43747 - DNA, 895 bp, Arabidopsis thaliana landsberg
  unsure (1)..(895): unsure at all n locations
tatatggaacgcccttagcgcgatcatcacatggccactcaataatcatgccaattaattgaaaaagataggtctatggtgatttcccacaaattctcttagttttatttgtttagttggaatttttcaacgacataagcatgctcttttttcaacttgaatggcgtaaataatcctataattagtatttgactatttgtatagcaaatatcattaaacacatatagtatacctccacaaaatcaataccattggcattttctatagatacaagaatgtattggctggctctgtatcatcatgtctacgtagacagagatgtatcatgtcgactaaacaaaaattacatttccacgtataagatttacttatagtagtaactagtaataagtttccaagtaaaaacagacacatttaactaaattattattctaaaacatttttataaaaggaagaagaaagtcacagagatcgaacatgattctccactttccacttctttgtcttctttcttctccttctcacttacttaacccataagccatcaatcccaaacacaccacaacaatggcttcttctatcttcttcttcttcttccttatcttcctctccgtcgtctccgccgtcaaactacctctctctcccttctcccactccgaccaatcaccaaaagacccttacctctctctccgtcgtctcgctgaatcctcaatcgctagagctcataaactcaaacacggcacctcaataaaacccgacgaagatgctctcttctncaccaccaccgcatncggcaccgtcgtgaaatctcctctctcttgctaaagctacggcggatactcagtctctctcagcttcggcacacccgcgcaaacaatcccattcgttttcgata

SEQ ID NO: 43748 - DNA, 351 bp, Arabidopsis thaliana landsberg
  unsure (1)..(351): unsure at all n locations
caatgtgggctgaaaagaannnnnnnnnnnnnnnnnnnnnnnnnnnnnnnnnnnnnnnnnntacacgcatactgagtacagacaagaccttattagcaaaagatatttactattcccacaaaaacccttgttaccaggtcaattttagaaggttgtccttcacttatcttatgaattattcacatattaagaacaatgagaagaatgacgaaacatccaaaatctgtaattcgttcaagtaaaagctctgcgtgtttaaattcaaaaagggcgaagaaaagaacaagctttccctcccttctcttaaaaatgaaagcaaaagacattacacaaaagactcacgatgcgaca

SEQ ID NO: 43749 - DNA, 301 bp, Arabidopsis thaliana landsberg
  unsure (1)..(301): unsure at all n locations
aaagaaagaacaacacgtggttgtaattgtttcgacgctttcgctttgtacactttcaacagactccnttttgcacttctctctttcactcttttactattttgtttatattatttgttacggaaacgtcattttcctccagacaatacctttattccctatatatataatggtatggtgtaaaaatgttattgccactgtatatattggtctatcacaattccttctctttatcttcctttttgtatttttgcagcaacaacaaaaacgtaatttatagttagggagttatctttctttg

SEQ ID NO: 43750 - DNA, 618 bp, Arabidopsis thaliana landsberg
tggattgcgaatggggtacagattttatgaaaggcagttttaatcgaaatgtttacttagcctgtggaacctcgatttgaggttgatacaatatccattgtttagcttctcttgtgctcatgtagttgtacactagttaaaacatcaaatattttgtcataaaggtacataaacatggcacaataatagaatcggataagtgataagtcaaatgactcaaactcataacgcaaatgagatcaggagcacgttagcatggtagataagactcatcttccacaaaaacgtgccaaagaatgtgcaataaaggcatattacggtaaatgggaatatggaaaataagaatcatctcttaaattgtagtcttttactcttcttagtcattacaaatggagttagtttgatcgtttaatctgtttataaaatttctttctgaatttcaactatctttttttcttctttaaatttttggttagcacatacaaataaaagttaaaccatacaagcaaactaagatttttttttttcttcttttctctttaactttttggttggccagaagactccttgtgctaataagataatatatatatatatatatatatatatatatatata

SEQ ID NO: 43751 - DNA, 561 bp, Arabidopsis thaliana landsberg
taatttcgtgcaagtccatagactttggtcagactataaaacgtgttcaaggcttgtgtttgtcttttatataaacgtaaagactgtttggacatgaagacttatttatccaccgtctggattatctacacacctaaaaaaatgatagcaatcgcagccataataagagagaacgcgttagtaaaagtcaacacgaagtcaactcctttgtggcttttagcccatcccacttggcgctatttaagtaaaatcccagtactaccaacttcaaaaaagtctctctttcacattgatcctgtgttttataaagtcccatatcaaaccgaattttgattcagagatcagctcaaaaatgaagtttgatgaatcgaaaacgctcttaccggtgagaatacctgtaaatggcaaccgcaaaaccgctggttacaagctttgggttctaatcgctgttctactcttggcctttggttctatgttaaccggttccgtctctctcaaaggaatcggtttgttccattctgctgacggcgttaacgcattctctttggcgatatctgcgtc

SEQ ID NO: 43752 - DNA, 800 bp, Arabidopsis thaliana landsberg
  unsure (1)..(800): unsure at all n locations
taaaaatcattatctagtaaattaacgacaaatacttagttaactttgttctaatttaatcgtaaatactaaccatttacgagacgcttaaagtgttacttaagacgaaaagaaacacgcccacgtttgaattccacatgcattatggcgattattcataaaacggctaaacagaacacagtattaaaccaaaacattctcttaaatttgtttatttcctctaatattctaaaataaaaagtactactgttcttcgtctaaattatatattcaacacgtaatgtttaaagaacagatactcccggatgatttcacttttttctttcgtctttttagttagttcattcaacaagaaaacaaaagtaaacctttgaaatgtagctaatggtcaacaatgacagatatactgagaaagatctgttcgcaaattattgaatttctcacttcatttcaatagaatttttactgttgaatcctcctcgagttatttgttttacaactcaaaaactgaaattgcattcattacaatgttatttcgttgttctttttgtttaatttaagattaataaaaatgaaaagcccccctaattaagggttagtagtagtaactagtacgtagacttttttttgtttgacatcatagactaagtagtaacaaaactagagtttgcatccaacaaattaagtcggtttttattttactcatttaagacaactangaagaaaccgaaggtatgcaaacgtaatttttttgcgcgttatgcaaacgtaattaaagataacacttacggcaataatta

SEQ ID NO: 43753 - DNA, 996 bp, Arabidopsis thaliana landsberg
catgattctccgggggctttgcgcggagtgtgaaggattattccttatgcatcaacagcaaacctatctttgttcatgttgaaatttttacaggcatgaacttccgtcatactctctacccagaatataaaagtaatcgtcctcccacacctgataccatagtacaaggacttcaatatgtcaaagcgtacatcaaggcaatgtctataaaagttatagaggtaaatcatgcacatgattgccatatttccttgcattgtgatgatttctcactaatgggcagacattccatgaagacaggtgccaggtgtagaagctgatgatgttattggaacactggctatgcgaagcattacagccggtttcaaagtactcatttccagctattcgagaagtgttcactacttattgaatgctcagggtctgttctatttgtccttttcctagaagtggactgatcatttgtttgttacccctttacaggtccgagttgtctctccagacaaagacttctttcagattctttctccctcgttgcgtcttcttcgactaacaccacgcggatcagagtatgaaattcatgttagatggataattgcctcattgtagaattttgcgtattatgaaaccatagttgctctttgtatcctgtatgttttttccactcagttgtgtcaaggctactgcttcttgtggcaggatggcttcttttggaatggaagattttgctaaaaagtttggaaatttggaaccagcacaatttgttgatatcatcgcccttgctggagacaagtctgataatattccaggttaagcccacttcctctacccctcacgaaattgttaatttctggggatattcctttcatagccgcattttgtgtatcacagaaaagttgagccaaagtgcacattctacatacaaacgtttagccaaagtgcacacagggaaaggctaaagtgatctaatgatgtttgtgtgatgcaggagttgat

SEQ ID NO: 43754 - DNA, 1031 bp, Arabidopsis thaliana landsberg
actgtcaatatcgatcaaaaaaagaaacttgaaaagacaaaaaacaaaaacaataattgaaaaattagctgaaccaagaacaaaaccgatcgaaccagaaactgataaccggaataaacccaaagagaacaaataataattgaacttacatcagctatggatagattcaagtctttcatgatactggactgtgtaggagctgtatatccaacctatatatacatgaaaaatattatttggttgatgaaaattgaacctaattttgatgttgatctgaaaagttaaaataacattgaaggattacaaaaaaatggaacttaggaactcacaatgcatccaaagctcaaggcaccacaagaaccaacagtgaaagcaagaacaaaaggtctcgtggaagcatttgatatttcagacagaagtgatgaagatttattaggagaagctgatacatcttctgtatgagatggtaataaagattcttccgccatttttggaatctgagattataaatcaaagtgaaacacaatcacatgaaagcacaaattttatcaaaagataaaagaagaattataatctttattgaatattatagagaactcgattaggatttttgttttagaggtagaataaagaaagaagagacaaatcttggaaaaagtctcaaacctttttgtatttgagtttggaagattgttggtctcctgaagtagtggaacttaaaacacagattgtgttacctcttttatggtaatagtattcttttttgataaagtaaaattttatggacatggaattgtttttaagtattacttactctttgttcaaaaaaaaaaaaaaaacttactcaaaagaaaagacaaaaatcataattcgaatcttcaaataaatgcgtgaaaataattggttaataaatatgtttggggaattagtactggtgttagttcatatcataagtggcaaaatttcttaaataatgcaataagagagacacatgaaattctaaaatcattggtgtgttaaagttttggata

SEQ ID NO: 43755 - DNA, 329 bp, Arabidopsis thaliana landsberg
tttcgggcctcagcgtcccgggctgggcttcatcggcgactccgggcacttcaaggaccgggtcactttgcagggccaacgcgacgcgctgtggtgcgggcggcgggtggccgagctggccggcccggtgctcggtgacccgttcgccaccgacgtcgcgctgcgccggtgggaggccgagcgcgaccgggagtgcctgcacgcctaccacttcgccaacatcgacaccgacatcaagccggcgtgcccggtgctcgccgagatcgtccggcggaccagccgcgaccaggagccctggctcggcgacctgttcggccgggagcgcaccc

SEQ ID NO: 43756 - DNA, 738 bp, Arabidopsis thaliana landsberg
aaaataaatacagtcaaaagtttataaccaattttctacaacagtccatggtagcaattacaaccatcacccattttttataaccaaattgaaatcaaccaaaatttacttcatatatttactttatttttcatacattttgttacatcgattgtatcaaatatacttacaaaaaattattgaattacaacttctaaatttaacaattttatcaattaaactttatttttacaaatctttgaaatcattcaaaatttattttttgtcttctttttaatttataataaaattaaataatatatctttacgtaacgttcgtagttggcaaaataaatttacaattaaaatctttactaaatttttcttctacaatagtccacaacaataattttacattttggactttaaccataatttttacaaatcttagaaaatcattcaaaatttaattttatcttctttttaatctatgataaaactaaataatatatctttacgtaacgctcgtagttaacaaaacaaatttacaattgaaatctttactaactttttcttctacaacagtacatagcaataacctcacattttggaatttaaccaaaaacgagtaattatatttattatactatactggttcaatattattaaagaaattttttattataaatataaaatagtaaaacacctttaccagatttaataatatattgatacaaaatcctatgaggtcatttttga

SEQ ID NO: 43757 - DNA, 707 bp, Arabidopsis thaliana landsberg
tatcttaatatcttgttttgagtctaagctattactttacgttgcatgtacaacagtaacatgtatgatgtatatatgaaaactgaaaagggtatattgctataaaagagctaccacttatctcatgcatagatgcatatcatgcattcccactttatggaaatttggccatcatgtattacagtattagcctatatatatatatatatgtatgtataaatttgtgtacaaataatcccaaacactctgaataagttgcactccaaaagtacgagctaaaactataaatacaatattaaatcaatttttcttatgaccttttccttcaccaaaagcaacatcataatttgtcagctgatgacagtacccatatattatatagttatcatgttggatttaataagaaatcgtgttgctaatcaaagagataatcttctttattaatgatgcttatcgtttactgatcacagtttaccctttcttcaacctatagtttttctctgatctcaatttagagacaataaaaatggaacataaggaaactgtaacatccatacagtcaatggtacgtatttaatatgattatcagggttgttttatttgtcttttctttagagattactttgtacaacataccgagatattattgtctatttcaataacagaagttcagatcgatcctagcaaaatctattttagatcctcag

SEQ ID NO: 43758 - DNA, 618 bp, Arabidopsis thaliana landsberg
tcttttctttctttatcttgtcagattctcaagtattacataatattttttttttgtcggtagtgttacataatatttaaggtagctgttttaacaaaaaaaaaaagctgaaatattatacgtttgaaaaaaaaatgttgatgttatttggctaaacacatttttggatttgcggtgtacgtagttccataactcgttactttttaaccaaaacaactggtcacataaaaagatgcatggaacgtgagagagattccttcgaccctccttcgctaaattgcccaaaaatctacaattagggattgtttcatagattgcctaagttggtgtcaataattagctagtataatgaagcaaatgacttgccgagttatgaatataaatgtatattatatgcatgggttatattctgcatctgcgattctgagtgaggctatgttttaattagtcgcgtctttatcgatggagctagttgggtgtggctattctacaattctcgttgtgaattatacatatgcgaatggtgtatacgggttttttttcttttaaaaaagttggggtgaacttaccaataacaaaataaatattttcagaaactccagtcactactacctatga

SEQ ID NO: 43759 - DNA, 656 bp, Arabidopsis thaliana landsberg
gcgtaccctcgatcatcgccattaccaattttttaatatcttcctcctacgaaaaccaagatataattagagactttaaaccatatttaaagaagaagaagaagaagaagaagaacattcgattcgatgatatctaagatgtctggagataccttatttgatgttctgttacaaagagacaaagagggtcactgagagaaacccagagagaaagagaaacccagtctgtattaatatgaacaacacttataaatcaattgtttcttttgttgggaaggaatcagcgtatttcatgtgatccgaactaaaagaatattattataaaaaggataaagagaaaattgtgaccttcaaattcttcttacatcgaagattgattgattctattgaagcaaaaaagggttttttgaaaagctctgtaattcttttttttttactaatgagacgaaacgctgtcgtttagttggaagaagataacggatcacgtgacacgtggcgtttggtctcgtaagtcgtaacgtagtgagagttgactgactctgctaattatacgttttcataatttcagttaaaaaaagataaatggacaccagaaaaagagctagaattggtgaagggattttttgaaaattatatttccgaaattagaggagaag

SEQ ID NO: 43760 - DNA, 796 bp, Arabidopsis thaliana landsberg
cgatctttgtaatccctataacattccaacttccaagtgtaatgcttattttccatataagaataacaaagcttaaaaataaaaaaaaaaattaacggtcacaacacaaacactattttaacttataaaatggaaataggcaattaggcattgatctccgcagaatctattgcactagcttgcactatgtttattcactttaatctcaccctttttgtcttctcgaaaatcagttgataatatccataaatacggtcaaaatacgtagaaaatacgataaggagagtgtaatagtatagggagaaaatgggaataacgtgatatacatatccacagataagcaataggtcaccatcccacggttcacgttatttccgtcggtttttaaaatcaaaaaatttcctctactgataatgttaattaagaaattaaaattatgtcttcaacttttaataaaacaattaatgaaaaactatcattattgtagtttcattagtgacaaatgacaatattaaaaaaaaataagaaaagtaagcaattattagttgaagaactgaagaagcagaagaagaagaagcagaagaagaagaagagaaaattttgacagagataatacacagatagagagaagagacagagacagagagtgatggaaacagctgtatttattatgagacgaaacaagaacctctgggtttctacttaaactcttctctctttcctctctcactttaaaaatccacactttagagcacacaatacaaaaaataagggtttcatatctttacgttcttcc

SEQ ID NO: 43761 - DNA, 687 bp, Arabidopsis thaliana landsberg
cccatagccatcaatttctatccaaatttataaaacacattgtcataaacttaaatctctgttgataacttcataacagaaaaaaaccgttaagcttacgagctatctgcaatttggttttgactccattgtcctgaccccattctactaatttgctttccttttcgcatctatagctatcaacaactctagctttctccttttcagctccaacaacctcattgattctaccttttaaagcagctcgtagagcttcaaaggtatcaacttgtgtttgcatcttacaagaaaccggtataagcgaaaggatccagctgagagctgagatttcgtttctaacactgtaaattcctgcaggagtgcaagcatcctcaccaaagtaaacttccacctgcatttcactcaatccatcatctaagcaacttcacatgcattacaatggcctacgatgtttgcttaccttatcgagattaactattcgtccaaaatgaagcaacttttccaatgcagcattcaacagttgttgagataatgatccactgaggttcaatgtttcctttacgcataaacctttgcaactcaagaacttctacagacacaaaatcataagacaattcattttcataaaaactcaaacaaaacatgagaaaaactaaacagtgtaatattttaagactttggcacatg

SEQ ID NO: 43762 - DNA, 698 bp, Arabidopsis thaliana landsberg
cattggtaataaaccacttaatataaatttggttttgtgtgttccaaaagttctacgcaacatattcgttaaaagtattgaaccgaaccggaaatcgaaccaaaccggaacccacgtcaataagctaaaatatactgaaagtccagaacaaaaataaacggcatcaaactggtacttttttatttttaaatctatgtagtaaaaaactctattgcctagcattacaatctgaatgggagtgtggttacgattttgttttgagtgtaaaatgttaaattttaataaaagtaagatttacaaaagtaattcaacaatttcttcactaaacaactttgtaacctagtatgcattagatcaatgaagagtatggtatgttacttgaattgagactaatcatatctcggattactttggggagtttcatgaacatgacattagttgtagaggaagtagtttagtagattcccttttattgtaaaggtaatatgttaggtacggttagattgtagtctggacaaatgatgataatgtcatggaccaaactaactatttttccaattgctgaactgtaaaagcaatacagtttggaaggaatgcgatttgtcgtaattattaatagtaatgtaattaacatattttgaatgtatattacttattgtgaaagcaaaaacgcaatgcctaatgtttacccacgcatc

SEQ ID NO: 43763 - DNA, 361 bp, Arabidopsis thaliana landsberg
atcacgtcgcttcttttcctcggcagaaccagcaagtgccattgcactggaatagtaaggtgtcaaatccttgtcactatcactagatgcctcatcatcaatggcagtagctgcaccaccagaaaaacgctgtcgcttgacaggccgctggaaacttttttttgcagaattttgcccagaataagtgggcttgaagccagtggcagcatccaccttttgaaaactctcagagctctgcaaaatttccgattatcagaacgactgcaaaaaccgagttctaacagctaaaacattagaccaactgctaaatgccctaataaaccaacagctaaaagccttcttttcaattcctttaaccaga

SEQ ID NO: 43764 - DNA, 404 bp, Arabidopsis thaliana landsberg
ggaaacaaatattttcaatttaattttgcatcgctttttaggttcctaccaacttcattaattataaacatggggtctctcaaattgtaaatttttgatatttatatgaaaccacaggctgccaaaaacataaatacatatgaaaccacgcatacacatatacattcgagtcttcatctttaattatgtctacggatttgtaattatttcaaattcataaacaaaaattttaaatttaataggatggattgatgacattaacaatcatttcttgttcaggcaagtgatttaaattgatgaccgtcaatttttcttttctgcaaagaaaaactgaaaatatcattttttagtagtattagctagcttagtatatatcatatacggcttaaatatatgtcggagat

SEQ ID NO: 43765 - DNA, 753 bp, Arabidopsis thaliana landsberg
acttttatttgtgacatactcttgaaaatcattctctaaataacgaatgaaatactcgatgttaggaaataatgatatagaatatttcaatttattggaaataccatcggttcatactcagtttaggattaggacgggttgagcattttaacggaatcaaacataacttatctatgagaatcaagtgcggttcctaactaagagataagttttgatatccgatagaatcatttaactcgtctacctgcttaatatcaaattatcaactgtgacacagcatgcttatgaaaaatatatgaaaaatatgtgacgtacgtgtgcatacaactataagatataatctgtccgttcttaaaaagttgatgttgtaccttctttttttttgttctacaaaaattgacattttaattttttattttatttttaagaacaactatattagattgactcaaacaagttaatgttaaggaacattgtttacatagactctaaattgtctccaaatatgttaatatatacttcaaaatatataaaatgattaaaaataattaaattttattagattatggttagttcataattatttgaaaatgtttcgtacaaaaaataatgttgaaatgattaaacagtagttgtttttaatatatatgaaaaaactgaaaacattaatactgtatcttagtatcagtgtggaagtatatacggcctacaaccttaattatctaacaaaaaaaaattgttaagagttttgta

SEQ ID NO: 43766 - DNA, 564 bp, Arabidopsis thaliana landsberg
cccggcggacttcgccaccgctcctgttcttagtacttgaatctctcaaccaattccttccacaggaaactaccggataacatatggaaagctccgaatctacagatcttctcagcgagtttcagcaatttgatcggtgaaatcccaaattacgttggatgcaaaagcttctacaggattgaactacaaggaaactcactcaacggaacgattccatgggacatcggacattgcgagaagcttctctgtttgaatctcagccaaaatcatctcaacggaatcattccatgggagatttcaactcttccgtcaatcgccgacgtagatctttctcataatctcttaaccggaacaatcccttccgatttcggaagctctaagacgatcacaaccttcaacgtttcgtacaatcagctaatcggtccgattccaagtggttctttcgctcatctgaatccgtcgttcttctcctcaaacgaaggactctgtggagatctcgtcggaaaaccttgcaattctgataggtttaacgccggaaatgccagatatagacggtcatcataa

SEQ ID NO: 43767 - DNA, 607 bp, Arabidopsis thaliana landsberg
gctgttttctaaaacgtattagatcactaacaaacatcatcattactcaacataaccagagagacaatcaccaaaaaaaaaaaaagcaattggtttagtttcttcttacagtgcttccccaacgatctttaggatcaacctcagctttccgatcaagaagaagctcaacaacatctttcaatccttgacaagccgccacgtgtaaagcagtccgatcatcaatgtctctgtaattagcatcaatccctgaatcaataagctccttaatcccttcaatgtcaccttcattagccaaatacattagtctcacaccaccatcgatctcttctccatcctcaaacacctcttcttctgagtgaaccgacggctccggaatcttctccggcgccattgatgattgcctaccaatcgtaaacctcggctgttgataatcctcttccattccaacaaaaaccctaaaaccctgatttgtatccgaaaatctcggagtgggtcaacgaaaaatcaaatctttctatagtaaagctccaaactttttggtacccttttgaaaacagagaccctaaaaccccgatttaaaccccgttcacacaatctgagaagagat

SEQ ID NO: 43768 - DNA, 834 bp, Arabidopsis thaliana landsberg
ggtttatattttcctaaaaaacttcctattaaacaatcactctcaatcattgtcgcgacggcttctgacccacagtaataatacttgcacattaagcatcattgtctttttttttggtcgttgtataaaattttcgacatttttggtaagtcaaaagttggacaatttaagtctctgggctctactaaatccatacgtgaaaatatttcggattgtgacttgaagaatcaaattgagtcataaataatacaaatggtttgatgcttctctgttcaaacatttgacactttcaatattacaatcagttttcaataacaaatggtggaaactggataccgaaatcagctactcttgccatgaactgcaatctggtgaatgtccatgtctttgagcatcactgatcgaccacaagagtcgcatggtgcagttcttgaaccacaattactctcatgttcagacattcctctcatcctgtctctagtatccgctgcagagttacccgcttcaaccatatctccacagaacctacacgcgattagacgaagaggacaatctctcccttgatgttgaacctgcaataatatcacaatctctggttacaaccgattcgagaaaaaaataaacacaacaaagtaatgattgcaatatacgcaccatctgttctttctcgagtactattccgcagccacaagtgagtggttcatggaagactttcaagtgcttctccatctctgttggctgcaaagctttcccgcatttttcacagtgcaaatgatttttcgcctcctcaactctgagaacgaatccacacccgtgatggttacaaaccacgtt

SEQ ID NO: 43769 - DNA, 646 bp, Arabidopsis thaliana landsberg
actggcagacataatgctttgttgccaattcacttatcctcaatattcttgatgtaatgattcttattttctttaagtctacatctagaagttaatgtggtttatctagttgcttatatatacgagtatatgatccactttcaccaataacaattttgactatatagatattcaggttaatgtgtggttagttcgatttggaaaactaattatgtgataataatatgacagatggatgttgaatgcgtataaggtgataagatcagagagacgacttaattggtcgatttgtcacatgtattatatcaataacatagccaaagggtgattgatggtatcataacttaaacgttggtaaaagacacgactggctaatatgaatatcagtaggcacactggataagaaatggctacggaagttttgtagtcatcagctacgacgtgactacagatttaaatgcatagctacatattatccactgatgacgtcatttatagccatgtaaagtccctatgctctaatactgtgggactaaaacacaattttgttataaggaatggctgaataacttggaatagtgaaacgggctctgaagacaattgtaagctatgttcgtgtgtgaaatgaactaaccgattaaacaaa

SEQ ID NO: 43770 - DNA, 292 bp, Arabidopsis thaliana landsberg
gacccagaccctggggctatggctgtatatgactctgacgcttcagggtcaagggatcaagatcgcttgggctaggccatggccaaacgcaaccgcaactatttccgatggctacccaaccagagagacaggaacagtaggtctagccctacccctagagggagaaggctacttctacatgtcaaccacatacacagagtgccagggccgggctaggccatggccaagggggaactttaacttttctcatgcggacgtacgaagacaaaagggaaaggatgtgcatgccact

SEQ ID NO: 43771 - DNA, 474 bp, Arabidopsis thaliana landsberg
atgtatagtacacaaaaacttttgggcttctagaagaaaaatatcgcgattgaggcccaatatagtgcgtgaaatgggcccaccatatatcttccaagtcaatgaaacaaccacttcttgtacatgggagagaaactatgtcatctatgaaattatttattgtagttacttagttgactttgaattgtcatgttctctttaccatcctaactccttcattagagtgaaaatacaacaattgtccctttaagacaaccatttttctttggttgttaactaacattctcaaactctagtagtgatatacaaacaagatttttttgtagtaactttacatcaacaaaaattatcctaatttcacagcagaatatagaaaaataaataaagcattaaatggaattaagttagaacaaaattattattaatgatttatcatgtgttcaaagtgttttcattaggtataaggacttaaat

SEQ ID NO: 43772 - DNA, 428 bp, Arabidopsis thaliana landsberg
cgtcgcggacggtcagcggttctccggccgtccacaggtggtccatgaccacttcttcaaggtcgccgaattgccgcatgcttgatgactcccttggtcggattggctcgcggcgacccgcgttgctcatgtcagtggaagccattctcccgcagcctcccggtagacgttggctcggtcgcccgcgagggccgcaacgatgagctctccgcttgaatcgtatgccgctgcgctggtcccgtccggaacggcgagagatgaccacgacttcccgccatcgacgctcttgtcggcgccgtccatccccagtgcgaggattttgtgccctgtggagtcgacggcgaccgccattgcccccatcgaactgcccagcgcggtccaggtgcggccgccgtcgggtggtcttgaccgcgccctgttgcatcgac

SEQ ID NO: 43773 - DNA, 548 bp, Arabidopsis thaliana landsberg
cttcttttttacagaatgctcacaaggaagtcttggacccggtgcaggtccaagtcaaggtccttcttatcctcctccttctccagggctcatgttcccgttatctccatccgggttcttccccatgccaagtccaagatggaatgattactaggtgctctttttctctccatcagattcattaaattaagtaaatcggattatgtttattcaggtttccttaggttagtctgtacctttgaaagaagcttaaaacttcagagcctacagtggaatagacgcagcagaatagatgcgtaaaacactaaaggagcttttagaagaaagaaagatttataggggtttttctctgtgggattttaataggtcaaaagttgggaatcttgggatgatgatgattacctttgtttttgtttatcacaaacttagttttatctttgcttacattgtacacatactacagacgaactcagttcaatttatatgattttttgggtggttttaaaagcaatgtctctttacttttactaaggaacaaaataatgatc

SEQ ID NO: 43774 - DNA, 985 bp, Arabidopsis thaliana landsberg
tggaataacacgagtttgcgagttcaaaaaaaaaaaaaggctgatgacgtcagcaaaaccccatagaaaagttaatatttgtcattacacgacgttgagaaaagtctccggtttataaagcctccgttgatttaaatctcgccggcgacttatgcttaccgaccattatattaactaatctctcaggaacatttaaatgaagggttggtttaaggaggagcatcatctgactctcggcctcgaagaaggtgagagagagagagagagagagagagaagtacatggaagtaatggagaaaggagcaagagaattaaaaacccataacctctctctcttctgctttctgtcaaacgccattaaaaacccatcagtatcagttacgcaatttctcaaggcagacaggtaagaagagagagagatttgttttttgggaatctgtaatgaatgtaaaaggagcgaaaggtgggagagacgaatgcactaatggcggcttatgataggctcgagacgaaaggtcgattcatccatcaattactctactctcgtttctctctctctctcagtctagaagaaccataattacggattttgaaatttggggattctatgagattcttcttcctctttggttaaaaacctggagattatcgttttccaattctagccttttcttctccccttaatatcttctctctgattctcttccgtttcgttttctctattccccgagatcttttggttaaaggaagataaagtttgaaacttttttattgtttcactaggcttgcgttaatggcgacagttgtgtgatggtccagagttagcaagttttacttactcgtttggttaaaaggacagagagtagagggaaaaaggctttgttactgttttttttcgtctgcacattactatggagtttcacggaaccagtcaaaatcacgatagctctgaaacagagaagaagctcaagaagaagaagcgatt

SEQ ID NO: 43775 - DNA, 733 bp, Arabidopsis thaliana landsberg
aagggaatttaatgaggattaaccagaaaaatatgtgtttttcatgatacttaacagactaaaaacccaaagatgggcgtatgaattgaaaaacaaacaaaacacattccatgtagtgaagattacacaaaaactggtaaacaacaattatgtgaaaacaaaactatataaaagaatgagagactcttgttgaattttgcccaaaaaaaaaagactcttgttgaaaataaaatacatgacaaccgggattttttttttctacaagtggaatttttatttattttatttttatttttatatgtttttattaaccagatattaatttttatatacatacacacacacactatatatgaatgtatgtatgcggagatatataaggagacagagcaatagatctgaaagacttgtcatcatcttaataaacccggcgggaaacgtaaaaaagccttttagcttctccctccaaaggatctgtttttttccctttttctctgattcttcttcctaaaccctaatttatccaatccacgaaattccctagcaatttttttgggggtttagtgaaagaaggatagagagagtgagcaaaggtgtctcctttacgaagccctgtgctttctccctacgaataatctccatggcgtgtgtttgtaacgaaacccagatcgaaattgatgtccacgatctagtggaagctccgattcgctacgattctattgagagtatctac

SEQ ID NO: 43776 - DNA, 377 bp, Arabidopsis thaliana landsberg
gaagaaaagataaaaaaccaagaaaggacggtgatgattgatatgaacaagaaaattatagattttcgagtgatgattacaccgagataacgtgagtttgttttctcacccatctctgagagctaagagaagagattggagaaaaggaatcatatatcaagaatctgaaattacgatgaacagattcatagaagaagaggaagaaagattgtgtagatccagaatccaggagagaaaatatctaaaaactaggtttagtgatcgggaaatttttcccgagaaaataacgaagtgagatttttgattagagtgacaagaaaatttcgaggtagatgagaaacgatgaaaacgccgaagagagaaggaacaacacaaca

SEQ ID NO: 43777 - DNA, 963 bp, Arabidopsis thaliana landsberg
agagcaacgagagaagctcctctattcgctgtgttaccttctacaatcaaatcacattcctccatattacccaaagtttacaagatatccgcattcccactcctgcggtctcttagtaactctgaccaaaaaaatcttcctccactgcaaatatgactctgttaactttgtgactgaccatactttccgcaccccacacaatactgagatgttgaacctctaaccttgttctgatattgttgaagcacgcctagtcgcctacgatgcaagagaactgttaaaagcaaaggcttcttgttgtctcaaagaacacaacaagtgttttacttgttgttctgtttcttatgagaaacacaatcgaacagagcaaaagagtaacaggaaactgacttttattgaatcggatacttgtgtgtttacattatagcaaagagttgcatctcttctacttgtgacttttggacaacacaacataacttaaacgtcacgactcttaattaataactaacttaatacattacaaactcaactatcgatcaacaagaacaagcccattctcatctcgcaaacccaagccacacctgcttaaaaattcctcctcgaccaagagaggccaatgttacttacatttaacccaatcatacctcggaggagtccaaaaccacactcaaacaaggatccaaaataggcctatcctccacaccattctgctatccaattaaaattctttcttcttcaacaacttgagggcaaaccaatcttcaacatcacatctgattttcttcacagaatcaaaagcagagaaacacctatcttcaaagaagaaggggtttctacttttccaatccccccaaagtgctcggggaaaaacttttaaaaactccggcgcgcccaagtaatttttttttttaaaaagagggggggttttttaaaattgagaaaggcgggtctttttttttaata

SEQ ID NO: 43778 - DNA, 615 bp, Arabidopsis thaliana landsberg
caattacctataatacaataatctaaatctaattggattgaatttcaaaatatgtaaatcctatttgtaagcttttggattgttctactagatacatagctggacttcatagctcaacgcagcttgtaataaacgacaacaatgtagagctcctcggactcgccggagaagtatgtagttaacgaatttttttgtttctattttttgtttttctgtttttaattttaatttatgtttttttttttaaatattgataagggcaaaatcgtctaaatataattcatttaaaaaaaggatatgtagagtaaaaagagattttagaggtttgttgtgttcaaaaggagacatgacaacgcttactcaaaaaattgtctcccaagttgacgttttaagttgggcttttaaagtagatggcccaaagcctattaatgtctccctaggccttgttaataattaattcaacacgtcctagtcaactcttacattgttgaacttgaacgtattgcaagtctgatcgtttgttttcccctgaaatgacaaggccactaacacgtgatttgtgaatatgacctaaaaggtgaatcccaaacttttctttctgttaccacaatactt

SEQ ID NO: 43779 - DNA, 611 bp, Arabidopsis thaliana landsberg
ctggtttcggatcctctctctttctctcgagatcttaaggatcttttaaaactttagcttcaagtcttgggaaaaagatgaagaagctaaagatcctttaattttcttttctttttttgtaagaaaaaaatagtttcttgacatgaaattttgggagtatgagaagagaaaatgtaaatgcctatgtgaattataatagtccatggcatgtttgagttatattttttcttttgtttttagatttcggtatcaatgtctttcgagggatatacagatgttaaatcaaattttaatatgttgaaatatgagaatattatacgagaaaacaagagtaagcatttttttttaacttgctatatagtttttttttgggtaagtacttgctatatagtttaaatgacgtatttgtgatttgatataagattgagcaatagtttgaaattgattctttttgtggtaagatttggtgacttgcgaaaagtgggaaataaaggtataaaatatctttttccttcaaatgcttttgatagtacagttttccttttcttcacgaaatcggtagtacaatattttctgaaacaaataattagatatcttttttgattatcagt

SEQ ID NO: 43780 - DNA, 729 bp, Arabidopsis thaliana landsberg
cacatcaaattcactgcaacaaatgaatcatttaatcaataacttttggacaagagcgcattttaagctcctcatttagtcttatgtaatcaacaaattagacagaagttaaagtttataagatgaaaggaaacaaatcacaaaagtgaaataaagaatccttcttgaacagggtgagaatgatatgtagaaactttttgtaagagactaaaacatagtaatcccttttatctagtaaaatgcttaccatcacatgatctaagacaaaactctattcatgtcatgtttttgtattatttagatgacataaagttttataatagtcaattacaaagttagttgcagacataaaagaagcattgactaaggtctaagggacgtttaagggggaaaaatagaagtcaaaaagagattggaacattacaaactattcactttttagtatttgggtttccccagatgtttgcagcattttcctaaacactgagcacaagaaaacattgtatatactattactaccaaaggttgataatttgaggcccgaggccatgaaccttactatgttatcaccctctaatcaatcaacaaaataagaagaaaaggaggtcccactagaacatgaagttagatcaaatcatcaaaatatgaatattgaaagcacatggcctatatgtacgaatttctctgattagatccaaccatgttctgagaaataaatgatgtaagatg

SEQ ID NO: 43781 - DNA, 554 bp, Arabidopsis thaliana landsberg
gtttgttgctgcttaagaatttatgaaggctaataatgggcgcatttggctggaaagtactgaaggtaaaggcactactttctacatcgcttttccatcagcccccagtaagtgatcacgttaattaattcgttagtttgaaatgtaattttaataattaaattagtataatgttatactaatcagtttgttataatctttccgaataatgaaaagattgttttttaccgcatttttatttttatgctgtttatggcttcacgcccaaaccattaccggcgaggtttacagcgaaggaagtaatgaagctattataggagccacggtttactacggagggaccatggagggtactataaccaacgcaaagggtggatttgaactaagagccaggcacgaacagatcccggtaattgtgagctgcataggctactacaccagtagggttatctacaagcccggacagcctttaattgtacgcctgaaacccaaactggagcaacttaaaacggtaactatccgcgctaatgatatggaccgcgctgaagagatca

SEQ ID NO: 43782 - DNA, 918 bp, Arabidopsis thaliana landsberg
  unsure (1)..(918): unsure at all n locations
atgttatgttttgtataacgagtatcaaatactccatctgctagatttatgatgatataattattatataataaatgacaaaagtaaatcattaatttaatgtttagtaaatgatggctagatctcgttcctaactttattttggtcaattgtaagattttaaatcggacttgtccaattaaggcttggtttttatttattattgttcgatggttttttaaatgctcatatattatattccatatatagttattacttattacacactaaaatattgagacgagacgaaacaagcaacgtttagtaacgtaaatttagctgccctcaacatgtgcagtgtcacaagatccgagccgcagggaatattaatatatttctaagacagttgagttttgtttcgtgagaaatgattaaagaacttgttattaggaaaaattaaaaggccatgacaaacacgtatctttaatttgcaaaagaggtggtttatatattcttgcttcttctccaatcggctatttttttcttagcattctactgtatgtccaccaatcgattattgtcacatttatttttaaaagagctatatgatgaagacaatggtttgagaagaagaaaaaaaacttgccaagttgcaggtttaagtctttgagaagcaactcccacagaaattcattcaaaacttaatcgatcaaacaaaaaccaaaccaaaccaaatttaaccgaacaaaaaccaaatcaaacgaaccgaattacttttcggttaagaagtcttaccgaaaaatttagttatttgtttttttggggtaaaaataatttggaaccagtaacctggcaataaaagctccttttaagaaaataaatttaaatggtnaaataatttaaaggaaaaaaaaattattttttgggaaaaaaaaaatc

SEQ ID NO: 43783 - DNA, 745 bp, Arabidopsis thaliana landsberg
gctctcagttaattttgagtttagggtatgattgtcatttggttatatatgatgattagcttatatgaatttattaattatcaaggaaagcgtgcgacggagataatctaagccattgattattttatcaatacgatacgtatattaaatgatagtttgattttattttcagcaccatcaattagttttggggactatttactcgtccctacttgtttacatgatggagcttattaaatgctctcgccgtctcgaaactcgtagtggaaataaaaattaaacaagaaaatggattttgctatcttttccaaaatttgtttatcattttatataactggaaatctgaatccttgctagtttgctagattcgattacaatcccgtaatgcgataaaatacgggatttaaattaaggatggctctttttaatactactatttataaacaattttgattcaagtaattttttctacagtttaacattttaacatttattcaaaaatttaaaaatataagattctaaacaagtgttaaaaattttaaaatataagattttaaactttttattaaacaagtgttaaaaatttaaattatggataaaccatattaaatttataatatttttttggggtttggatattgtgctatgggtaaaccatattgaaatctatcagataaatgttaaaaatttaaattatgggaaattcctcacaacggtcatacttgtcttttacttcgtagccatt

SEQ ID NO: 43784 - DNA, 944 bp, Arabidopsis thaliana landsberg
caataatatcggatacaatattattttaatcacatcgatcatagattcatgataatattgccaaacaaaatgtaagcttaaaaacttttaatgttaaaatgtccaaagaaaagctcgacgtgagtcaaagcaagttgtttttattccaaaaccatggtccagttacgaccccataataagatacatacaaacttgaaaagttataaaaaaaaatcaagaaaaaaagatattcacaagacatattctcttcatatttcaaccaaattcgagaatttgaagtcgaacaattccacacgtaatatccctctagacctctggtttcttctttccttcctataggtctcgccgtagtgatctaagctttatgaaaacatttgaatttcgagattcgtgtaaatacataaataaataacaaaagatgcaaccaattatatagcaaacgatattattaataaagattattaaattataacacaccaagaaaaattattaaagtatatcctagcatttactaatagaagagtctaattttaattttgttattgctcaaacacagtatataattttagagatttctttggtttacgtcaaaaaagtctgtctcaattttaatattttagtcggtcatcagtatcgtccaaacaattattttacttttgttatgataaaatacggaattcctcccctaatgacaatcaaattcgaattcaaaagagctaaacaacatatttctaacaaataatatgctcatgcatgctaatatttactgtaacatttaaaaaaattaaggatggtaaacataatctgcttaccaaatgatggtaaacataatctgcttaccaaatgatggagatactcaagagtccagctgtaatacatcttgcatgcaatatcttgatattagcctccttttgttcacccactctcttctcttcttcttctca

SEQ ID NO: 43785 - DNA, 280 bp, Arabidopsis thaliana landsberg
tacttgacatctttcgaattattatttccatagaaaaaaaaaattgtaatttgttccttcaacagcagtatttccataaattctaagatacaaacaaaaattccaaataagtttgttgtccacatttaattacaaaatttcgttggatattaatgaatttttataaaactcaagacacttctttttttggtatctagttaaaataattgcatttggattaccaatttcttatatatgtatctctacagaaatctcggaccgagtatacgtagatggggag

SEQ ID NO: 43786 - DNA, 1023 bp, Arabidopsis thaliana landsberg
cgtcggatttgcaatatttgtatcaagatttaagatcatcagcgttgttttcaccgtatgttagttatctcgaagatttagagaattatcactgtttttatcttcgatattcaaatcgttgttttcattgttattattctttaaataattgtttccaccaacaaaaatctatataaaaacaaaacatattataattatatactttttcatgataaactattgtataatataacttattttatgatttctataaaaaaataaaccttttgtcccaccatgtacctttggttcaatcctaatttacacatatatatatatatatgtatgtaataaattggtactaacttgtctaagatatatttttttctttttttttcaagacttaactagtaatctctattgtattttttcatatttataacaagctaatacaaattatttagtttgatactggaaaaatatagtatttgtttaatatttgaagatttgttttaaaaaaaaagttataatgaaatataaattttggaagattactcccacatctaaaaaaatacgatccattgattctcctctattcaacggttcgatatcaattacacacacgaagttaaactcttccctcccacaccttataaaacccctatacatgaaaaaaaccttcatcttgaaaaaacccctttccaagttttgcaatttccactgaacagaaaactttcccggttaagcaaaattcgccatggatgctcaacaacggagaactgatattcctcgagcaccaccggtcggagaacccggtggcgatatatcttcgattctcattgctttcggtgttttcgctacaatcgccgccttggtatgatatctgctctcttctcgtttgatctctgtgttcagattagatacacgtatcatcacaaactgaatcggttctcttaaatgtttcatctttcgattctgagtcaacccttttctaaatgtgtaagctttgtatctgaagttgacttaaagctgatgactttggat

SEQ ID NO: 43787 - DNA, 638 bp, Arabidopsis thaliana landsberg
  unsure (1)..(638): unsure at all n locations
ccttttcgattccgactaacgcctagcgattttttgaacagggttcttttcattcatttctgtttcacttttaagaccttgtccacaacttaacattggtttattcatcgctagctatgggccgggaaaattgaaacatgggttagagcctccaaaatctaagcttatataaaaatagctgccctaattatttttattgcaaaacaaggcccctaagtttatgaggctacaaaatttatcctcacgaaaccaccaaaatgttttattcttatagctcctataggacatgagtatgaccaagcatggctacaccaaagaccaaaggcacgaggatggaagaatagaatcatggtttgttttatatttaagtatttgatttaatttatctatatttgaactagcaaaaacaaaaacactcatatttacagattatagaagctataaataaaatgaaaacagatggtttaaaaaattttagtccacataatcgtaatactatgtatgagggactcatgacgcatacgaatgagtgttgntctttggttttctttcttaagatatcgcgagaaacaaaggtatgagacctatcctggctcaatatatggtccaaagaacgaaccccattgctacttttggac

SEQ ID NO: 43788 - DNA, 668 bp, Arabidopsis thaliana landsberg
tgaaaaaggaaatcaatctgcttttgcttttcttttttgtgattaggtgtttctacgtattcttttaagattctgtctttccctaatggtatagtgcgactgtgaaggacacaattcgtattccatatttctggaatggattctctgacatcagattatgacttatgataatatcagtttatctcactcacacaccaatgatattggattctatgtatacattcgagaatggttctgtttcaaactttcaactattaatgttttatcactcattgcaagaattgaaaccttttattcaaacaaattgtgtatgcatacatgacggaaagaatgaaataatgtgtagcaagagagaaaaaaacaacaacaaaagtacagagaaaggtttaaaaccctactaattcacaaacttcaaatcaatttgtggaaccaaattcttcccaaagattaacacaagatcattttccaatggagttagatttaagtccaagatctccttgctgctactgcaacgattaaaaaccggtctggaataaaccacagaagggacaaccgattgctcggctatcatgctcgtcctatgctttctcatgtgaccgcctagagcttgaccggtcccaaacatttgatcgcaaattgtacacttatgcatatcattctctttgtta

SEQ ID NO: 43789 - DNA, 532 bp, Arabidopsis thaliana landsberg
atatcgagagacgagtttacgatataatcgtaaactaggaatctcggacgattcgcgctagtcgaagacgaataaccgtaaagacgaactagattcttgtgctgaacggaagctatggcagctacttcggatctgaactctctttctcctttctcttctccttcgattctcttcactgctacttggcttccgtctttcaagactcctttaaacaccgaaccggaaccgcctttcccgatcaaagatctgaatccatcggtggcttcttcaagatcttcgagcttgaatttcgttggaactccggcgacttttctcaagaaactgtactcgattcgtagctctctgccttcggagacgaatcttgataccaagagctttctttctttgttgtaacggctacggattatgaggaaacagatcacggcgaggatcaaggaaatgtcgacgccggctatgagatagaatgttttggagagttttagagaaactcgggcggcgattatcaccacaacaagggctaagaattaatata

SEQ ID NO: 43790 - DNA, 249 bp, Arabidopsis thaliana landsberg
ccccctgtgcccggggcgacacccgtgctacaaagcccaaatcaaaggaacgttaaccaatcagggggagctagctacagacgcgcgatcaatactcggactgctggcagcaaccgggctgaccgaggcctggaagtcttgcatgaaccggacagtcacaccttggctaaagacctacctgctcttgagcacacatccacaaacactataggagctggccataccctaaatctagaccagaaccaaacg

SEQ ID NO: 43791 - DNA, 157 bp, Arabidopsis thaliana landsberg
atacacaggttaatgctataattcctaaattaatgcacattagaaacctaattaatttctaacatacgttataacacgtgtatacatacataaactacgcgtaaaacacataaatgtagagagagggagatatagaaaagaaaacagagagggcatt

SEQ ID NO: 43792 - DNA, 595 bp, Arabidopsis thaliana landsberg
cggtggggcttttcctcagatttccctagcgatgattaaaatttttgaagtattcgatttcaaagaagaggacgagctcgctgagtctgcagctggaaagttattggaaaaattcacaaaccctagtccttgcaattctccggttctgcaacgccaacgcatccaaagctgtaagttattactctgattcatctctaaacttcaaatgctgatttaaattctcgcttcagtttcagttgtggaaaaataattttggggttgagatatttgtaaacggagagaagttaagctaacctgggaattcttctgtttattttagttttccagactcttgtatatagttgaatgaacattgctttgtttctgcagtatgtgagaaataatgatactaatgctgttgtgatactacaattttatgggaggcactataatgatttgtactatattgttcagaagcaaataatttttatcatatatgagtgagttcttatggaaatggttaattgtggccagtctgcaatgaaaaacgtgttgaggaagaagaaatggaaggtccaagttgtgcagagcctgcaacagctgtagagtctgacga

SEQ ID NO: 43793 - DNA, 527 bp, Arabidopsis thaliana landsberg
tcttgtcttattatctcctacaggctacaatatgaggtgtaaaaacaggaaaataaaatatgaagaagatgtttgatgcgggtggggaaagaataacgggtttattcagagattagattagaatagtggggtcaatgtggaggaaagaaaagtggagtggaatctctttgaagcacctttccaccttgaataattttaactttgctcatcttctcttcacaccaatgcaaattctcttcgttcatttcattcatccttaacactcttgaaaccactttcaaatctattaatcccatcaatatctccatttcctcctctatactcatcttcttcttcctcatgtatttccctcctcgacgcatctctttcagcttcgtctttttctgttcaccattatatatcaacataatgttgttaataatattagaatactactcacaaaaaaaggtgagtaagagacattatttaataatgataaaacttagaaaactttaatactaataaaaacccctacactacatgtcttg

SEQ ID NO: 43794 - DNA, 1222 bp, Arabidopsis thaliana landsberg
agttgttcttattctgcgggcgagaggaggaatgaagagtttaatcaatgagcctcatgaggatctttcctaatttgtggaaaagcttcatgaccaaattgatcgtttatgatctttagggtttgtctatatatgaatggtgaaacctcgtgtatacatgttttgataatttaatatagaagcattcttaaattcttatttttaaaaaatcccaagtaaatttgtaatgattcatcaaggaggaaaaacaggaagaagaatgtttcaatgattaaaccaccaccaaagaatttcttgagatgtgtttatcctatgaagtatgaacatatgtagggtccatcttaactatcaatatgctcataatcctatttaaatgtctcaatttttttggtttaaattgacgataatttcaggagtgaaaataaaattataataaaccttgttcacaaaatctataagctatgtaacttgttcttttttcccaacatttaatattgttagtttttagaattcgggtatatcaacttttttttattagttactccacagactagctaatagcctaatactatcattttcttattcaaatgtgactgcattgaacaatgataaataaactcctcgaatattgatcaaagtagtgtacaaatgcatgtaacatttgaagacaattgtcagtatcgtttgctattaatgctaatctaacctaagataccacatgaacctagctagactgaaattttcttcacatttaaagctttcaatgaaataaagacaaagacagaccaaggaacggatcaatgtacgagtaatcatagattgatttgccttataattaatgcataattaaagctgtaattagtgattacattcagaaaagagatttgtggtcctgcattttacacttgatcactttgacctagttttagggcacattatattttgggaccagtaagtaaacactcaacttcaaaaacgttattcgtagaacaaaacaagagtttatttaaaccaaaaataaaggtacatagaaaaaggcagacaatgaggaaaacaattagagagacatagaagaattaagaggctttttggtgaaatgattgttggattaggattctttttataatcttaggttttaatacggatatgaatatgtcttgcactttaattctttcctaaagttaaaaccaaaccacctggataactcataaatagctcaata

SEQ ID NO: 43795 - DNA, 437 bp, Arabidopsis thaliana landsberg
  unsure (1)..(437): unsure at all n locations
tatacatgtcgcnatattttatcacttctctattctatgttatcccaaaattattacatcggtatcgaatgttaaattactcatatttttatcttgaatacttggtaatacggaagagaaccagacattttaccatttagcgctacaataaccggaaaattatgaacatacatggtccaatgatttttttatttttattttgctttttagtttataattttcttttattctaaatatttagcaattacagatctaagacaacactcacatacatttttagccgctttttatagatacaacttacaaatttcacagtcagactaattcaaaggtgaattctggcaagagtttccacaaatcaatcttagattaaccagtaacgtctaagaataaagtcacatcaattttagcctacaagtttcaagttaaacccgact

SEQ ID NO: 43796 - DNA, 280 bp, Arabidopsis thaliana landsberg
tttgatccactatagttgggcctaaggttttatagttacacttccagtcaaatatctttacatatcttatcaattatagttggccgcaaaataacatattattcttttgaaatatgtgtatggattcaattttagttttgggcctacttaacaatctcatcatcacagagtttgttacacatctttggttacaccggtctgagatagtggattggtcaaacatttaaaccgagatttaacatccaagtctactagtttggttacaaaaattgagattatg

SEQ ID NO: 43797 - DNA, 820 bp, Arabidopsis thaliana landsberg
ttcttgtgcagcatgtttacatgttcaatctttaggaaatgcaattgttcttttttcatagattgtgatttgtgaatacaaacttttggaatgtttcattgcctttcgggctgagccatctattatatatgaatcccatatgcgagtataatccatcattaagtttataatataaacaaaaattaaaaatatgtgtttatttaataattttagttgtacgtaatttatagccaatgaaatcttaacacaacaattttttttcttttttaacacaacattgctttagtgttattagtgaatattttcagaagtttagtctgcatgaagaaacgtccaaaacccaacaaggatgctaaggctagcaatgagatatatacactttaccttaatattaacaagtgaaaaataaaataaaaattgatgcattttgagccaaaacattaagcatggaagacatcatgtctatatatatatatataagatttcgtcatttttccttctttttttattctacataattttaaaatttgtcgtccatacacaagtaaattaaacgttttatgaaaattattatagttatgtacgtactattgtcatggtgattcaacccttaggtttgatcacacggccatacttctacttcttactctaaaatgatcttccatttttgtccccctcattacatgaccgtgttctgtttcatgatatgcttatccgtctaccatagtaggcattctcgcatattcgaatcgcgactcaacctccaagatattcccatgagtgcgtcctcgcacaacagtccccattccagatgccaaat

SEQ ID NO: 43798 - DNA, 1344 bp, Arabidopsis thaliana landsberg
aacaaaaaaagatttttttggtttgtttaaacatttaatactttttcatttgaaccattcttatttatggtattttctacagccaatttgtcaggtttagaatgcctagggaaatatttaaatttattttacaagattgattagtaataaattattttagacagtagtctaactgtgtgtaattaattaatttcaaacagttggactgttggagcaaacaatttggaattattttaggctaggtttttgtattgtttttttcaaacagttcatgataaaaatcgtcaattggttttttaccgtattttcttaactggtgcctcatcacttgattccattttttatatatacgttaaccttacattatttctaaaaaacaatatcgtacatgtgaacgaagagacatatactatataatatatacattttgttatatgtgtatatatatatatatatacatacagttgtatatgaagctttttacatgggtgacaagagccgggaacaaattgtatataaagctaaatataatataaggcttttgaatgatactcaagtttgactaagcgattatgtgatttcaattaattatagtgatttttgacgcatcaattccagtgatttaaatgagaaatatatttaaaataaataaaagatttaagcaagaaacgtaaactaggttttacagaagtaaaagataaataaaaaaatcggcaagtgaaagccaatatatgttacataaaaacatagcacttacaattttcggtcgaaaaataagaaagaaaaattctagatatatatacaccagttaagaaaccggttcacatttgagtcagtggtatggaaaaactacttcgatgacgttaagctagtgagtaattttcttgctgtcaacatctagttggaattttttatgtttgagtattgaccaatgatcgacttttgcgggtatgcctctttgtagagtgacattcgttaaatttgccccttcttaaactattttgtgaattttatcatttatcaggcaaaaaaaattataatttaacatacatttttactcgttatttttgagtttattcgtttttttttttaatttttaaaaattagtatttgatataaagtacatgtttttgcagggaaaaattgtaaataagtatattgttaaatgtataaaaatgaaaaaatccataaactattcaaaatggtattttggtaagcttgtttcccaaaaaatgcatttaaaacaataatccctttcattttttgctattgccaaatttctatagctgttgaaaacttataaaaatgacaataaattttagtgtgggatatcccacttgaaaa

SEQ ID NO: 43799 - DNA, 525 bp, Arabidopsis thaliana landsberg
  unsure (1)..(525): unsure at all n locations
attctgcgtttagattcagatccagcagtagataaattaatttttccgatccaataaaattcatttgatgctttaannnnnnnnnnnnnnnnnnnnnnnnnnnnnnnnnnnnnnnnnnnnnnnnnnnnnnnnnnncaaccagtctcatttgttgttaataagttaacattgatacgtacgtcggtacgcgagtggcaaaacaaacacatcagctctaagacgaaacacgtttggttttccaaaaaaagaaacgatgtattgataagctatattgacttaaaaggtaatatagtaacagctatcgaaaaatactacgaataaattagctaaattataatattaattatattagactatttaaattagcaagaaatctcttggaatgatctttctattacctattttggttcattctcttgttaattaaccatagtaatccatttgcggattggcctgtatctagacatttgttctgtcgctaccactagaagtttatcattttgaaaatgaaaagataagagagat

SEQ ID NO: 43800 - DNA, 720 bp, Arabidopsis thaliana landsberg
tacataatatgaaattataaacattttgaagcatatatgcaactacttgagaagttttaatattattatacaatcaaacaataaaaattaatatttctagatatttatcatctagatctagacatagatcgagaaaatatattaaatctctattagaagaaaaaattataattatggtaacaataaagtcatatggcaccactgtagacaaaaaatattcaatttttatactgatattaatatactaaaacataatatgttaaaaatagataaaatcaagatattattttaaaatataaataaggagagaacctgtaatgaaaatgataaaccgacgaggaaacacccgatacatgttccagtagcagaaatctgaagagataaaatattaaattcattatatgtaattctttcaacatatacatattgacatatatatagggactagggaggcaatatataattatccaccaatgtataataataataataaaagataaaaaacaataataagttggaactacagttataacataaattctttaaaaactttatttttaatatagtgagaaaaggtacttgtaaaaattactctgcttttgactaataacattataaaaaaatgctaggcacttgttttttcttactagaagtaatgggcgtcttcctgatttatccatcaacagtacacctaaaagttgccataagggatctggaaag

SEQ ID NO: 43801 - DNA, 653 bp, Arabidopsis thaliana landsberg
caagcttggatcttacactttcacttcaatagttttccttttgattatctctgttccgatttcgattctttggatgttcatgaaccagatcttgcttttgcttcatcaagatcctcaaatagcagagttagctggtgtgtactgtctctggctggtaccagctttatttggttactctgttctcgagtcgttggttcgatattttcagtcacaaagcttgatttatccaatggtcttgagctctctagctgctctgtctttccacgttcctctctgttggctaatggttcataaatttgactttggagccaaaggagccgctgcgtctatcggtatctcttactggctcaacgcggtttttctttgggtttatatgaaacgctctagtcgttgtgtcgaaacgcggatttatatgtccaaggatgtgtttgttcatacaaatatcttctttcaatttgccattccttctgcaatgatgtgttggtaagtatgtaaacatttattaaaaatccatatagaattaaccaagtgatggtagtctagtggtggtcattgttttgtggataggtgaaagatttaaaatcttaggttacataaataaataaaaaaaaaattttttttcccttcactaatattctattgacacttatttt

SEQ ID NO: 43802 - DNA, 571 bp, Arabidopsis thaliana landsberg
actggatataacacatatcaccattatctctaaaatcctcatttaatatttctaatatccgataattgattatacgctggcataaacttaaagggtacgtgtagtataacctttcaatgtcaagatcaattatatctatgctaaccagtaaaatacaaaggcattattgtgataaagacaaaatagttcctcttctatggagtcattggtaattcatattgcctgaaaatgatttgatatatcagttggttctttattttggcataaaatctgcatcctgtcaccatttcttgggattttgcaaagattttatgaaggacttaggttatgaaaactatcaccaataatgtagaataatagaaaaagttacatttcaaacaaaaataatagcttttggactggactagataactttgtttgtctattacaataaatacacaaatagacaacaaacataattggtaaattgagaggccatggcagcccgtggatgtcgcattcgtatgaaacgttgttgtcaaagttcgtagtctttcactgtattacaatatgcagttacatatactcaaga

SEQ ID NO: 43803 - DNA, 568 bp, Arabidopsis thaliana landsberg
  unsure (1)..(568): unsure at all n locations
gctacccatctgggcttgacatctcccaaacaacagacgtgcatcctttagcttccccaacctgatgtacgtatttataacagtcacaaaagctaaatgatcaggccgatggccttcatcccgcatcctttcaaatactaagacagcttcctctggcaaaccagccttcacatagccagaaaacaaacacgtccagcaaactgtattaggatccactatccattcaaaaactcgtcgagcatcactaatacggtcacacttggcatacatatcaactaaagcccctccacaatacgagttgcgttctagccccattttaatcatactgcaatgaatttgtctaccaaactctacattagtctccctggcacaggttgataaaacaatcgaaaaagtgaatttatttggaaaaatctgattctcaaacaatgatacaaaactccttaagacctttcctggtttcccaatgctggaatacatcgatagcattgagttccacgccgntacatctttttaaggaagtcgaattgcttctcagcataagagacttgtgcacacttggcatata

SEQ ID NO: 43804 - DNA, 536 bp, Arabidopsis thaliana landsberg
tacagttcaggtttagtataccagttccttctctttgattttttttgttggtgtttatcagcttctccttcctagggcttagttttccctttttgggttttaggtagctgtctttgtcactttgtatgagttttgtgtatcctttctgatgtttactgtaaattccagatgacaaaagaagaagaagatgcaaatcatctttttcgaagtttcattattatttttcctagcttttcaaataatcaaacatgaaactaatattatcaacaaactaaattacctttttcattttgttttttgaagcaaatacatgtatatccaatgataacacagaagtaaagaagtaccttactattattacaaatcaaactttaagatgaagttggtgtattgtgtacaaagaaggagagagagatctgccttccattacatagcaaagttggtctggactttacttacgagatgctctccatacacagctcttttgaaaacttggcatcctcctctccctcccgggtacttcctgtttacatata

SEQ ID NO: 43805 - DNA, 907 bp, Arabidopsis thaliana landsberg
tctagaacctcaaccataaatttcccatcaagtactgcaattgaccataggaccagcgacgacttgtttctatcttgacaaaatatcagattatgcattgattgtatgacataaaactttttgtgaaatccacggagacgatccattgacaatgttttcatttcagaaatggaaataaacaagtttcatgctctttagcggcgcgctcagcaactacattacacatccttgaatggacttaaacgaatatgcaacaacacacacggtgcatctaaatttcactctgagaagagagctacacaaacccaaatctcatagatcgcagactaaacctctccttaaatggggagactcggatataaaagagtggaacgttgctataagcagctacatgcgtactggaagatgcaacgaagcgcttcgtgtcttcaaacgcatgcctaggtggagttccgtttcttataacggtatgatttctggttatttgagaaacggtgagtttgaactcgcccggaagttgttcgatgaaatgcctgaacgagatttagtttcctggaatgtgatgattaaagggtatgtacgaaacaggaatcttgggaaagcgagggaattgtttgagataatgcctgagagagatgtttgttcgtggaataccatgttgtcgggttacgctcagaatggttgtgttgatgatgcaaggagtgtttttgatcgaatgcctgagaagaacgatgtatcgtggaatgcattgctctctgcttatgttcagaatagtaagatggaggaggcttgtatgttgtttaagtcaagagagaattgggcgttggtttcgtggcactgcttgcttggtgggtttgttaagaagaaaaagattgttgcggcaaggcagttttttgatagtatgaat

SEQ ID NO: 43806 - DNA, 460 bp, Arabidopsis thaliana landsberg
  unsure (1)..(460): unsure at all n locations
ctaattgtgactgattgatatataaacttacttcaaagttttttgaatcattcaaagactttatagacgtatctcaagttgaaggccttatcacacgactttggatccgaagtgttactagggccaattctgctccgacacgtccaatccaaaagcatgaaccgaccttatcgccaaagaagctcgacaaggaagaaatagtccctgttaaaccaccaccattacgtgataagaagtttgcacaactcattgcttgctccgtatccttagaaagaattttaacgacaagcagccaacttcctccgctccgccacagcttttcttagtaactaccagaggagtacaaagttgttcatctttaaacttccttcccgacgtctcgttcatgaccgtggtggacatcaacttctccatgaaacactcatccaatctttcacgtgtcantcctcaatcaacatgt

SEQ ID NO: 43807 - DNA, 872 bp, Arabidopsis thaliana landsberg
  unsure (1)..(872): unsure at all n locations
tgtttattaatcatttttggattctcaatgttcctccaatttactatagggacaattagctgaatagcctttttgataacttaatttgtctttatagcatgtcttcatttctcattcagtaacttacatgcacttttaaaaactgtaaaaccattcttacttgtgaattggcgttaatttagaatttccaataacaataatatgttccagtgaataacaaatattttagaatttttttacacaactatagaaaatttcaatatttccttaaacctgtacattgttgttcatcttccacattgacaattggtcagtttatacatacgaagaaacatggtcacagtagtaatagattcatcatttatgtagtgatgatactaatactatatgatgaccaggttacgaagaggagacgaaagagagagaagcggagatggagataggatttccaacggacgtgaagcacttgagccacatcggagttgatggaaccatgaccactttcgacaacacctcctcatcttttccattctccggtttccatctcaccggcaccgtcgtctgattttcgcatcttctagtactaaatcaactacatatgacattttctttcaatagtttcataattagtcgtaagatcatcttatttggttgcaagtacgtacatacataccttaaaattcaataatcaatctcattcctttaactattcagttttgttaagtttttgttactcatcatcttttacnaaactcgttaccgttttaatttaaatgaaaataattcttaggattttttttttccggtctttgtaagaattttctagagtgtaaaaaaataaatcttcaattttggcttctagaataatggtt

SEQ ID NO: 43808 - DNA, 156 bp, Arabidopsis thaliana landsberg
tatgcttgaacttgttctattaacgtcgtacttttatgtagcgatgtttaattaattgattctcaggaaccaaatgctgacccgattccttgtcatactaaaataaacgattctaactctaaatgaattattataagaattttcttttttcttttt

SEQ ID NO: 43809 - DNA, 606 bp, Arabidopsis thaliana landsberg
atgtgaggatgggtcatgatggccaacaccaaaactttatagattaccttgtgaaagggggcactcatgattttgtccaaactcactaccctattgattttggtagcttttgccttttttgttctatttcctaagaaaattattaatttaattaactagtgtatcttattgttgggaaatgggggcccgcttatcatttttcacccttaagccatcaattcgatttgactacattactatgaataaatgagcccaaatgggaacaaaaacatttgtcacctcttttaacctttaacactcttgtcaataatgtgaatcggaatcacaatcccacccaaaaaaaaaaactagaaaattcaaatttcaaagtgaggattacccccaaaccattcctttaagcaaccgaccttttttgtttgttagaaaaaaaactactatatagttgttgaatattcatatataaaagtctagattagtagacatcaattgttgacaacgatttatagataaacttaatttgaaatgtcgtttcgaaggtaaatcttacaaagggatattagaactagaaggggttagaagtgataaacgatgagacataatttggca

SEQ ID NO: 43810 - DNA, 728 bp, Arabidopsis thaliana landsberg
ttgacggataagaatcgatcagtaaagtattcagaattagaatgatagatggacaatagagagatagacaaaatgaaacttgaaacagattatgcaagaaaaaaaacatgaaaatgagaaaaagagagaagcatgcagtgtgattagaggactgaccagcgagtttgggaagagatcgccaattttgatgaccatttttaaggataaaagatctgagtctttcactttcttcatcactccatggccctctcttcacttggcttttgtcacagcatggtgctcttctattccccatcacaccccacttttaattttagagaatcttatggggacatgtaacttttgtcatcatcatcgtgttatatatataagggttaattatgagaccacgagggtcatgccactaattcatgtacaagtaaacctactttaatttattaatttatagaattgagtatctaattcgcatatatacattttcatcaaataatcgtgacttttttttcatttgacagccttaattcttatttttgtaaaatatatttcctgtttccagcactcgtttttcttaatctaaatcaattttcttttcatattcaaatattttctaaaaggttgaaatattaactaatttcaatattttcttctctgatttaaattgtttacgtgaaaagttggattttcaaagttaaatttttaagactaaaagtctttgcctataaaaccga

SEQ ID NO: 43811 - DNA, 746 bp, Arabidopsis thaliana landsberg
  unsure (1)..(746): unsure at all n locations
gcctagatataaataaacgaataaaatggtttggcgggcatttctttaaatgccacccaattttgtttattccatatattacctgtcatttccctttctttgataaactacataacaaaaacaaaagaagaagagggacaaacattttggggtttacatcagaaaaacaagctgtacctatttccaattccgaataagataattagagtttaattaaccctaatagattattttagtttctttttacaaagttgttaactatgattctggcatgagacaactgagaaaacatattgctcggacttgtgtcggtgagacccgaatcagaagaaattgtttagaggggaagatattgaacgttggatcagagggacccatacaacacacccaccaatccaagggtcgcgatctatttgaggtggcaaatggttcccacttacccgcaggaatattatgggaccgctccttaactcttgcaatgtcacttgttggtgcatcccactcttctcttccttcttctctcttcaagataaagcgataacataaacaaatgattatttttacaagatttgatttgctgcctatattactccattatgcaatataataaaatactaatattccagatctttatacggttttagataccaataaatatctgacactgaactaaatcgantaaaagtataaataaagcaccatatgttattaaaatataattcacataaaaaatatcanataattca

SEQ ID NO: 43812 - DNA, 561 bp, Arabidopsis thaliana landsberg
gttctcgtctatgacgtgaatactcttaaaacctttgaatctatcgacaactggcacgatgagtttatcaaacaggttgcaaaactgtttttttttttaatatctgaatttcataattgaaaatcctacatctcctagagacgggatccaaaaccgtctctttgctagtttctggcgcataacattacagttatcctgtattatattgagtacttaatatcactagctcttacctcaaacccctcataattttcaggcaaatcctgagacacctaccaagtttccttttgttttgatgggcaacaaaactgatgtaaacaatggaaaaccccgagttgtaagatttagtacatattctctaaaaacaccttttctcttgatccatctaaactctaatttatgcgggtttatcttacgcaggttgcaaaggagatagctgaccaatggtgtggatcaaaggggaatatagtatactttgagacttcagcaaaggcaaaaatcaatgttggagaagcttttctggagatagccaaaaaggctctcacagatgagggtcaaatt

SEQ ID NO: 43813 - DNA, 525 bp, Arabidopsis thaliana landsberg
aatatcaaattaagcaaaagacatcatttagttggtaaatattatagtctctaaccactgccagaaagacaaaagtagtgaccaaattcctagcatgtatgtgcgaaggccttgtagagattaaccattttaatttatgtgtatctttttttcaacaagacacgctttataaaactctcaatcaaaatgatactatgatttggggggaaaataataatttgactgtctctatcgtatttatctcatgatgattcacctgggatacgagtttgggtctgttttgaaggattgaagtgtgtttgtgtacccaaattgattccagtaaatatttgatgatgaaaggttttttttttttttttttattactttccccttcaacaatagttatattttatgattttagatgtagttttagtctttgttcaaaaaaatatatatatagttttagtagtaaattgatgcatttctacgaaagttaatattttatgttttatggcttgtttacactaaacggttttttaattc

SEQ ID NO: 43814 - DNA, 627 bp, Arabidopsis thaliana landsberg
  unsure (1)..(627): unsure at all n locations
taccttttttgctaagaaatatattacacattactaatattattatttaatataattgttaaaatgttattatttttgttatggatattagatagggtgtggtctttcatatggactgcattgaaatgtgttactttttagatactgttagtttgacacatcaacaaaattttgattattttataaacttttattttcttcataattgcaagcaattgttataataattagtccataaatctttggattcgttgggggattttttccttttttaatatattttttaactattgctgggattttatagttccacttttataatctgcttttattctattttgttattttattttacatttcaattttggtttgcagttacttttgtattgatatccctaataacagttaccacacaacaatgctaattttctggtttttctaatataaaatttgaatggtttctcgtcagggaaaaaaaatacaaacaaaaaatgtaagactttgcaacgatgtattaagtgtgtaatttgttttgcatttttttattgttgcatagaaaaactatcaatttcttaccaaaactcanattacanatttagaagtttcataaatttaaactcacttcac

SEQ ID NO: 43815 - DNA, 1109 bp, Arabidopsis thaliana landsberg
  unsure (1)..(1109): unsure at all n locations
gaaagcttacctaacctaataaaattatcctttttgggtataaaatgcagatggcatgacgtacgagaaaacatggttggtattgtcaaaccggttagaccgtcacattcacatttaatcatataaccaaatatcaaatcaagaagtcaaaaccgggtttaattcccggtctatttcactaagtcgacgttagatcaagaaatactttgaaaaggtgttctcaatcgcgcgtcacgtgtctctcagctctcatcacattgtccgttagccgcctgaaaaatcaatctactacttttcttacagcgagactttcattgatttttttcagaccgacgcttaagactcgttggtctcaatttatgctcttcaataccctagattttaggttttgactcattcgatccgatcgcatcgctcgctgatcactctaattattttttttcttttccaggtgagtatgttctttaacttttgatttattgattctagttatctaagagtaagatcaaggtcagatgtgaattagttcgtcttgcgtaaatcttgattcttttcaaaaaatgtattgtttttgtgttttctgtctttaagaaatggttatttgatcatatcatgtacttcgtttgaagtaatcaaagcgagcatttgtatctagttaacatcgttattagcttaataacttcttaaccacggctaaaatctacctctgttaatgcctttattcttgtaatcatccctgtttctggccaaagaattaacaatcaaattacagtgtataaatctctgtattttgactatttatttttctctaatcaattagtttggttgcaactttgctcttgaatttcagcaagatatgaattctgattctaataaatcatcttcaaatggatttgagaaatctttgacaccagaggagtatctaaacaaggtatatgatgatgatgataaggggaaccattagctgctctgtgatatttcatgcgtgtatcaattntttttttgtcttcttttgatataaagattgtgtgttttgacgacatagataaatgaagtgaggacattactagggccattgactgagaagtcatctgagtttttgtcagatg

SEQ ID NO: 43816 - DNA, 679 bp, Arabidopsis thaliana landsberg
  unsure (1)..(679): unsure at all n locations
aaaaaaaaagggaaaaaagaaaaaaaaaaaaactttaaaaactcaaaaaaaanaaaaaaaaaaaaaannggaaaaattggtaaaaataaaaaaagaaaaaaccccaaaacccccaaaaaaaaaaaataaaaaaaaaataaaaaaaataaaataaaaaaaaaaaaataaaaaaaaaaaaaaaaaaaaaaaaaaaaaaactaaaaaaaaacaaaaaaaataaaaaaaacaaaaaaaaaaaaaaaaaaaaaaaaaaaaaaaaaaaaaaataaaaaaaaaataaaaaaaaaaaaaaaaaaataacaaaaaaaaaaaaaaaaaaataaaaaaaaaaacaaactaaaaaaaaagaataaaaaataaataaataaaataataaaaataaaaaaaaaaaaaaaaaaaaaaaaaaattaaaaaaaaaattaaaataaaaaaaaaaaaaaaaataaaaaaaaaaataaaaataaaaaagaaaataaaaaaataaaataaaaaaaaaaaaaaaaaataaaaaaaaaaaaaaaaataaaaaatttaaaaatataaaataaaaatataaataaaaaaaataagaaataataaaaaaaaaaatacaaaacaaacataaaaaaaaaacaataaaaaaaacaaaacaaaaaaaaaaaaaaaaaaaatataaaaaaattcaaaaattaaaaaaaaa

SEQ ID NO: 43817 - DNA, 569 bp, Arabidopsis thaliana landsberg
aaagaccaagactctgattattctggagatataccatacgatctcgagtcttaccctaggaaggagatgcaattctttcttttggtttaggagatgcaattttttttatcgtgagtaatattgtatatttcaatggcagcgattttaagattttaagtagatctttttttttgataagaaggtttcattatactatatgataattatcatgaaatttacaacccgatgaatattggtaaaattacatatacgtgtaatatttggtaaccaaaaagaaaattcacatgtaaaacatcacagtaaataattataagtaactatgtgataggagaaaaaaatgtatttgtgttgaaaatatatctcttttgattgaaactggaaatagaaggccaagactaatgtgacatgattcgtacgtataagatattcctcacatctaagagattttgttttctgtacgttttacctaattagttgatagttttaatttttagctgcaagtggtaaagagtcaagaacgtgtgagctcctcaaatgtactcccactatcttagttttattttttttaa

SEQ ID NO: 43818 - DNA, 923 bp, Arabidopsis thaliana landsberg
taaaactaagtcagttcgtgcataacagcaattgcccgcttgtcgaattcctttgaaccagcttcaagtccacgtgcatcggcataaggagacagataagatcgtttctgaaaatgttcgatcttccctctgtatcggtacattttcttgtacgacggaggaaacttcatggggaaagccagtgaaagcatacctggcttgtgttcgcaatcctcggttatacctaaagtctttttctccaactctgtgatagcccaagctggattccatgaaacaagctcaagatactcttctccatccccaagtttcacaactttaaaatgctgaggaaaattgtagacccagtttatcctaaaatcaagcggcaacccgaaatccctccggaaatgaacaatcttatccaatggaagcttcttatcaacagacatcatcaaacacctagtcacatgttctgcagccttgtctccattctcttcaagtaacttgtcatgctcgtccaacaaatcttcccctccctctgtcaacccgcaccacaagactcctctctgatctttatacaattcaaacaacttcggagactttctgatgaaatcactaatcttatgtggtttaggcaaattgatctgccgcctatactgttcaaacgacctgaacggtcattatcatatctcgctcacccttcaacacctccatcaagaaaatcactttagaagctatcttccatttctctgtcgctatttcgagctcttggactctcttttccctgctcctatcttgaacccgcttgctactggtcatgaacctgacccatacccgcctgaaagaggattctccgtataaaacgtttctttcaggcattatcgcaaacacattgtgtgcattcccattccggtagaattgcagccaacatcgtgaacctccca

SEQ ID NO: 43819 - DNA, 414 bp, Arabidopsis thaliana landsberg
ccatgtttttctgtcactggatttattctactttgttttctacttggatgctactttcttggtagttctataactcttgtctttctttgtaatcttaattaacattctagatctctaaataagattaacataagaaatatgtatcggcaaaactaatgataaatcgcgggagacaacgtaatatagaatgccttatccgacagaatgaagccaacccttggtttttttcttctcaaacctcacatgaacccctggaagaatggctccccccatatatagaaattttggaggcgcgctggggtccccacaaggaaaaaaaacccccttggaatccgttggcctcggccaaaaagacaccccctctgatcctcggctattaaaccagaaaacgtttcccccttttcaaaaaaaaat

SEQ ID NO: 43820 - DNA, 777 bp, Arabidopsis thaliana landsberg
taattttttttatttaaacaaaggcaatgggtaatgcggtaaacaaaaagttttaggggttttaagataattggaacctatatactaattgggctttcgtgaagacgaataaaagaaaaattttaaaaccttttgtggtggtgtttgatgaatggtaaaaagtgaaaacgacaaatagactttttggttgtgattaaaacttttttatttttcttggttgatccaattctaaagtgtctgataatagttatatatcatgattttcgccaatataaattaacaattattaaaatttgtataatagatattatctggttagtgaattttaaaatatatatgttaggttttaagatgacaaatgagtttagtttgctatttattttagtatttaattggtttacaaatgccttaaaaatttatgaatatctatcatgtaaaagatcaattattcttttatatattttgcgtgtttatagctaagctcacactcgcgacctaagttttattttctacggtaagatttagtttggattttcacctttttgtatggattaaatcaaatatgacaatcggagttcttacaaattattacacgttaatttcttgtctactctaatatttcggtagattagtggcaacatgcatgtgtaagaattatattattatcatttgttacatttgttataaaattagtcatatgagtactcaaaaatataacaaagtcatgacaacttttgtttcttctagtaatgtcgatgttatgattaataccgcgta

SEQ ID NO: 43821 - DNA, 691 bp, Arabidopsis thaliana landsberg
attcaaacttggagactcaagtgtgccacgtaaagaaggattgctttctgctagtttatgaagatcaacacacaatttggctcttcccggtgctttgtccacacaacaagtctcctcaggaattctataaacaaagccaccactaaaaactctatgagatccgcattgtaacatcttattaatagctaataatatatcttaatccttgcctcatatcatctacagcaatcacttcaaccaaatcatcaaagctatcatcttttaaaacaggaatccgtctcaaatccttggagaatatcttcacagcttcagagccaccacttctgcagaacataaccaaaaaggatgataaaacaaacatttataagaaatgaatgattcagtgagaagggtagaggaatgattgcctatccggtgcttcggaaaatttcctcttgaacaagccaaagaacatcttccttgaaaaagtatttgcctctggactagtgaatgctgagagatagtcatctgcgtctttccagttaccattaaggattgcattagaaaggtagctaaaatcgaagaaaacacctgaatcttgctccaatcttcataacaaaacaaaaccacacataaattaggtataagcaaagcttaaaatcaaactattgagaaacaaaaatcaaaatcaaccgtacaagtgtaagctttc

SEQ ID NO: 43822 - DNA, 590 bp, Arabidopsis thaliana landsberg
gaaattgatctcaaaattgactttaattcttcgtctgtaacattagcatccagacctccatcttaaatctgaaagtagaacgcgttatacttgcagtctatcaaaaacaacagactaaagattttggagaataacaaacgaaaactagcgacatactgttgtgttattaggatcattatctccagcatttgctccttgagtgttttgatacatagctgcaaataacagatgggtgagctcaagagagatggctataaaatttctattgatactgcataacgccccactcgacatggtgagaaaactacaaaactaaactgcagaacaacagacagttcactcaaacaacgtttgcaaaaatcattcacatcaacacctaagaagataccagcaaagaaaccaaataacatacagagatcaagatcagaaaaatctgaagtcagttgattattgatgtacaaatcgttaagcacatatcaaacggtccatgtgagacttaacgccgaagcatagaataacgaaagcaaactcttcatcctacatctaaatttcttcaatattagaagttcctagtaatcaacttacataac

SEQ ID NO: 43823 - DNA, 636 bp, Arabidopsis thaliana landsberg
tacctgtgtcgcgggccattaaaaccagtacaccgcccttttttacccattgggaaagactgcgaacgtcctccggggtgataaagtgcggatcaggcgtttctgcccgggtatccggatctactatgatgtatacgttggtgcgttgcagattgcggctggtgggggcatcccttaatgtcccgagcgccaccccgtgaaactgccatatattaccccaaagggagaatccactattggccatgtcatcccaggtataatgaaagggcacttcatggcccgtgatatccctgtggcgctcctgattgaaatagttatccagtgtgacggaaagcccttgtccttcggataacccggaatcaatctgcatttgggatgcagccagaataaaggcgccaacacccttgggatcgtttgtcacgggtctttggcttgcatagtaacgataggagccgacccggtagggtttgcctccgagcccggctacggcgcaggttcccgtcagagagaggttgtatccggataccttgacgaattgatttaagatgccttggtagcccttatgagccactttcatgaaattttgaccgagatagcctttcggacgccttttgccatactgtacacaaacataca

SEQ ID NO: 43824 - DNA, 1043 bp, Arabidopsis thaliana landsberg
actagccgacaaacctttcttctgatccaaacacattgccattgcgtcctgttatcttcgccgctctgaaaatctcatagcagtgtgtgtcttctggtctctcacacttcacccatgcataagctttcaaatgaaaaccaacacacatacttataagtaccaaaccaaaacaaaagtctcactttcttgcattagttagaagagaaacttacaaggagtaaactctctaactttcttgaaatagttgcagtactcaggtttgattgtctggagcgagaaacgcgtggacatggagaagatcttgttcagtgtctcccatcttttcttcacagtcccataaccaaaattgaatatctcattgcctccatcaccaactactactttgagcaactgcaaagcacgaagctgtgtgtctcttgaaactcccatactacttagacttatatacactttcattttttcataaacagctttctcttttactaatgcccagctgcaacaacaaaaaaacatttatatgagttgttgtgaccaatccaaacctttgcatagagtttactaggagagtcaaagttaatagtcacccgaatcttgagccagcatgacctgtagtcttggagagactgaacaagctcaaatcttcatcagcttgacgtgtaataggtgaaaaataaggccagtagtaagcataatcatgaatgtatttcacattaggaccatcaagaaccgctcttttcagcttcccatctggattattcggagatgtcactatctctataacttgtgtaatatcatcattgcgctcgctcctcttccacgcagacgcatctccttcaaacttgagattggtagaattaaagaaatctgcttggtgggttgtacaactgcactcacacacacatataactggatcagaaccacacatatcaacttgttacataaagccaagaacagagcgttttttttgcttacattgtagtatgggacagaagtcacaagtcttgaaaggagatatgaatttgttgagacaggcatgaacagaa

SEQ ID NO: 43825 - DNA, 191 bp, Arabidopsis thaliana landsberg
  unsure (1)..(191): unsure at all n locations
tgggtcttgagttcctgtgtcttgcccggatcgttgcgctttttggcagcgacagcccagcgcagggcctccggcggatcgacggcggngccgagaccctgctcataaagccgcgagaggttgcccatggcataggcgctgccggcattggcggccttctcataccagtagcgggcttcgacataatcctg

SEQ ID NO: 43826 - DNA, 713 bp, Arabidopsis thaliana landsberg
ttgcttttcaaaaagtaaaacttacaacatctgatctctaaattaaattatttgtggggttcgcatgcatccacaaaacctgattgctttaaccaataaaaatatccttaaaacttgattggcacaaaaatgatggaagagtattgtagctatataatactatttttgcagtatttaagattccctattaaaagtattaatttgaaagaatctttcactcattaatcaaatatcatatcggcttactaggagaagatgtcatttctatcactcattcaaatcctttttacaccaaattcacataaaaaaatttgggtattaatcaacagtatgtatgagaatatagatgattcattgacgaaatgattccatattaattatacctcaacagcaaaaatatatatcatcacaaaatattttaaaccaccaatgttattgtaaacgatcatgtttatgcacgatgtagtagaggtgctgagtggtaaatggccgtgatagattttttccgatataagcaaatccatcaaatgtttgtttattcgtctgcaggcgtatcatcaatatttaatttgaattttttgaattttgatatattctttgaatctacctgccttaaaattttgtgcttgacagaagccaaatggattttcattcttattttttattctgtccgttgaatttgtttactgttttcctatgtatcatattcgaat

SEQ ID NO: 43827 - DNA, 359 bp, Arabidopsis thaliana landsberg
ttttcttttaagaaatgctcttaatgggcctacacggatatgagagttgcgcgtccattatacgcatagaaaattgataattattctctgcgtctcacaccagttattctaaacgtgaaaccttccccacttggtcactaattcgaacttatccatccacgtgtctagaaaataatagatctacggctaagatttaaccgccataaaaagaagatctatggtaaaaaaaatctataaatactaaaaccttccttaagctttcttcttcatcaattgaattaacaaaaactccaaagactccatcgaacaacaccttcaggtacgatttcttctttcttttttagttttgatcgttggcc

SEQ ID NO: 43828 - DNA, 537 bp, Arabidopsis thaliana landsberg
ggatcatttgtattagacagccaaattttgaatccggattctaacagatcctattgcagactggatctggtcactttttcaccaatcagtggctataaatactgacagagatatggttttgattcttagaaaatctctttattctatgtatgattcagagagattttcaaatctcattctcctacttaaatgttcattgtggccatcaatatcttcacttgacttgattatctaatctctggtcacagcgagatgcagtgacacaagtgcatggaactgtaactgttggagcacgtcagaaagttcttaacttcaggagctctaatcttatctggaagctcatcgaaagacttctattgtcgagatagttctgttaaatgcattgatgcctggggttgaggaagctaaagtgacagcagggatggtagttaataccaataatgacaagaggttggctattggtgccgtcacccaatctgtcacaaaaggtctgagtatggtccagagccaagtcatagcaggaacgatgtcatcact

SEQ ID NO: 43829 - DNA, 335 bp, Arabidopsis thaliana landsberg
  unsure (1)..(335): unsure at all n locations
cgaatcagacagacgaaacccagatttgatttagggtttgctttttgcaggacagacaaaccctgagctaaaagaacagagatgcaaaaaaagggagaggatctgggaaagttacaaatgacgattgtaaggaaccaaaaagtttttgagggattcaacgaaacttttttattcttttttaaaaaagagtttaaacaaaaaagtcatattttttatgggggttgtcgggtaaaggatgaatgttcatgcgacnacaccaattactatggggcttttttttttggggttcttttgcgccaaatcgatggttgtcctccctggcaaaaaggggggat

SEQ ID NO: 43830 - DNA, 555 bp, Arabidopsis thaliana landsberg
gctgtttgcattagatgttagctctataacagacaagcaaatgaaaacagaaagtactaccatttcccgcatatttttccaggttacccaaaacggaacagggctgaacgtgttaattgacgaggttaacagcacgcaattgcccgctgccgagaaatatgcataccaggcattttgctgcgctatgctggcaaaagctgcttccggcctgttgcagaaaggtaagtatatacagcagtacggcacctttatcaataaagccgtcgctattgatgcggcctgttatgaagcgcgattgctgcgtttcctcgtggaaaacaagctggagaatgtaaaattcaccagtcacgcggaagctgaccgcgattatttgcaggcgcatgtagatagcgagcaggaccaatacctgaaagcgataaccctaaaagcgctggcaaatgaatagcgagatctttctgcgtccgttccgggaatttcccgcatccgttattgtgaatgtaccgcaatcaagaacgtacagttatgaagaattttatgccctggtaatggaagtag

SEQ ID NO: 43831 - DNA, 547 bp, Arabidopsis thaliana landsberg
tacaaataacgatcgatgatactttcttatgttactcattgttttacatagccataaaagtttttgttagatgccaaagagaaatgttgtttttggtgtctttgtgtcaagtgaatggttctccaatgttacaaaccaacgatagtttcaatggtttgaacaaaccagtgacttgaattgcagaataaggaccaatggaaatccaaatttgaactcatttaaagttgccactatctttgctaaattagtgttagcccacacacgttggacttgccactcttgtttccaccatgttataccgtttaatgcatcagttttttgcaagggatcttcttaattaataaatttttaatttaagtatcaattattattaattattactaatttttagtaaggctatttaagtaacttaatctacttaaaaataggttttaaaaaagaaaaaggttataaggtatttttcaatgaaaactcaaaaagaggctattttccaaatttattctattataaaaatagacatttgaactagacgcgaaagaaatttgca

SEQ ID NO: 43832 - DNA, 657 bp, Arabidopsis thaliana landsberg
tcgagtttaagtgatggggactcactcaggttagagatatttgagacttgaagtgatgcaaaaggtacagctcatgatgattgtattgtgatgatgataatggtatgaatatgatgatgagaattaagtatgcatgtgaatgttagatgactgaaaaagatagacaaccacttatataactaaccaacaacattttaggctttcctctttctctctctctgtttttatttattgatttttgggtacactaatgtttaaatctgtctctttaattggacggcctagcattcttagatctctcgatactgttttaccaataaaaccatattcagaggtgtcattttgtcatgtgtatttgttgtttttccccatgtatcacgtaaatgaatggtacatttaggggtgattacttcaaactttcatttttttctgaacaaaatgaaaaccaaggaaatcatgagttcacacccggattaataggagtattttggaatcgaattgaaattgcagttgaatttcaactttggactatatccacaaaagtaaactaggtaccactaaaccattaaaattttgttgaatttgttgttttaggcaaatgtttgagtttatgattcagtgcaactttataggacgtaattctatttatagtcatac

SEQ ID NO: 43833 - DNA, 484 bp, Arabidopsis thaliana landsberg
tataatcaatgcttaaattactataaacacaaaaattgtagtgatatattagaaagataatttaaattgttacattgttaagataataaaaaattataaatagacatctgatataaaaatggatgaagtatagcatattaaaaaaacatatgtttttggtcaaaacagaatcaatgcatagttagctcaccgctacaacaataaccatagggactacgtaccatccataactacattttcttaaattgcatcctctttctaaaattttgcctataaattcacaataacacttcaactttttaggccataagttatctctttctctacaataagcaataaatctcacctcccttttttttttttttgtctcgctacttttgattatcatttaaaaccaaaaaacctaccatgaatgagaatcacattcaaagtgatcacatgaacaacaccattcatgtaacaaacaaaaaacttccaaactttt

SEQ ID NO: 43834 - DNA, 663 bp, Arabidopsis thaliana landsberg
agtcaacaaacttactatacttcaatatatttaacttttgtgtggtacatcaagaaaataaaattgcagctaaccaaatattcgtttttgttttggtgcactgaactgaactaaaatttagaaaaatgtaatatagaagagtattgttgtatatgagagggacctcgacaaaatcacaaaaacaataaataatacgtgagagaccgttgggaaaaagagtatatacggagcctacgatgtgtaagaaaaattattaatgcaagggaccagaatcatatttaggcccactaaaaagcactgtctctttaggtccaacttaatcttcatatagtcactaattgggcctaaaaattgtaactgtagttatggatcacgttacgtagaatattcgtttagcatatgagtttctcctttccattcgttaactaattttttctttgcaaacatatctaccgttttatcaaataattttctttttattatttgtttgtttactagaattacagttttttcaaacagagaaataatcatattaataataacatttgctaaatttagttaaaagaatcatggtgttactttttaagttttactggtttgctttcaagtttcaagaatgattgtatagtagttactttcggatgttagatctttaaaacttgt

SEQ ID NO: 43835 - DNA, 615 bp, Arabidopsis thaliana landsberg
aaacacttgtgctatcacctgaactgattacatcgctttgctgaaatgatgtttcaagaggagtaccaggcagaaaagaagatgattcgctactaaatgctggagaagaaaattgagtaatatttatgtccctttccacgctctcaagaatctttgaaagaactgacaggcgagaaacctcacaaagaaacttctgttctccgcctgccgagtcaagggaactgtggagagtgatctccaggacaatttcccttatagctcctgcaaatcatgcaattataatttcttctcgaaatgccaattatctacatatgtagaaaaaacgttgtacaagtaaataaagatagtacgacttaccatattcatcatcacacacaaaacccagtgcaaactgggcgacatctatagaaaatgcttctacagggtacccgttttcttgttgagaaggaatactaatttcagtgacgcttgaatcagcttcgaatttctcaagaactggtgcagaattctgaatcactgacaccttacttgaaattaaataaaggtacgtggagtaaccatgaattaaccctatcaaggccctttggttcaagggacaaaaaagaacacccctgc

SEQ ID NO: 43836 - DNA, 799 bp, Arabidopsis thaliana landsberg
ttttgcatagaaaataatttaaacaatgccgttataaataaatatcagttcaattttttttttttgtaaaacattttggtttagtttgattttatatgctgatttctatttgtgatttacttggaattggttttgtatatgtaacaatgtcagcaatgaatgtagaacacagatccgacaaacgacatgtgttttacaatctcccaaacagtgctcaagaacatcaacaccaacatccacaagggcctaaccaatcctcttccttagccgctgaacaagataatcataacgaacatcatcaccattacgtaccaaagcatcaagtagacgagatgagatccgaaccagcgcggccctcgaagctagtccatgcgcattccattgcttcggctcagcctgctgatttcgcgcttaaggagacaagcccgcatctcggtggtggaagagtcgttggtgggcgtgttatacacaaagacaaaaccgctacgagtacttatgatcttgtcgagagaatgtatttcctttatgtccgcgttgtcaaagctcgtgagcttcctataatggatataacaggaagtgttgatccattcgtcgaggtaattaattaagtaatgtcttaataaaacatttgattcaaatcaagaatttttttataaaaaaagttttgttttgtaggtgagagtggggaactacaaaggaatcacaagacattttgagaagagacaacatccggaatggaaccaagtgttagcattcgcgaaagagcgaatgcaagcctcggtgttggaagtagtggtta

SEQ ID NO: 43837 - DNA, 943 bp, Arabidopsis thaliana landsberg
  unsure (1)..(943): unsure at all n locations
tcagatcccattttcagacggagtttctccgcaaagcctaaagcttcgaagtctttgcttttgtctagaagctgttccacgaaatcctcagctgatttatcttccaagtcttcttctctatctagaatcttgtcaaagaaaggagcttccgtgacgggaaaatgcttcaaagtagcgaaggagcataagtcccgcttctacataatcaaacgctgtgttttgatgctcgtttgctggcacaaacattcttgagattcattgcattggatccaaatatagaagagaatctttgtggaagcaaaaagaattattaaatttataactatgaaaagagtattccatttgcatttggttatattctttcgttaacccgtctttttcttctatcaatgaccgtattttgtataaataaccatctctattgcgtattatttctgacttcatcttattattctgcattttttgaaaataatgaataaagttacaaaaatgaataattttgaagtgtttttttgcacaaaacactctcttaaactattggtaagtacacagttttgattcatagtattggaatgtaatcgaccttcttatcctaagtgtctgaatcttgaaaggaaaacttgaaatggcatatggcataaactaaactaaaggttgtttcactcttaggcgaagtttctttttttttttcaaaggctaagttagtacacaagtctagatattaagtagcataatttcatgacaatagttccatgctacttataatagttggtgggaatttagtttaaatatttatacgtaagggaatcaatttgaaatctcacatataattatagaaaacaattttaattagaaagatagtagcaaataacatatgtttaaaaaattattctatttattactaaaatttgnaagatacatgcatgaactatcaacttatgac

SEQ ID NO: 43838 - DNA, 844 bp, Arabidopsis thaliana landsberg
cggctaatagtggttgtatagttttgctgtcatcatggaatttaatttaggatcgtcttatcggacccaaaacttttgagactttggtgttaggtctcgaacactacattttctccgatgcatttccaatataaaaaagttaactaattcttactacgtctttcttctctaagcgcaatagccccttgatgaattggatcgtttagttgtaatgaccaaaactttgacgaacaaaaattgttgatcaagcgtctaatattctcatttttcaaaatcttgatcgtctgtttggatcaatatccttttgataaattaggacaacagaaatgaccgatcgatcatagattcataatcataggttatactaaaaatataattggtggagtgaggttataaatgcaaaaaaagaaagaaaaaaaagagagagtgagaggaaatgaatgatgggcaaagtgggagggaggtggctttggaagtaaggaactctctctttcttctcactttcactcatcgcctcgtaaaggaacttttcttctttctctctcagagacatgcacgtgcgtcggtgcatcatccaatgctcttctcttccccaaccttaattgctttctcatctctcacttacaaaaccctgctcacacaatttctatatgtatacatacttccatcaaatccatgtctatatatgcaacttgatcaagtgagttagtcaattatacaatcatatatcattctcttgttccaagttctagaatctaattcctagtcaataccttttttaataaacaaaaagtgattatgaaaattagtttagattttaatatttggatgttgatacaaagat

SEQ ID NO: 43839 - DNA, 970 bp, Arabidopsis thaliana landsberg
tgttttttttccccacttgttctacccgaaataatgcatttcactgcactacttactcgcgttttgttaaatacactttctgagtttcattctactgagtaaatgtttttaatccctttgtacgctttataggctattgaggctggcaggcttcctggggacattttggaagatataccttgcaaatttgtggatggggtggttatatgtgaggtgagttatctgcaattattttttgggataaagccttccataagttcttggaaacagtccaaacgtatataaatatatttaaaaagagctcaacagaaattatctacacttaatcaagattaaaaaaatgtcgtaattataagtacatggaagtttatcttccaaactcaattgtacatgtatttgattgtttctgaaacataatggagtaactgggaccagaagtaaacataaaaaacctagttatactaatttttaattgactgctgtgtaccatcttacatcatcatgttttctttaatttttggcacatactattgtaggtgcatgactatcggaaacatacctcatctcaagtctctcctgtgataaataaattgcgccttaagatgtcactcgagaatgtggtaaaagatattccatcaatgtcagacaactcatggacgtacggtgatctcatggtaatcatggtagctcgtggcttataggtcgtatatctgagcactgaaactattatcttctgtactgatccttacatcaactgcaggaagtggagtccaggatattaaaagccttacaacctgaactctgtctggatcctttacccagacttgataggctgagtaaaaatcctttgactgctaaggtaatatctcattaaaaagactccttgtgctttctgttctcggttgtttattatagtgtctaaaatgtttttttttctctactcgatagctcgatttgtcgctttctgttt

SEQ ID NO: 43840 - DNA, 982 bp, Arabidopsis thaliana landsberg
gatctctgagtgaaaaatctttgttatattgaaaatgtaatgcaattatggctctcattgccattctcatctttggtcacagtgagacagtacaaaagattgatttggtggttgcacctattcctcattcttattctgaacatttaatatcaattgcacttagtttgttatcttgtctaggtgggccttttgccctcgctttttgttctttttctttcttggaagttcttacgatggctttgtttttgatatcaagttctcatagtatgcttagcctttgttggaggcttagtcatacgacactaattaaggttgggccttattgggctctactggtttggttgtaaaaaactttttggcccaggacaaaactttagcgaaaacccaagggaaatgaatgacaaagagaaaagcttactacttctcgaaccttctcgatttggggacttttcaatttccctatcaaagtgaatgactttcttctccaaaatcgatttctgaaacatcccatttcttgatttccctctttgtcgcaaacccaacaaagtagagcaaaaccctaaaacggaaaccttccatggcgattatctctgaggtagaagaagaaagcagtagcagccgacccatgatatttccctttagggcaacactcagtgctgcaaacccattagggtttttggagaaagctttcgactttctcggagaacagagcgattttctcatgaaaccctccgcggaggacaagatcgatgtcgcgggtcgggcggcgaaggacgagttgaacaaggctgtgaaaaagagagctgaaaaggccagtgtgatagcctgtcgagaatgaaagccggcgggccattgtaatgcttgtcgagacaaaaggtgtgaatgatagtggcttgccaactattgctgattcaaatgcagtgcctatgaaagtggagaatccatacctggacaaggagtacaatgaaatttgtgccattgg

SEQ ID NO: 43841 - DNA, 777 bp, Arabidopsis thaliana landsberg
ctaattcccgcaaaggaaaacaaacaatgctaaataatctctagttgctagataaaagagatttattcacataatatatgagtcctaccacaataacttcatataagaaaaaaaataaaaggggttcaaaaaagagaattagtttgtctatttgaatatttgatgattatttttcacttctactccatagaacaggaagctcccgtccaccttctccggcgaaactcacctgcttctgcacatgtttaatttaatatcattaaaaaaaattatatcattacttctttgactcttaattattaatttataatatatgattaaccaaacaaaccgataaatcatttgataatcgagatgatcttgatcattggtaagatatgataatgcattaatcttttttttccccgagatattacaaaaactaataaacatgtgtttctaagcatatccttcgacaatgttattaaaacaaagatgtatacaatttcatgaacatgtgaattcatttacgagttccttggtcaatccattgataagtccactcctgctccgataaaagtttgactatagtaaacatgcatatgtaaatgtgtgtatgtaattttttttgaatatattacttacgtcatactcacgtaggtaaatgacaaaaatataccctagtgggcttaattagtggcttacaataataattttataactctaatccaacgccaaagcaatgcctaacaattaactccgtttctgcctctacataattaggacataaaaattaac

SEQ ID NO: 43842 - DNA, 1094 bp, Arabidopsis thaliana landsberg
aaactttgcaaacgccaaatccccaaactttcatatgaaatcatggaattcaactcgaattcagcctatacattagattaaggatcactgaagatacctattcggcgacctaaaatcgatttatcttagctttgcaacccgaacatcaaacattcatatgaaatatgagaatcttatataatttcaaaaacctaaactaccatcacaatgcagcaacgacagaggatagaggagaagaatctgacctaattcgaccgcttgttgcgatggatatccaggtcggcgggttgatggtggatgtttggaatcgatggtgatggaggaaggaaaaagcagaagaggaagaagatcgatggcgaagctttttttttaacactggtttctttttttttctttaattttcttttaatttctatttcgaaattcttttttatttatctaaatcagttcattaaggataaaaaaggaataccacattgttggtggcatgtagattatatgatgaaatgctagttagcatttggttgagacccaaatatatatatatatatatatatatatatatatatatatatattctttttaatggcctaaggtagaaaaccaaaattggtgattaaaatttatgtatttagtttcttaaaaacttaatatactatattaagaataaagaattccaagagtagagaaccacataaaccttacccaagagaacccaccttccatcatttcgttacttttcattttttgtttttgtctcaaaaggagctcttgatggtgtggtctttagcctagccatattaactaattgtatagatatattagtggaattcgtatttccgcattttgtataaaccaagagggggtgaatatgtccttgcaaggaccaatagttagtatcatattcattttgtgtctaattaacaattgtaaaaatgtagcataaatcaaaattggactagctaaacaaaactgctaaatatcgaataaaaccaaatttcttcaattatgtaccaataaaagctgtcgtaattgattgatatcacagcgttctatcaaatgcatgggccctctttattttcttgttttctccc

SEQ ID NO: 43843 - DNA, 662 bp, Arabidopsis thaliana landsberg
atcatcagtcattcgcactcatcttaatcatgtaaccaagttgtctgaatataaatccttctactacatttcgcaaacacaatgactgactctgttatcaattccatgtggataagcgccttcctagtgatgcaacaaagagctttgacttaaacaaaacaacaaacattactcttattatcattactcactaagcacagacgaatcatgtaaccaaattagaataatctaaagcttcctacaacattttgcaaacaaaatcactaactatttctacactagataagcccctacttagtgattactcctcttatcatctcactcactagcctcagattcttctcgcgaggtagcctcatgaaactacaacaataaagggtatttgctaaagtcacccagaacaccaaaacaacaaacgtttttcatctaaaaacacactttaagtagccatgctgctttaccactcactcggaaacaaaaatcatataaccttatgttgtgttaaataaagccttcaactacatttagcataacactagtcctcttatcatcactcactaagcacagaagaatcatgtaaccaaattattttaatctaaagcctttttctacaacacttggcaaacacaatccataactaacttagctacactccgataaga

SEQ ID NO: 43844 - DNA, 613 bp, Arabidopsis thaliana landsberg
tacacatgttctgattttattcgtaaaaaccaattattttaattaaataataaaattataataaaaataatattttttattcaatacatacccatttttgaaaatccaccattgtggatgctctaatgggccttaaatccctttaccaccaaaacgacatcgtttacttaatgactttaaacttagccataaaacgacatcgttttacgtaatgacttgcatctttctaactgagcagaagccgacaaacgacacacgacgtcaccacaattctcaactttggagctgcagacacaattccggcgacgtttacgattctgacaccgccggtaagggttaaaatggattctgattctgattattgtagattcgttatctaaagattcgaactttctgaacatttcatcgcaaatagctcattcatagaattagagatctctacattgctttgtaataagagatcgatcgttatgtgaatcattgataattcttaaagtctcagacttttaatttcctctttaccaattggaacagaacccacttgtagcaaatggaagaagttcaaaaaagagttgcctttatactaattgatggtttgggagatgtatcaata

SEQ ID NO: 43845 - DNA, 332 bp, Arabidopsis thaliana landsberg
catggggggctgagcagagacatgggttgagagaaagggcttttcctgagtcaattcccattagctcgagacataggatcttctctttcatctggagggttactgtctgatcagctacagtgaagagaggatggctatggagattggttttgatggtggttggtttcgtggataagaatgtggattgagattgttgtggacatgaaggtttctttggggaaatgtacagagacgagctcaatgctgcagacatggtggaaagagatgatgtggctctttggatggtctgcggaaggagaataacaataagtgtgaacgtaaggtggttgatt

SEQ ID NO: 43846 - DNA, 419 bp, Arabidopsis thaliana landsberg
ataactcataagatatcgccacatgttagctatatctaaaattgtaattatataagataaaaatagaaaaattatttactatataagaaaaatggaaatataaaaaaaagtattaatatagttcaattttataatatattaagctcgaaaaaccaagtgtctaaactaactcatacttgctttgaggggaaaagaaaataatatatatatatatataaggtggcttaggcaaacataacgaaggtcaatagcaagcactatttggaaagctggtcttggactcggtcggtaccatgaattgggtactcaaccattgggaaacggtaaaattgtggtctttatcataaaatgattcagtaaagcagcgaatcaacggtaaggtcttttgggctcaaacgcatacgagataaaaggatgca

SEQ ID NO: 43847 - DNA, 718 bp, Arabidopsis thaliana landsberg
tatgggacatcttatcatctgatctgcatgtgcctattggtattatgataaatgcttcatatattaagaagaaaagttgtaggcttgtagcaaccgattcatagtggaaaatccttttttttttttttatgaaaatcagatcggccgcaaaaacaactttcaccatgcacgaagctagaaactgcattgatgtaccgtgtacgctgtttttaatataaaataattgcagttttattagttaggctacaaatatgaaatcaggagaaatataccaattaatgtacgtcctaattgcttggtatgttacataaccttaagttgtataatatttattaatttattttatactggagttgatagctttaaaagttgagagcaaagtaacttgagaccattttagagttagcaaagtaatggagaaaataagaaaaatcacacgcatgcagcatgatgaataattattggaaacatgtatttccaagaaagtaatcagttctctgtacgcctgaattcgattttcataaagctcacttccttggattgctagagcaaacatttatattgatatctgcgttaacatcataacatgtgggtttttagtaattcttaacagtatgggtatttttggtttctttagagagggtaaatttgtgattccatctgcaaatttattcctcctatatatatatagaacgtgatgaaacaaaattctttaagt

SEQ ID NO: 43848 - DNA, 144 bp, Arabidopsis thaliana landsberg
cgcggcctgttgcgccgcaagccgaaggacttcctctatacgcaggagcagatggaagcgttcggcacgcattttctgatgaccgagcgccgcgccgacgaggcgacgcgcgaggtcacggtgtggctgaagtgcgaatacatt

SEQ ID NO: 43849 - DNA, 1250 bp, Arabidopsis thaliana landsberg
aatcacagatcgggataggatttttcatgaacacacacagtatcataagcaacaagataagcctctccactcaatcattatccacaaaaagccaaaacatttctcactcagattctagtcacttcacaacatcaaacaaaaaggtctcacaatggtctaacaactttatccccaaaacctaaccaagttcacacttttggaaaatctaagaaacacaataagaaccctaaaatcaattccgacgaaattattaaaatcaacgaatcaaattgggaagataccacagattttgatgggagcctcaagctcaagcaaattgggttgctgaaggaaaatatctctagctgtagtacagagttgtttgatctcagcttcagagagctggacttgctttcctggtctagctaaccggacctccgtgagtcgcctgattatatcatcgagaaccgccgagtcaatcgccgtttgctgcccctgcgtcgtcgtcgtcgtcgccatcaacagaatcccaaaaaaaaacctaattttttcgaccccaaaaaagaaaagagctaatgcaaaataatcagtgagaacaaaataaagaagaaaattacgcgcaaagactttcgagattttttttagttcgaattgatttttttcaatgagtattaattaaagtatcagaaacggagatggggacgaaattaacacctttgaaaattgaaatgaaagaaactgagaaaataactgacaagttaaagaagaaaagatgagggatacaggacgacgtcgtttagtgaagtctccaaaacgggctttagcttaatcggtaatgggccgtttatgagatctaacaagtagtttagtaggttcgtgttactttgtgtactaatcaacctaacaagtaattcaaagaataaatgtggtaacttcaatcaatcatttgggattattaacaatgtttcgtacctattttcttcttcttatagttgtgtgaataatgatgtgtttagtatatttataagaacacgaaggatgcaaaatgtatcatttaccagaattttttcatcctttttgtaaggaaaaactatagttatgtaattctacatagaaaatgaattggtacggtactctagtggtgcctacattggttgataaagtcataaagtcaatatcgtttaaacatgcaaatgcaaattttatggacccgattaagtcggaatgatccgtatgttgaggcttgaaagagcccatcaatgcaatgagaa

SEQ ID NO: 43850 - DNA, 808 bp, Arabidopsis thaliana landsberg
aacttctaagctcataagtagatgccaatctgatgaagggaaacaaaaaaaaacatttaaaaatccgaagaggcaaatctattggttaatgtgaatagattcgtgagatgtaaaaccatgtgaagatgaaacagcaatgaatcgacttctaacttcttaaagctagcttgcattcattggattcttattggctaccacatgcatcgaacaccaaaaaaaacccatcaaatatttaacactaatctttcaggatctacaaaattaaatttgaagtgaatctaatcaagaagattttctgcaccgaacaccaaaaaaaaaaacatatctttaggtccaaataggttaagaactctttgactttatttcttatatcaatatacttgtttgactcacaatttcacacgtatatatataaactatatattgtttgactcacaatttgacacatatatacatgtataaactatgttacaatgatcctatagtatccataagattcccaaagtaggagagattagggattcactaaaaatagacagttatacaaaactaaaatattttgtaaataatgtgattgatgaaatatattaataaaagaagtgattaataagacgaaaaagaagtgggagagataaaagagagagataatgaaaaggaaaggagaaaacatgtcctgaaaagaaggtaagtttgtctgaagagaagggggcacacaagtaagtgctttgtcagatttcgcgtgcattcatcaaaacaaaaacaaaaaagctcttctttcttcttcttctctctttctttcattcattca

SEQ ID NO: 43851 - DNA, 493 bp, Arabidopsis thaliana landsberg
aatacttgccatgcattggtgaaaaaggctatgtcccaagcaagacttatgcgaaggttagtacttcatgatcttatgaggctcctttttttataaagtagtagagcccaaagtctcttcatcacagcaattatgtgtatctccaaattaacaaagacctctgtcttccttatcagtatttgaatccatcatcatcataaaaaaatctaatcaagctttaaaaaatctataaatccccacaatgaacaatcatgaaccagatcacacaattcacaagtttcccaggaaaatcttcagctaacaatttccagaattggagatggaaattgaaataacgctgagcaatcaaaggtggtgggatcgaaaaagtaagcaagaaggagggtatcttcctcggcggagaaatctatcagcataagaccattgatatcgcgtagctcgcttctccagagaaaaaatcttctcccatagacaaaccactcagattcaataa

SEQ ID NO: 43852 - DNA, 498 bp, Arabidopsis thaliana landsberg
tttagactaataattactgagatgtgaactcttcatttttcaaaattattagttggacctaattcaaggtgttggttgaagagataatatttcaaaactcaactttatttacagatattcattaaatgaacctcaagttcaaattatttatttagtagacaagtatatatacatatagaggtataaagaagtaaattctgccagctatagaagtatttttgaatcttcattatttctttaggtcaatgcctcaatagtcactaaataatgaatgactaacttcagaaaaagactaacccgggacagtctttaaaataatataagttataactatggttatacagttatacttaataatattattatataaccatcccaaacataatagtctaaccattcaaatctgagtttagtggatcattttatatttactaaaacgacgcgagctcaactaatgacacttgaactttaatactactaactattattcaacataca

SEQ ID NO: 43853 - DNA, 609 bp, Arabidopsis thaliana landsberg
atatgcaattcaaaacctgtttccatgacccttgaggtagagaaatcggttccgctggtatgttaccggacgcctcctcgacggtagttgccactgcgaacactcttaattctctccgtgaagacaccacaaaactctgttaagaaaatccaaagttttaaacttttcttcttaattggcgacaaagcacacacaaaagagataaagaatgagagaagagaccttaggcgcgaagaaatgaggaagcttgaaagatacgaagtgagtatgagaacaagaatgcatcttctgagaccaatcgccgaattgattgtacttttgtctgaatatcaaaccttaagttacagaatgattgattatacttttgtctgaaaatcaaaccttaaaccctagaggaaagtcacagtaacagagaaaattcactgttgggcgttggcagagaaagagaaaggctgtgattagcctaaaacgctgcgttttggtcattattattttattgttttgtgtgcaaagcgtttttgttatttaatctgcgttagtaatttgttaaagtgaaaagagaatgagttgttgttgttcgtttgttaggtaacttgttaatgcatcata

SEQ ID NO: 43854 - DNA, 816 bp, Arabidopsis thaliana landsberg
  unsure (1)..(816): unsure at all n locations
tgttcaatttagtgtccgtaataggttagggtgtgttgtcttacccaaagaccgtttcttggctgaagagtacaataagattaaggcctagatagaaaattggtatgcaagaggtcgttagaaaattaaacttcaatgcataccatttgaagtttctccacatattcacaccacgaatgtcttcaatatcaagcacttatacgcttatgaattggacgaagagattctcgatcttcctcatgctagctagggtgggncggctcatgaagcatatatactactctattcttcttgatgttgagttttgttttacttttgactttttcatcgctttagttatctttattcacaagtagaattctacttcggtttttgtttctgatttttggtcgtttctcttaggaaaaagactagctcaattttaacttaaaaagcacttagtcgtccttcgttttgtgtttttattcacaagcagattcttgtaaataggcgtcattcgtttttgtgtttttgtcacctttttatagtagagaaaatctaaaaagagattttgaagaaaatatatctcttatttttccgcacaatttttttagaattcaacggacctgagaataattggataacctgtattacaaatttacaataatttaccaatgtgttatcagtacttttgtgattttttttttttttttttttgataaaatttcaatgccaaaatgttttgaaactatatagatatgaaatatatatcacaagacaagacaagtagatatgaagtatatatacaaaagagagaattctttataaacgggaaag

SEQ ID NO: 43855 - DNA, 888 bp, Arabidopsis thaliana landsberg
attctccaccttctcttcttcacctctccctatcaagcctaaaacagatggagaaggttcataacgtgtgtatgaactgatttttagtttagacataaatctaatagtatagataagtttaccatcttcaacaggttctttcgtagtatattgatccacataatgctttttcctggacagtgaagaagtattctgcaactcgttatgtggatcacaagcagttctcaaattccgaccattagtctcttcatcgctcacaatatccaggcctacatccctattattgccttcacttccagcaagatacgtactaagttggtttcccaatttctgaagacgggcttctgacctataggtttggcattgtgttattgaatgaatttttgcattcttaaataagaagcaattagaaatagagataaatgccttgcctctttagatcatcgtgtgcccgcaagaaacggttatattctttcacaaatttcttcgagcttgaagtaatcctgacacacaaaaggattgaacaatacttgtcaccagaagatcaagtcccagatttgccaaataaagtttcttcaagtatatcgcatcataattaatttcaagcaaacatcaaaaaggaattagtcattacctcctacattcatctttctctctatccaactgggtctcaagctcctggatcctagaagtaagaatgtctacttcatgtgccttcctttcaacggacgcctttggacaaaagaaaattgtcaattaactcgtatttacaatgcaatcaaatcaattgtggaatggagaaatttacctccaatcgtagtttgtcatcagttagcattttaacatccatctctacatcttttaatggatatagacaaattggacttg

SEQ ID NO: 43856 - DNA, 626 bp, Arabidopsis thaliana landsberg
ttgtacaaaaaaaggtaagagtaaaaaaatttgtaccgtatttgataaaacttttgtggttgataactgtcaaaactattcaaagtggtacctctttgataagggcatcaccctaacactattttagtgttgaaataacactttatttggtgtaaatttagcattaatttttttccattctctaaccacaacaccaaaaatcacactaaatataatatcctctatcattatattactaaattaaaaattatccttttttacttattaattaatataaataaaaatcaaaaatcaaaattgtacaaataaattacatcatactatttgtctatgccgaccacaaatagtcaataaatatttcaaagtttaatatgagcttcttgatctttaatttgtttatgtcgagttaaaagttctatgtttttaataattaattaaaaaatttatgcattgttaatcaatttcgtacttattttaatattttttctaattataattcagatatttaaaacctaaaaaaatccaaaaataattttggtacattgttttttagatacaaagacttagatagattattaaataacaatacaaaagtatatagtatgtaactatcacgggataaaaaa

SEQ ID NO: 43857 - DNA, 625 bp, Arabidopsis thaliana landsberg
gacgccgaaatggggcatgtgctgggcaaccaggcgctgaccgagatgctgcacaggctgtgcgcccgcacgtggttgatcttcgcgcactacgacacccagggcgaaagcgcctgctggtacctggaacaccaggacatgctggaccagctttggcgcggcgccgacgacgcggtcaaggccgccatgcatgatgacctggaagactgcgaacaccgcatgaaccaggccggaagcgaaccgggcgacccctggctcgccttcggggtcaaacgttaacccccggagcaccccacatggccagcaaagactacccccgcgatctcatcgggtacggccgtaccccgccccatgccaattggcccggcaaagcccgcatcgccgtgcaattcgtcctgaactaccaacaaggcggcgaaaactgcgtgctgcacggcgaagccgcctcggaacaattcctttcggaaatcattggcgcgcaggcctaccccggccggcacatgtccatggaatccctgtacgaatacgggtcgcgcgccggcgtctggcgcatactgggcgaattccaagcgccggggctggcggtgaccatcttcgccgtgggcattggcctggagcgcaaccc

SEQ ID NO: 43858 - DNA, 617 bp, Arabidopsis thaliana landsberg
  unsure (1)..(617): unsure at all n locations
tttcttgtttgtgttcacctttttttttttctcctcaattggatttaaagaaagggatgagataagtgtgtgaggtctttgttaggtgtgaaggtaaagcaaaaaagactggaccatctctgcatttggaccaacttctacaagatggcatctcccatctatttttttttcagtcttcgagatattctagtggttattattttttcttttatttgtatttggtgtttacaatttacaggtttaaatcaaaattcagtctaaaacacttccaagaaactcactcttttgggttttatgcatagtcactaattcttcagctgtttgaatagatgatctttttttttttaccaaaaactaaaacagatgttactttattagtttacattattatcgacgtaaaatgatttaaaaataataacttgcatgtaggaagtatatatatgtgtcatatagtagtagaaatagaaagaaagagatccgggtcgtcttatttgaacatatcaagcgactaatcagtcatatgagtcattagatcagatctgctacttttcatcatacaatatttaccaattgaaagtgagcttttttacatttgcaattagatacaaggccntagc

SEQ ID NO: 43859 - DNA, 538 bp, Arabidopsis thaliana landsberg
gaatggaagaaacgggattccggtgatgggtgaaaggaattacagaacgttgatggatgaggtttattctttgaataagggatgattgattgggttctgtttatctgaaaggcgatcaatcggctaagcttaagggctacaagatgggggggtttgttgcaaagtctgtgttctgcactctagttagtgaaccccaaatctcagtaatgatctgaatcataagggttatcaagttttgagcttcaagattctgtgttcttgagatacataacaggttgaagcatagtgtgattggaagactgaagatttcaagccatgatagcttagagatattctgtaattgcaatttgattcaaggattcaaaatcatgttgtctttgtatcatgttctgtgtaaatgaggtcttatgacaatcaaggatatcaattgttactgacactacttgcaaaccaaaagctgttcagcatgattcttaacgcccttttgtgtattattactggtgatgcacaactataacatttgctgttacaggatcta

SEQ ID NO: 43860 - DNA, 1016 bp, Arabidopsis thaliana landsberg
cttgatacgattaagctttcttgcataatgcaattattgttgaaatttcattccaacagaagtggagatcgccctttaagctattcctttttaatcattattagtctttttaatttgtttgaaattttaatcattagtcttgctgtttcttcctctctatatggctcttttacatagtccttactccttaatatataatttttttgtaaaaacaataatcatgagagaagtgttacactttgtcaacccaattgtatatttttcatatcatactttccttaacggaaattttctgatgtaaaggagctgaaaagcataaacgaaaatgtatcaaaaacattaaaaaaaataaagagagacatagaagatacaaagatcaaaatagattagggattggatcttcgatgttttgtctatcccaaactgcatatacatctagatatagtaattcaataaggcatctagacctaccccatcgaggaacatagatcaaaataatgatcgtggggataaaaaggcaataaaatgttgccagctttttgtaataatgcacagcaaagatcctatcagtaatgttttaggtatgatctctgatgttagcttttgatatttttggtcggttgattggggaagtgcagcacattcgaccggtatgacttgtccgatgaggttcttgcccacaatttggtactgtccccaaaacctcaattatatctgcttctttttatgagtttcatacattaaccaaaagcggtaagcggtcattgccggttgactttttatttctatcatcacttttaagtttcatatgctgtggtttggtatattgtttttttttttcgaccggagaaatactatctcgactttttacttacctaactaataaactaacgcattgacgatgaaaaattaatttttattatcacattgtcttagaatatagtagcctattccttggatttatgaacatgtcaaaatagcggattatgctatacttattttggccatctatattg

SEQ ID NO: 43861 - DNA, 841 bp, Arabidopsis thaliana landsberg
acttgctaattattccatcaagaaacagataatttgtatcaaaattgtggattgaaatagagttatgggttagagtagcaatttcttacaaccaagtcaaagatacttgttgctcttttgttacagtatactagtgtacaatttgtgtatattatataattgtaactaagaatgaatgatattattgatggaacttttgaataagaactcgaagaatgttgattccctaaagatccacgaggtggattttacgacatgaagtatttcattccgagcgttttttatctattacacaaaaacacaaaaacacttactatggcattttttcgatcaccattgttattggagtggcttcagataaaagacgtatccaaaaagaggtgagagttgctattgaagatttagtgagggcttatccagatatgcaaaatgtaactcttgagtttatcgacatgaataatctaaaaaaacaatattctgatcgtgaaattcagcttctgatgcaaaggtagatgaaaaatgttacagaaagattgaaacaaatttatcaaagtttagtttgtatcacatttgaagcgtaacgatttgctattggaatttatgactaacttgctatagagagattgaaacaaatttgtcgttcagtttgtaacacatttgaagcttacgacaaccatataggcgcaaacattgtttaaaacaaaaaataatcaattattttttgccatagatatacatatataactgcatatattatcttttatttattgaaaaatttcaaaatttgcattaatcaactctaccacatcaaaattttctcctaacgtgacacccatttaat

SEQ ID NO: 43862 - DNA, 731 bp, Arabidopsis thaliana landsberg
tataaatgttttctaatatattgtttcataaaaaaaataaaacggctagggttcccttataagttaacattttcctctaaatatctaaatgcagttttacggaaagttactaattatcgtagatttaacgattttagttttcgcataaatctttttgttgcatgaccaaaaagttagaaagatattatcgacgaacgcattaatataaaaacaacaattaaaacacatgaaataatgataatataaaagcatttctaatcaatgacatcataccatctctatggttacacaaaataaaacaaaactattattttcaaaaatagatcactttataatacacgatttgtatatttttaaatggaaaatgaagaaaactctaaactctctcaaatattttgttttttttggtcaatgtcaagacatcgctccttcgtggtcgtgaggagccttatgacaagaaaattcaagggaagcctccctttccgctagtggatctctcagacatatctttcttattctactatttatttttagggtaattattctctattgatctagttttggaagccaacaaaaacacaactctgtttaggtaagtgaaagctctacctttgtaataatccctcaaaatattgtcgaggacctcaagaaaaacttcacataggattattactcgaaacaagtctacaaaatgtgggattttgggaagcgaaacttcaaaatcagtattc

SEQ ID NO: 43863 - DNA, 766 bp, Arabidopsis thaliana landsberg
gcggccaagtctcctacgggtacaagagctttctaaagggctggatagtagaggaccacgtgcgctgctaggcttttgccggtgcgaacgactactactacaggcggtgccccggtggcaccatagaccccggcaaggacaaggccccttaatagtggactactgcgagtttcacgacaaggtacggaggccgatctcatcgtggtgagcgtggaggtggtgatccaggagatacagagattcctttagcacctaaagccaggcctgatgcccggcgggcacaacgaatacgacaccctgcgcctactactggacaagatggaaaaggggctccacataccatgagcggcgaacgaaagtgctccaactgcaacgccaatgagttcctggccgaacgggtggacgcgtacaaggcggcgacaagcctgctcaaggaagccggggtggacttcacgcccgaagacctactgatggttgcggcattcctgaccggagaggtgggctcgtgactaacgagttcgttcgggtgcgcaccgattcagacgtgcggctcgaccacattgccagactgggcatgttcttcgacggccagggtaagtccctttgcggtaagagggcttggccgggcgcgtgggaggacgccaggggccacgctccgcgcgtcgtgtgcgccgactgccgggacaagtacgggaggcagaaaccgtgaatgcagcggttgaataccttgaatcgcaagaatatctagaaggctaccggtctaaca

SEQ ID NO: 43864 - DNA, 514 bp, Arabidopsis thaliana landsberg
atcgtggctactacaccaattttatcttaaactaagtaagcagctccttggaaggtaagatttaccgatcaacgtacgattaagtatattatattggagaaaattagtgtcgttgaccaataataagttattacaagttggcgtctattttattgccttttaattgtctccttttcgctacctcttcttggaaggtaagatagaccgatagacatacgattaagtttttttatttcttagaaaagatgatgtcgttgacaaattaaatatggcgcctattttattgtcattttaagtttcttttattgctatctctcttaatcctctcttcctttttaaattatatcaaaaataaaaataacgtttttacaactagtgcaacaattaatttaaaggcttgttctagtgctagttttgccaagtgacgttgatcatagcttctttttattctgttcctggaccgcacctggcttgcgtgttcacgaagctgtcatagtttttggtccgcttcctt

SEQ ID NO: 43865 - DNA, 635 bp, Arabidopsis thaliana landsberg
ggtatcgcttctacaggtatcaagacggacctgaaaggatactgtgaaagctggaggatcaacgtggaagttcacaacatcagaaagttcgatgtggtgcctcaagagtgtgtatcgcacattaaggattacatgacgtcatcgcagtacaaggatgacgtggcgagaaccgttgatgaggtcattcttcatttcgggagcatgtgctgtagcaagtctaagtgtgacggcatggacgcttggatctttgatatcgatgacacgcttctctctaccatcccttaccacaagaaaaatggcttcttcgggtaatttatgaaattctctatcttacccggtttaagataaaccaacttgaattgatgggtgttgtgtatacgtaactgtacatattgttactttttagctttttacttaagtgaatgcactttggatctgactgaaccggaccggatctctgattagagatgtgaattttagatttcggttcaatttggattaatcttatttttctcatgctaatggattaaaaacagaggagagaaattgaactcaacgaaattcgaggattggatacagaagaagaaagcaccagcagtgccacacatgaagaaattgtaccacgacatcagaga

SEQ ID NO: 43866 - DNA, 582 bp, Arabidopsis thaliana landsberg
gaaaagaaaaggtgattgccgctatggtctcaaacgtagaggcaatgataagagctgatagaaagatcactgttttaaaggaattgcaggtgagcaaaaaaaaaaacaccccgcctttatttttattgttcacttcaatagtgtgtgagaaatgccatatgaacttttgtatgcagggtcacatatggcgaacaggttttgagtgtgatgaactgaaagctattgtttttgaggatgtagcagatgctttagagaaatggcattcttcaggaattaaggtatgttcatgtagcttttaaagaaatgacatttttttcacaggtctaatggttttcatgcgaataggtttacatatattctagcggtagtcgattagcgcaaaagcttctctttgggaacacagactatggagatctgagaaagtatatatctggctttttcgacactacaatcgggtatataaaaagatctttctgtctctttctttttcaatagagtatgatccaactacaaatctcacacgattctttgctgcagaaacaagaaagaaagtagaagttacaaggagataaaagaaacatt

SEQ ID NO: 43867 - DNA, 406 bp, Arabidopsis thaliana landsberg
agtgacagcaaaaaaaattaaatggacgcgcaattttttattatacgtagatcaattgtaagtttctaaagagcttccaaagtcaattttttgacaacgctttggaaacaagattccgagagcttccagttccgactccgatcctgaatgcggtgataggttcataaaagccattgcaataaaatggtattttttgtcatttaaacttaaaagcattcaatattaaactaaagattttatgtcataaaaaaaattatcaatataaaaggaagaagaaaactacaagattatgttttgaaatttgtttttttcaccacaagcaatttgtcatatagggctagaaatattgttttctactagattctaatcaaatcccataagaagcattcaatactaagattctcat

SEQ ID NO: 43868 - DNA, 382 bp, Arabidopsis thaliana landsberg
  unsure (1)..(382): unsure at all n locations
gcagcatcatcgatctgaggctgnnnnnnnnnnnnnnnnnnnnnnnnnnnnnnnntcatgtcggcaaattcagtgtccttcatgatcttgaaggaaactcttggtgacgaaacagagtccgtcgaaagggtcggttttgaatccggatccggatgcggatccggttcaagatcagggttattgggtatcttcgtgttgtcttgatccaacacggcttcccaagctatgggaacttgaagaatctttttagggaccactttggatcttggaggagactctgtcttggggagaggatctttagtagatgggcagaggaagttgtccatcaccatggctccatgatgatcctcgtcatgatcaagatcaagatccttgtagctgt

SEQ ID NO: 43869 - DNA, 211 bp, Arabidopsis thaliana landsberg
ggtaaaacagttatttgataatattcgtgcgtcttagaaacgccatatgcccatatccttaaacattcgtattggctaaagggtaaagtagtaatatatgtgttgccggagatgtagaggatctgatcttctatttagtgtagaattcccttgtaaattcattatgggctaaagggcaaaatggtaattataggtcaccggcggcatcaaa

SEQ ID NO: 43870 - DNA, 776 bp, Arabidopsis thaliana landsberg
agattccatcagaaacgatgatagtgactcgaacgcatcgctttctccacgagaaagagagaaggatttcaatgtctcagaccaatcagatgcttctggaactttctgcaaacgaaatgatcgtgttggaaactctgttgcgggtttagtgcctagaagcagtggttcgagttcactagcaaccgcgaggcaaagatacatggagcattttggttacaatacaagaaaatgtcatatggtgacacattctgttgactctgatcttcaagttgaggtttctgaacttggatcacctccaacttcagttgatggtaatgactctgattatgaaagatctctgtttgtttatgaatcggagatgggaaaagaaatgggttataagggtgtggaatctgaagtcttacttgtggggaaagatgatcaagatcaaaatgaaacaacttctttagcttctccagaaaatgaagaagcaagaaacttggagtccacggttcctcaatcggattccgctttcttcaaaagagatgaggttagttcatgtttttttttgaagtcatgaaaatggtataaatgtttagacattgaacataatctttgcaaatttttgtcaggagttgaaggaactttccgagaactcagctgatgagataaagataagttatgactctgacgaacatgaaccatccgagaggacgactgatcaagaatttgaagaaccttatgagagaaatgatggagaagaaaggcaacaactcgtggaagctggagcttctgat

SEQ ID NO: 43871 - DNA, 702 bp, Arabidopsis thaliana landsberg
agaaatatttaaatatcgtcttccccttttcagtccttcagtgtgaaatcatgtatataatttgatatctaataaatcatgattaaacgaaatgaaattaatcatttggatccgaaagattgcgagactttgcaatcatgagtattgtaaagcatgtgattagcccatcatttgatcaagtggcacatatatattcaaggaaaacaaatgaatccgaaaagagtctaggaagttcacatactatatgatataacatattagtaccgttaataaaagaactgaattgagaagtttactcttcctgatttttgattaaaatttttatatcatgactaaatcgttgttgaattgtagacctatagaagtatatatactgtgtattatttatcaaaaacaaaaatatagttctgtttgataaatagaaactatacatagttgaagtaactattgcatgtgtatttgaaggtaactattgcatgtgtgtattgaaggtaagcacgttgaagtaattctgtcatgttcgaactcaaccaatgagtaggtaaataccacatgtatacatgtatgataaggaaatagtctataccttaagttacatgcctctatgattcaaattgaaagacaaaatttattaaaaaccaaaatggcgaaagataaaccagatttggaggaagtaaaaaaaaagaatacgattcatatgga

SEQ ID NO: 43872 - DNA, 521 bp, Arabidopsis thaliana landsberg
  unsure (1)..(521): unsure at all n locations
aaataatttcatttctttttaatctctaatccgatttttttaagttctaataattccattagtttaacatcgtgagaggtcgaagttttgtatatttggtacaaagttgattagctttgtagcagtggcaataaagtcagtgcgtcatcttctaggtctacttcacatcttcgtcacaatgcagagtttatatcgatgataaaaagcttaattatcataaacttaatcatcatacgataatatctcttacctattccaaaagaacaccaaaatcactcttatgcctatatttgtctaatctaaacgatatgacacaactatatattataccactatacatcacataaaaaactagtatcactctaatgaatagaatacnacgnngaatatgnttttcgcaacttttttaaacaaacgtgacaaactttagaaaattatccattcacatcatacataaaaaatgtaaaacctaaacacaaaaaatgattagaacaatcacatcctactcctaattacgacac

SEQ ID NO: 43873 - DNA, 579 bp, Arabidopsis thaliana landsberg
tgtcaaaaccatgtttgtggttggacctacatttcttctcgtatcttccttctattaattataaatctatccaaccttttaatccatatttttacatatggtcataagtgatatttatcgacatttagatcatgtatgtcgttttacggaccatcggaatatctacaattctacataacatactaattaaaaaaaccattaaactgaagaaaaaaagcagatgatgaaactgtgtatgaaatgtgtatatatataattcttttaataaatcgtccaatttctatatcacatttaatttgaagttaaaaaaaaaaaagaaatcttgcaacattttagtctaactattggagttaaaaacaaatacgtgtaagcgagtgtgatcacgcctaaagttctttttccttagacaaaaacacctcatcagccaatgttgtcttcttcgcttgtctcaaaactcgaatctcataatttaaaaaaaaaaagagagttctgtttagtttttatcaaaccagaagaaacaaatcgtattttacttttgtaattaagtataatgtgattggcgggttttagttagcacta

SEQ ID NO: 43874 - DNA, 744 bp, Arabidopsis thaliana landsberg
tagtttctaacaaatgattgatggccaggtacaatttagcaatgattatcaaccattattgggatttttaattttgtataagagatgtctatgtttaactagtttcgtcaatacattatttacacaaaaaggtttaaaatcacagtattaagattatgagtgaaataagaagttatgttaataaaagaaattaaaataataggaaatagttaagtagcaaataaaatttcatacaaatcatactaaaggagaaaatatattgaaatggtagaaaaacgaagaacttgagaataaaaatacaaaattgtttaacagataatggaaggagtacaaacaaattagactaattagaaatgcatagaaaatatatgaggttcttagaaaaacaccattatagaattctcaactccaactaactcaactaaaaagagaaatcatattcggaaatattgtcggaaacaacacttaagtttgttcgaaatgaaaattgtcgaaaattaccattaatcgacatgtgtaaagtttatgaacttctaacacatttctaatgacgtttcaacaaatttccgatgaaggttccgaattatattgttctccaataacctaaaaacccttttttttaactttgtaacgataattttatttcatcaaaagttggaaataaattggtcacaaatttttgtaggtatttttctgaccatggtcctcaaaaattaagattgttttcttctagtgatatagcaa

SEQ ID NO: 43875 - DNA, 1008 bp, Arabidopsis thaliana landsberg
attaccaaaattaataatttatcatagtataaaagctagacagtttatacatcaacacatcggataagctttatatactttacatatagtgattgcaatttgtaaataacacatcaaacatgtaaaaggactacacacacatgtcacatgtgtatcaccatcattagacatgtaagatcatgttcttgaattcttcaaagtcaacaaaaccatcaagattcttgtcatgaactcgaatcattctcccacaatcccaagcctttgcctcctcctcaaaccctagccgttccaacacatcacgaagctcctccgctgaaatataaccatctccgttcacatcgaacacattaaacgccctcgcaatcgcttcatcattatcagcaacaacatcaatattcttcttagatcctttgctatctaaaacagcgtcgtagtagaaccgaaggaactcgtctaaatcgaggctctgtttaccaacgatcagttcaagctcatcgggagtgtgttcggccgaaccgagtttatcaagaatccaaaggagctcgtcgagggtcacaagcccgtcttggttcttgtcgagcgtcttgaacattcttcggagatcgtttgtagttatgaatgaacaatccatttgatcagagaagggtagtttggatcttttggttatgttgaggaaatgtgtaaatctatttatggagaaattgtgcaatctttatcgtctataaaacatatatacacgtacagcaacatatttatatgattagtgtgtacggaagagattaaagcggaggaaggttcccggaaatgggttatgaaacgactaattttatgaaaaatgatgtttctagaagaaaagtcaataaacatgacatttagctaattttcttgtgtcaactatgacatatagctacttttatatgaaaatttgatagcgtatttaattatcatctttgattttttttaatattaagtaaaaacagtataagaatgaaaaaattaacttgataa

SEQ ID NO: 43876 - DNA, 982 bp, Arabidopsis thaliana landsberg
cagaaaaatgatatgcaaattacataagacatcaaagtttgcaattacaatacaaatttaaattcttaaataatataattatacacaaataagaagtagaaattatttttttggaattttaatgctgctgtacatcgaaatattttagctcgagtatatctcatatattttgatagacatcctttcagataaacacaactcatatagcctcctaaaattatctaataaacactatgtatttagatttatgttttctatacaaaaatatggaacaaaaatatatgattaatcacacttaccaacgaaggagattatgtggagactttttcagaacttggaatatagtggaagaaagatgaggcggatgcattgatatatatagagagaaaactagggtttttcttttcatccaatcaaaacgacttttattatatttgtatattgaaaaacgacttcgtttttgttttaatattttgaaagaaaacaactagataagaggaattattcaataagcaagtctaataaaaacataaaaataatcggaaaatgattaactcgctattttattacaataccctaaagccggcgcgatgtgtagcatatcgaaacttgggactagggccctcaaaatttgtttcctacaaattatgttttattgtaaaattagatcccgattttctgaattttaaattttactctcattgtttaaatattatcttaaaattgaaattgaagcaattagcaaataaaaagtcatttgaaattagaaagatggagctttttccccaaaaaaagagcaacaccacctctaatactttgacgtaccttgttgcatccccctcccccacaccacaaaattatcaaaatgctttagtgttattattctttatccgaaatcgattaacattgtgagcttgcacaagtgtgtaacataaaactaacgcagcagcatagtacttgttaacttaacgcatagaccacc

SEQ ID NO: 43877 - DNA, 480 bp, Arabidopsis thaliana landsberg
  unsure (1)..(480): unsure at all n locations
acgaccagagatgaaggaagttgtgagtttgcttgaagctgtcgacaccaccaaaggcggtggaatgatcccggaagatcagagacctggctgtttctgctttgtctctggtcgtggtccctaattttaccccctctctctttttacctttatttatttacttacttaccttcacattgaattttggagcaatgctctgttttttttttcttctttaatctgtcaagataaaaaaaggttttcattattaatatatatacacattattattatttctgtcactgtgaatatgaatattgtcgtttggtccaatatacattggaaaatcatataacatattttttgaaacgactgtgataagttaaggcctctgttttaatatacatagcatangtgtgtgcaaattttctctatttnnnnnnnnnnnnnnnnnnnnnnnnnnnnnnnnnnnnnnnnnnnngaatgcatgaaaaatgacca

SEQ ID NO: 43878 - DNA, 649 bp, Arabidopsis thaliana landsberg
tctcaaatatagagaacactaagacatggaaaaatagggttttccatatctaaaacttcagaatgagatgattctgaagtctaagtactagttccttagtagaagcagcactttttttttttaattttactttcagtcggttcagtatgaaggagttaaggctaaaagtttggggtagttaaagtttggacctaaatgtcatgtactagatcatgattaggttcgtaaaaaccttagtgttgccaacttgccatcatcaagaagatcgcacaaattcatgaggatgtgattgggaatctctgcatcaccaaagtttctgcattagttacggcaatctgtttcttttggtcttactatagaggttacagttatattcgtgatattcctaatgtcgttggggaaaatatctgtaattttacctcttttttctttttacctacgtatgtcttattctgaaccttcaagctattccttttctttaaacgttaatgtttatgtatgaaagtaatttctctggtactttcgtttatcatatttggttaacataacacggtgttagaaatgaatgatctggaaaaggttgtaagccaaaaatcttggcggcaattccattttctaataaaattttcttaaaaaattttttaaaaat

SEQ ID NO: 43879 - DNA, 674 bp, Arabidopsis thaliana landsberg
ttcataatggtcttttagattcgcttgaatactcataaaattgtgacaataacacgtttaattacccaaggaaatctgaattaagtgaattcccatcccataagcaaaaagaaaaaagaattacaagttgagagaatcctaggccgaaaataaaatttgtcatatatattagaaaaatagcacttcattgtatagtaagatttgtttcatgggtccagactccagacttgagttaaacgtattctcgttgtgattttaattgttattattaagcattttagacggcttaaatgataaaaccatttgattttttcacatttatattctgaaagtatatatgtattgttatataaaaatcattagcaaaagctaaagatgttgtggataatgatggaaactaatgatctttcctcaaaagagattcctaatgtcacacagccacctcaaaagtgagtttttaattctttttttcttataaactaattatccccaaattaatagtcacaaaggtaactaataaatggtccagttatacttgtttaaaatattttttttttaatgcagaattctaactttgtttttattttgtttgttaaaggcttaatctaactattgtttccatgataactgttacgaattaatcaggccttggcgatttagtgtttttgtggcat

SEQ ID NO: 43880 - DNA, 710 bp, Arabidopsis thaliana landsberg
taaagattgagatacataaatttatattgaactacaatatatatttatgaatactaatttacatttttaaaaaaaaaaaatatctaagagacttggtctagaagagatgaatacaagtagatttatttaaggtattgagagaataagagacaagtcaaatagagtgatcacattacttaaactctaactctagcataaaacaatattggtacaagtaaaaaatcaaaaattggatttgaacatatataatgtatttgttttttgttttagaaaacttttttttcttccttaaaccataacagcattagaacaaagcgttattagtcatatactagatctatgtaacacataacaaaaacgtgtaaaggtttgcgaattggttgttagttttttcgaactttctaaaataatgtatacaacatcttcgtacgtccaatgataatgtttatgaatccaagcaaaagcagtaagtgtcagcacacaaagacaaactctacattgtgctattagctggcatatttgttggtgttatttacgatttgtattcgttctctctttggttctaatcacggacaaaagtttatcataacctccggaccatgtataaaaatgggtgtcaatttgtcctagggaatgtctctcaataaacaacgccatcccttggtagaccagaaagttgcaattattcactacaaatattcccatccatt

SEQ ID NO: 43881 - DNA, 880 bp, Arabidopsis thaliana landsberg
aaaccaataggaaaatctggagttgcagaagaaagtttcattcttttttatcctccgactctctgcgccatggctgtaggtgaaaaaaaagctttggagagaagaggcgtacaatagcaaaacaccaccctttttttttgttggtcttactaaattattgctttctagtttcatcttttgtgtctttattctcaaataaatatcaaaccatgtcgacgattccttaacacaatttttctgtattattccaatttaattcattcccatttgcctacaaatttgtgtcacacaacagaaaaaaaaaaggtaaacatcaaattaaggtccataatcttatttagaggaatactcggatacatgttcatatgaagatcttttgtcagttctcttgctctcagaacaaggtggagttttcctcttggttggatgcgaatcatcatcatcatcatcataaaggctgagatcatccaccccaagagcaaggatttgcgatattccatagtgaaaaggctagagtcactttccattgtaaacctatacagctcccatgttgaaccattgttcatagcaaaacatggtataaatttagcacgtacatagttccttcgatgccgttctttaaccagtttccaaaccccttggtcgggcacgaacagcgcgagaaacagccatatgctatgttcctcgctacatgtcaaatttgtaggaaacatatccggctgaagatgcggagctatagacagtaactgactgttttcttgaaggtttggtatccccggacttcaacgaagctccggataactaaggctttctaagattctcggcaatactaaatcttaaaggttacgaaaagtgtataagtttgccatgttgtgtaagt

SEQ ID NO: 43882 - DNA, 676 bp, Arabidopsis thaliana landsberg
acaacagagggagtatatgaaagattagtaatcaagaacaacgctgacatgtacccaaattcttgtccaagatataaaggctccaaccacaaatatatgaagaaaaaaaaaagattttgttttagagctataaatttataatttaaagttaaaaagaaaagatttcttagcataattttataaatatataattcattatctttattttgtcaatagataaatactttacagttagatcttcaaaaattgaccataaaagaatctgactacaaagtagaaggtattatgccaacactttgattataatatgcaactatatgatagacacgagagtaatacagtacatttatacgacattcttgatactcatgcatacaaatttcagaacaaacaggtcagtatgaatttgaattgaagaaattaactgttgcttacgattacgacataagaatctttatgaaatcatcgaggatccataaaccatgtgatctttattgattattaacctatagattgacttaagaatgtacttagcttgtaaaccctaatcatgttataccttaatttattcagcatatcataacgaggaggaggccaagaccagtcaagccacgagccaaagttttttttagttattactcactgaattaaaagtagacctagaccaaaatgactc

SEQ ID NO: 43883 - DNA, 813 bp, Arabidopsis thaliana landsberg
tcgttttgggtcatatagttttgaattgaagtagagtggtagagagatatgcaactagagtttgtagaatgactaaggagtaaaaggagagaaatagtgatgaatgtcactagtctataatgggagtgaccacaacctcgtttgcccgcgacttacaaccgtctctctttttaaataactaaaatgtacaaccgattagacacaacatgacaacctatattccatttacaaattaacatttgtagttaaaaatttaaataactaaaatgttaaacatttgtacataaaattcaagaaacgcagacgttcatcttttttcttttttgctgacattcatcttcattttgaagtctctcattaaaagtaagatttcgtaaatatttttacaaaacgcaaacgcctataaaaacgtcttttgcaagtgatcttgcaaaaatgcaaaatgatcaacgtacgcttaggaaatgattgcgtggtaatgccttgtagaagacaaagtatgaagattcataagtggaaagaaatattaactagatccaaaatactaattttcatcattatcaacacctatcaagaagcatatgatcgccttttgctatacatatacatatgaagacacatgcatcgaaagtttcaaaagaaaatccatgagtaccagagaaaaatatgctcaaccctaagagtgtttagtccaaagtttaacaaatctgatcgtagctagtagcctgtgttgaaaagcaaaacaaattagctaacatcaaattaactaccaaatgtgcataagaaaataagatggggccgtttttttattgc

SEQ ID NO: 43884 - DNA, 571 bp, Arabidopsis thaliana landsberg
acttcagccccgaccacgctacgtcttatgggtatagttctgtcaggtctagctggtgccgttttggttccaagcctgccagaactcttctttttcctgctttgttgatcatatatggtaatcctgcggcgggtgcgcccttaatttgaaagaaaaaaaaccaaacaaaaattagaacaagataataaaatatgagtataatacgacaaataaattaggaacgtaaaaaacgtcactgttttaaagttattacagttttacctaaaccgaatttagaaagaaaaaaaataacctgaatttcatgattctgcaatagtgagtgatcaaatgaaggctgatctctcacgtcgaagcagtctacaatatccccatccgaactctgtaattgaaacaaacgtaactatcaatatatttatagtgttacacatgctgttatatatcaagagttaattagtttgggattttaataaatatatcaatagtattacacttccgcatcatgtattatgtattatatatattcgatccctagtccctatcatattgaaatcacctggatagtcttcttggc

SEQ ID NO: 43885 - DNA, 801 bp, Arabidopsis thaliana landsberg
gcaattttatctctgtaggagtctacatgattgcctttgctcttcttgttgcccctcttccaatggtcgcagcctctttatacatcgatggctgtaaatctcttaccaattccactcataacccaaccgaaaacttcaagtcttggaaatggctagatgcagcgaaacaggtctttactttgcacttgttgggtttcattgtcacgctgctaccttatttcatctgtcaagtaccgggccaacattctccaacaaaccgctccatcatgtggggcactacctcttcgtcgcttctccttataacctttgtcacaatgcctggttgctctccgttctcctctcgactccatggaaccaactgggccatcttgaaatcagtgaccatctcagctgccttcatcggcctatgcctcatgtccataatcaattttgccaccgcagagattggagcgttgctactagtgccaacgtgtcttatggctcagcctataaaacccgctttaagatccagacgccttaagagcctgttgggtgcgttttgcagtattgtattgctgacaatcgggttcccggtcatgttttttgcaatctctaaagggttgcttggagaaggcctcgtagggttgagtcttggaggagagttttggacatggttagagtcgctttgggcgtggaagagtgcaacatatctatacataggtatggttcatcttccttgctggctcctttgcctctgcatcttgtttcaccttcttaattcttattttacgtccaactcatacaaggaaggtcacagtattc

SEQ ID NO: 43886 - DNA, 734 bp, Arabidopsis thaliana landsberg
tcttgaactctacacctcttaatatcgtgtttctacaccaagattctattgatcatcaacacttagacattattttcttgttatcaaagcacaaccgtgtttcccaaggtggtcgatctttgaagaaagtgttcaaaccaactaatctttttgaaaaacctacttattatattgattttgaagaagatgaaaaaaatgatgaggatcaatatgatggtcgtacgcatagtctaccatatgaaaaatacggtccatatacatgtcctaagtgtaaaggtgtgtttaatacttctcaaagttttgctgcacatatgttatctcattacaatcgtgagacgaccaaagaaagagaacataggcttcgtgcaagaaacaaaaaaaactatcgtaattacacggaaaatctcaaaagatgaaaacagaagttaggatccgtattagtgacataattatcacataagtgactatgaaattttcaaaaatcttataatcgtaaaagaagagcttgcttataatattatttctttcgtatctcttgtccaacttattttatgtaaataaataatgcaaactggtcttctatttctaggattctctaaatattatatttgttattaccaggattggatatgcttatttgcacagataattgtaatctttatttgctctttatattttaagttttgtttttttaataaagtaatttcttaaactacaataaataatatgtatac

SEQ ID NO: 43887 - DNA, 1366 bp, Arabidopsis thaliana landsberg
tcttaatacgactcataactaagaaaaatcacacagtcttaagggtatattagcttaagacgttaagacgcaatacacaattgctactgaattcaaacaaacagagagaagaacagaagaatcgtcacaaagcttcccctaaactctgcctttgaaacgaacatgaaaaaaaaaaaaaaatcagagagacgaacgaagaaaacgcaccggacatggaagaagcagaagtcattgctaatgaggtaaagcaatctcactaaatcgatccaccatttgattgatacgaacaagaaattcaaaacctccagattccgaaatcacagagacggagattaagaactctttacgaagaagagacgagttcaaattcggatagagaggatttcgaaatgatagaatagagagatagagagacgcacacagtgatgtgaagaagaagaagcagaggaagaagaggaagaagaagaagaagagagacagatatggagtctcaggtagccctccctggccacacaaataccgtccgatattccaaagaaagaaaaaactttgagatatttttttccctttgtggtcaaacattaaaattataaaatctcttccttttctgttaaaatacttttttttagtcaatagtttttagggtttacaaaaaaaaaaaaaaaaaaaaaaaaaaaagtcaatagtttttagtatttaggaattatattgaatgaccaaaattatatggatgcttgtaaatatttaaaaaatttacaattttcatttgtaataagatagtaatttagaattattaatttcattttcttaaatgataaaatgtccacacaaaaaaaggataattccatatttttattttattttattgtgtatataatataagaagggaaaagaaaatacatttgtgaccaaaaggaaaataatatacatttgtattttattatttcattggttattattaggtgaatataaacaagaaaatatgcatattggttgtatatactttatatataatttaataagctcattcaaaaattcccaaaaacaagtatttcaaatatcgttacaatttacccccgggacaaatcaacgagccatttaaaaaaaaattataacaatgtgaacaaatataaaataattaatgggcaataactttaaatttagggagttaaaatagtgttaatgagaagagcatccttgcaaagcttcaacaagtttgtgttcctacgagcaagctcagcatcattaccggcacgatcgttcaaagcgttttcacaagcctcaccgtcgcttatcgcggtgttgagccaaatatcgacgtcgatgaacgagttttgcatcaaagcggctagagaatcgtcgagct

SEQ ID NO: 43888 - DNA, 568 bp, Arabidopsis thaliana landsberg
  unsure (1)..(568): unsure at all n locations
gggactctgtacaccatgacttcgagtggcaacgaagctcaggcgtgcctgtgcttttcacactgctgtgttttgtgttttctttctcgttccgtacttcctgcatggtcaacgttgccttttcagcgttgatatcctctgttcacttggacgaggcgatcttctgctcgcatatcgatgcagttcttcgcatgtcgtcggtgtaacttgtgtaccactttgcacaccgttcttgcactccctcatccccctctcccgctctcctcatctcccctgctccctcaccacacccccttctccacacatccccgaaatcgcaggtcgtcgttgttggcgacttctccgtcggcaagacgtccctgattcgtcgcgccaccgagggccagttcacgaccgagtacaagatcacgattggcgtggactttttcctcaagaagctgcgccgcaaggactcggtcgccgatctgcaggtgcgcagcgcccgaccgatggcgagacattgtggcgagccgcgtgcctgcgtttgctgtcngttgcgcgcgcgcgcgcgagaattgaatgatgatgt

SEQ ID NO: 43889 - DNA, 654 bp, Arabidopsis thaliana landsberg
atatacatactcaagtcttagataaaagttaaaggattacttgctccaaataatttgatgggcctaagcccaatttcatgtccttattgttttttttttaaaattcctaattcaatttgtaatataagtttagcttctttcccaaaaaccaatttttaattaaaaaggtatgggttgccaaaaatcaaaggtaaatggggatatagctgcatgttaataagaagtatggttctatgtgattgaaataaattttataatatcatgtaacataatattcatagaacaacaagatattaaacaaaaatcaacgaaaactatgattaaaacacatgcaataaacaagccaacttttttatactctctccattttatattaggaatattttagattgtaaatattgtttcaaactaagtgttgttagatattattaatgcaaatgtttgttacaactttcaattttttccattactttaatgtgtacaactaataataaattttctattattttaaggataaagattaaaatagaatattgaattattttcttattatgtataaaatcatcttaaaacaatacttatcttcgttttaaattataactatctagtgtcgatggttttcttaaaataaaatatttatttttactaaatata

SEQ ID NO: 43890 - DNA, 677 bp, Arabidopsis thaliana landsberg
gtatcattgacaagttctcctgccagaccctgtcaggaagacacattcatatttgaatcatctccaattctcaactactctgtggaaaggatgcagctcaaagaatttaaaagagtgttttcagaattaccttgttcagtggcgtgaagaacgtgtgtgcaacgccctttttacccgctcttcctgtcctcccgattctgtgtacataatcctctgttgttaaagggaaagtgtagtttatcacaacttccacgtcggggatatcaagccctcttgctgcaacgtcagtagccacctgtaatttataaaacagtgtcaatgctctgtttcagaaccagccaaagtggaatgatgagagtacacatacgagtaacgggcaggatccttctttgaacaatgataaagacctggtacgttcgctctgtgctttgtttccgtggatagatacagctttccaacctctaaaatagttgtgtaaataaatcttagaatcattgcatttcatgagcaaaaatatcaaagatgtttttcctcttttgttgaggtgatttgggctaaaagatagaacctttgctgaagaaaacgctcgagacgttcagcttccaccttgtataaagcaaataccaaaaccctgttcctgaaaataccaaaatgcttggtattagtatgttgaaaaa

SEQ ID NO: 43891 - DNA, 925 bp, Arabidopsis thaliana landsberg
ctataaaatatacttatattccaatattctttttttccatttttcttaataatcagattttaaactgatgagtgtttgttaatttttaaacatattaaattctttaagttaaaacaaaatatataaattgccacaagttttttttaattacgagataaattatagtctataattttttgcactagaattttgaaaatgctattttaaatttagatacaaataaaattatcgtaactttagaaaacaaattgtatgaaataaattacaagggccatgatatgatgataatggaattttaatttgtccaaactttttgtttagttatggtctatacagtactccatacatttttgttttggtatggtctatacatacttacgtacgtccatgtataaagttttgttatggagtttgagccaaaaaaaaatgtttagtgaaaaaatagaaatgagtagagagacttgtgccaagaaggcaataagcaaaaagaatcagaactagtgatcgaccaaaaacaattgactaatattaagtcttgtaacatctgatcaaactcttaggtttgactaggattcaaaaagcaatttggtaaattaaaaggtgaatacctgttaattatatatagtgcacaagccacaacttcatgttaggatatgatagaaacgacataagacaagagattgattggtaactacaaacgtcaaatagatattctccttgttccccttttataccaaacattcaaacaataatggcttacatttggaccacccaaccttaccttctttcatttccctcttatgctttcaggttcaatgctcaaattacttttcactatagctttcaatttgatcggtccttgcttattgcaggactacactaaagatggttaaaaataaaataaaattgagtttatccttaaagc

SEQ ID NO: 43892 - DNA, 813 bp, Arabidopsis thaliana landsberg
gcagcacacgccaatgaaccatcagtttgcttaagcatcacctgccatttcccttcattttttttccatatcagatatggatagagaaaacactctctcatgttcaggacactggaattgagaatgattatgcaaatctgatagagagactgagacaagcatcacatcatgcttagtgatcaaggaagtcacaatacaaataggtacagctatgatatatattgttttagtcttgtaaagaatagtctagcatttaccaggatattgtcgaaaaagtgctccgttgtagttcaacacaaatggtgccactgccactgtcttagccaagcaacacaaacaactattatgctgcttcatttctgtaagcagccaagaaaggtccgctaagaaaatatcatcctaattgtatagtacctttgaatactctctggttcggatataaaagacgggaataaattgagaaagaaaccggtagtgcagatctttagggggaaagccaagaagccctaggtcagcactgcactaaaattcaattgtcaccacaagtgaggaaaccgagagagattgagttacgcaaaaaactgagatctcaatagtgataataccgcaaagtatctagctcaagattgaacagaagagctggggttgaactggcaaaggtttcctgcaagtatagaccaacaacttacagaactatatagaaggcacaaagaaaatttaaaaatgaccatagacagtgaatatatctaaaccaagttgcatgtaacgataagaaaagataaaaggatgcaataccccaaacctctctatgaa

SEQ ID NO: 43893 - DNA, 1281 bp, Arabidopsis thaliana landsberg
aaacatgtctctagtttttcaaacattcatctatatatgtttgataccatcacgccactaagatgattggctttaagtggatctaggaaacttctttactagcagaaaacatcaatattctaatccttactttagataaaatattatttataactgctactaaaaattaccgcctaataaagcaaatttaaccaatctgataccccaaccccaagtgacattcactctaaatggtgaaggtaaataccaatatatttagagtatttatccaaaaaaaaaaattgccaatatatttcatcccagctataagatattattttcattcactagactttatttgacttggtaaaaacatgttacctaatgcaaaatttctaaaagcacattttagctatccgaccacaactctcgcaattaggcttcaggaactatagtagtttttggtaaaatttcttcattgtcaactatttaacactataaattatgtacaaggactaaagtcactttatgctacatcattacccacaaatttcataaaccattggattatcgaataattacgtatataaaaaaaataaagtacgctcttaaaaaaattagatatggttgctcgaaaagaaacatggtgcgtcgacgagtcgctacctctcacgctttctttgaataatttataatatagtctttgattttctccgcaatggtccccttcatgccatctacttactttcacctttcaagtgcttcatgactcatcaatctcacgattagaacttctctttttcttctccttctattttattaaaatttacgtatgcttcagccacttggattagttattagtgtaaggtaacactactttcgatttattcatctataaaaaccaaaattagagtgcatttcattgataccatcatacttgtcaacaaaaattttcttaaagaacgcataactgtttttttcatggctggttctgtctataaccttccaagtcaaaaccctaatccacactctttattccaaatctttgttgatcgagtaccactttcaaacttgcctgccacgtcagacgactctagccggactgcagaagataatgagaggaagcggagaaggaaggtatcgaaccgcgagtcagctcggagatcgcgtatgcggaaacagcgtcacatggaagaactgtggtccatgcttgttcagctcatcaataagaacaaatctctagtcgatgagctaagccaagccagggaatgttacgagaaggttatagaagagaacataaac

SEQ ID NO: 43894 - DNA, 445 bp, Arabidopsis thaliana landsberg
tggtttaaatgaacaaaagtcaaaatttataaatgatagagtgaatggagtaatataaatgattggggtgattgtatgacatttaggaaagttcagggggaagaggtaaaggtaggtttgatatgatcaagtgcggttggtctacagtacactagtagaataatgtcgtttatggtgagctgtcaagcagtaagtgggtgaaaacggttgcttcgctgtatatacgtcgtacactagcgtaatccagcaaagtatccagtcatgccagagtctctgttacatgtggcatggttcaagaaaaagtcaaattatatattcatccacacatatctcttaatcaaatttaagtctttattaatttgatgtttatttttttaataatccactatctatatacattgataaacatattcttacgaattcaacattgaatttgtcacgcctt

SEQ ID NO: 43895 - DNA, 485 bp, Arabidopsis thaliana landsberg
ggggggggttttcatgttgtttcattgttttccaattaattcttgacactgtttatacataaatatatgatcttcaagtctaagggttaatagacttattaattcttcaagtctctgggttaatatagtttatacaatttatacagaagaccttattaattcttcaagtctctgggttaagagagcattgaaatttatcccaatttatacataaatatatgatctgtccaaatagttttacataaatctcatctctttatcgtaactcttatttttgtattttgtcactaataacttttttacattcataaaacccacttcaaaagattgtatcttagtttagttgtttaattacatttgtattcataaagtgagaatgagagactctcacacacctagaaaaaggaaataccgagacaactcttatatcgtaattataaggttagctattaacgaaaataaaatcagacaacggataattagtt

SEQ ID NO: 43896 - DNA, 564 bp, Arabidopsis thaliana landsberg
ctttcatgtattaattcaatttcactcgagtacaaaaaagtattaatcaaaacatatgcatttccattaactagttaaaatgaccccgacttttgtctatagaaatataattttatgattgattgacgaggattttgttataggttgtgttagtgttttcgttatgttatagtggatagtccacattgttgacacaaattatatgattattaaaattctaatttatgtatgatttaaacaaacaacatgttaatttatctgatagtaagtgttactatcagaaaacacgaaactttacaccttaatatataatacgtgtttgctaatttacccaataacaacttatcttactaaatatagaattttgctaggatacgaaaacgtattttaatggtacattttctccaatttactatattttctatcataatacgtcaagtaattctttaagagaagaatcaactaattttttaagaatatcagcaaaccgctagatgtggctttaaggaaaaaaacaacttctttaataaatcatacctcttcgttgacaaaaaaaaaaagaaa

SEQ ID NO: 43897 - DNA, 612 bp, Arabidopsis thaliana landsberg
gaaatcttgactctaccgaggaaacttctaccgggaatcggtcttctttcgtggtaaaccaagacttcaatgtgttggttgtgctggtttatcacactctggtcataatcaaagtagagtttttggttccaaacagggttaaggcttttaggtacggttcttgttttgcttaactggttaaggaaatcaacttctacaaaaggacttgctgatccttggccatctctgggcataagatattgagcatcaaccacgtgcacgactagtttggtggtgtttctcattgtggggttttcttggtttcttggagtgcaagggagatttaaaagggaaagaatcttgaggagagaaacctaattgtggaagaaaggtatttattctgattaaactaatcaagaagcttgtttataagttgaagtaaagaatgtaattatgaagaagctacttttgtctctcattgagctacaaggttttaaaggattctctctttataggaaaatgaatttggaggaaaagtataaggctgcaaaacaagttgagcatttgcgcaaaaaaggtttatttaaaattttattcttatgcatgctcaaagcaaaacaatatccttttgca

SEQ ID NO: 43898 - DNA, 667 bp, Arabidopsis thaliana landsberg
cgattgtggcgccaaagataaaattaagtacttccaccgcttgatcttctcctgcctctgcttcttcttttcccattagacgaaaacaaagaacaaaagccacaaccaacggcagatattttaggtgaaggtggatccaacgcaggagatatctcccccaatcttccaccatggccacatcctccgtctgatgcgctacgtttcactgttgcagtcgtagcagccattgatccgtcacgatgatcgttgcaccggtcttcttgtctttcgtcgttgcgaatttctccgctcaagaacctgtcgttccagatgagtcctgacgatccttgtctcctaaacgacgctgttgatctctgcaacgccatcttttctcttctctctttcaatggaattgtgaattttcaattttgtcaaggaagaaaacgtaaaacaagaataattatgggaaactatgttttttttcttcttgttattacttgttttcctttttggaagttttctttttattttggttttaattgttaagttggaagttttctttttaatttgtttactttttcttttcataattattttcttattatggtttcatatctgtagtttaaagttttaaactaacaatatttggtaaaatgagattgtttatcaaaaataggaatataggata

SEQ ID NO: 43899 - DNA, 560 bp, Arabidopsis thaliana landsberg
gagtctgccatgaatatataaagaatgggtaaaacaggccagatattcgaactaagaaaaagagagaacaagttttgatacatgaaagatgactgtgtgttctttacctcgtcagcagtaagactcaattgcagtagttgagaatgcaatgtcgctatttccccttctagtttttccttttgttgagtctcattttccaacatcttgtggagtctcatgatctcagaattccctgatgcctaagtaattacagagttgaaaatgaataatccacaaacaaaccaaaacatgaaggataaaagcaaggttttcggggtatacttcgactttcttgaactcattgagttgatgtttaagcctattcacttcctcttcagccgccatctttgattgagcttctttctgaagcaactttttcagttcagagacttcctctaaggctggggctattgatcttctgataagaaatatatgtttaagccaagtttagtgagactatagctgcaacgtgaaaaaaatatcatgcacaaccagagacgttacgtttccatttgatgtga

SEQ ID NO: 43900 - DNA, 589 bp, Arabidopsis thaliana landsberg
ttcggtccaaaactaaaatatgacaaaagtttaaaactacatcgttactgagttgcaatataaaatacaaagttaagaaattctattgtatatatctaaatacactaaactatctatcaaatagaattattgattcatttcaacttttttgcggtttcagaatattccataaattccactgcaacaaaaacaacatgcaaataattaatttcttctccatggtcgaactcaaattaaaattttgtctacccctctcaaaaacatatatggaccaaccatttattctgtataaacattaaattaacttattatatccattaaagtatcagttataaagcaaagcatcccaaaactcatcactataccggtcactaaaaaacaaaggtatatgagacataataggcgtcttgaataatctcttcacagcaaccagtttttacaacaaatcccaagctcaacgaagccatcgacgatccaaggaattggatctctattcttatatcgggtcagaatccatttgccggacccaaccaaccaccctcactatgggataggatggacgtacaaaaacattttgacgataaaaagt

SEQ ID NO: 43901 - DNA, 575 bp, Arabidopsis thaliana landsberg
ttggtttcttcacaaatcaatatttttccttgcatgctgtagattagacgatccaacattgatcaagtagattccaagaatcttggaagcccgagaactatgtatatacaccgcatgatttgtcaggacaaaatttgggttaacagtaaaaatggagtagagatgacttatcattggttttttactttttagaaatatcgacagtccatgcaacgaccaaactaaatatttttggttgtatatcagagacttatgcggtaatctaatttttcaaattgacaatggtaatgtccaagactttctttgttcctcccattctcaaccttcagtgagaagaaaaaactacaacaattaacaatatatcagaaaataaataaatagagaaagaataatcttacaaaataaaaatgagaaaattaaagtataatatttaatgcgagtaataatacttcttaatcaatagttttgtgtgaaaaagaaaatctaaagtttagtgagaaacaataaaatataatgaaagatttagtggggaccgtaaacatacataatctctcaagttgttgcaagccgtccca

SEQ ID NO: 43902 - DNA, 551 bp, Arabidopsis thaliana landsberg
gagtgtgtggtgacacgaacaacaagaaggtgaaatttttttttacgatagagacggcatttggactggactggtgacagagacagttcatttatcattatttgtgtgcttatgaattattattactagtgagaagatacatcagcctttttgatcattgaacttttttgtggtccaaactaaaacctgcaatttggtatacttggaaagtatcgaccgtataaacttcaggttggtccttatataattttaaaactatgaaccattgtagagaaaaattataacaagttagagcagaattatcttaacaaactgatattataagataagtaagatgtgaaacagagtaacacgaaaacaggggaagaagtatggtgaacataagccattaaaattcgaataccaaacagacgaagaacactaggaagaagacgattttgatgaatcaaacccgaaattcgcaacatgagatgaatgaaaaagaatggttgtattaataatatgatccactagatagcttagacaccatggatcttgatgttatccttctt

SEQ ID NO: 43903 - DNA, 738 bp, Arabidopsis thaliana landsberg
ggaccgagtgacattaaacagaaaaaaaaagaaaggaagaaaaaacaatacaaaaaaaaactaaaacgtactgactttgatagaaatgttaaaaagaaatccccagaaactgcatgtttatcattctcatgctcagcccacaccatctgcaaaagttggagttcaagaaaacaaaacaaaacataactctatcaaaagctgaagacaaaaagaaaaacatatggaaacaagagcaatgctctatctttctggtaagataaccccgtaaagtgaaaacaatagaaatcaaagggacaaacataaaaaaaatgttaaaactcaaacttaagtctaaaaccatgagtgcaacagcatgaacagatgctatagtttacagtccgtttaaagacgttagcaccaaaaccagatgagtggagagatggtggacgttcagtttataaaacccagtgcaacactaaaacaaaaaaagccaagagacaaaaagaatgtaacaatattcgtccccaccatcaccaacctatagagaaactaacttcgataaaacaaatggcacttgagaaaactgtaaaaccagggacagtaaagaaaagaaaacaaaacataaaccaacaaaaggaaaaataatggagaaaacaaaaaaaacaaaagtatggggggtcacattgcatctacttgaaatagagtcgaagcaagaatcatgaataatgaattacggcaaccgatgacaatgctaaccta

SEQ ID NO: 43904 - DNA, 795 bp, Arabidopsis thaliana landsberg
aacctctgcatccctggttaggagagcccatgctgcagtcagcggttagtgaaagacgtagataatgtcttcttctcttgcgattgtgcaatatgcttttcaactaaacctgatactctttcaactttcttatcctttggaatgcaatcggctgtagaactcagtgaagtcaagccggaaaaagagaaacttgagatctacagattgttgcagaggcaagagagataggaatccatcaagtgacgatgtgtattcctttgcaatactgtccatatcttgactcatgctttgtagaaattctccagcacgctgtgttaagcccttcctaccctcactgatccatgaaccgggctcttgcgatttgtttttttctcgtcctgattctttagatctgcaggaaatcggtgatattagagatcaaattgtgaccctaaaatcagaggaaaatgtttgagcaatagtttaaggtctacttttgtttgaatataaaagacaaaacacaccttatttgcaactcgtgaattccttcatacaaacgatctgcatgactcctgaaccgtaatataagctcaaacaggacgaaaagtgattcgcggatggtctgtgactgttcacccagaagagattttccaacaatggcgttgaggtacttctcatgcgctgccaagagatcatcgaggtctttagcagcttccatctcttttgagaaattagaccatgatacctccaatacctcaaacatgatgtaatactgaaagttagtaacaaaatggttcatttcattccaaaggacct

SEQ ID NO: 43905 - DNA, 712 bp, Arabidopsis thaliana landsberg
ttaaatagacactgttcgttgttttcagtttcagacaaattaaacggtggtaaacattttacgacgaaaagtttgatcctctcgcaatctacgaatagtcgaatatacctctttgtgtggaccatcatatttccaaaaagtcttaatatataccaaacattatactcttatgatagcaatacaaagagactaatagaacagtttatttaagaagaaaaaaattaacacgaaagtgtttgtattattgatcatattcgaagttgttaaagtgaaaaatgaattacaggctacagcgaagacaatcgttcgtttagtaatatgctatgcgtaaaaaacgaacgaattagctctaacacaaaaggaagtatataattgggcctatagagacaccccaagcccatgatgaccaagcaagatcgaagtcacataaaaatacactagctatgatctgattcagatccatggcgtttccgttaaaactctcaagtctgcacgagatgtgttcaaaattattcgaccaatctctagagtgttaagcaaactgtcccagtttctcaattctccatagcccttttcttgattcacaagaaaagtctcctcgaagattgcatttggtctgtgtacaacctcgattctcaccaaaaatcaccacaagaaccagctccacttcctaaaatggtggaatctcatattatctctcattataattacc

SEQ ID NO: 43906 - DNA, 959 bp, Arabidopsis thaliana landsberg
gtcttgactcggtacttggatctgtttacggattatgtatctctgtacaacagcatcatgaagattgtcttcattgccagctctttggctatcgattggtgtatgcgtaggcatccacttgtgaggaggtcatacgataaggacctggacacatttcgtcatcagtatgttgtgttagcgtgttttgtactgggacttatcctgaatgaaaaattcacagttcaagaggtattttcatatgaatttcacattgcttttgtgtttttaggttgtagagactaggaaagcgaatacttgttgttagaagacatgcatatgttgtgtaatcttgtttttggtttatttattcatttgattcattcggttccttcttcttatatcatttggatttggtaactatcttggctagtgtagaatagaatatcgtctatgtaaatgaaactgaacataactccttccagaaccaattaggagtccggcgtttatagttttatttttgcttgtttaaacgttgtactacctatgtagcctctcactcgctgattgttttgagaaactctttgaatatcaaactgttgcatcgtgaaaggtttgtttgcttccattcatggaatcttctgtgtcctacctacctatgttccataaggtgccccatggattagtgtcatctgtatctcgctgttacttttctggccattgtgttctttgattatcttgtcataagaaactgtagtgactccttatatgcacttcactaagatcgttttcccttactaccttcatatgtatttttccagtatatgctcttggtaaagatctgatctttgcaaactgccttcactctttaagtatttttgcagcattgtggcctctctgggttgatagccagaatcattgtgcaatatgttaattctgtgcattccaaaccatttcaagtgttctgggcgttttctatctac

SEQ ID NO: 43907 - DNA, 558 bp, Arabidopsis thaliana landsberg
tcggagcgtgtctcagcagaaattcttgggcctatttttgtccaaattccaatagccgaacagtcaattgacacgtgtataagacatcaccatcccaagtaattactctctattgtactgtacagattggtttgatgataaatattcaaatatatgccaaacagtaaataataactaatcaattttttttaaaaaaatcaacgaatattttctttcataataaaaaccctaaataaggaataacaaagtaaaaaaacaaagttttttaaaaaagatataataatattaatactattttggttattatggcttcatcattgatcctttgtgcataagaactaaatgagtaattgagtactatataatactgcacaaggctctctctgtgcaattgactgtccctaccaaaattaactctctctatctctctctctttctttctctgggtaagaagagtctttaaaagtgagtatatttcgacacaaacgagctctgtctgtaatggcatgcttagaaatgtacaacttcaatggtggtggtggaactcccatgagtcct

SEQ ID NO: 43908 - DNA, 548 bp, Arabidopsis thaliana landsberg
ctcacttgaaagtaatggtttcgctctaatgatattagcaaaagttggtcccaaatcgaatgagattttgggataaaatgcacctagaactttctcattaacaaaaaaaaaaaaaaaagtgggatcaagacctagaactttcttattaacaaaaaaaataaaagaatatacagtatgattatttattgatatatcatttaaagaagtgatgatgtcaaagattgcaaaacatttcgtcatcttttatatatatgaataagattagtaactacctagctagctttttctatgtataattgtacatccacccacaaacacaaaactgtatggtgtaaatcatatataacccataagcacacacataagtatctttatcacgtaggattccgacagagtttcatggtggacactttgtatatgtagtgttggaggttgaactcaagtgtataggtgtgggattgtcgcttcttcctttgttcgtacaagtaagtgtttgcatgtatataaaggtatgcgtgtgtataatgatgtgttgccatgttggtatc

SEQ ID NO: 43909 - DNA, 1250 bp, Arabidopsis thaliana landsberg
ttaaaatcttagataaagcttttaaatttaaaaaggcccttttttttgtaaaaactcgttagagtccatattataaacttttaaattgaaaaagcccttttttgttcttttatcaaatgcatgcttgatctgttaagaaatcgttttaaaaaattaagttcttaatttatatgcaaatttaatattttctttatttatttaaaacgaaatcgtgtttgaatgttccgattgtacactgtacttgacgatcatcttatttcccgaaaccaaaaatttacaattggtttgaaataatttatttctattaaaatcatacaaatgagtatctttgttgtatattaatatcggttgaccaaaaaaaaaaaaaaaaaaaaaaagtatcttcgttgaaattcgattcatgttttgattcaatgaaaatattattagtagactatcgtcatttaactgatatttaagatttattggaagtaacatttattagtttcgaaaatatatataatgaatcaaaagttgagactagtaaaatacatatattaaatcgaaaatacatacatatcaaattaaaagttgagactagtaaaactaatatgtagaatttggctactgtcaggtaatttactcgctcactaaagttgtagaatctttgtagtaataatgtaactgtgtgagttagtgtagttcaacatgtgaatatgtgatcaatgtgttatgtcaataattttcccagttaaatgcttttaagcactatactagtcttaatttaactatttttttttttttttggcgaagtcttaattaacttcaacatctaatggatcccaaattctagatataactttttactttttcaacaaggtaaacacacatctagtctagatgaccatgtgacactcgccatcgcctttgctatacggttatggacctatccaatagaaaatgatgcgaaggtgtgtgaagagtgacacgtgaacgatgtgtgcttacacatgcaagcttcctattcagccgtccgtcacgtgtcgttgatttagtccccaccgctcccgctttttaaagttaactctttgttgcttctatacgaagtaagctttgtctcgtcggaatctgatggaggagaagaagaagaaaggcgatgatgaattgaactcgaaaccgccgttaatggcgttgaccatgtgtaaggctttgtaagacgtcaaaagtcttcgagtctacacaaggtattaggtcgtgagatagacgtcagc

SEQ ID NO: 43910 - DNA, 609 bp, Arabidopsis thaliana landsberg
  unsure (1)..(609): unsure at all n locations
agtgacagagatagaagcaaaggcactttatcgatgaaacaggttatggagtttagttaacacataagttatgccggaaaaagaagagagagagatagatagagaaaagttgatagtatgaaggaaacaagtgaagtgacggttgtatttatgtaggtctttttattatttgtttatgaaaaatatataaaattgctttcttattttagttagaaaaaaatatattgcgaatcttatttttcaaatattgaattatatgccccctctcctgacaacttttgttataatagaacgatttcagagaatctcgtattttaaatgtacatagatctaaacttgctaggtataataatatatatcgntgaatctagccaaaacatatatgaaaaattaccctataccgtaaaatttattaatatgtttcgagctttgaatttgacactcggaccttgcagttcatatattagagttctaacttctaaggtctatttttaacattcttcattaccttaataatttatatatcttcaacttagtttttttattacgaaaaaaataggaagtgaaaagaaacattttaatatttttattttatacgaacagacatgg

SEQ ID NO: 43911 - DNA, 609 bp, Arabidopsis thaliana landsberg
  unsure (1)..(609): unsure at all n locations
gtacgcataccacgaaagtaagaaaataagtttgtactagaggaacggtataaattttttaatgagattgtatttttgaatgtatttaatcgggtacatgcagattatatgtcaatgaagtagcatgtaagttcgaaaattgtaaacccattttcaaagttttgggcagagtttttccggggaagcctttctgatgtgagataacatcatcacatgatcattttggttcccttaaaatgcttatgaattatgaattcacgattagtataaaaagagagtaaattagtagaaaacaaaatcaaaaggtagctgatttgttattgaaattctagcataaatagttnnnnnnnnnnnnnnnnnnnntaaagatttactcctttttttatagattttttttggtaagacattttttctaaattttgggcgtaatgaaagtattaatagtatattttttcatcatgataggtgaaatattagtagaaacaaacgtaaattacattttttttttcttttttgttttcgccaacagcctataaattttccggattttttttttgactactatttttcaacctataaacataggttgaaacgaattcaagattttta

SEQ ID NO: 43912 - DNA, 519 bp, Arabidopsis thaliana landsberg
gaaagcgttgatttctctttccaacaattcatagattgcgccttgccaacctagaaggagagcaagttttttatgctttgagactgaagttgtttgcaaccaaaggaggaactgatcccatgaaagcggagaagatgagatctgaagtctttatgttatcaagcgccaaacttcagttgagaaagcacaattaaaaaacagatgatttctggtctcatgggctaaccccagaaaggagacattctaactaaacatcataactccaagaagataaacgattaagggtaggattacgattgagtagaaacaaccaataggttataggatgtacaagaggagcccaaaaaacatctagttttaaaatgctaacagcattccaaaccgctttagatcgagaaagacttgtaaggaataccatcatcagcctaaactgaagtatcatttgatgaaaacctgataatggtagaaatgaaagagaatagaagaacttgtctctctgatctagcattaggcagagac

SEQ ID NO: 43913 - DNA, 361 bp, Arabidopsis thaliana landsberg
catgcaaatcgagatcatggtggaagtagcctacgcactccccaaggaacaactcatcatcttggtcagggtaccgtccggcacgaccgcggaagacgccatcaagctatcggggatcctgcagaaattcccggagatcgacctggccatcaacaaattcggtgtcttcggcaagctgaccaagccggatacggtgctgcgcgaactggaccgcgtggagatctatcggccgctgatcgcggacccgaaggaggtccgtcgccagcgcgccgcagaaggcaaggtcatgaaaaagggctggtggtgaaaccgccccggaagcctgaccttgcgatcgacctttatttgcagatgcgctcga

SEQ ID NO: 43914 - DNA, 1047 bp, Arabidopsis thaliana landsberg
cctcttatacttgaaaaatgatttgcaatgagtctaatcacatcaagtttaacaatgataacttcttattttttctttagattgtgggttgaaaattcactcaagaaaaaattatttgagttctataaagaatgatgaacttagttttattttattttgatgaacttattcttagtgaaaggtattcaatatttgtgtgtgtgtgttaaaaggtatccagtcatactagtaaaatattgaatacgaacaacaaatcatcagagcttcatctcatgaatttgagttagtacacactttatctcctcccttgggaagataatgaattttatacttttaaaaaaatatctgtcatttggatagaagaaaattccaaatataagattcaaatgaaacaaaaaataggtatgtcttgtcattagaaccagacccaccaacttgataaattgttgtgttttttattttccatcaaaattcgttttaccctttttgtttctttctttcaacattttgacgtggaaaatgagattcctatttctttttagttttaatttgtatggctttaagaataaatagatattccttgcttgtttgaaatatctttcttcgccataaaaataaaatttaatctacgttttagatctgttttcttggattgctaacattaaataatacagcttttttgtttgtgaattgatagaatattacaccattaaattcattaaagattttagtggtatgacattcataaggttgtgataaatccacttgtggatgaagtgtttattgaggatgagatttaggacccaaaaaattcaagagaatctgagagtgatagaaaaaattggatatatatgcacatgatgttatagaccttatggtgtaaacacataatagccatatcttgtttctcaaaattgtgtttggcgtaaaatagatcgacattaagttgcagactagcgataatgaaaattacgaaattatgactataccatcaatttttttgtttgtttgaaaaacacgttaattattcggtaagggtttctagtt

SEQ ID NO: 43915 - DNA, 590 bp, Arabidopsis thaliana landsberg
  unsure (1)..(590): unsure at all n locations
ctcgccaacgcacagcacagacccgcgcagcagccagatccgccggcatcacctgcacgaggatcgcatcggccgcgccatcaagcgcgcactcaaagccgcccgcatcgacaaacgcgccacggcccacacccnnnnnnnnnnnnnnnnnnnnnnnnnnnnnnnnnnnnnnnnnnnnnnnnnnnnnnnnnnnnnnnnnnnnnnnnnnnnnnnnnnnnnnnnnnnnnnnnnnnnnnnnnnnnnnnnnnnnnnnnnnnnnnnnnnnnnnnnnnnnnnnnnnnnnnaggtgtcggcatgatcgagcccaccgtcgaatgggtgctggccaagaagctcgccgagctcaccggcctcacgaccaaggccatcgaccgcaagcgcgagcgcggaatctggcgcgagggcgtgcattaccgcatgattgacggccggaactattactccatcacggcatacaacgcatgggtcgcaggtcagattaccncggcgtcgaccgcaacgggcagaacctacgtatcacgttcgcgttcggcgacaacccgcgctgccgcgagcagctaggactgccggacacgccggcgaaccgcgcg

SEQ ID NO: 43916 - DNA, 918 bp, Arabidopsis thaliana landsberg
gattatggtaagtgactaaatggactaaatatgggaaacggagcaaccgacgatattaatttgaagcgtttgttttccactcgtttaattaaaccttatctcaaacttaacggaaattaaaaaggacgatcatttcttgtttttgttacctcccaaaaatagataataaatacaaatctgagttttggtcatatgctacgaacaaccaaaaatgcatgaaaatgtttacataattattaaattcattcagccgatggtcctaacttcttacaattgcattcatatagttttagagacaagccagcgaacaaaagtttgtacactacagtctgtaaatagcaattccacggaccaaaagtaaagagaaaaaaaaaactatatgacttttcaattttaattaaaatttacgaaaaaaattgagaacccaaaactgatataacgacttattttcattataaaaatcagatattgtttttcctatatagcgacttattttcaattataaaagcagacattatttctcgttttaaagaacgagacgtgaagagtaaagtctaaacgaatatgattattgaggtcattttcttaattaaaatatgatcaaatagcttccactttacataataatcataaatatttgcattaggtatatcatctaatatgtctactgtctacctacacattttatccacttttttaattagattaacaacttgtgatttaattgaaataatgatgctcaccacccgaattaaatccaggaaatattttataattaaaacataaattgtttcaatcagttcttgattgttttgtctccaaaaatttgtgaatataattcaccttttagaattaatattgatagagaggcaaaaaaataaagtcaccatccaactattgtcgaaatcaaacacagca

SEQ ID NO: 43917 - DNA, 609 bp, Arabidopsis thaliana landsberg
gctcattccttgcagcaagatctatccaacgataccaaattctcgatttgactccttcagatctgacgggaactgtttaccaaaaccgctactcgcaatcgtcctcttcttattatttttcaccaaagattcagatttaagccgcatattcaaaagaccagtacagagatttgcaggaggagaagacataatcatgctagcttttccttacctaatcaaaccagtgatgaacgatggtgagcggtagctttggtggacgtgacctccgaaactctctttcactcttggtgatctcttcctatctctcaccaacatacgatcaccactacagaatcagtgacaacaatgcctcacggacttaaaaacgatgatggccggtgactttagtttcgggcttaagatggagacgtaaatggtggctgtgagaaaggcgaagataaaaacacatgggcttttctttttaggaaatcaaatagggtggccctagaagttgggtttggggtgtgacaaacttctttcaacaatgaaatgtggagaatgcgtttattggagtggaaaccagatcatccgacaccaattcagatcaactaatacaaaattctttcacat

SEQ ID NO: 43918 - DNA, 1815 bp, Arabidopsis thaliana landsberg
cctctctattctttgatgaacttcagtcaggataattaatttactaaaactcttccaaaatgtcacattccttcttcaatttattcctaatctctcttttcctctacaacaattgcattgcgcatcactatacattcacggtaagtttaaattagttaatcaattgggcgtgagtaaacaaactttgattgatgaaaactaattaaatcgttaattaatggcaggttagggaagttccatatacgaaactgtgtagcacgaaggcgattttaaccgttaatagtcagtttcctggaccgattataaaggttcacaaaggagacactatttatgttaacgttcaaaaccgagctagtgaaaacatcacaatgcattggtagtctaaagaccatttgtattataccacttacaagcatataataaattaagacgatgatgattgaataagtgtatatgtatatttaaacacacaggcatggtgtagagcagccgagaaatccgtggtcagatggtcctgaatacatcacacaatgcccgattcgacccgggtcagattttttgtacaaagtcatattttccattgaagacacgactgtttggtggcacgcgcatagctcttggacacgtgcaactgtacacggtcttattttcgtatatcctcgccccccgcaaatcctcccttttccaaaggcagaccatgaagtccccataattttgggtaaatggacaaaatattttcattttcagatttctattgtatattgttacacaaatatgcgttttttcttcttcttcttaaaatttttttgatgcgattcatcaggtgagtggtggaagagggatgtgagagaggtcgttgaggagttcgtaaggacaggaggggctcctaatgtgtccgatgctttgaccatcaatggacatcctggtttcttgtatccttgctctaaatcaggttttgttattattttcatttttttttttatcatttctccttgattagtatgtttttgatccgtaaatttatcacaatttgtgggataaaaactttatacaagtgtaactgtgaattaaaatcattatatgtgaagtgatagactaggaaaacagagtaaaatgattagaatgagcatttgttaaaatcttttttgaacacaaaaaaaacaaaagtaaaagcatcttcatttgttgaaatcttcttttaaagtgtttttttttggtttttaaattgtttaaatttttttgggattttataagataattttttgtatttcattctattggttgttagttgtgattactcattaggaacttatgtgtgtgtttgtatttattatataaaactttttttgtttatatttttgaaagtattacattatctttttgtattatgcatgcgtatacgtttaaaacttacctagtaattttgttattttacatgaacagatacatttcatctcacggtagagaagggcaaaacctaccgcattcggatggtagatgccgcaatgaacctacctctctttttcgcaatcgcgaaccacagcctcaccgtggtctcggccgatggacactacatcaaacctataaaggctacttatatcactatatcccctggcgaaacactagacatgttattacacgctgaccaagaccccgaacgcacttattacatggctgccagagcttaccaaagcggaaatatcgatttcaacaactccactaccataggaatcttaagttacacctcttcacgcaaggctaaaacatcatcgttttcaggatactacccaacccttcctttttacaatgacacct

SEQ ID NO: 43919 - DNA, 895 bp, Arabidopsis thaliana landsberg
  unsure (1)..(895): unsure at all n locations
atctacaatatgaatatgagaaacagaaatagacatatataaatgacaaaataaaatgtaaaacactactagtataaatttacaacatcaagatatctatttttaaaaaagatctatgtacgtagatcggatggcaatgtgaagggaaacaaaggattcgcatgcaagtgggtacaaaagagacagttatttcagttagaagtgccgccaaataacaaaaaaaaaaagaaaaaaaagaaagagagattgcaacagttttgggttaacccaagattcgatctcccatgcaaccaatagaaatctgacaagtgcacatatattccagaccgaccactctcggagaagcatgggataatataattgatgaagaaacacggtttacatttagggcggcaatttttgattaattattccggttaagtaccagaatctacacgtgatcatgttatttgttagcattttaattatctatcaatataaaaaaaacacttcgaacaatattatatatgcgtcggacagaaattgatgaattgtaaatattaattaaattttgaatttttttaacattatatgttattttgggatggggaccttccctttattcacttttgcatctncctttttcattacctctttatatataaccttgctctccaagccctcaacgaacacaaaacatatacctattctataatctcttcttcttcctctcgagtctcgattctctctctttctttctttgaaactgattcaaacaaaataacttcaagaacaacttgagattatatatatggctcctgtctcgttacctacaggtttccgattccatccaacagacgaggaactaattacttactatctaaaaagaatgatcaacggtctagaattcgaactt

SEQ ID NO: 43920 - DNA, 546 bp, Arabidopsis thaliana landsberg
tctccaataacgtgagctaatatgttttaaggcttcgatgaaaatgtacggttcatctgcagataaaatctggtatggtttaaataataataaaaaaaatatatatatatatacaaaaaaattgttattacttaaaacgcaccgtaatgtgcggttgaatcactattcaaaacctaagtatacattattacgattatcgtaatttaccgctattaaaaaaactttctctatgattttgtcataatcataatattacatggaccaagggcacatcattacttattttgttttattttcgtgtcatgaagaaggctcatcattacctttaatcatatgctatttattctcacgaacaaactttgaaaacctagtttctattagtaccacttttattggactctcaaatgattgggtagctaacttgttttcaaaaatggggtttgatgttttatttgatgtcttttttaacatgattttaggccaaaacctcaatttgtctatgtaataacttcaagataacaaactaaaacgaagtgattttttttt

SEQ ID NO: 43921 - DNA, 483 bp, Arabidopsis thaliana landsberg
ctatagtctgtttttcttcttcgtcaacaacatgcattatgccggatttaatttcgaatagtgactcagtgatgcatcaatcactaggactaaccattaagttacataacaacaaattcagattttcatggatatggaggatggttcaagatttacggctgagaaactgcggaagaatctagaggagaatggcattctccttatccggggaaactcatcccggtatgtgtagcatttacgtttacatgtgaaaaatgtttagttttactaaaaggaacacaaattttgattaatttttcaaaactatttatatgtggtatgtgttttcaagatcagaatagttatacatcaccagataacaacaagtgatgtgcattacacattgtcttgctttcaggtaaaaagaatattcatatttatctactacacaccttgttacggtgaaacatctaattatatgaaattgatgttttctttggcagc

SEQ ID NO: 43922 - DNA, 716 bp, Arabidopsis thaliana landsberg
tttggaatttacacactttttgattattaaataattgtttatataacctttttgtaaatgtatgtatatttttattaatgttgattttgttttacgatttctatggcttccattaatgtttttttttgttttaaatagtactggtctagcttccattaattttatcctcttatttccctatataaacacaaacttcacctgccctctcacatcatcacttcagagcaaaagcatcatatatatcattcctcttcttcttgattaggatcatgatgatcatcatcataatcatcatgatatttatgatcataatgatgatcgtttctctctttcaactttttctatcttctccactacatcatggttgtactttcgaacgtgtgactatctcacggagaagaagatttcttggacattagtgttccattggcattatcctcgctgagctttttttttcctctatgaaaacagaaaaaaacaaaaaatagttttgtttctactaaatcagaaaattcttctataatttagaagatttttcttgaccttgcaaggcttattagttttgtattgttcttttattttcttttatcttctcttcatttttgtattttattttgtattggtttgttgtttctattcctcctgagctttatgtataattcactattaatcccataatttctcagttattagtttctctgaaacgtctatctaaa

SEQ ID NO: 43923 - DNA, 484 bp, Arabidopsis thaliana landsberg
gtcctgttttctatacggactgttctataaagttgaatgaagagtagtgttgagattgattgtgttttatcttttgcaggtttgtttgttagatgtgaaagtagagctcaaagacaagcttcatgttgttttgttcaatgaagaactaggaacaagagattctctgtaagttactcctgtttctttttgtcctgctttaaacttgtgaaatgtctgaatagaattactgttttaaaagccccacaaaaatccatctttattcaaaatctcacttttaccaaaaccttttaaaatattttcagtgtcttgattttcaaaatgaatttatcaaatccttttacttccaattcatctgtgagttttcatgaccttgggcttttaaggaattatgttaacagtataccaattgagatatgtgagaattatcctcttggaaaatacgaattgagatgctctttgctcaagtatttttaggccgttgctt

SEQ ID NO: 43924 - DNA, 1118 bp, Arabidopsis thaliana landsberg
ccccattacggtattaatagccaaaaaaaaaatttagttttacgtaataaaattttaaacctaacttttttagaatggacaatgtaatccatttatgttagtttcagtagctaataacactcggttggtgttggtgttgttgttacattccattgtaaaaagtaaactgtaataggaatttaatctagtttcttaacaaaaaaataaaaataatctaggtacatgattattattagtagtactgaaacttctagaagaatagaggcttaagaaatgttttttactgcaagcaaagagaaaaggtagatgcatgaacatcccaatgctttttagatgttataggtaagttgacggggaccggaggctgatgtactttcctgttgtacattgttttgttggagtcccaatgaggtcctttgtctacatttctcctccttgagaaaatcacaaacttacattaaacaaaataaaattttaaaagacttcttttttaactaacagaaaataattggctattatctatcattttcttcaaccaaaataattgaattatgtagtaaaatagaagaaattctcatattagatagcaggaacaattgataaactaaaccaacagaaaaaaggaaaaaaaaaagggaataaagtcaataaacagtataggtaaattatgtttaatttgataattttgaataatattttaactagcaaatttcacttcctgcaaaaacattatttatcacactaaaaacacaaagttgatagcctaatggtttatacgaactctttaaaaacggcaaacgtatttcagtaacacaatattaaatacaagatgtaatattaatgaaaataaatagagcatttgccgaatttaatgaaatagtaaagcaagttgggtggtgccagcaaaataaaaaatcgagaaattttcattattcgtagattttgaatatggaggatgcattgcacctaacagcagtggttttatatgctttcccgtggatttggcctttctttggtatttattatttgaccatttggtttatattcaacatttttctattttaagtagtttcattttttatttggtctgcttcttctcaacttggtaggcctttaca

SEQ ID NO: 43925 - DNA, 695 bp, Arabidopsis thaliana landsberg
ccattttgtcaccattcaaaaatataatatgtggacaaaactataagttatgtcttaggttgttcatttaaattgctcgtacaatagcttactaaatttggccataggagagacaaaaaccacgtgaattcggatatttcgaggtcaaattcttaggttttgttggccactatatattacgctacgcagggccaaaattatcaacatacgtggagcataaccggtccggatagatctcaaaacttaccccacttctgataagattctagaccggacaatctataaaggattgcactcgatacggaggatctgatcctactaagggttgttcccattaggcgagacgttaggaccggctttatatccaagtagtccagttagggttggacaggggaccggttaggaccgtctagtatataaattgaaatagacatatgcatctagaatatgacctcaatacggaaaaggaaaaaagatctcacaatattgaagtttatcaatatccagatttctaaaatatttaagacattacatatttttttaatatcaactttgatattcaaagcacaggaagcttaagattcagtaacatctctaacaaatgaacattaaattgagaaatatcgaggtccaaaacctgtttttacaaggatcaaaccgggccagacttctagaattggtcgtaactgacaatg

SEQ ID NO: 43926 - DNA, 220 bp, Arabidopsis thaliana landsberg
aaaataaaggtccaactctagtatcatcaagcccaacagaatcgagaaaatgggtttgttgtttttttgcagacaaaattggtatatgttcggtttacgttatttacgagagaaaattgaatcgaaccgaacccaataattaataggtcaaactttgagaactggtggtgcatgtggagatgtgtggccactagtgcagcaaagtacagactgttagatg

SEQ ID NO: 43927 - DNA, 255 bp, Arabidopsis thaliana landsberg
  unsure (1)..(255): unsure at all n locations
gatctatattcttcccatgtcttgaataatccaaatttctacatacaccaacaaaaaaataactttatttgttttgaactttgaagtgaataattgtgttaaaaaataattgcatgaaaaaaatggaacgtgcgcatacctgtctacgtaaggtaaacaagacatgaccggacaaatccatgagataaacttcacgacagctcttagaattatannnnnnnnnnnnnnnnnnnnnnnnnnnnnnnnnnnnnnnna

SEQ ID NO: 43928 - DNA, 836 bp, Arabidopsis thaliana landsberg
catcacaagcgtctcgtgtagcagaatgctgtaaacatttagcccctgcaaagtgttacgtaaacaaagttcaagattcgctaaccaattagtcgagaaaccacaatgtttgatatgtgattatgtaacttactattgatggaattatgttgacatagtgtagattttgggtggctagcttcagcttttcatcaataggaccaccttctacaacaaggactttctttgtgttctccatttggttgtaatagttcacaatgttctttgttttatgcgtaggcaatcccaaatcatcaaacacgaggagctgcataaatttcccaatcagcaggtacaactaaagtcagtttaataacaagccacggttatcaagagtacattttatgattaagaagagaaagaagctgacttttccttctgcggctcgagctgtcaatgctattttcagtccaagccgtcgaacctgcttattcatctttatggcatggcttctcggtttgggtccatgcattacacaaccacctcgaaactaatggttcaataaaattcaatcagagagctatatttgatggcatgaaaaccttaaaattcaaaaacagatttacctgcggacctcgcagtgtaccatgtctagctcgacctgtacccttctgattccatggctttctaccagttccactaacctcacttaacgttttggtcgaatgagttccctaaatatcaacaacatgtgtcacacttattgattgtttgcttatatgactaaattaaggcgttgtgagataactaattaattacctgctggcgttttcgcaagctgccatcgcacgacattg

SEQ ID NO: 43929 - DNA, 848 bp, Arabidopsis thaliana landsberg
aggtaagaaaaaaacaatcgagtcatgtgaagcaaaagatctttaatttttctgctctagattttgcttgctaatactttttttcctcggtactatacacgaaattttaaatttgggtttcagtttttagctgtgaaatgtagaagtttttactacattagaagagagactttcatatgaattatccaaaagtataagttttgtatccaggtaaagatagatattttttctttaattttgcaactttctcttaatgtttatatcttagattaacttaaataaaaagatgataattttttttttggccttaagaaattatttaggtatatcttagattctaaagtcaataataatagtgttaagatttggtaataaattacaagatgacagtttattttgcaaagttaataagaaggagtgttaatacaataaaatatcaattaagaaaaaaaatagttaaaaaatatattaaaacagatataattatttacagttcaataaacatgttaaatagcttacatcaattttgtgtttactattgtctaatcttatctcaaacactcgttggtgacataattgaaggtacaaatttgtaccctgctattaaaaactaaaaatcaaagtcaacaacacaataacaataatagtgaaaataattgctacatgatctgctctcttattcgccttttactatgtaaaaaaagtatttacactcgattgagtattattgatatatgagataaaaatgtcaaagacgattagggttttgtgttcaattcaattctttggttaaaatttttttttattttttttggaaaataatttggccgtttttttttggctttaat

SEQ ID NO: 43930 - DNA, 417 bp, Arabidopsis thaliana landsberg
  unsure (1)..(417): unsure at all n locations
gaataacgggctaagaacgaacattatctttaaaatatagtttgttgacagacaagagctaaaagggggaggggaaacattgataaatcctcaagaaaaagataagagcatggaagcatgttttgtataacagtagaaatttatcaatacacatatcaacttttcggggatgctttgggcggtccagcaggtggagcagcactctgtgaagctggtgtaccaccaccaccaccagcagtggctccagcagacccgnnnnnnnnnnnnnnnnnnnnnnnnnnnnnnnnnnngtatcctccataagacccatatccctgtggcgcttgaccatacccatacgctggaggttgtccataccctgaagctgctggttgggcatacccagactgactaccatagctcccaggagcacctgga

SEQ ID NO: 43931 - DNA, 647 bp, Arabidopsis thaliana landsberg
ccattccccttctgcatttcaccaaaacaagatatatcaaagccaccagagaacctcccctttgcacctgtagttaaataaaaaggaacacaaaagccattaccagatcatctccaaagttttcataaaaaatgttgtgtttttagcgaggaagagaatgatctccagaaataccagtaataacaatagctttaacatcattcctgctcaaggcctcctcgtaattacttttgagattgtatagcactgtacacaaatatccaaaaacagagtcacatacaaagaaaattcacataaacagatcataaattcgatcggaagctcaattacaatcggcgatatttacaaaaccaaatcacgaagcgaaattgacctaaatctgaagaggtaaaatccagtaaattccggatcataagaataaaatgaatctgagagtacgtaccgtcgaaggatagagaattgacgggaggattgatgagtgttatgacggcaacgccatcgccaccaacttccatcaccgtcttccccttggttcgtgaatccattttcgagcttcgttgagattttgcgagtcaaaattttcggaattaatgaaaaagagaggagacgtgagaaatcagatgattatataattgcaaaagatgatg

SEQ ID NO: 43932 - DNA, 1302 bp, Arabidopsis thaliana landsberg
ctttttttttgcatcataggcccttctctattataaattattactcttctgtatttgtaaatatctaattttatctattcgtatgatcttgactatctaaaaacgccaattacgtacagaatactgtgtatatgacaaaccctaatgaaatgaatgctccagagagtttataaaatgttgaaagaattaagaaggaaaaaaacaaattaatgaagtggaggagtactcttctataatgtccaattaggtacgattttacaagtcttggagatatgattcaaaattgaattttaaaagacgaaaaacgtggaaaaactaacaagaaaagacagagggaagtgatgtgtgttcccatcatgaaggcatcttcgtggtacaatcgtccttacccaaatatttcagtctgccacttaattccttcggacatttccatccaatctcacctaaccatattaactaactgtctcaaatttcttctctaattttccttcacctaaatacagtttaattgacgtaactttaatttaacgtgattgcgtcatattaaaatagccactaatattgggttttattataattttgatctcacacttgcgggaaatgcgacttacaaatagtaagttgataatacaataaatgttttgaattaggtaaacgcaaactcaaatatgtgtacgtagtgaattaacagttaaggtctttgtcggaagtccataatccaggattcggtttcatattttaccatagcgattgatagaaaaacgtggttatttatacaaaacgaaaacaaaatgcaggagaaagaaaagggtgtgaaactgtgagattacagagaaatcccaaagaacaaaatgtaaaaaaaatgaaaggaagaaagattctttttttaggaagtggcaacacataaagattcccaatttagaaatcctctgttttctcgatctccttcaatacatcttcttgatctttgaactttctcaacaccctttactttgatttcttcttctttttcttgttcttcttccttgtattctggaatctcttcttcgttatctatcaccgtctcgattgtttcttcctcttcttcttcttcttcttctgcgtctttggtctctgtctctatgtggtcatcagaatcaatcaagatagcgagtctgacccagccattgcttcggtcctgaaggcaacgattacgcggaggaggtctcgtggccatcattaccaatcttgcgttttcacggtgcgacttgacttcaatgcaatcaaaacctctcatacttgtcaaaggaggtggaagtgaag

SEQ ID NO: 43933 - DNA, 409 bp, Arabidopsis thaliana landsberg
  unsure (1)..(409): unsure at all n locations
atctacactattacaagctactatgctataattttcataattttttcgatgacatcacaactatacattattatgatacaagttttgggtaatacccatcgatgtatggtttacatttacagtggctatgtaaacgtatttaattaaagttgatttctcatgttggctaaaataagaaattagcatactatattcctatattaatgatagtaaaattgctacttattacaatatcgacattnnnnnnnnnnnnnnnnnnnnnnnnnnnnnncaacgttgtcaacactcaacatttagcttcaaatttttttaactactgttttgaaaactcggaatcaattagacaattaataccttattcactctatcaagactagacctacaaaatttttacaagatatatttagtt

SEQ ID NO: 43934 - DNA, 648 bp, Arabidopsis thaliana landsberg
ggtcaagagatgaacacatcattacttatgctagttgcaaaaaaaatggaatccttttacaagctaatgagagtaagacagacactgaactatgccgaggcaagaaactatgtgtcattaaaaaggccatggattgccgagacggtggttacacaggtacggcatttataaataaaagctctggaaatccgaaatcttggattacagtagcagagcaacgaatcgaaaaggtgaagatcgaagcagcgagaccttcatggccaaccatataaggttctcgttaatctgaatcagacaatcaaaatgcagcaactccaagaccattttttaattcttcatccaagttcatcttgttgcacaagtaaggatacgacaaatcaactactttgcttgcaaaacgagacttgttttgatgggcccaataataacatcacctatctttgatttattttacatgacaaaaaatccgacgaaatcctcatggatacttgaatgcatgtaatggcatcattagtgtttcgtgtgtacaaatgcttcttgctcttaagcgtatatgtacatgatgataagtgagtctaagtgttgcaactacaaaacaaagaggtatagatgaaactggcagctgcacaagtaagcaaagctgaacgg

SEQ ID NO: 43935 - DNA, 602 bp, Arabidopsis thaliana landsberg
agtatatgcaatgcaaccgtattacattcagaggaaaaactataaaaagaattttaaaatctcattttctataccatattgatacgccttaatattggtacgtaaactttcaatcagtttcttattcctatgtatatctatacattataataactaaaaactatatgttatacagttttcttaaaaaaactgcgtataacataaggctgcagccgacattatccgtgtttatccgtgtctatataagactcatcatactttttcatttccaaacatatttcaaaactcacacacaaaacaatccataccaacgcagaaaaagaagttcaaaaggtattctatagctgacatgacaaagagcaaagacggttcgctactaaaccggctgagacaagcagtgaataaagtaaaattcgtgttaagtttcaagataaatagcctctggggtctcgtaccgatgcttggttcttcctcttcttcttcgtctcttcggttaagtttcaacgatagacctggtttaacagcggcttttacagacaatgaaccggactcaaccggttttcaaggggagcgttggatagaaccgtgagttatgatcaatc

SEQ ID NO: 43936 - DNA, 1903 bp, Arabidopsis thaliana landsberg
  unsure (1)..(1903): unsure at all n locations
tgatcctaaacaactttcaaaaacaccatcttacaaaccttaacgtggattctttttcacagaaatactatttgaaactgcatctacacagactcaaaagccagtgtgcaatcaatcagacgagatgataacagatagcatcaaaaggtaagagattcaaaattatctgccaaatctatatactgagtaacagtgatgagatctataaacgaaacacagtcacctgaagacacactttgaaacacctggagctcctcaagtggaatctcttaacaagctcgctgttggaatggacagaaacgctgcagctaaactcttcttccaatcctgtggtactaacttctacttcaacttaatttcactttctttgagcataaaaaaacctgactatgattattgtttatatgtccagtgttagctactcgcggagtcatcaaggtaaaccaagcagagccttatggggacattctcattgcaagaggacccaacatgtaaggtttgatttctaaattataaaagattctggtgaaccgattatccatagttgttttgcttttcatattctagcagagagagttcgtagacttttttaagttataaagagcaagcgttctttacccaaattcctctgtttggtccttttgttatatggttattagtacctcatacatcatcacatcctagctttgtccgaaaacatctgaaactaatttttacattattctataatttaagtattttactcgcatatattgagtcttcttagaagatgtattgaacagagcataaacaaaacaatagtttaatatatactccgttgacaaagaaaatggtggcagtcacgtaataagccgcaactgcccccatttcatacaatacatgtataatcttcataattagtcgctcacacgtttcatacaatttgtcaaatttctcagaaaattaaactaattacacaatcaaataccagcctctatatgtttctatatatacgcatatttcttacccctgaatcacacatcaaggagaagaagaagtttaagaagcagagtgcataacaagtaacatggactcaagagccttacccttctccggtctcgtcatcctcaatgctacggccgttttggccaacggttacaattcttcttcttcttcttcaaccaccggataccctgtcgtgaaacccgtggaagcggcagtggaaggaatggtgtactgtcaatcctgcgacaaattcggatcatggtcattggctggagcnnnnnnnnnnnnnnnnnnnaaaatcagcattatctgcaagaatcataggcaacaagtgagtttctacaaagtctttcgaactgattcctacggccatttctatggtgagctcaaaggtttcaagatgactccacatttcttggaccatcctcttcattcttgccgagccaagctcgtctcttctcctcgtgaagactgcaatctcttctccaacattaacaatgctctagatggagctccactccgatatgaagagaagaggctcaagtggactaactatgaggccgtgatttacgccgctggtccattggctttccgtcctgaccactgccctgcgactgcaccacccacttactgatttgggttttgaagatcatcatatactaattacataagacaatgttattgatttttctctattttgtatctttttggttttatggtttgtcaattgtttgtaagatgctgagtaatattgtaatggcctaatgggactcttgtgactcaattttgctcagtttaaatcggttaaatcattggtcacagaaacattataaccagaataattctaaatctcaaaccttacgacacaaatatgtcttcaagttacaacaagaacaaagatttctcataatttaacaca

SEQ ID NO: 43937 - DNA, 800 bp, Arabidopsis thaliana landsberg
cccatgcaccacccactcctgcacaaccttgttaggtcatggatcctaaagctcagaaaaaggaaataattgaatataaaataattaaaagaaaatttcaaaaatacagaagttatgggaacagtgatccccactacataatgtgtctgagacttgctagcattgtcttaaattccctaaagcactggcaaaaaataaaggtgcataaagatcctcacacacatatacatatacctagtaatctatatatctacacatatgtgtataaaaaataactatatataattttttgtaaatttttaatggacaagagtgatagaaaatcataaatggagatgccaccaaaaaaggtggcatatattgagattgatggattcttggtatccaccaccagttatatatttaggtttattatattttttgaatggcttactagtttataggccaaatttgcgatgtttccacgaaaaaggctagtaaaacaaaataactttaactgaaaaaattactactagaataaaaccacttaactttagataaagttgttttcaatgaaatttgcttttcaaccaatttcgactgcttctaccattttcacattttattaaatagtactggtaagataatcaacaattaaacttgttcatttttaataaatgtcaaatatgaaaatttagattattatgtatcgtaaccattgttaagcattgtgaatgaagcgatctaaataaataaaatatgctccttgtgtagatgagtagaattttcaatctgtacgaagagtataacaatgacaaaca

SEQ ID NO: 43938 - DNA, 752 bp, Arabidopsis thaliana landsberg
tacgtatttacgatttttttttaaaacacgtattttataccaaatactaaaccaaaaaaaaaaaccgactaattttatcataatgggtaaaacacaagttaaatcacttttttatacctgaaaaatgataaaattttaaaaactatttaaagatggcaaaatctataaatgccataagaagaatagcaaaattcgtaattaattcgaaaaacaatcgaaaccttacaaatcatcgtaattaaacacatgttagagtcatttttgtattaaaagaaaccctcatatatcaaaacaaccgaattggatacaagattacatgataaatgatcgagaattggcgagtatgtataagatatgtcaaagttcttgctggacattcgggttcgatggcaatttgaacactttcgataagtaactaatagaattggccaaagaggtcttataaggctggttgactaagaaggtcccatgcatttctttcacactaaaatagataagggtcggctcttttgtaggtccaatataatatgcgttactttcaatttcaaattttagttaaaaaacatttcaaattgttcttcttcatattttacattaaattttaaaaccttttgaatgcgaataaatctaatgcttatgtgacacaatgtcaaccctagctagtcccgacctttctcaacttgtctctatcaccattcatgtctctcaaaggtccattcatcctagtcgctaataattgaatattgattact

SEQ ID NO: 43939 - DNA, 2627 bp, Arabidopsis thaliana landsberg
  unsure (1)..(2627): unsure at all n locations
cacagccgccgttacagtcgacctctttgccctaccacgtttcttcacatccgccgccacagacgtagaaggaacagcctgagctacgtttcttttcggacgaccacttggtttagtactcgccttcgcagaaacggcaccgatttgggaagagtcagatttagcctttngagtcgaccacgaccgcgtttctgagaagcagtatcagtagctgagacgccggtggcatccgtttgaggtttgttgccagacgcatctccaggtgtaccggatcttggaacttcggaaccagacgcgggaggagtaagagctgttttcgccatgagatctgtagatgcgaatcagaaaaaaaaaaaaaaaagagaaagcaaaatgtgagaaaacggcggttaatcggaatcaaaaccctagcaaaaacggacatcaacggagactagacttaaactaaacaaccagaaactcgatttcgctaaaaccttaacgaaatttcaaatgtcacaaacctagaatctagaaacgaagactgtaaaacacagattcaggctctcacgcgtagagatttcgttttgagaaaaactagggttcgcaaatcgcaatgtacgtaccttgttcaacttaatagaaggattcgcgagatggtaaaggaagcttgaagaatctggaggaagaagaaagaaattacaaagagaaacttggcggagaagaaagataagagagatagagatggttttcgcggttagaagaagaaggtcaccaccatgggctagagcttggaaagagtagaaacgaacgaccgagaggttcagaatccgttgcgtcaaccgatatgggtccacctttactccttgtttttatttttatttatcaacatttcatttttctttttaattcacagatttttaaaataaatcacgaatattaattttttggtattatagtataacatgcaaatgtggtggtgatttctttttaactttttcaaaaaaaaaaagttgatttataaaaccaaaatcgaaaaatacactactttatttcaaattcaaaatttttttggagaaaagtattgaaaacttgttaaaaaagtgtttatcgagtaataaatttagaaatttggttaaatggtgtgtgagtgaagagtaaaaccgttctataccttctacctaatttctgcaataagtacacttaaaattaaaaccggatttcaaattaaaacagagcaactgacataagcaacttttatttaatggttttctaactacataacgtaagagacttgaagaaaccatcataaaaagtagaagtggtcataaaaattacataagcgtttttgataaacatcaacaacaactcctaaaaagcctaaggagacaaaatagaataagagacacaacagtctaaaaaaaacacgagggaacaaagaacaaagctgcctacacagatatggacgatggagagagatgggaagcatcaacaatggtaacatcctaattcactttacagacattaccctacctctccttgttgtttggttagagacacaatcatcatcatcagttcatcacattgttctttttttgtttttctcctgcaaacacccttataagattaaaaatttcatgtaacacacaacaagtaaacccaccacttgctagctttttatgtcaaggctttatcttcagaacagagcttcttgcattgcctctgcttctgtctgggtctgtgtttctccttctctttcttgtccttcttcttgtcctccttgtgtctcagcagcttcagtttgttgagcttcagtctgtggtgctgcagtctcctctggctgcacttcttccatagcttgtggctcaacggtctccgtcactgttagtgcttccagatcttttatggcttgcaccactgcttgattctcacttgtaactccatccttcaacaccttcacaatttctttcactttctcttgctgaaatcatttacatacaaaaaccaaacataagcaagtagaatcgaatactttaatcaaataaaggacagccaaactgtttattgtcaacaagtagacttacaaaaatatcaaacttcttcttgagttctccagaatcttgtgtcccagtcgtgactgatgttccaatctaggttcatgaaccaaaaaataaaattgttagataaaagtataacatattcaagaaagacattaatggttaaattaagaagtcttactttagatccaattgaacacgttactagtaaaaaagaagatacagagaagaagacactatgtgatgacttagaaaccattaagccggattaacacactaattgatgataaaattattcctagctatagcgatacattaccgactattttggtcttaattatccaaacgaaaatgaaaataaaacagagaaaccagataaggataagccaaaagtaagggacacgaaaatataataaaaacactagatactagtcagattttggatacgcgaaaacagacaacaatgctcaaaagcggaaagtgacattgagtttgaattccacaatgattgcaacacaagtatcaaactttatcaatctaaattgacggcggagcagtgaacaatcatgcacagtaaacgtcagatattgc

SEQ ID NO: 43940 - DNA, 559 bp, Arabidopsis thaliana landsberg
tgaatatttgattaggatgaaagtcgcgtcgtgcatagcttgttctcacttttcaggttgaataattctttttcttcttttgttcttaatttttaatgacctattggaattgaaaacagtgatttaataaagatttgaacagttgtagtatcacgagaacataattaacggacatcgaccggtaatgtgaactccactcttagaaaacttaaataaattaaactcatattaagaaaaaaaaacagcttgaactaaaataacacatacctctgacttcatgcttgaacatgtatatagtaatatatcaataagagacattattttgctaatcctaaacttaaaaaaaaaaatcaaagttaaacagaaataatagacatagaaattagatggataattctaaataaaataccacattttatggtttgttttctaaaactactagtatgatccaaaaactccaaaaatactataaagtttaagcttaagaatgagtataagagaggttcacaaaaaaaaaaaaagattcctacaggaaaaaaaaaatctaaaatagtaatct

SEQ ID NO: 43941 - DNA, 887 bp, Arabidopsis thaliana landsberg
gctatacgagattaagtttcatttgctctgttatgatatgatccttaaaagcaaaatctactttgggacccaaaaatttactcaaatcaagattcaaactttcttattcaagcagtcaccacatggattaataagacgagggaaagtgtggaaaacagaaatcccaataaatttggttactattatataaacaaaactgatgacattcatcaataaatttggattatgacagaaaaattagttaaaaaagcaaacatgttcaaacaaagaaatattctgaatactaaaaaactaattttcagatctattccaccattcaccaaccacatggttgttgtatttatgaactctactatacaatagaggcaaaattccagcaatgagagctatgaaacagaagaattttgagttgttttgtcgataaaatattaactatgaatggggaaagtttaccaatcacagcaagtgttggatacctacaatggctctagatgtcggtagacttgtgtgttttcaaagatattcacaagatcattaggacttttttcgattacaaaatgtgtgcttagattgatgaaattacaaaagaacctcgagtttctagtctacgaatgtcttagacttataaacgaacaaacaaatcgttttctagtctatacatcccttgaacttatctagcgaaagttgtaatgaacaaaatggttatggaggatttcctagaggagttggctaatgcatacaatagtacaacgtgccaaaagggtcacatccgatgtggaacaaaacggaaagaaggaacgtaggtgaaagcgctctgctttgtagctaaagttcatcagaggaacggctttgagaagaaaaaaactgtacagccatgtcctttgcta

SEQ ID NO: 43942 - DNA, 1186 bp, Arabidopsis thaliana landsberg
gctactttatttgttgttgttgtacaatgctactaatacaaaatgaaggttggtataaaaatatctatgaatataagtgaaaaaagtagagaagattcacgagaagcaacctaagtccctgcttttcctgaatcaaacaaaagctgataaaaaaatccaaaaataatgtcttatattatagacattgaccattttttcttatacaatatatggtttgacattgagcatttgagcctcatttcttttatactatgttatctcataattaaaaatccaatgtatctttcatatatataaatgtctaattttcgaactaataaatcatctatgtcggtttctaaataacaaaaaaagaccaaaaatctgaagaaattgttagtgctaaaatgagagtgaaggtgccttgcgtaatttacaagtcaaatccacgtaggacacaacgtgtgaacacgtctatgtgggtcctttgtgttttcacactaaaagctgattggttccgagctttcaatcctttcttttgtttctttttccatgtatttattctactatacccattctttcgtttaaaagaaaaaaaaaaaacaatatcacaatgttgataattcccaaaattcaaatacatatcatttcttgatttttttcttaaacttggatgagtcgtatgtccattaaactttatgctatagggaaatagagttgtactagtatgctactttgcttcattttcactgaatatgcaagaaacttaacgcatagtaaaatttcgaaatttgtcctaggtaatttgatcaaacgaattaagtggacataacaattgtcaacgcgtttatttcatactaataattttattaaatgcaaatgaatttgatttttttgaagtataaaaaaattaagatttacgatatacacatgacgccatcagcgtcattgacttcaccacacaaaaacctcatggccgagaaatgaagacatatataaggccaaagtttatggcgaaactattcaaacccaagaatgtgactatttcaaatcttaacatatgatttaaatctctgttactacttttttttcttccataatatagtcaattcgttttcttaattagggcttattctctttgttattccaacctttaataggtaatttattaatttggctattgtatacaaaggcaaaggcttttaaa

SEQ ID NO: 43943 - DNA, 880 bp, Arabidopsis thaliana landsberg
aagacactcatcctcagaagcttccaggttaatttcaatttttttgatacaagtacaataaactcttgtagtttgatctatatcatctgcatggaacgatagtccaaatataagttaaggagatgaaaatattttgtacagtactttttatataggcaatttagaaatcaccactagctcccgtatattgatagaatacttaagtcatcaattaaaaggagaaagaaatttcttttaaaacatcctacattgaatcgatattttagtgtaacaaaaatgaaaaaacttttcaacgaaatttactacgaaaaaaaaaatgcgatgcattttaattaatcgattatctgcagcttaatttctttttattgaataacctcttaaactcttcttagttattatatatttatgaatatgtaccattgtaccaaactgtgcatgcaagtatagtgatattcggatcttggataatgtttggtgacccaactttgaaaaacaagtttcctcataaataataacttgttcctcttagactaaatttctagaaattcaattcaaaattatatttctttatcttgcaattaaggggtgacaagagatggcttgagcaaacacttcttccacaaaccatcaagagcttacacaaccggaacaagaaaacgacgtaaaataattcaaaccgatcacgactctgagttaaccggatcatcagaaaccaggtggcacaaaacgggcaaaacaagaccggttatgatcaacggtcaacaaagaggatgcaagaagatattagtactctacacaaacttcggcaagaatcgtcgaccggagaaaacacattgggtgatgcatcagtatcatttagggattaatgaggaagagagag

SEQ ID NO: 43944 - DNA, 837 bp, Arabidopsis thaliana landsberg
cgcacgtcgactctagaggatccccttcttttgctaacaacatgcattatacggatttgagtctggatattgatacaatactaacacaatgtcacaaaccaccagtctacatgtcatcgacacatacaaaaaaaaaactacttaaattctgcaatggagactaaaattttgtatttaattggtaacctacataatcgttttgtaattttccatgttttcatcaatttcctaggtttgtttttctgtgattttgcaaaattacattaccattctatgagtttctgttattttctacaatctcatgatgaaaattgagaattaagattaacttactgttcaggttcttcctgtttggttataaactttttcttatctttaggcttcacttctccatctcctccaccttatgcaataaccaaagattaacaaaatttacatctacaaataaataaaagatctaagagagtacctaatttggcgtgaagcttgaactgtgggaatcctaatggtgatggtggacagaggaattgaggtaaagcaagcgatgatgaatatgaagaagatgatgaggttttggaatcattagttctgtggctaatcgaagaagaggaaatgcggagtttcgctgccatttccaacaactaaacgttttgtttttagatatgaatttttttggatatattagttggagatatatgtggcatttgtagtgacatttggcaaacttgtagactaaaaccttatcctcttcttacctctctttgtgttctgaatttttggatttagacactccatttgcagtggaaccattgaactaaacccgaatcaatttaataa

SEQ ID NO: 43945 - DNA, 842 bp, Arabidopsis thaliana landsberg
catttttgaatatatctggacttgtaaacttaccagattttctgatcatgtaaatagtagctttcaatgtcctcgatcacaaaggccatgaagtgtagcattttgagaaatggtcattccaaatctaaatggactttctcattgagttgcttgaaagaaaaataatcaattacaccaccaattgatcgaccaagaaaaatgtttggtggataatagttaccccaatttgtgtttttttgggcaaaaaagtttccccacatttatattttaattttgatgcctaaatttcgttgatcttaattaggctttaccgcactgtcctgacagcagtcagcatgcgactaaaatgtgaccaattgtttgtccgaaaccgaagattactcattccaaactcccagtctaattggaggttgtgtcttgatatctaataacttgtttgataactattataaggtcttttgcttaggttttacggtccataagttaccaatgtatcctatgatcaggacgactactacaggttcaagattttgaagatataggtcatacactagattttcttatttataattgtatagtttagcttagtcacccgggatctctcatcgaatgaatcatcctatttaaataatagtcaagtggaaaccaataatgaaagattatattaagttatgaaaacgtcaataataatcatgattaagataagatcgaaaacaccatttggatgattagatctatctatatagtaaaataaaataaacattatcaacgaggcctggttgtggcatattaaaaacaagacattaatgagagatcagtatcgctataaaaggcgactttaa

SEQ ID NO: 43946 - DNA, 629 bp, Arabidopsis thaliana landsberg
ccttatatttacctaaattccaacaagtcaaaccaaaaccataaatcaaccaaatctttatttgatgttaccatgtaactaaattctaaaataccagtctttattaaagaaacgtataatccttcttcttcctaaaaggggttcattaatcatacaactccttcatgtttaatgcagaaaccactcaacactcattcatattacataacccaaagaaattcatcaacattgtcatagctaaagaaagaacacacattcaacactcctctgaacattccgctaacacccctacttgctttgtgtaccttattaattccaaaaacatgaagaagataatcaagagacaggtagaccatataagcttacagatatcgttgatgtgagttttatattacctagaagagaagagggtgatatattacttagatcccacgaatcatcactcatctgtgacagaaatacaggaacaaaaaaggaataagacattgtcatttggtcagatcatagatatatctactggaataacactttattcacaacacacatttcactgttcgaagatacacagagagggatcacttaaaatatcatgcagattatacattgctagtcgtgatgcagtatggtgg

SEQ ID NO: 43947 - DNA, 272 bp, Arabidopsis thaliana landsberg
  unsure (1)..(272): unsure at all n locations
ttgcatgattcgattttaatgnnnnnnnnnnnnnnnnnnnnnnnnnnnnnnnnnnnnnnnnnaaacaagatggtagacctaggttgccagcgttcacatatgttagactgtctgatgaacttcgacctgaaccagatttctcaacgtttccaattctctagacccgaatgcttgcgaaccaagtctgcgatcaaatcgagccctattcgagatgcgtatgtgatccttgaccatttaacatttgtccgaccaagggtgggcttttcatgatt

SEQ ID NO: 43948 - DNA, 593 bp, Arabidopsis thaliana landsberg
agatattgaacgtaagcgagctagctagggaactaataatcccttacacactagaatagagatgatggctacagtaaattgcaattgattacgctaaaatcatatattatatagagtaagtataagaaattctctaatatggtggggataaatgatattatataaaaccaaaccatgaaaaagtgatagaggagagcaaacagtcaaaaagaatctgttggagaataaaaagactcaatattttaacatgacaacaagagttcttcttgcttctttgtggaatatatccaacaactacaagctatccctatatataactagtaattaatatctaatatgccatcttttcataaaaattatcgtaatcttctttggtaatctttcacctataaactgcaatccctcagttaagtaatccacctccaccagagctcaatgcctagtttgaccagcaaaaacgtaatttttaacatgaattggcattattatatttgttagcagaagttaagtacataacatgcatctgaccatatccaaagaaggttctctataatttttagacgcgatgagaatttatataagttcactattaa

SEQ ID NO: 43949 - DNA, 877 bp, Arabidopsis thaliana landsberg
  unsure (1)..(877): unsure at all n locations
ctctagttcgtatgctctatattttcatgaattttacagaaactatactgttagcaacttagtatatagtttggcaattgtatgttctttttcttaattgataacccaagttttaaaatcttatactaacactctcctctattttattttatcaattcccgggttaaacatttctcgaatcgatgtcaaaaaataaaaataaaacatttctcgaatctttctctcttggtttccctctacatttttgttattataactagagaatattaatgtgctgatcagtacaaaaaaagtaaagaatctatagtaacgaaaacctacgggccataatccatcgacacttccagtgcatcttttcatagtgggaaacaggagtctctatttgaaatattttccatgttcttatatttctatttctgcaggattatcgtttttgtttcctctccatattgaaccgaaagtatttgatttgttcctttcaacaacagactacatgtgtccgaccgaaagtaatatatgatttaaaccgaaataaaaagaaagaaagaaatatatgatctactctctaagataatcaatatattggtgatatgaagtttaaggatttctattaaaaccaaaaagaaagaaagtttaaagatcactttgtggatcagtttctcgcaggtgtccgaattccaatattgttggtcatgagctccttattagtccaattatatatcaaacatccgatttaatttattttaaaagacaatcaagttttgaataatttattaccatgaacattgagtcgaggaaaagataatctagtggaagataagaacgagtggattgcanagttaaatatatacaaaaaatataaccgagttaagaaaaa

SEQ ID NO: 43950 - DNA, 770 bp, Arabidopsis thaliana landsberg
gacagcactcttgttaattgtctcgagtctcttcaataaacgacaaccagtcactgaagatgaaaccgttgatgaaaatgatgatgtagctcctctaattccgggaaaagacgatgataactcaagctggtgctcgtcctacagttctattttgacgagtacagaggaattggaaggtgcacatggtgaaggccacagtagtacaagatatctatgtgcaatttgctatgatgcgcctagagactgtttcttcctctcttgtggacactgcgttgcttgcttccagtgcgggacacggtaagaaaataacatgttcgatcttttcattattttagttgtgtcatttttgaatgggatcttttcatgacacaagaatgaacattaatgatgacttcaaaaattggatgtacaatacacaggatagctgaaacttcgggtttttgtccggtatgccgtaagaagatcaggaaggtcaagaagatcttcaatgtctaacagagagaatgaataacacacaatgcaacgttgcttgctgtttctgtttcctcgcattaccatatccgttgtataaatgtaaaagacaagtgtgggacggagaaaagcaagaaggttctggcgtctgtgttactgctgtctgtatatgaaatgatatggattccggagtttccgcttcgttgtacttgtaaccatatttcattgaacccggttgaaaatttatttttccgattcgataactgtttaacgtctggtttgcagcgtaaatttcttgt

SEQ ID NO: 43951 - DNA, 404 bp, Arabidopsis thaliana landsberg
tttccctttctatttccgcaaattactcctccgatcaccggaatttcgaaatcgggaagaatctaggtcatttatgtatttttcctccttatcgggtatgtacagtatctctggggacttggtcttgcccctgatgaagcagagtgcaatgatgtgtatgggttagacgatgaacttctagagatggttccaaagcctgttcttgctgttctcttcctttacccaatcaccaaaaaggttctcttctgtttgatttttcaatggaaccccaatttatgattctgtgtattgattcaatttgataccttgtgatcttgctttatagagtgaagaagagagaatcgagcaagacaaggaaattaaggaaaaggtaagtttcttatttgttctacatcagaaggatc

SEQ ID NO: 43952 - DNA, 1349 bp, Arabidopsis thaliana landsberg
tgtgttattctaataattaatcatattatttgggttactctagtgatttatcctccctagaattatggttaatgcacaaataagtgatcagtagatacaatcactaagttaaaagaaccttcaaaaactttctgaagttttaatatcctcgtctttttcttatttttgttatcatcgagttcataaacttaatacgttctaggacttatgtacggtcttgtagattgatcaggtatatatatattcgctctaattgcatctggcttttgtttctagtacctatcacttctcttcatgcatgtattgggacttctttagatattgtagatgggttttgtattaattagctacagttattacattagtaattctcatttcgttttttgaagtgattaccgtgtctgaattttaggaaacgggattggattctaattatgactgatatttcatatttgtaacgtgtagtggttactaggttaatagtaagactaaaacttagggggtaactaaagaagagaatgttttgaccggtcatactatttctgattgcctgagctggaaaattgtcgtggctaaaagtgggaatcggaaaaaggaataaagggatttaacatgggattaggaagaagggttaacgtgtttataagataacaatagttaaaagataaataactcttaatatattcttatacaagtcccgagatatattgttcgatgtggtagataatggaactcggccaatagaaatatagaatgtcttgatattaagaattaagtcgctttccattttctggttgtatagttagctaatttagttgcctatttagggttattaatgatttcttagtttagttttcttgaaatgggttataattaattacttatatctaacgtgaaaagttttttttttttttttgtcttcttatttgcattgttgagagggtttgttcttgtcgcatccattactgataaagtttacgacaaactgctaaaagataaaatcacttaagacttaagagcaacagctattcaatttttttttatcccatttggatagcctaaaagtctaaaactatatgcaaagcaataaacttaactataatctagctctaccaaaaatgtgaagataagaaaatattaaaacatattcaagttcgagtgtcgctagtaattactaccaacatgaataatcacatactcgatcagccattttatgtcatataaatatatttttggtttatgctttctataattaattctctagatccgaatatacctcaaatgtacatgatttgatacactatcattttatcaaaaagggtctattttttatccgccctaaagcttaa

SEQ ID NO: 43953 - DNA, 158 bp, Arabidopsis thaliana landsberg
tacaaagagagatgggtgcgagatgctgtctacaacacgaaaagagagggagaagagactgaaattgacatagccatgctagcggcgactgaagaagtccatatagagacttggatggcacgcacacatgactggggactgccttttctacaagatcc

SEQ ID NO: 43954 - DNA, 639 bp, Arabidopsis thaliana landsberg
gacttagaactagcaacctttctcttatcaatagaactcactggaacttcttcactatcatcactcatgtctgcattgttatcttcatcctcactagaagtaccaaaaccctgaggctttttgccattaagtttgatgccactaccagacttaacaacaaaaccataccttttaacaacacaatcatcaacatattgcacaaacctcaccaaatctctgctcaatgatctcttactacttcttatcattggatcaatcctaccctaacagagacaaaatgatactaaatcaaagatctgagaaactaaataaacagaacattctaaggattcacaaagagtttaatacctgaattgaatccagttgaagaagcaagtctgtagctttccgagaaacaactttgaaagggaaaatgagtttccctgaaaccgaagatttaagagacaagaagctagcttttatcattgcaagctccttgagttgtctaaaggatatggatctgtgaacaaggtaagagcggaaatgggtttgaataacacgcgccgccgaatctcttagtgttgagtgtcgatctcgacgtttgtcatagaaagataaaaacttgtgagtgaagattcaagatcatcgattttgcggaga

SEQ ID NO: 43955 - DNA, 1464 bp, Arabidopsis thaliana landsberg
ttcagcctgaagcagaggttagatatggatagacgaaaaacttactcacatatgtgggagagaaacactggcaaattgaataagaagctgacctgaatggcctcagtcagaattttgtaccggtccagttcagcattccagtgatgaattcgatcattgatcaaactatacagtctagacgagtatatatactggtcatcctttagttcattctacatccattaagcaaaacatatcactgtcaactgcaactactgctctaagaaaaggaaaaaaatccctaaattatatatccatacctcaatatcttgacattgtcttgacaaggaaagattatactcttgtgaagcttgaagctcagacagacgaccttctgccattatctagaataattattcaatacacatgctaagcttacaagtttggaagaaaaaccaaaaattaaaagatgaaccacactattaacgatgtagttacctttatctcatcaatggagtccttcaattcacgcaacttcgttttatctacaggcttctcaggagaaagacttccatttgctattgccggtgatgttacatgaccttcacatgcagcatccttctgcattttcagagttatcaattttcttctattttcttcaagctcagccttgatctcttccaattgacctttaataaccaaatatactcaatactcaggagcaattatgaaatggcatcatgctaatacttaaattctcacatcctggttccagcgtgcataatggaaaaggtgctacgcttatagaaacaaacagctgatttttccatattgtctagaatcatgaaatatataacctttaaggtgtttaagctcggattgatctgttgaatggctgcttatgtacgcctgaatctgctcggaatgttctttgtgcctcacatgtaaagcatcaatcatctcacgcaagtttttggactcctctttcatcaaatcattaatgctagataactggatggtggcatctaaaaataaaagaatgtgaattttcaatagccgttaaattaaaatgaatcgataattggcacaccaaccaaccttctgtcgattttacagcatgtaaactttgtgaaatgctttcagctttcgtcttctgtgtatcaatggtgttctcaaagagtcccatcaactccattgtagaggaatgacgcaaagcaagagcttcttcaacctttcttactacctcatcactcttactagtatctaaggaatctacttgcagaagtctacatagaaacgtttcatcagcagcgcatggtggaactgaacctaaagtgcatgaagatagataaactgttacgcaaatctaagcagctattatacttaaagaactgagagagaactcttatttaatacctcgctttttatctacaatgtccaagtagtttagagcctcttgattagccccggcacgaacaccaagca

SEQ ID NO: 43956 - DNA, 638 bp, Arabidopsis thaliana landsberg
acctcaagcagaggaaaatgcacgaggatcatactctccaaatcatcgagagtgggaatatgttatgttgtttttgtgaagaaatgtttatgcctaaagtcgaaatcagcctatcccgcaaagcagcatcatgtggaagttgcaagcaccccaaaacttgtgaaactacttctgtagtaggaaccgttccacctgaaattgtctcgcggtaaaccatcaaagccattgatgtcctgaaagaaagggaaatttatcaatattaacctggagttggtttctggtgtatgtctttagtgaagaagagagagtaacacaactatatgatcaaatccaacaaatttactgaaacctcaatcaagagtgctttaactgggaagtatcataagattttctcgaccccttcccaacattatgaagaagagtcccacacttaataattgaaaaaggaagcaatactgaccatttattttcaatttgagggcgccctgatttgaaggacacaacaggtttaccaccagcgaaagctttctcaaaccttcggttgcataggcctttacaaaacaggcaaaaaggacaaacaaacaactttaatatcttgactgcattaatgaaggacaacagaatacattttaaagaaa

SEQ ID NO: 43957 - DNA, 664 bp, Arabidopsis thaliana landsberg
cattctgaaagcagcttcccatctctatttgatcgacagagatacgtacgtacacaaactggttttaatgagatagattctgacaagagaaccaaaccgagaaattgaccttagaagagttaaggaaacatcaagtctttactttctcaagatggctctcattttcttttgcttcacgtacatgtaatctacgtattcttcagctctaccgtctctttctctctctcttgaactttcggtagttgaaatactgctgttgagtatttcagaaacctaaccctcaaaatcaattaactttattgcactctatatttatcatcttcaaccacaacaatcttctgtttctttggaagcaactaactacaaaggacatcttcacgactacaaagacgcatacccttctgtcttaaggacgagaccagaagcttcttctatcggctttctaatggtctacaaaggataagaaaaaaccaaatccaaactaaagctatgcattttccacttgtttcggcttggaacaagagaaggagaagcaaatcatatgatacggatccatgtacgttccttttctccatcatcttcgccagatggcataaaagtatgttactgtttttgtttttcgacattactactactgaatataaagggtttaggtgaaacttga

SEQ ID NO: 43958 - DNA, 561 bp, Arabidopsis thaliana landsberg
caacatactcttatgctaattcgtttcatattttagtatagtataaaaattacaaatttcaaaacaaactataagtaatatactaacatagtcggtgtaacatttcgttaatttcacataacatatgttaattacatatgtacactatttttgaagtattttataacttaaaatatataaatttaaatctaagaaatcacaagcatgagtttttccttccggtaatcgtaaaatcaaaaatcgctcgctcgagaaacgccggtgctagaagaggaaagtaccgtacataatcctgcgaacccaattctcgtcttcttcaaactcagttttccgaaaccccaaacaccgcgaggattgcatggcctgaagaaccacttaatcgagaattgtgctggaattctcaaattttccctcgcgtttttctttcacactctcggaatcggaaatttccaccaagctcgattctgacaattacacactttcgcgcaagtatgcttccttccctgttttaggttggtgttaatctatcggtgaatcgaaggttttgggcctcgggctttg

SEQ ID NO: 43959 - DNA, 731 bp, Arabidopsis thaliana landsberg
ctcaatcgttgtaagtgctaagcgcagcaacaaccgctcctgttgtcgaaaaagccgaggaaatttccgtatggtctctccacgacgtattgattttcagggacgggtataaccaagacttaaccgaatcaacaaaggaacccggttcgacattaagtatagcttcccaatcgatctgtaaccctttcgggatagtctcagtgaactccatattagcagcaagcagaagtccaagtaacactacaaatcctgttacagcagttcctcgagctaatggcataaaattgtacctggtaaaaaaaccaatgattgctattaaataccaacagcttccgagtaattaatcaatcatacgttaggttgtcatagtcgtttaccagtaatatgtcatgcgtaagatggcgtctctaacggtttctaaagcgtcgagctcagtagaaccatagttctctccacaataggcagtgcataaagcctgtggattcagttagacttttgagtttgttttctcagaaacaaaagaaataccaattatttgcatatgcttaggtcttacctcccaagctgaggtcatttcttcatcaaagtcgctccaccttgcaggtgtacatggagttcgaattgaaaaatcataccccagccttcccctggataaacacgagagaaatttattgaagaaagtggtgtgattaggatttgtgttaatcacatgcaacaaaaagtaaaattta

SEQ ID NO: 43960 - DNA, 714 bp, Arabidopsis thaliana landsberg
gtcgtttccatttgtatgcattccgtcaaccatctgctactgtcttgctatctttcgttacgcctaatgtggtctttagttatgtttggtgtttgaaatttaggtttccattgcgaaactgccagaaaaatttatcctaatttattctttttttttaatatgctttttctttcagggttttggtgttgaagattcagatgctgagtctcctagagatatccattgttcagtcgagagtacagacttttccgctagagtgaaaaaacatattgaagaacctattaaagatatagaagtttctagcgtttcacctactgaaaactgttatcaatcagggagagaggctataccctcagttactcccagtactcctctcacggcccttagatacacaacatcagctgagaaacctgcaagtaaaactactggctcatcaacagtaaattcgaagcgttcttcgtcctggggaagaggcaacgtaagttttccattgtctggcatgaaaagtccaattctgttgtcctagtctctggagctgacttgctatgcatttattaagtatttataggatttttttttgtaatttttgtctgtccttgtaactctttgatcaccactagacgaaattagttctcctgatctctatcgctgtcaggtcatgatatgaatttcccttcagtttttttaatgccatgcttattggtgctatacgct

SEQ ID NO: 43961 - DNA, 562 bp, Arabidopsis thaliana landsberg
ctaaacatgctttctttgctcacatgtgtaactaggattgggactgacacaaggcacgaaatttcggttcggtggatgtttccaaagcttgtcgaaatccggtatcccgcttgtaatgttcaactgtcaaatctaaaagagtgaaagacacgaaagaagcatgatccttctattcaaaacagttgaacttttcttttgatctaagaaatagtttgtctagtgtttgttctaagtagcacatcacttgcaaccactaaacctatcctaaattactaaacattcacaaacgatttacttattgcaactaattttaggttcccattagttgcaccaaggatcaaaatataagaaatctcaaaccttggaagaagaagaagggcttgtagacacatgaggaggaactagctcggtgttgttgatgtgttccgagatcgaactttgatactgaatctcatttgtctgaaatttgacaaagaatcagtcacaagttaaaaaagaaacaatattgatagctaaagtgcaaaacttgtctcagtacaagaagatctcgaaaaacattgta

SEQ ID NO: 43962 - DNA, 337 bp, Arabidopsis thaliana landsberg
gggaacctagatggctccaaaagataggtttgcttttctgcaggtagaaactgatcggctgtacccggatgctgccacctaccgagaccagcatctcttgcatcagctcagtgagctcccaatcactgctagagacgagattgagaggaggagtacagatattatggatcatagggctcagagctcaacttaatgagatgctcagaacaagtttcagatctagcacctataaaagatacagactgactaccgtgaagggagactatcaagctcacagtacaaacagtggcgctgaaatgggagagcgatcaaaggagactgatcaccagtagagaga

SEQ ID NO: 43963 - DNA, 678 bp, Arabidopsis thaliana landsberg
gtcatatctaaatgttatggcagaaggaagggaaccgcaagggtcttgcctcatcggaccatgacatacctaaatcgtcagaccctaaagtgagtgtatattcatacaactgcagaaattaataagattctttttttttttttttttttacttttcggtttttgatagtttctttattaatttaattctcaacagacattgagaagactagcacaaaacagagaagcagcaagaaaaagcagattacgtaaaaaggtcagcattcaatatttgtaagttgcaaatatagtttttatatccaaatttatttataacgttatttgctttggtaaattacgacaggcttatgttcagcaactcgagtcatgtaggatcaaactgacccaactagaacaagagattcaacgggccagatcccaagtaaacttttgaccctatcttttcatatatattttctttcacctaaagtctaaaatgtaccaatttaatttgatttcctatatatgtttagggcgtattctttggagggtctcttataggaggagatcaacagcaaggtggactacccattggccctggcaacatcagctctggtacgttaatagtttcataaatgtgatgactcaaaaaccgtaaaatttgaaaaccgagagaatgagatattgagtaaatgcaatg

SEQ ID NO: 43964 - DNA, 908 bp, Arabidopsis thaliana landsberg
ctctacctcacacctacctggcttatagattttagcagcttcgaagctatcaaaaacagagaatctgcatgcatcatcagaccacatcatgttttagattttcttttttttacttattagattccttttgcacttctatatatatgtatggttaaaaaaaaaaaaatttacctgtaaaaagacccttgtgtgctctgataattccagttttaacgattcctggatggactgcatttatcgtcacgtttgcatttctgtcctgtaagcacattcagtgataaatatttctgattattattttacgtgaaaaaatgaaacaaaaaacaaagatgtaattattaattatgaaatgtacctttaattgcttgctcaacgctttggcatgtaaaattgtggccaactttgactgagcatatgcccttgtcccgttatacctactagacgattacaaaacacaattacaaattaaacacaattacacaaacctaatgataaattttattttttgagataccttttttcttagatactttccctttttttttttttttaatttatttatatcttagatactttcacacgtaaaaaatggataacaaatgtaaattacctaatgggatggagtaatttagggaaggagaaacaatcaggcttgacccaactgtgaatcacagaggaaaggttaatgattcttccttcgattccactcttctctgccgtatctatcattttctctatcagcatttctgttaataagtaatgtcctgaaaagttatgctaaccatcattaattttctttcactctacatagatatattcatgtgtcacataattacctagaaagtttgtagcaaatgtcagctcaatcttttcttcggagaattcaagatttggagagaaaactcctg

SEQ ID NO: 43965 - DNA, 603 bp, Arabidopsis thaliana landsberg
tcggttttgcagaaggccttgatgacgtctaatctttttttggacctctttatttttctttcttgaaactagtttttgttaagaaagaaaaaacaagttatagtagttaatgtattactgatgcagaggtggagttttaactaccacccgctagtagtagttatgagttatttattttaaggtgtgagagagagatggattatcaagatttgtcaattttattatgtttgtttgtaataatacaattctttactccagttaatgaaaattgggggattgatcacttttttttgcatttttttcacttttcatatcaacataccaaattttacaaccattattgactattttgggaactttatctttcgtttcaaatttttacaaccattattgaatgctcatttagctttagctgttgattaattaaatagtctacaaccgactttcacaatcttatccttcattcaatgttttccccctttatattcagttgaagcaaaactccacaacttaaatgaaaaatcttctatagacggtccttgtggtccaaaaagagcaaaacctcatgactctatccaacaaggcaacaaccaacctaattta

SEQ ID NO: 43966 - DNA, 757 bp, Arabidopsis thaliana landsberg
gaataatatgttaactttgtgcatgctgcttacatctcgttttgtatttcccctaaaagagtaatctcctatcatttagggtatttcttgatcatgtctcagtatctgaagtgttagtagtcttagaatgattctattgtttgttttcttgtctcttttcactttagttgtttttggctgttgatgtgtatgtttgttggtgggttctttgcctaatgatatttaaggttaaacttgttagtctgctgttcaagcttatgaattctagtgcatttatgtgcaagacttgtcttctggactctgatttcttatatctgcttgtttgaatggttgtagatgatatgggattctcaatgtttcataggcaatatgataatccgggtggagagaatgacgcattggcagaaaatggtggtgggtctttgccacccagtgctaatatgcctccacagaacatgatgcgtgcgtcaaatcaaattgaagcagcacctatgaatgccccaccaatcagtcagccagttccaaacagggcaaatagggaacttggacttgatggtgatgatatggacatcccgtggtgtgatcttaatataaaagaaaagattggagcaggtaataattttacggaaaaattaatgattcggtctaaaaatgcaaagaaatgtgaaattcttgagaaagtggttttgctttggactctgttctcgaacaaaataaggaaaaagtgccacccattttgagattacattcttctctg

SEQ ID NO: 43967 - DNA, 211 bp, Arabidopsis thaliana landsberg
ggggcgagaaggccgtggcccgcgccgacgagaaggctgcaaggctgccgccgtggaagaagccaagaatgcaccgtaggaagccccggtcgaggaagctcccgccgccgaggaagctgcttcggaataagtttcctgccgctcgaattgaaaagccccggtgcgtgagcgccggggctttttgtttgactggtgaacccgccctcgtggt

SEQ ID NO: 43968 - DNA, 304 bp, Arabidopsis thaliana landsberg
aacaaattctgatttttcttccatctacataggcacattcctgttgctgggacaattgaaccacatcttggagttgagactattcgactgatattgaccaacgccatctttggactcagaaagaactattacgctcaggaccgtgttaataaacattggtctcagacacatgatactggaggtattaagaatgagctagaactcactactagagctcagagaaacaccggatgacgaataatctattgtggctccgagcggcagacatattcaaaaataaacatagcacacgtgattactagct

SEQ ID NO: 43969 - DNA, 398 bp, Arabidopsis thaliana landsberg
ccgacggtaataaatagaccaaagaaaacgatatattatcacttactatcactttgcgtataatgcggaatagtatttaattggttacttatacgaaaataactcaaaagaaagcattgcataagacattaacaacaatgacgtctccatgtgtagcttgacttgaaaaatcatcgtagtcctccaccactgatatgcatgatagataatgaaactttcatcttccgcaatattgagcaatagttcaagctcaattactggtgaaaattttgtatcaaaccaaaaaatattggtgaaaatagttcttcacctctgatctaaatataacgtttttcctataatactataaacagtaattaatatgattgtcttgatagttttatttatccataaatttc

SEQ ID NO: 43970 - DNA, 690 bp, Arabidopsis thaliana landsberg
agaatgacttgaaggaatcgtaagagagattgaggaagaagaagaagcgtggagaaggaggaatagcagaaataggaagaagatgacttcgtgctttgcttgttgcctgccgtcatattatctatcaggcggctactcgacttctttatttaacaaataattggataatatcaaattttacagggaatttttaactgattctttttttttgacagttcagaaatatcatttctttgtgaataacaccaaattttttatttttattaagacaattttttaaaaagttagattctttgctttacgattcagataaactcctgatatagatatcatagatcctactatagtgtataactataatatactattaccattaggttataaaatatatttgaatttttataaatgaaaatacaataaaaaaatgtgttatttcattaaaaatcatgtttgtttttttacttcctattgtttattttgaaggataattaattgattgttacataaatctcgcatttatctatgccaaccaaaaaaatttagaaataatattatgaagaagatttttcaaaaatataaagaacgcagcaatttttattctgttccagaaaagtttgttatatatattaaccaggtgcatcattcatcaatggtgaaccatttgtggagagtaaaagtcagtacatacat

SEQ ID NO: 43971 - DNA, 1022 bp, Arabidopsis thaliana landsberg
tgtttttataaataaaattaaattcggtcattttttttttgaagtgtattcggatttggtttcgtgtatagaaaaataattacccattctatccatattttagtgtagtttgtattttcttataagatttaatttattcgaattaaattggatcggtttagtttgtcaggaaccaacagttgtaaaacaaatccaaacaccgagctgtgttcaagtcttttagatcatatcttctgaatagaaaatatgacaacaaacagaaattaagggtaataaagtagaatacaattaaacttttgtaagtttaaaacatacatgaacacatattgttcctagtttgtgtttcctaaactcattacgaacacttgcaaaaggttatgaaaagtttataatttttcaaatttaaaaagtttcgataatgtatatattatatgtacaacctacaaaagatataaatgttcaatatatgttgataccttgacggtcttactttgttaatggataagccaaaaaggtgttattttatcaaattaaagggaaagaagattagactactttcacaatgaccctaaaaattacttgtaatagaaaatagaaatatagtaatcatgataacataaccaaacaaatgcaggaaactaaagtaataagatcgtgtctagggcttataggtcagtggtcagaccacttgtttggctcgtacgacaccacttccctacaatatgagccatatagttttaaaaactattgagaaaattggagggatatattaaataaaaatagatcgaaaacccaaacaaaaaaagagagggagatctaattaaaactcgatcgaaagtacacaatatgatgatcgaaaaatgttagacttagtgcaaaaactattgaaataaagatttaactaagcagtcctaccataatgcaaaatcatgacatgatcaatagttgatgagtctcgaagcaaagtgaaagagtaagatgatgatgattttggagtccatatggaatctcttacatgctgc

SEQ ID NO: 43972 - DNA, 401 bp, Arabidopsis thaliana landsberg
aaacgatagactgaacatgtgtgaattgtactgtggccatttttttgttcattttaactgattagaattgaagatgaaaagattagtgactctaatacgaaactaatcctgtttttacacgaaactaattcatattttagttttctaacattttgacttccgtgtaatagtgatattagtatgtcatctgaccaacttaatttaaactgatttaataacattgaattaatataatttgtttagaaagactccaaaaaacatgaccgaacttagtttaaactttagtaatgaactacaaatctcttctgttttggcctaattaagctagcaaataagtgattcatttgggctaagaatgtaataaacaataattctaggttcattaggaaaactagttttgc

SEQ ID NO: 43973 - DNA, 602 bp, Arabidopsis thaliana landsberg
  unsure (1)..(602): unsure at all n locations
aattacccacttacacacaatcaggattcacaagatagcggataaccgggccgcccgtcaaatttcatccgccgttttcaacagatatatcgaaactcggcggcggccgcgcctttgcggacggaagaaatttgacataaatatttcggggccttatgaataaggcgaatcaacgcaaagaacgcaaaggaaagcccgtgccagaaagcgtcccggagcttgccgccgcgccgcggcgcgtccctgttttccgtgccgcggattacggccgcgaagccgcgcattttaccgccgccgccgcgcttgcgttcgccgcgggcgtgtgggtcgggccgctgacgctgctcggctgcggcgcggcggcggggctgctgaccgtcggtggcagcaagctgttcgacaagatcctgcccgcgatgttcaagaagaaggaagtcgcgcccggcgcggcggaaggtctggccgaggcggtgcgcgatttcacgccaaaggcggngctcgccgccgcgccggcgctgtacgatttcgagctgaacaaggaagaccttgcgaagcagaacgacatcaacgccaaccccgccagttccagcgcgtgttcaacg

SEQ ID NO: 43974 - DNA, 396 bp, Arabidopsis thaliana landsberg
  unsure (1)..(396): unsure at all n locations
ccggcgtgtgcggcgtgccnnnnnnnnnnnnnnnnnnnnnnnngttttgccgctgcccgcgggcgtggggccttcgccgatcgggccggggcttatcgcgctcatcgccacgctgaccatccgctaccgcctcggccgccggcccgtggccgcgttgcttgcggatctgttctcccgccccatctcgccagccgctatccagaatgccttggagaccgcgagcgacgccatcgccgaagcggtggccgagctgacgaaggccgtccaggacgcccctgtcgcgggggccgacgagaccggctggcgcgaccaatcggggttagcggccggcaaacggccctggttgtggggtggcgaccacgcccatcgggtcggtgtacgccattacccccgacc

SEQ ID NO: 43975 - DNA, 511 bp, Arabidopsis thaliana landsberg
tttatattcttcttgtgttgtaaaagagagacatcttggtgtgcgttttttttccgtaaccaaaagctaattgtaatctctccatggtaatggaatctccaggctgtttttttttgttatcaataattcagctttctgcaactttcttacattgttgttcgttatttagtttgtcttgttgcctactattagcagctcaggagttacttaaattagtatcttgctaagattatgagaaaattctgatcctgtgttttgtataagctttttggttcttgtgcatgtttgtgtcaagaacttactgagaaatagtgtttgtgcttttttttagacaattttgacaactttgcagggtcagaccaagctttccttttacaacatctcactatgcccaaggttttatagacagcttcctttctctttggtaagtcaagttacaaacttacaaacagtgattccaaattattgaacacctgagctgggagacttgttacttgctgcaatcaggttc

SEQ ID NO: 43976 - DNA, 758 bp, Arabidopsis thaliana landsberg
agtatataaatgagtatgattaccatctttacgagctaattcttgacaccatttaaagcattggcgactactctcgaacgtctggttacaatgatggtagcaagtttccggtatatcgctcgcgtttacgcccatccctacaacgcagttatgaatattcaaaaccatagcataataagaaaagcaaaaaaaaaaaaaaaatcaaaataattacatttgagtggttcataagaaatggacagcataaccatgagagtaaacgaaaccaataatatggaggaacccattttttctactctctctattagtacactcagagggtagagcataaaaagatgtatttataattaaataaggtgaatccataaccattattatttactttatttccttttcaaaatttggtaattaataagttggatttttttacatgaaattgtagatttctttccttttacagttttttattcttatatgaactttttgcactagcttatacaatttagccaatctaattaggatatagatgtgaacgaaaaaaaataaaaaaattgaggtatagatttaatagcttatctaattgaggtatataaagtttaactgtttttcactcaagtaaatttaacactaagactaaattatattgtttttttgcaaatatttttatcatgtaaattattatttttatatacaaaatgttttcgtttgcaaggtttttaagtaaataaaatatatttttattgatttaactaatttag

SEQ ID NO: 43977 - DNA, 876 bp, Arabidopsis thaliana landsberg
tcttgtaaaaaaaaaattcttggataatatatgatgcgttcgggtctttttttggtcaaaatttataaggtgttcagaactttaaatcaatatattgagaatcataaaatttgattttgcgcgtaagtcctgaagtaatatttattttcatcttcatgtgcaagcatttttgtgtcatatttcttatatgtgcataaatgtagataactttttaagttgatcactaagcaaatgtgtgtatttttgtatgaaaactactaataaagtgtgtctcaatctagaccacaaaggtctaaatcttaatatatgcactatagattccatttgcatatgataccagttagattaccaataggtaatttgttttctcttcttttagttgcctttaactatttttttatgataaacttccataaagccattgttgctttctgctaaaacttataagagtattttttggagaccgtgtccctcactacaagaacctcaaagagtatgtgcctctggctctgactgtgagctgtagacttcaactaaaaaaaattcattaaacaacaaatataatctattatattaacaaaaatttaacatcaattttgtatagtgttacctacataatttatgaaattatctagataatgtcttgtttttaaaaatctaattatagatgcaacatgtgggatcgtttagggatccacaacactttagacaaaatcatgacatgaacaccatatccattacttcacttggatctcattcttcctatgcccccacagaaaagtcaaacactgatctggcaagtctttgactgccgtactcattccgccacgtgtccagccttaactttgttcctattaaaacacaactaataaacag

SEQ ID NO: 43978 - DNA, 379 bp, Arabidopsis thaliana landsberg
  unsure (1)..(379): unsure at all n locations
cgggagccacgctcagcnnnnnnnnnnnnnnnnngccatcggtaagcgcgtgttcgatcggcgtgcgattgtcggccagaccatgggcggcctcgctgaccggaatcgtttgttcgtcgaaaatcgcccccacgttgctctcttcgagaatatgccccaggtcggcagacaggccgtcactgacgtcgatcatcgcatgcagacggcatcgggcgtgcagggtcaaagcctcgcggacgcggggcgtgaagtcgaggtgtcggccggcaatactgccgccgaatgtgccggtcgccagaacccagtcttccggccgggcgccgctccgcagaacggggccggttccggtcggttcgccgaacgcggtgatactcagcac

SEQ ID NO: 43979 - DNA, 528 bp, Arabidopsis thaliana landsberg
aattaagcatactgatataatatgatttacaaatagaggctggagcaatgacactttaatcgttttcttattatataatataagtatataacatgtacataaaagttgttactttacatgcactgtacttatcatttgtctgttgatgggatctttgggggtcaactttaataatgatgttttgtttctctaaattctatgcttaatcatgcttttgggtacacaattgatggattaactaataccacataatgattaaccacatttgacctctcattctttcactttttccatttctttattctagttttaattgagttgagtgtgaagtttcacctcgtaatttgttcccatactaatattttgatatatcatttcgtcattcccttttgttaaatcatgtgtgtcccatgctcacatgtatgttattaactgaaaactaatttcgaacaaaaatatcacaaaaattaattcacatttgtcattaaatcgaaataaggagaaataaattaaatattcaagagaatg

SEQ ID NO: 43980 - DNA, 666 bp, Arabidopsis thaliana landsberg
aacaccaacttcgaatataaaacacatttaacaatcttcactgtgactttagacttcatgatttttttggtgttctttttaaaaaaaactcagtaatctggtgataagtctcgtagttacctcatcgtagaaccacaatttagtatttacacaagaaggtatggtctgattaaagtttgggggtctttgtaattaggcctacaataatcattcacaaatttgaaatattacaatttatgagggaccacaacacctaaaaaggcataaatgcattatgcccagtggcgacgaaaaaagtgcattaaaccaaaggaatatatgtttgatttttattttaatgtgggaatgggatatgcaatattacaattatgatattatctgaaattttatatctttacaaaatttgattttcaaacttaaattctatagtatgatctacatgaacactttatattcttatgcaagaaaaacaagtcctttgtccaatcattgacctcttaattgaatttgaaatatttaacaaagtacccaatagataattctttttgttcttgttaaattaagattttcaaaatactaagctttagcattaatttgaataatcaaagatctttctttgaattacctattcaacatttgtttaataacttatttcaaacaaaaacc

SEQ ID NO: 43981 - DNA, 432 bp, Arabidopsis thaliana landsberg
gttcccggaggtgcgtgaagcacgcaaggacatcgtcgagttcatgctcgaaaacatcaccacgcactgaaagctgattgcgaggagaccatcatgaccgccgatacggcctacgccaccgcctaccgccgctccctgcaggagccggaaatcttctgggccgaacaggccgcgaagctccgctggcacaagccctggctgaaggtgctggatggcgcccgcgcgccgttctaccgctggtttgcgggcgccgagttcaacacctgctacaacgcgctggatcgtcacgtcgaagaaggccgcgcggaacagaccgcgctgatctacgacagcccgctgaccgacacgctgaagaagttcagctaccgcgaactgcgcgacgccgttgcccgtttcgccggcgcgctgcgcgacaacggcgtgaagcggggt

SEQ ID NO: 43982 - DNA, 823 bp, Arabidopsis thaliana landsberg
gttcgatcactttttgccataaataaactttttcttttcaaacaaaattacttttttttttcattcttttcatttattttgtatttattcagccaaaattcaaaaagcagtcatcatcttgttatatcataagtaaacacggctgtaacaattttactatcggactacctaattttatttttttatttttgaattaaattttcaacttgttatataaatacaaaacattattgtctgactagtgacgcatatatacaacagtaatataaatacttataacatgttatacatatgaaattgtgtaaacaccaccaaataattttaaataggggaaaaggtaacggcaacgcgttaggcgttggatcgatgatcgcaatcgcaatcgcttttggaatattttgacttggaatcacttttaatggattggtgaaaacgacacgcacttcttctctcccatttcatttgtattgctaaaacgtgacgcatttcgatgctcttcctcccactttccgttttaaagaaacccaattatgataattcgcttccataattaaatactcgttgccataaattactctttaacaaattgaatggccttaaaatgcatccacatatataaacctacgcgcatttacaacatgattcacgtgatttttatatacaattatataaaaaattctgtatgtattcttattgcttttaaagttttcttacattagaatgtgtagtgcgttttctttaacattaatgaattctatttattgacttgaaatacaaatccacagaaaaaaacttggtcaattagtggtggtaagagtatagg

SEQ ID NO: 43983 - DNA, 869 bp, Arabidopsis thaliana landsberg
gctgtgtttgagagcaaatctatatcatttacaagatcttgttagaatgaggccgatggacagctaatggtgccaataagtccaaaattttgaatcattaaaacactactcataccccccactaggcactatttttcatagaggataagatcattttacatttaaaactgtatttagtttaatgatttgtaattgctttacgatacggtctaatttgagcttaatgtcggtctaaacatagtcattattatcatattaaacacctaggaaaatcagccaccaaggaaacgaatttacttttttgcattatgatggtctaatgattgtaaaagtttcatgttagttaccataaccctctcaagaaaaaaaaagagacaaaaaaaaatagatttttctcttaaattgattttattttggtagttagctgtactagtgaagtagtagccgaagcattattttctcttctcgttgaaattgatcccttctaatatatttcttcttcttcttcttcataatttgtatcaatcatttcaaagaaccattctctctgtatatctccttccagtttagctatataaaggcgcggcttttaaaaatatcttaggtaagaatctctccttcttgtatactttttgcttttcagattcagaattcgttttcctttttgaatcctattcaaattttgagcgattcaatgctgaattagaggtttaagctatctagttggtggctcaaattcaattccaaaatcagaaatcctggttagtccaaatttggtagtctactgatttcttcattcctctctggggaaaatgttgcttaacgtttttccttttctgtcaaggattttgaatatattatttttgggg

SEQ ID NO: 43984 - DNA, 204 bp, Arabidopsis thaliana landsberg
tgtggttctcgacgaacggccaatccatgttcgccatcctttagtccagcatcagcaggatgccgaaggcggcgctgtcccgggtcatcagaccgaacagcagcgacaggccgatcaacaggtggccgtattcaacgaggaaggtggtgatcggcgccatggccggcgtggtgaacatggctaattcgttgtggaaggtcttgg

SEQ ID NO: 43985 - DNA, 803 bp, Arabidopsis thaliana landsberg
  unsure (1)..(803): unsure at all n locations
tatttattacctttttccaattttattcaaataaaggcacctcacatgtttgacaaatgattggtcaagttttcttaaaatacttgggggaaaacatttaaaactaatcaaagaagaaagcactccatttttgtttgttctttctaatgtgtgatatggtagtcgtacatcgtaatgtcttaataatctaacgtgagtagactcgctaacaagatgaatctgattctaacaaatcgttcnnnnnnnnnnnnnnnnnnnnnnnnnnatatgaagtataattttggagaaactgaattctgctatcgaaaacgcttaccatcttatataaaaaagaaaagtacactctaactaggtctctaattattgacaactgtgtttgagtgggttcactgagtttgaatctactttaagccaaatccacacatacataaacataaatttacaccaaagttcaaaaagagtcgaaacaagaaagttacgatatattaacaatggttggtccactataatttcattttcttatattataaaacgaggggaccatatgataaatcacatgatcatatcatatgacaccatctctctctctctctttctctctttctctcaatgccaggaccatgatgggtctcaatctctatctctccccatctccattatttccccttacccataacatgtctctcatatacaatctatatcatacagataaataaaaatggatacaaaatatgaagacgaaaacatgacaatcattgatatcgccaacgtgcgagggccatattagatggtcactagacaat

SEQ ID NO: 43986 - DNA, 133 bp, Arabidopsis thaliana landsberg
acaaagaagaatgagaaagacaaaggttaaaacgaagaaatagggctgacatggcaggagacaaaaaagggcgattattttaaattcgcgtgggaagcaagaaagctacagccgacagcctctccagtcactt

SEQ ID NO: 43987 - DNA, 517 bp, Arabidopsis thaliana landsberg
ttacttagtttatggcagttggggctggaaatgtggcgaagacaatggccacgtaggtgacttaaatccatatatatatatagcggggagctggtgatccttaaaattcttttagtcaccaagtggagttcgaactttctagagctatttaccagagggaggaagggtgcatatcttcttagaaagttccggaaattatacttttgaggagattaaggtaaaatcgtatgtggtggatcccatgatttacatatcgaagtaatatatattgaaaccaggtatacaaaaagttgaccacctcaccggaccggtcgggactacgtggcatcaatcggatagctttaatgtagtaaagtgacgactgacgagtaaaactagctacaaaggtaaaaaaaagaagaaaagaaatagtagtagctttgaggtcttggtaaatagaaaagacgatatacacacaagtgattggcacatttggatttttccaagaaggagtagattccaaagtttcctttcggat

SEQ ID NO: 43988 - DNA, 492 bp, Arabidopsis thaliana landsberg
cacagttttgtaggtcaccaatcgattcggttagatgagacggatcaacaatacggttagaagcatttttaatcggctacgaaccacctaaatacaaggcgacttgcgaaccatcaaatgcgagttttgttatttactttagattcttactgtaacttttgtttatttttacctttcaacaactgtgtatcaaagaattagccaaagatattccaattgcacctggttatacaaagttataagtatgttttctgaatatggatttaaccacttttgaaataaaggtaacaagtgcaatgcatatgatattgaaacttgatcacttgaaacaaagaagagaatatttactgagaaaacataaaggacagatggaaacgacagaaacaaacttaataatgttacaacttgctcctgtttttcttttgtagtttactcatccaaatacaaatcactgtccatagatagaggaccaatcctttacttagctgattt

SEQ ID NO: 43989 - DNA, 758 bp, Arabidopsis thaliana landsberg
aatttctttgcccaaaaacaaaacattttatttttaagtctctttacttcttatttgtgttcatcccatttggtggggttccaaccgatgaacaacggaaggttgcgtcaaaacgcaaagggttgtgttgttggtgttgaagtggagctccttcattttaggaacaagcagaggacgttacacaatcagactcagtttcttcccttatttaacgtaaccactaattctattttcttgttcttttacaaagttcataaatggaaatgaacacgtaagaagaaataaaacaaagttcaaaactaaaaaacagaaaaccaaaaaaaacaaaaaaaaaaacataaaaaaaacataaaattacagaagaaaaaaatgggtagcttccttgaggttctttgagcaatcttcatacctactgttggtgtgttcctcatatatggactgggggtaaatttttttcattcataaatcataaaaatatatgacacatttgacattaatggttaaagtaagatcaaatctcttgttgttttgttactttgtatatgtgatagcagtaggagttttgggtctgtttgcttctaacgttattcgctttatcccaggactgatatatgccttgtacgttgtcaccgagtatgaataaccaatcaacaacactggatgcttactttattctataactatggctttttcaacaatgtttgtataatagatctctatgttggattaaggaatagatgtgtatgtaccaaactttt

SEQ ID NO: 43990 - DNA, 577 bp, Arabidopsis thaliana landsberg
ctgtgacgctatgaagcttttaggaatatcagagacgaaaacaagggcctttctcaggaaacttctcaagacctatgagaataactgggatttcattgaagaggatgcttataaggtccttcttgatgcaatcttcgacgaggctgatgcccaggtctgttttttctgcttaatcactttttattttctttatttgattgtttacatattctcacttagtcagttctctttctttgatatgtcatatggtagtccactgaaaaaaataagaaggaagaggaaaagaagaagaaggaagaggaaaagaagtccagagtaagttaactttctttaatttgatgacaattttctggtgttttttgatgttgtttcttctcaaggctttgatgatctttttttgtttctttagagtgtagcaacgagcaggggaaggaggaaagctcctgaggtatacgacctaaatatctttgttgttttagaatttgttatcatcatgaaacattaacttgtttttttttttggttaaaccaaactcagcctttggtacaagatgaagaggacgatatggatgaagatg

SEQ ID NO: 43991 - DNA, 543 bp, Arabidopsis thaliana landsberg
tatatttctacactataaattggatgatatgtgaatttgtttgatttgattgtatgaatgttgaatgatatgttgtacacaaaaagtatgtaaataatctttaaaaagtgtaattgggactgggaccttcccaaaaaatgtcataatcactaatggttttttcttctttttttgatgttatagaagagtgacaaaatagtgaatcaaatcaaacttggaaactgagagcagaagtgcaataagaaaacaaaaaaacaaaaatgatggaattgaactaaattttggttttggttcatttcagtttgacattttgattccatatttaaccaaaaccaaacaagttgaattagtgaaataaactttgaatccggtcgggtttgagccttgtttggaaaatattgatgatttggtataaagtttagatctaataaagcagtattgattggtaacacacataatggtggaatacccgttttttagtgtgactatgcaaaaaaaaaattgtcaatcaaaataatatgcatgaatgagtatatagttatt

SEQ ID NO: 43992 - DNA, 509 bp, Arabidopsis thaliana landsberg
tgaccgttcgttccacatataaagctagccttgccaacaattgtaagctcgtggactgataaaatataccaacttaaggcagaataaacacataaacccaaagtatatgtgtcattaaggtcaaagacaaccttgtgaaatgttttgtcctaactaacaggtgaatggaaagcgcagcctggaggtaactaaatcgaagaacaaacacactaagcgaccaggttaacataaacttgtaaaggctatagatatctggttggtgagtctgagtatcaatcgtgtaatctacaaaggtggttttgttttctttccctctctagttttttctttcttaaaaaatgagggtttaggtttgttggcttgattgttgtataatttatatgtatagcgtatggtggtttctcatctcctttagttgtcacatataaattttaaaatggtttgtttataacaagaaaacaaaaccaacaaacaaacaaagagagtgttggttccttatttgtttgttt

SEQ ID NO: 43993 - DNA, 765 bp, Arabidopsis thaliana landsberg
gaaacaaagctactattagagtatatggttaagtgttaaccataattgagtctgtaaactggtatgaaccggagtctttataatgtctgtaattgagtctacattcattaatgaagataacaaactttctctcgactctttctccttcgattctctctgtaacagaatttcttctgtaacagctaccataattattagactatgcaaatctcattcgttgtagttgtatgaaccacatgaaacatgactattacttaatttgtaaggaaacaagagagaatacttgtgaactgagcagtaaatatgttgtgtgtatatattattatattgtgacctaaaactccgttagatcgtattggcaaaggcaacacccgaaatagcaagggatctgacagtcattctcactaacacccatccttcatgaatatatgcatcatggatgatatcaaagttgtcatcaaatgcatagaggtaagtggttattctaacattgaaaatatgggcctcacttctcatttttgatgtgcagttagtcttgtgccaaattttccaacggatttacaccatcggttttggaaaattaaccagatctatggggaagaaagagatcgcttacctaaaaactcagatctaatttaaggagagagactgagagagttaaaaagaattaagagagagagagggagcgatatttcatgtgttgtcttcttttggacttttttaccaagcctacttattttttgattaaacatagtacctggagca

SEQ ID NO: 43994 - DNA, 1597 bp, Arabidopsis thaliana landsberg
cttgcttttcgcaggctcattcccgtcgaggcatatgaactcgattggatgacccagggccggattggtgtctgcaagtaagacaaaagtcaatttatatatcaatttctgttgtgcccatttatatgatcactaaaccaaatatcttgagcgactgaggagaagaggagacagacctccttcacaagcaacaatccttccatcaactttgataggtggaacctcactaatcagttccataggtgatttcttgcttctatcctgtaggaatgtggcaaaagaaaacaaaatgtgatacagaaacttcataatttaccagaaaggactggtatagagcctatgcaatttatgttatatatacaggtttgaaagtctcagcaaacaaaaaaaattcactagattacatcactagttttcaatgaaagcagagctgccatcttaaactaggaatagtatgtgatgaatcagctcttcatcacaattttctcaagcactgataaaaagggtaagctgatctggtgtcaaagggtagtgacaacataaaggagaaagctcaaaccaacttattgatttgactaacaaatataaagttaacagtaaactaacatacgtgattttctaccgcccaaaattcatcagccaaaggaactaactccaagaccatagctatgaaggtaatggttatacccttaaaatgagcaatatagatagcacaactcatgagaaaagaatgagaatattttcttctactcctcttatgctctcaagccctttggctttaattattgtttggcaccggatgatagtcaaagacatgtaaaaacatggccacatgaatggaagcctaagtttcccaacgaacagattttagctaagatagttttctttcacaaatttcccatgtaatagtaaacctaatgtcctcaaaaatccaaaacaagttctaagcagtttcgaacagatatcaagaccactgattcaacatcgaaacaaatatcttcagttatcaagactgactagcaagacttttcagaaattaacaattccctgtgatttccaaattccagttcatatgacaggaacacaatttcagcagaatgaatcgactacgaaaccgaatcagcaaatcgtaaacatgccaaatcacgatctaaccctaggggagatcgtcgagactaattcccgagtaaattagtgtaattcccagattaaattcacgatacaagtcctcgtacagatttatttgggatgcgaaagagctagaaaactaaggactcatgatcgcgaagattacctgcatccatttggcggtgtgattgccgactagatcgtctgttggaatgccaagctgtgtggtcgccacactgaaattcctcctggaagatggaagaatctgcgatcggattagggctttcaggagattcgacgccattgttccaacaccgagtaattcagaggtaacaagagtctatcgagagagagagattgttcgtgaagctctataccaaacaacgcctctatttgggctttagtacatataagcccacttatttgaagcacatataggccccttaaggtcttcgaatttttaaatttc

SEQ ID NO: 43995 - DNA, 585 bp, Arabidopsis thaliana landsberg
tgggggggacaaggtttattatactctttttgatgctattgtttggatcctcagaaactgttaagagttggggaggttttctgttggtataaaaacatacattttaaggtttctttttgtcaaatcgagtacaatagttcggcaggatcccagatttgccatgtggctataagtgtctctgttattaatactataaccacatggcaaaaacaacatacgtaatactcacattaatctggaaagtggttgctttatgtgagaatttatgcgagtcaatgtaacagagaatctccacagtcatgggaacgagtctttgagatctgttagaagtagatgacagcggaatgtttcttcttttgattgagtcctaatgttctagtagctataccacactcacacaaacagacaggagacgatgttctgaaataaatgttatttaacgctcctcagtttcttgtcattactgcaagtctaaaacatataaatgaagacagccatatacgtcgtcaatgataatcgcagaatcccttgatggatattagttagtgtttcttttataccggactggagaaaaaaatgtgattg

SEQ ID NO: 43996 - DNA, 217 bp, Arabidopsis thaliana landsberg
accagtgctaaaaacgagagcgtaatgaataagctttgttatattgatcagaaaatatccaaacaacgaaaacattactagaacaccaaattgagaccaagaataatgaagcaataatatagactatatagtaaaggaagcatggactcgcggtttctagaaaagtcagtaagatcataaacatgttagcaaaattttctttatttaaaaaaaaaaa

SEQ ID NO: 43997 - DNA, 734 bp, Arabidopsis thaliana landsberg
ttcattgagtaaaacatggtgattaaaaaatatagcatctcaagagttacatacaaaaacggtaagatgtggtgataattaacgaatgataacatacgatctggtgggaaaaatggtggttttctattagtaaatgattagatcagtatagtttcactttcacataggaggctttatctgtattttttttgtgttacgccaataattttgtactatcaaagattttaatttcaccttttagatattttaaaatatctctagttcgagttattttgtaaattgtttttttaatcgcttttacctacatatagtattttaattttgtatttgaagaaacttaagaatcatattattatatcatctttaactatcaccaaaatgctttaagaaaaaaaaacatccactatatatcgggccattatcattaatcatatttttgaaagctcacatcagaatgtatatcgttttaaaagttccaaaaatgaattgaaagagtactctgtgtacgaaaactattaatattttttaaatcaaatggaataaatttatttacaagttagtgagataattaattaatgaactgatgatatcacttttgaatattaaattcttaatggttgttatactaatgtccaaagaaatggtgagctgcacagaggtaagatatagaaaggtggtggttgtttctaactcccacatttttttcttgtttacgttaactccccaattttaat

SEQ ID NO: 43998 - DNA, 657 bp, Arabidopsis thaliana landsberg
ccccggaaaaaaaaccggaaccgattagtcgaattggtcccatccgaaaaatatccaaaccgaatccaaaccagtttttaaaaataatcgattaggtccttaaaaaatcccttaccaaaaattccgtaaccgaaactgaaccccagtatccatgagtagcggaatattatcgggagtaccgatatagatttaacaataaggaaaaatgtcttaaataattagtcatcatttttattgtttttttattgtttaaaagcatgaattctaaaattaataatttaaattttttaatttttatgttgatatttaatttaattttgaatttttgttgagtaagccaattaaaaaacatagttaaaaatttcccaaatcataaactctagatccaaaaaccgatttatttaataagaagtttcactgacattttaaaaaaaagaagtctattgtagctttggaataagagtaaaataaaaattaagacataattttcattttacaattaactcaccttttatttgatttatttatctacatataactttgtggttaataatgaaatcgaccgctttttagggaattccagacttttatttgttttcttttttccaagagattcatcaatttgatctttggacaccttcggttgaattctaaatt

SEQ ID NO: 43999 - DNA, 954 bp, Arabidopsis thaliana landsberg
cccatttatattattattattattatccattttaggcccattaacccactaaagctcactgaactctgaaggcatcagtgtagtagcaaattagctcaagatccttttcacttcttcttcttcttccttgtgcgctcgataatggctgcttccgatgattcctctcactatttcaccgagtttaccttgtctgaggttatctatgctttctatcattcgttttcttagattagagattcatgctttgtgatcttattgctcttcttattcgaagattgtagacatggagaatctgtataaggagctcggtgaccaatctctccacaaagatttctgtcaaactgttgcctctacttttaggtactttattctgaattttacgagaatttgatcatgtgaatgtgtttgttagagaatcgagacacaagcattttgtggatttataggaatagtaggattattgattttcatgcacagtatctaaaaaatctttatgtcttcttccattttctcttatagttgttctgtgaatcggaatggcaaatcctctataacctggaaacaggtgcgtctcttttttcttcatagagctaactggtaaaaaatgcaaatagagtagaaataacttttttttttgaatcaaaatgttttcaggtacagatttggttccaggagaagctgaagcatcaaagccaaccaaaatccaaaactttgccatctccccctttgcagattcatgacttatctaatcccagttcttatgcttcaaatgcctcaaatgctacctttgttgggaattctacctttgttcaaacacgaaaaggttttccttttcttgtgtgccatatttgattcttttagttaacgccttataacgcctatgaacattttcatacacaggcaaggcctctgaattagctgatctggcttttgaggctaaatcagcgcgggact

SEQ ID NO: 44000 - DNA, 736 bp, Arabidopsis thaliana landsberg
tgtgtcgctcgaattggggcactgtcttaaagcgggaaacggagaatctctatagtttttctccgggagatttcaaaggaaggaaagataaagttttttgttcgtccaataaagaaaaagcaacctcctctctctttagctttatgtttttgtctgtcagaaataacagagactactctgtttaatattttaatctgttcaaaaatatcaggaaagaaatcaactatataaaattgtaaaagaaaacatcaaaactaaccacaaaaaatattatatttaattgaaagtttttatttttggtttcttttttaaattcaattttagatcaatatttcctaaatttagtgagataagaaaagtactaaatgtacaaataatatgatgattagatcaaatctgactttatatttctcactaactcgcttagtatattagtaaatttaatttaaataattaagatgatagcttattatattaacatttttagctatttagttagatacattataaatttagtttcattatcagtgatatataatctggttttgttgatatttttttgagataacacatcttaaattccaaatcaagatgattggacaaaatttgctttacactaataccttccttgtcttcaacgcacaaccaaaggccagagaaacaaaaaaaaaaactctcactgtaaatttgggcttttgcaatatcactggcccaaaatatttgcggtcaaaataag

SEQ ID NO: 44001 - DNA, 153 bp, Arabidopsis thaliana landsberg
gctgatgccatctgggagtctattgatcagaggatggtgatgtggaggaaagatgggatagaagcgaggggggatgttgaaatcgagaaagaccgagcctcgaaccctaagatgactgagcagtttgcggatttgaagaggaaataacacact

SEQ ID NO: 44002 - DNA, 462 bp, Arabidopsis thaliana landsberg
ctatcctccatttgttttttcttctgaagagtgatttatattctacctttctctggttaaagaaactgcctgaatccaccggttatgtcttgaccggctttaagcctataaactgatgccctaagacacctttttaggtttctcaataattctccgcatctatcttttcttctccacaagtaagggaaccagaaaaccagggaagaatccgagcaagctagggtttcattgtgtgcacaaaagtaagatctctctctctaaccaatacttgtgtaatttgtctttgtttctttgagcaaatattgcatgtttgttcatattagccggatccgttttatattttttcatgatctacattttatctttattttgtttgtaaattaatgagtgtttttcttttttctttttctgtttttgtcacgatctaaaaaacaagcgttacaaagaagaagaaaaaccttt

SEQ ID NO: 44003 - DNA, 926 bp, Arabidopsis thaliana landsberg
aagttaacactaaaaaagcttggatgaaatcatgagatttgaacattattaagtccaaaaccagacatgcaaaaacacatacatatggaccaatagcataatctaacagaatgcaaacacagatcatgcataatacaatcgaagaacataggaaactaaattaaccacaaaaaaaaaaaaatggaaggaccagatttatcaaaaagagaaaacctgcagttatcaaaaatcaggaactcggaatatttagggagagaaatttaagaaatggcaatgagatcgatcatagcagaagttctagaactcaccagagtgtttaagcaccagattctgagaaagaccacaacggcttcagttatcgaggaaatgttatgcagccacgatattaaaagtgggacccacctagtttcgttttgatctaagccgttgaatttaataggctaaaggttttgatcgttgacgtgttgataagatatgacccactaagttttgttggtaagttgctacactcgagcttaatttacttgctctttcggattttttataactgtttaattagacaattttagaatttccaaaatttgaaatagtttttagattccaaaatagattttcaaattttgtgagaaaaaataacatggttgaagaaaagggacaaaaaaaatcatgtttggatagtttttcatgggccttaaaagctcattctatttggataagggtttcataaacgtttgccacaaacctgaaattaaccatgcatgcaataatcaatataacaatctcatcaggaacacatgatcctaacaaaaataataatcatatgaactacatatatcatacaatttataaacaataccaatatttaaaacgataatatcatatgtccacatgagtctcaggtatatgattgacatagtgtcgcaata

SEQ ID NO: 44004 - DNA, 163 bp, Arabidopsis thaliana landsberg
ggcggactagaagggctcggtggaatgggaggcatgggtggcatgggtcgtatgggaggaatgggaggcatggaagagttcgaagacagtgatgatgaaggtaatacttttgaagatctctctcgttgatgtttggtcacagccttcttgaaacgaaagcatt

SEQ ID NO: 44005 - DNA, 611 bp, Arabidopsis thaliana landsberg
aagaaagaaaaaatatcataaaagaccagaagaggtgtggatatgcttacttgaagctgctgaatcgaatgtactaatctgtttcttttccggtatttttctaataagatttcatatttttcggagatcggaacaaatttagtcacaaaatgcagaaagagaagaagatgaagagatgtaaatgggagagagagagagtctttttatttgaaaaagaaaatgtggagagggagtgggtctctttgtatatcattgaaggatagttatctaaatttccattatgccccttcttttattcatagggttcatttgctaacaagttttttgggtgttttattcagtaattaatgatccatattcggtgatacatatgcgttattgactaagacaatcaatagactaataaatagaccataatggttctacgtaattacaaaatttggatcggggtatcaaaaagaaactacataactagtgaaacgattaaaacacaatatatacttgcaaatattgggacctttaatttcacttcttatattcattagcttacaatcttatatggtgaaagttgtatgcgaaaataaaaatttcacacaaggaatttatttttc

SEQ ID NO: 44006 - DNA, 738 bp, Arabidopsis thaliana landsberg
cctgcacctcgactctagaggatccccctatgatccgaatctctaatgggccatcatcttccaccggattcacttcaatctgtgtctatcagagtcgacagcaatgagatcagtccgtgtgatgaatgccgtcgagtttcttgaaccaaagaagttccaattgacaaagacaacaaacatggctctactaacattccgctgaagaagattcacaccaacttgaaaaatatatcagtttggactcttcacaaagatgaatgctttaaataacaagacgtttcctagctagtagctaggccaatttgagattctgcatgtgtgggagaagagatcaacaacttagtaaacatgtgttactctgtttcagaagtgacatgttttattcaacgcttagcgatttacatggatctcatcgaaaagattaaagaaaagaaggaaacaaaacagtaaacacagagaaacatttcaaaaaaaaaacgagtcaaaagatccagatcaagaaaccggatctaagtttgggatccggatttgtggaggtagagttttccaaagacgtgaagagcggtgacgaagccgatgaaacagagactcatgatcagaacaaccggcggtgagatcttcaaccccggagcatcatctgtgtagaatctcagcatgttgctcgatcctgatccaactccggatccgccgcctgacgatacgcccaccaccggcaccgagcctgcggcgacgcatgcc

SEQ ID NO: 44007 - DNA, 783 bp, Arabidopsis thaliana landsberg
gaattcaagaatatctaaacatagattgagagatcatcacacatctaaaccctgatggttatggccttactgtcaaaaacctagaacaaagagtattaacaataacgatatgattcagaaaccatacttaggatgattacttttgctatgtttagataacttttcactatttcctaatttcagaacccagaacattgaaaaaaacccatcatttcaacttttagctaactctaacaatcaaaagtggctactttccagctaattatggctgccactttctcccattaattcttaattgcaatctaaaccccttaagttccacaaaacccctggaaattccccattacttttgtttcccgttcccagaagccacaatgaagaaactgaacgaacatcgatctagctgaaatcgtctcagtctactaattatctaattcagcattcaaaaatcaattccaaccacaagagatctcagtttaggaacagtaagtcaacgtagagcaggtacgactaaatccatgattcgtcgacgaaattgaaagagacagatagtattagagttacctgatgagactgtacgagacttgaattgacggaaaaccccaaaccatggtgactgatcggaatcggatttccagaaagaaatcgcttagagagagatgaaccagaggtagaaggaacagaatcagaagacgagtagctgttatctacgatatcaaaggagaatattccgatgacgccaagaatgagtaagaggaggaccaaaacccacatttggatcca

SEQ ID NO: 44008 - DNA, 796 bp, Arabidopsis thaliana landsberg
caataaatgttaaaattttacacatgcgattcacgttgattttattatcatttcatttacaagtttaatgtatgttttgggttatttttttcatgaataaattaagattttgaatgaagacagcaaatcgggtaatgtaggacacataaaattgaataaggcgatacagtttaagtattatatgtgcaagaaaacacagtcagaacaaatgcggttagtgttgaattagagatcaagaataatgcttgaatggtgagaaaataatgagatatgagtataatattttatcaaattttaaaaaatgtttttaacatatcaattttttttgttttggatataaatggtttagttaagttgttgtttttttaaaatgtatttctgaaataaaacgcaccaaaagacacctcattttatgcttcttctttgtaaggtgcatttcttattttctcttcattgcgatttgcgaagatccgcatgtgattcatttattattaaaacataatgttgatgtgttattataaggttggtttgttgaatgataacattaataatgaaccgttttaatacggccttttacatgttcttcattcaaggcttagtttacaaaaagttttataatatttatcgattggactatcgtttccgggttgaaaaatctaacggctacatagtagttctatttgtcatatttaatactggagcattgtaattatgtcaatcaactggcccataatttctttggtttctttggggattttgctttaattaaaatttatttttggcttttcctttttcc

SEQ ID NO: 44009 - DNA, 994 bp, Arabidopsis thaliana landsberg
aagttgaagttgatcattagttaattgcggaaaaaaaaactagaacattaattagttgcgcaacagtgaacagtggcattagcacatataagatcttcatcataatgataaattaagctactagcaagtaacagagtaatgatctagtggttgaatattggcaatgttaattaatcgattgtatagattaattttcatctatctatccacaacgctagctcttttatgttcagctattacaaaagttgtaagtggcataagaatactgtggtcgtgcatcatcatcacacaccacgatttactcttttcttaaattttttattagataggcatacctgcaaatgttactcatataatattacacaaatatttgatacgtcagcttaaatatgtatctgggtaaggtgatcaggtgattatcaaaataaaataaaatagtacagcattacttgttttgttgctaggtaagtttgacgacgaataaaaatatatgtatccaagttcaccaaatcctacgctagctagttggacgacaagactttattttggactcgaaaaaaagagagagaacgtgttaaagaaccctaatcaaagaataaccgatccgatagtagtccactgtcaaaagtgaaaactagttgtgatgatatcagtccaatatacacttaacctgaaatatctatattaaaaacgaactaagaatttggtgtacttggatcaaaattttacatttgttccagcatagaaacttggtctagaaatgatgaaaaaattagaagataatagaatccatagttaaaaaaaacttaaaagaaggttatgtggccaaagctttaaagaagagtttagatactttggaggtagatcaatgtaaattgggatctttgcaaacagcgtgtgtttgttttctaagtttcaggcgaactacgtgtcgttttagctaagagaaaaaagccgggtttagatttcgtaatccgtagacgtcgttataacg

SEQ ID NO: 44010 - DNA, 544 bp, Arabidopsis thaliana landsberg
cttcctctctgtttaccatttttttttgtagaacctaggaactgttgttatgttattatggagttgtaatgtcaaaattcagaatgaagagaccttttgttccttttacaattatcagattctgtctattatggaaaaccaatgaactacctgtgggtcaaatcttcatcgaaattctttgttttgaattgaatgtcttccaaatctgcaaaagctgtcctttaggtttgcattacacaagataaataatcagccttccaaatctttacattcatgttatttgttccgttgattcgtacaagtctgtgagacgcaacaaaaaaacaatatgtagtttaaacaaacacaatacgtacgttagtgatggagaatttgcaaagtttgctggtttcaacattgggttacgaagcaatgtggcggcagaagaaacatgtcaactgatctcaatggtgtgctgtacacagtcacagcatcaaggtgagtgtgacttacaacttcaaatagcatagagatcagaatggatcatagagatctatattaccat

SEQ ID NO: 44011 - DNA, 289 bp, Arabidopsis thaliana landsberg
  unsure (1)..(289): unsure at all n locations
gaatagcgaagagcaaaggagcatagagtgaccttaattcttgctgcgtcgcaaataggcatcgggatgaatacaggatcaaccgcaggggccatacatacacgggcatttgtaagtagtgaaccatcatcaacgaaacgaatataaaatatggataagcgtggatgctgactcnnnnnnnnnnnnnnnnnnnnnnnnnnnnnnnnnnnnnnnnnnnnnnnnnnnnnnnnnnnnnnnnnngcatacgagtgcgtaaaccactgaagatcttgaagcatattaagcatta

SEQ ID NO: 44012 - DNA, 504 bp, Arabidopsis thaliana landsberg
tttggttttatagcattgataaaacaaaacgtcattgaaacaaaaaaaaaacgctaaaatgacctttcatattaaactctaaaacgacttaccatccatctgcatggattaaagatcaatgggtcttcataaagatttgcatcgtaattaatttccctcgtgtatacataaattctccatccttttgggattaaataacctacaattattaaagattcatgatcagagaatactaaaatcaattaaagagaacacaaaaaaggtttatattctgtcaaaattattgcaactgaaatacccaaagatggctcacacaaaagaggatgctttcatagctggatttggttggtattcataatacactctaaatcattgatatacttaaggtccaccacatgctcacattatttctcttcttttatttcataaatttataataaacccgacaaaggaattttgataaaaatagatatattgtacgtaccgttgatttccaagtcacga

SEQ ID NO: 44013 - DNA, 772 bp, Arabidopsis thaliana landsberg
aaatactgcatcggtgacgttgaccagtcaacggttccggtgacgcatctgtatattttgccgtgggagaaggaatctacggcggcggaaacaactaaagaagaatctggaaagaagctgcttatctacttaattcctctcttgatactcggcgttgctttcgctctcagattctacaacaacaagtagaccaaattatgatgaacagattgataagagtttcttactgttcttgattttcgtttgttggtaataacgggcttcttatgtgaagatttgggccatttggcccatcgctcagaattggactataatgtcttatttattttatgttaatgggccgtatcagtaggccctttgttgatatatgccaatcccaatttcttctagcatgagctttgtgttatttacttgattttgataaaacaaccaacttatgcagtagattccatttgacgaaaaaaaataaaaataaaaatgcagtagattccattaaattcgtacttaataataaaaatgggtgagggcatacttacaaagaaggaatgtgtgtcagtgtgtgtcaaaaatatgacacagacacagaattatttttagcaaaaacgttccacataatttcaacctttatactgtcggttattttttgccactttaaagacacagaattcaagatgtcataaaaaaaggacacaaagaaatgaagaatgttggtttttaatttactaattcgagaggggatttattaatcaaatttcgaaatgtaatgttagta

SEQ ID NO: 44014 - DNA, 825 bp, Arabidopsis thaliana landsberg
ctgcctctgttggggacgatcaatcatattctcttacgaatacattatcaaataatgattttggcaaaaatggttttgctttatttgaattatcaaaattaagaaatcaaatccaaaaccaaggatgatttaaattttatctcgattaacaaaatccacgatatatattatttaataatctagagagaggactttaaaataagttcatgatcgagctaacaaaaatattttgcatcgtgttcttacaagatgttttagaggcaattattatataaagtgtaattgtttctttatatttttgaaaattagcataaatacttatcatatgttactttaacaaacaaaaaaaaaacacttatcataagtttcaaagaaaaagtaagtaaccagtttaaatatttggattgactatgccatccgaaaagtaagatgaaaataactaattagtttttttcgatcttccaaaaattttactgaagccaagagaagaaaacttcgattgtgttatgaaaatccttcgcatatgtgtcaagactaacctgatgatgaacgtgacttttgtggagacgcaagagtacagtcgctagacttagagcatgagaccagcacaattactagaagcaaaatcataagtcctaaattatttgccatctctcttcctctcattgttaattttgctaaatcctcttaatccatgtgaatggttttaaattcacgaaatcacatttaaagccggagaaaaggaaaaaaacaaaaaacatctacaaaatgtgacttttctcggctattccggtgttcatttagtcaaaaaaagacattaacaaa

SEQ ID NO: 44015 - DNA, 748 bp, Arabidopsis thaliana landsberg
tctccatcatgctattagttcatttgataaaaggtttgagcaatatcaagcatatgaacatatgtttggtttttggtttgattctaatagattgaaattaaatgtgtgaagatgtagatttaaagtctcattgtagtgttttagaaaaaagtttgagaagtggttatatactagacatcgatggagatgatttatttcttgaactaaaatttcttaaggagcttttgccaaatgaaaatatggaagcaagtgatgtattaaattaaattgtacaatttgatagttttccatatactatgattgcatatagaattttactaacggttccaattaccgttgcttttgcagaaaggagtttttctaaactcaagctattaaagtcatatctaaggacatctatgtcacaagggagattgaatggattagctttgatggcaatcgagaatgggtttttgaaagaactagatgtagaaagtttagctgatgattttgcttctgatcattcaaatagaccgacattattcacttagccgtatattactttctttcatccgactattttataaaaagtatgattttttttgttaccgcaacgagttgcgttgacgcgcaagccgggtttgaaaacaacattgtatatttattaaggtacaaaagcgcactttgtaaattgtttcagttgaaaaatgccatttctccatctttgtggtcaatgtgttcaatgcttgcttgctttttgttaggtaac

SEQ ID NO: 44016 - DNA, 966 bp, Arabidopsis thaliana landsberg
ttttcctccaattattttagacccaaatgatatttctcaatcctagttttagatcgaaactcaaaactctttctttttaatttcatttcattgatgttatgtaactctcttttagttatcgcaagtacttcattgttaacattctctgtagagaccaaagcaatctataacttttgtaacttacttgataaaaaaccaacaatctaaagtgagaactatataggatgtaataagagaaatatatgttaaaagaaaacacacaactcagttgaaactcaatttcatgaaaacatccctagtcttaactaaactgactagagagttaactttgttacttttaagttttaaaaattaaaagaggcacaccatttaactcttggtcaaaaaatatgttttggaaatatataatatgagtttatatatgtattcacctttcactctttttcttcgtcctttaatccttttccgcaatcttgttaattagattttcagctttctttttcttcctttccgcttcatattgtcttttttttcttcttcttttgatcatgctaatttttcaatcttagttattttaatagttcatatttaagttattgcgtgaccatgaaaaattctcaccgtgaaaaaccagcctttttgttatcttttttactttttcatttctctttttcacagaataagaaatagacaaaaacaaagtgttgttttttatagaaagattaaaaataaaatacactaacttgatgtgtctttaaaactaacattgctgagtggagaagttgggcaattgcaatcaatttaatctaaaatataatgagattaatgggcctttgctgtttgtggatcataatatcaaatggatgatattacgtgtgatgaaaggtggaaattaaaggggtcaaaaattctttccgtatttccaggacttcgggtttcttgctcacaattagttaaactctaatt

SEQ ID NO: 44017 - DNA, 813 bp, Arabidopsis thaliana landsberg
ctcgcccctctcatcctgctcgtagtagtctcgttatcgatcgctccggtagataccacagaggtttcgttttgttcttcttcgtcttcttcatcatcttccattagcccagctctgctcgagcctccttcttggattgcttccatgtgctcttgacttctaactttcactacatattcaaaatttcggtttggttgagactacggtaacgtgagatttaagtgaaccggcaattaatttcataatccggtttttggtacagtaccgtataaaatgatctagcttgcatggaagttgaagccgcaaggaaaaacgtttagaagttcaaaaacagattattttattagcttatgaaaaaaaaaaaattgtgagatagagagtaaatcattgttttaatagacaacaaatctaatatacatgaatataaaataactcaagtggaaatgaaaataccaaccattaaattttattactttgaaatataaaaatcatttaaattaaatgagaatttttaaatccaaacgaataaaataaactaaaaacagttcaattggaagtatatgaaatattcaaattcaaaaaatataaaaattgaaattcagttcacttgttagtgagtatatttaaaactaacaaaaaataaaattccaatttattttgtttcttgttcaagtctgatgaaaaatgaaacaactctaatccggttttggtacaatttgttatagtatgatttgattaagctaaatcatgtttcggtagtatcaatttcgtttttggttggtgctaacaaatatgatcatagtacctagacat

SEQ ID NO: 44018 - DNA, 1425 bp, Arabidopsis thaliana landsberg
tttccctaggggcaatcgaatattattgttttgtctaccaaatcgaatattatattgttcattttagtgatagaacgaaagaaatcaccggattgcttcttccatacactaatgtgcatcaccgctctttttcagactcatatatacgtgaatattatatgttttcatgtgatgtatgagaatacacttttaccaaaatgtacagtgtacacaatacaaatctatgtatatatgattctttactttttaaaacagcatacatgtgtatatatgtaatatgttatgtaagtcgtaacagtgtaacaccatgcaaaaaagtcattagactaattaattaaggatccattttgtttctatccatcagaaaaactgtgatatataccaaacaatatcgggtattattacttcaatattacttttttctattttgaaaaccaaagattgttttattctcctatattactgtcgtcatttttttcttattgtgtcaattcattacatcctaatttcggcggtttttcccagacatacccgaagtctatatatgtagcactctccataatttgatgtggcattcattgaagtaataaattcaggtatatcatagtataatcaaaccggccggtatatcatttgacttccatacacaatgagcaaataagcattttttaattctagataatagttttcctctttgactagtatttgatacacgttaatatgcaattggtgtttgtcaccttagtcaaacaaatattttcttgtaaaaaagagaatatgaaaagaaatggaaaattaaaagaagagaaaagtaagcaagaaccctgctttcttccacctcccctcctttgatttattttatcacctttgcttttagtctaagcttttaagattcgttgataatcgtataatgacccaatcaccattacatgctttgttctttccattgagattgttcgttccacagtggcatgcctaccgacaattccaagtcttttcaggggctaagtagtaactctattccaaagaaaattaggaaattgttttgtcacgcgttattcaaaccctagtctgaatgcactatatatgtccattctctccaggcgatgcttgcataaaagggtgcttttggtaattttataacttgtgacttttttttgtatacacatctttaacatacgttgttttgtttactttattaatcaaattaacgagtgtgaaaatttgaaaacctctctctttctcattttccctttttttctctttatctcaagctcattcttcttgttaataactagatctctctttctttcttcttatttttcttttctcttctttagtttcgcttatctcgcggctctgaccagctctcaagttgttcgtttctggttaatggatattgaaccctcttgggatcttgggggg

SEQ ID NO: 44019 - DNA, 880 bp, Arabidopsis thaliana landsberg
tctatatatttcatccctttttcctccaccgatctctgtcagtttctcgccagtctaagaaccaagatctaataagctttggtaaaatcatgtggtaaaaacatttggctatgtttttgtttcattgtttttttctgtttccatcgcaaatatatagaggaagctttcctgttccaataatttctagaataactttctctttaattgtcgtgtctttttctttctaattaattactgcgtctagtccagaagttttgatttgagttgctcttgtttgttggagctcataattaataattactctcactttttcgtaatatatgatccgataggtgaaaccttagaagatcgtccagctaaacatgttgtgtcctctttcgaattctcgaaagattcctctaaattattcaatagtatgtttcactgagtgatttttattcgctcataattgtctataatctattataatacttgctaggcatagacgatgacaagtcattgttgttgacaaagctgtggacccaggatcttatctacacaacatttgtttcgctaaattgattctcatatcctcttaagtctttatttgagttcaagataaacaaaaaaaaaaagataaacaaatattcctgataagcagaatatctagatgaatacttagtatttaaaattatagctttcatacgtgtagattgttgtgcaagatgaatcgtatacattataaagtcctaaactccgttattaagccgacccaaaataaagtcatagatataaccagtgttttctttcttttcaattacgttttgacttggaaagatcccaacttcaaattattttggaggacagggttcaacacttaaacatttgctttctctttttt

SEQ ID NO: 44020 - DNA, 840 bp, Arabidopsis thaliana landsberg
tttaaaataaaatgggacgagttaaattgagggacgtgttaaataacgggatcgataataataataaacaaattctctaatctgacgctttaataaagattaaatccttattttactatttaggaaaatcgtcaaaatatagtaaaactcaacaaatttatattggttctctgattatctattcataatacatacatcagacaaatatattaaatttaataaaataaaattttaagttaatttaaaggatataatttaagacgaaatacttatttccatagcgtataatatttctaccaaaacttaaatatgcaaaacaaaaattttagtttgcaagttctcaatatcaacaaatagccacccaatcaaataaaaggatgagaaaatctatggacatgacatacaagcatcaatgactctctcttaatttttttttgttatgagggaataaaatgtcatttatatccaataacttaattttccacaccttatattaaattggccaaaactgaaatatgaacaaagaaaggggttgtatgcaaattttggtaaatataattaaatagaataaacagtatatcaccaaaaaaaaatagaaataactgaaaaaataattaaaagatgagaaaagttgtggacatcaatgactcttttaattatttttattaggagggaatcaaatgcaatatactaatgtttgcaaaccttataataattaggccaaaaatgaaatatgaaaaacaaaaagggtttgtttgcaaattctcaacaaaaagccacgttatcaagtccttttcacggtgggtctctcttctacgtggcacaatccttaccgggggc

SEQ ID NO: 44021 - DNA, 859 bp, Arabidopsis thaliana landsberg
attcataagaagcaaataatattcatttaagaattagtttgtattaaatgtgccagttggataaatatgaaattgataattggtttaggacattgcacaattatcttgatagccctaggcatgtgggagcctcatgactcatcttgttactaaagtcttgtattagctgtaattccatcttgttatctctttttttgtttttaagtttcgaaaaaagttctctgtagctttctttccaagtcaaagcaaaatcccttacataaacttcaccataagcaacaaacgaaatattactaaatatatttcaacatctgactgcgaccgaaatagatcggtgattgaatataatatttgtttcgtctaacgacacatactcttaaacaaaataattaacgaaaaaatgaaaagtaaagttttcgttttcttttacactttattttaaaaaagcagtaaactgtggaataaattcattaatgaagaaagtcctttaatggaaaaagaaagtcctttaatggaaaaacaaatgttcatcatataactttgacccacaaaagtaaacccaataacattaaaattgtattatcaattttccaaaaaaagaaggaaaaacaataaagatcgagatgaattacatttgctttcactcccaaatcagaaataaacaataaatatggaacatcttccatactttgttgcagaataaagaataagaaaagataatctttgagatcatcttcaaagaataatatgaaatctcaagtactcataggtgagaaggacgctatcttctatttccaccatcaccattgtgttatcaataaagataatgagatgcatcaatataataatgaggagcatg

SEQ ID NO: 44022 - DNA, 650 bp, Arabidopsis thaliana landsberg
gatcggaccaacttgtaacaatgaagtaaactttgtatttttatactttccgaagttacatgcagttttattttttcatgtgtgactaaagcttgaagctccttttatcgaacatataatcattctttgacaaaaaaaaaacataataatttttcatatattttccaaacattttgttttcttaactataattaaacactttaatttggttcgaatatatttactaaaaaattctaacatgttttatgtggatcaacctgctttaattatcagcaaaaaaaaaaatataatccacagcagagacctcagtaattaattaatgatacatattttttttgttagcaaagtaatgatagattttgccttagaataatgcaagatctccatgaggacaaatgtccttgatgtaggagtttagctgcgttttatgacaaaagacaatgatttgtatgaatataatatagtagttctcttctcaaaagtttaattgtttccgtacgacccacacacgttcccatatctgcaagactgcatgcatcatgcatgacaatacacacaaactcctacatacctagagagagagagagagagagatatacagagactaaagagtcaaattgatagacagcgagaagctggaacaatacaaa

SEQ ID NO: 44023 - DNA, 684 bp, Arabidopsis thaliana landsberg
ttgcaacaacgaaaaaaaaatcaaatcaaaatctcaactctagagatttattgttgacccgtttaccgcgattctctcctcaattcgccggtaaacccctaactctgtcggaaaaccctaattcgccgcgacggaaattaccaatactcgtttcctcgtagcattggatttttaaagctgttgattccagctttgttgaggtaaatattatcttcccagatatctatcttctgattctgattttattgaggtaaatattattaatttgattcaaattttgagaagttggtgattcagttggttgatttagggtttcatttgggtactctgtctaggccaaattcgttttgtattgaaaattttattctttggattgcaaaaagttgtcttgtttattattatttggtaaatttgaatttttgtggtttgtcatgttatttgttctttagagctgtgattatgatttgttatttgatttgatgtatgaagcctgcgcaagtttgtgtctttcgtaacattgaatcacgttcaatgtaacatatttcattgcaaaatagttatgggattcaaatccttggttagtggatagaacaccaatcttctaattttacgttttgttgtatgcctattgtgctggaaaatggctagcaatatacatcttattggcagtttttggttgttctt

SEQ ID NO: 44024 - DNA, 901 bp, Arabidopsis thaliana landsberg
ggcctcgaacaaaatttgcttcaggggatgaggataaatcaaatttctctccctttgactttgcctcagctgcccatttctttgatgacctcttccactttttaattagatcaggttgaaggcagagctccatctacagttgtaaaaatcaatgacgatatcagagcaactacaaaatattttcaccatccttaacaaaatccatgtgaaggaaacacccacctggaaacgtccataagacaagctgtgccaagattgtaatcctgctagacttagaacaatctcattaaccaccgcgtcttccaaactctgtaacatcacacagttaagaatattgaagaaaaacaaaatagcacaaggatataatttgtgtacaaacatgaataataaggttttccacgtgaaacaaacaatttactgagtagcacacagctatattgtctgcaattactgcttactatatcatgtattaattttctgatctgaaacaggcgcaacagcattctaaatacttacgacctattcaaaagttacatgcaagaaacggaacaaacctggaaagcattaatcatgaagaccaaatagtttgtcttctcagcaatagtcaagtctcttccctacaatggtaagcaaatgatatataaatatacgattggtttagcaatggctaattatgatttatcactatgcctccaaatatatagcgaagtcaattccaggcataagacaatgttataaatcacaggtacaaaccaaattatcacaaacaggaacaacactagaatcacaaaaactaaaacaacaggttgaatacaaacctctttaaaggcgaaaaaaccttcttgtagaaaaacttttttgaaatagaatcatttcccggatccaatgaaaaagccaaaat

SEQ ID NO: 44025 - DNA, 828 bp, Arabidopsis thaliana landsberg
ttatgaatacattatatattatgtacatatattttataactcgacatgattctaaagacaaaagtttgtaataagtggattatggggtatagaagaatatttatacttcaataataaacctcaaaataggggtatgcgtgtttgatttatccacatcatcaaatgattgatttattgcatgattttaagagagaataatgtcgtatacataaaatactcaaacaaaaattcaaaagttaagtacatatagaaaaatacaaaaaagaagaagagattagagtgacgaaatagaaagtgatggaattattatcaacctgatttattgtaatcgttttgtctttgtgcggcagtctagaagaaatatacgtaaagattaagtcactatttttctcctatcaagattaagtcaccattaatcatgctaaatcttgtagttatattataaaatgtctatatgtatatgaaataatgcccactacacgtacatagaatgcaaacaaatgctatatgttaaaaacacttgcgtaactgtgcaactaacaatttcatttccgcatatatatataatacacgaagatggttacgtagtctctatttaaaaataattaatatgtgtacatataagtaaatccgtttctatgtttaactttagacaaaaaatcgttctttaaaaacgatttctatggtttttgaatattgtcttctttttctgaaaatctggttcaacaacatgtttaagatcctgcagaaagagaagcaaccactacaatcaatggttattatctatggacacttgaaggtggtgatattgatgacaatcatacaaaa

SEQ ID NO: 44026 - DNA, 691 bp, Arabidopsis thaliana landsberg
tgtttgttgcacagagactcaatttgatacattacgttcgcaagttcaacaggtaccaaaaacaccattctttgaatctcttctttttcaagattcaagattttcaaatgtgtgtgtatatttttttttttttttgttatcaggctattccttttattgttggttgtccagcatgtttgaggaactttctgaatcttttttgtgaacttacttgttctccggatcagagtttgtttatcaatgtaacttctactacaaaggtaataactttttgaataatgcattgtctagttgcttcaacgttgagtagctttaagtctaatttctgtgttttgtttggtaggtcaagaataattctactgtagatggaattcagtactatataactgatgattttggagctgggatgtatgaatcttgcaaaaatgtaaaatttggtagctcgaatagccgagctttagactttctcggagccggtgcaaagaactttaagggtagatgtttatttgatatgtctcaagactagttcaattgtgtttacttatcttggaataactgagatgtttgttgtgtcatcagagtggtttacatttattggtcagaaagcgggtgtcaatttgccaggctcaccgtatgggatcgcttttttgccaacaccgcctgtgtcgtctgggaatgaggcctatgaaat

SEQ ID NO: 44027 - DNA, 549 bp, Arabidopsis thaliana landsberg
cttatgctcgtgcccttggtgtaggactcgatcatgtacgggccgtcgccgatcggcttcttcaggtacgcgtcgtggttgtcgaagaactccttgggcagcggcgcgaaggccttgtagcccaggcggtccggccacgtggagaacttctgcgccagcttcaccgtgaaggtggtgtcgtcgacgaccttcagaccggacatggtcttggcggtcggcgtggccttctcgtcgtccgggtggacggccttgtagccgtcgatgtccgcgaagaagtacgagttcagctgcttgttggtgaccagggcaccgtagttccaggcgtccacgaaggagctggaggtgaccggggtaccgtcggagaacttcaggcccggcttgatcttgatggtgaagttctgctggtcggtcgtggtgatcgagtcatcggcctcaagctgggccttgccagtggcgtcgtactccttgaggttcatgaagatcatgtcaaggaccttgccgacctgtaccttattggtgttggcgggcttaagcgggttctgggggtcg

SEQ ID NO: 44028 - DNA, 901 bp, Arabidopsis thaliana landsberg
  unsure (1)..(901): unsure at all n locations
tggaaaacgcttgcgctgtaatagtaaactacgttacttaatttttctttatgtaacctattatgttaatttttaaatataatagcttgatcttgatgagcatttcaagtttaattctcactgctttatatgctaaaaaatctaaagactgaggacccaaaaaagccgattaaaatgtaaatgtattcgatgtactcgtaacaaaagttgtaccaaactttaacgttcaagatacataaatgcaacttatacatataactgagtctatttataatagttgtggaacaaacattatagttagtagtacaaaacataatgtataataaattaagcttctgtttaaatatttagtactcaatagtaaactgaaagataatttcatattttacatctataatagtaaaagtgttattataagcagagtgaatgatcctgttgtcacgtttactgcgttcctatcgacctagacgcggttaacaaagcaacaattgttacttttttttaacacatagtatatatattgatgatctttatcgattgtgaaagaaagcaatgtgtggtaaaaaaaaattgaaaaaatgaaaaagcaaaagacaaataaataaggaatggggaaaagttaatcacgagaggaagaggccattggtaacaagcgggagagtctgagatttgtacaaagtttaatagcgacttctcatttcttacacatttcatactatcttttaaaaagataaaaaagaaaaacaaagaaattccttatcatatcgctttaaaatgttgtctgttcatagtctttttaaaaaatattccantttgttctatntatgtttttntttgttggattggtgttaatgggccaaataagnggtctacaatttatgtttccatttagatttggggt

SEQ ID NO: 44029 - DNA, 215 bp, Arabidopsis thaliana landsberg
cgctgcatgttggtggcggggtcggtggctacggcggtggggctggcggcaacggtggtggtgtgccggtggtcgggggcgatggtggcggcggtggtggcagcggtggtggcggtgtgctggcgggcgggggcggtggtggcggtggtggtgacgatgggggcggcgcatggttggtggagggaggcggggggctgggcggtggaggtagaggt

SEQ ID NO: 44030 - DNA, 596 bp, Arabidopsis thaliana landsberg
ttggaattctttgctgctgcaaatgtttcatcttcatttccacctcctgatgtacctgagattgcatttgcaggtactgcgttcaatatgttgttcccaccaggattatagaaatatcaacaaaaaaaaactttttctgagttttagaatatgcatgttgaactactttaataacactaaactatattaaaaagttgggatatttggtgtcttaactctgatcaggaaggtcaaatgttggcaaatcgtctctgctaaatgctcttaccagacagtggggtgttgtaagaacatctgacaaaccaggactgacccaggtattcccctgtctgagaactacttgcttgtatggcgtacatgtttttgtaataacaaagggtttatgaagtgcagaccatcaatttctttggtcttggtccgaaagttcgccttgttgatttgccaggctacgggtttgtctttgcaaaagatgaagtttaggaagcatgggaagatcttgtgagcatctacccctggctagagaattattatgtctaaattgcttgcccagtttcgtggattaactaaacaggttaatggtcccccatctgtttaac

SEQ ID NO: 44031 - DNA, 225 bp, Arabidopsis thaliana landsberg
  unsure (1)..(225): unsure at all n locations
ggatgcgaggtggtcgtctttcccgaccacacggaggacaggaaggagtgacgccgtgaaggactacgcgtggaactgaccccatccctccaagcaggcttggttgcgacgcctagaaacgccggtgcaccggacagcgaagggccgaccaannnnnnnnnnnnnnnnnnnnnnnnnnnnnnnnnnnnnnnnnnnnnnnnnnnnnnnnnnnnnnnnnnnntgggc

SEQ ID NO: 44032 - DNA, 635 bp, Arabidopsis thaliana landsberg
tatatatatatatatatatatattttactctaaaagacacaaagatatactaaaaataaaacaaagcaaatagctttagcctctttagcacagttttgttcacgcctattgataacgacaagacaacttcaacggagtttgtctcttcctggcttcgattctttgtcttctttcagttttaaatcacacttctagttctatcacttactgtctgtttttgtcgaaaccttctctttctttcttgccctctacttgttttcttttcgatcagttttcgtcactgagggcataatcagatgatttagattgagtcctcagttacatgtgtgtttttttgtttcgatattggtacagaaaaatatagtattaattaaaagaattgagtttgcttggagaaattctctcctacccacctccaccattattttcttgttactgtgtaggccacaatcatagtatttcttaattattagctttgaccattgttgtcgctatttcttcgtccctgctttttttctttttttctacgagtttttttttattgattattactatcagcctaccatcaatttagacgctaacaaacaaaaaaattatatccaaattccaattttcaaaaggttgtatttgggtct

SEQ ID NO: 44033 - DNA, 1255 bp, Arabidopsis thaliana landsberg
aaatcttatttctaaatttccaacgaaactgcactgaaattgatgcattaaaaaagtaagtgggagcataattcaaggtacgatacatcatttttcttcccaacatttgactgcaattttgagggcatagaagcttcaattcctgttttgttttgtccttgggatacataaaccagatcttgtattatattatatttaccatgtactatatagtattcgaagttcattctcattaatcgattcctacttgttttcaaagcaaattagtcagccttactatataacagctgtaatccatagtgattactgattagtatagttaatcctcataatcatacttacgtcacagtagaaaataataatattgtagctatctaatacgtaatatatacacaattctcttcttctttttttttgtcaaagatagtatacacaattctttagatgtatatctaggtatttatactcgatgatttgtacaaatatgtaaatcgaagaacttgatattaattagaaacaaaaaacgaaacatagtgtcgaagaaaaagattattttcggcacaacatcatgcacaatcttcattcgctatagaccttctaagccctagctaggcacaacattggacatggaacggtgaatgttcaaaattatttgcagatcaccatgtaagagagatacatatatatagtctagataggaatgatctgatcatcttagctgatgtttataccaatatgaataggtttatatatgtggcaagaaaaattatttaatggaaactgcctatacatattaaagtatttctcatatatttctgtgaccagctttggtttattaaatttaatacaaaataatagtggcactgatccatagaagccaagcttctctatctttctctttccacactttctttctatctcaaagaagaagaaagagagagagagagagatagaaaccctaaacatcgtgcccttgaagctaagatatcttcagctttgtagaaattcattttgcttacttcattgcgctctctctctttcattgtcttctacctcttgcctctaacagaagcaatacttttcggcctccaaggttcgtttctttcctcatccatcttatatctttaattgtcgtcatcatcatctgcatctacatatatatacacacacgcacttcctcacaacttcctcatatatattatgggaacttttcggcttaaacatctctctattttcatttcttttttttgaatac

SEQ ID NO: 44034 - DNA, 556 bp, Arabidopsis thaliana landsberg
acctcagcaactacggcgagaacaaggttgatagggatgttcttgccaatgtagttcaatgtgtttccatcaagaagcaaagcaccagtctgcaatcagtattccaaaaagaaccatctcatcacatcaacacattcttgctttgctaaagaatctaagtctgaatgtaaataaagattagacgtaggcaagaaccttaaaccagacagcttcagggccacagttagcgccatatttgtttaaagcttcaggaatgatgaaaccagctgctcctaacatagcccatctcgcatggatcaattcaaaagcttggtatctacaaccacattcattaaagaaccaatcttaatgacaaattcgatagatatagctcaaagcaaacacaaaaggtttaggataaaagaatctacttacttagcaaagttctcaggcttctttccaagaccaaatgggtcataaccataactgcaaattcagattcagaccaataaaccttaagcacagaatccaaaagtaggcatacatacaaagagagacatgataaagtgtcttactc

SEQ ID NO: 44035 - DNA, 924 bp, Arabidopsis thaliana landsberg
  unsure (1)..(924): unsure at all n locations
taaaagttaaacaaaaaaaatcagctgacataaacaagttttttataaaggatgttgttttgtttgacaaaatttagacgagaacgttaagtttggtatcgatcataacggtatattatatatatatctttatttatttattattatctttttattttgttaaaggaatttacacattgtttctgagtgggttttaaaaagactttttaaaaacgttccttttcaaaggggctctttaaatattggccttatgttggcacatgcccaagttaaaaacttaaaaccaagttgcatctccaatagcgacgcaacacatatatgcttaatgcctaaacccatatattatcattataccttttcctttctctttaaattattgagaatttacatatttcacaatagtttaaaagttcacaagatttcatatttatatcctatatattcaacaaaataatctaaaattatcctacaaattaatattactttgtaaaatgaatttttgaacatccacatttttctacaactagaaaaaataaaatatatctttttttaaacaccaatatgtatctagataaaaagaaatcttttcttttcattttgtcttgtgaaacaatatctgaggaaatctttgttctttgtttgtaaaattcctcacctcctaaattgaattagtcgatcgagtatacgaccctacgaacatggctatcttgctgggaccaaattaaataaaagctttcacatcattttgatgaaatgtcaatgattttgcttctatatatactatcttggataagataccgntataaatattaatcgtttccattgcgacttaaggtcagcctacaagcctagcctctatctccagacaaatctttcacgaataagtctatattttcagataaagtatattactttcttaacatc

SEQ ID NO: 44036 - DNA, 682 bp, Arabidopsis thaliana landsberg
gacgcagatcaaattataaggacagacatgggagaactgtatgatatggatattaaaggaagacctctcgcgtatactcctttttgtgacaacaacagggaaatggatggctataaattttggaaacaggtaaacattaatctttttgttttgcttgtagaggtagttttggtttccatactcttacattttcaattgctttgaacagggtttctggaaagaacatttacgtggtaggccataccatatcaggtaaaaaaacctacttgaacctcagtaagttgttgcttttcccattcttaatgtgccttgttctatctgtagtgctctatacgttgttgacttggttaagttccgagagacagcggcaggagataatctaagagtattctatgagacgcttagcaaggatccaaacagtttgtccaacctagatcaggcaagttgtataatatggttctctatacttagggctgtaacctttctttggtggtcacactatcttttactttatttgaaaggcttttgcatttgactcttaccatacaccatgctctgaatctttagagttccaggttcaaacatattgatggcatgtcattatttttgttcaagatcttcctaattatgctcagcatactgttcctatattttcactttcccaaaaattgtttgtggtgtg

SEQ ID NO: 44037 - DNA, 433 bp, Arabidopsis thaliana landsberg
ggagatggttgtgatcaccgagatgttcatgtttatattcgaaatttgattctgatctctaggtaagtttttctattgcatgtgtttgtttaatataagcatttattatataagtgtagatgctatgactaaactaatttagatgttgtaaaccaaacaaacaaacaaaaaacgaatgaattactttctatattattaaaattttatccaaaataatatgttcaaagatcgaacgttttttttttagttattattaatgatgaaattttcattaaaaaaaatataagatatatctcaaattatttaataaaatttaagagtaaatgatcaaattaattcaaaacaaaaataaaacgatgggatatactgaaagagtaaatgaattacttctatgtattatatttccgacgtctttcttgatttttacaccaaa

SEQ ID NO: 44038 - DNA, 658 bp, Arabidopsis thaliana landsberg
agacttttttgagcgttagcctaccaagtcagattcatggggccacggtatcatttaggaaatggaccgattcaatttaatgttgtctttaagtgcgatgtgaagagctccctaccaatcggacacctcccatgccttatgatttctctataactattgattttattcggaaatactataaatgttacacttcaatctctgtatatagttaatggaatggaattggaagaataaaaagcatcacatcaaattccagactctgatttgcataccctaataaaacatgtactaatgtaacacaatcatattgggatttagacttaatttacgaatgagaaagcaaaaaagtgtgagacaaaacgaggttgttgacgaatttgactacgatgagaccccaaaaaaaaaaaaagatgttgaccaactttttaagactgtatggttctgaatattcagatattttgggggttaaaatcgaaagatttgtatagttaagggactagataaaaatatttaagtgcgaggaggcagttgagggaaccacttctgttgaagtctgccattttcatatatttgtaaactgggccagatagatttatagtgatcaaaatgggaccaattgatttttcaaattaggacaatatatgccgcctctgtattt

SEQ ID NO: 44039 - DNA, 707 bp, Arabidopsis thaliana landsberg
gttggaaaggttagtgaaacagccttacaaatctatgatcgtgacttctgattccttataaaaattgattcgttcgtgatgttttaatattggaatagtgtgaccttttctatgaacatatgttactgcgacagttcattaataacgcattcattttttgtataaacgaatcgattagtgttaaaacaaaaaaagaagcaaattgtgttgtaatacaccaattgaaaaatgcgtaaattaaacacaatcattatgtcctcatgacctcgtgataatacgtaccaacaaatccgtttcgatggctttgacaaacacgaaccatacataataacaccacataattaaaagttttttttttttttgtcaaattaaagtaaaatttctgatggtgaaactcaatcacaaaaccaaatataatatatatgttatgttcacatagattttggtgcttaccttctaaatcacattattaattctcccgttgataattaaagagaaccctagacttcaaaaactcttaagacaatcacacgtacgcgtgattttcaaatagttatttccatttcttttgactttctaaagccatatataaagaataatacatattttcttatttcaaagtaatccctagttaacaaaggggaattcgtcactctcttgttttgtttaaatcgcaaaactcttctgttttattttgttttttacat

SEQ ID NO: 44040 - DNA, 545 bp, Arabidopsis thaliana landsberg
agacttggagattatttggtgcaaacagctaagtctttaccgtatctgtatgcttcaagtcccatccctatgcttccaaacttgaaggtgcatagtatagctaacccagctggattcctgacctctcatttatgaacatatgagcactaaagttttatgttaacaaagaggaagatgtttatttatgcttaccaatcaactagagcaagaattggcagatcaggaaaagttgtgctcatccggtggaggaaaaacctaaaagatttaacttccaagctacttaataccagtgactacattgcaatatggttttgtaactgagttgaagaattgaccttgtggcaatatccggataccctttcgctgtgatgaacacgcaaggaatgtgattgaacacacgatcttccacgagccgatgaaagatcgcatgctaaaaacagattctaggagtgagttacagacaattacgacatctctcatatgtgcttgattacatcaagaagctacctttttcacaataatgatataaccgagcatcagttctc

SEQ ID NO: 44041 - DNA, 887 bp, Arabidopsis thaliana landsberg
  unsure (1)..(887): unsure at all n locations
agccttggattggcacatcaatgccacggaatgttgaaatcccaagctatcatacaagaaaagagaaagttttatgtacaggcatctaaaatgccaagtttaagattcctgcaacaaagcaaaactccaaggatatgacttcagaaagttattcaaggggtgtagaaattacgggagactaacatttcatatcttaccaaactgaggcagattgcgttgattttcgaaaagagtttacggttattgtcaacaaagtttgcgaaacctgtatcacacatttcaacaagagtttcaacaaggtcagaaagtaggcagcgataagcatatatatttattataaacagaaccattttgatccattgtcacgataaagtgactgctaactatttaaaatggtatgtattcaattactttcaccagagaagtaaaatataacaaatggcgctcacctttgaatgattctcgaataacctataacagaagaaaccaagtatgtcaaagctcgattttaaaaacgtgtgcaaaatggcaagtgatagaacttcatgctgaaatgactgtttgtgaaaggttcatataaacatcagggaaagtaacaaataatagagagtaagctttcttcattttcaaatgagccacgcaacaaccctattataatttccaataaagtattcacatatcttttggcaacaaccacctctgcaaatttagctttcacaattgtaccgtatatcagaatttatattgattcatcattgcaagaacaggacaaacnagaagattgtctcaccttgccaatgattaaaggaattaacagagtaactataagacttctgaatagttggtcagtaggaaacgaaacccctactcccccagctatgtatctt

SEQ ID NO: 44042 - DNA, 383 bp, Arabidopsis thaliana landsberg
gaaaaacaaaaataacaataaaattcctcaataaaataataatccgttgaaagtcgtcgttcaaagttgggtttttttcttcatattataaaaaaacactcgttcctcttcttttctgagttgctaaaatgccaaatcaactcatataattacacataaaaattcaacatttctctctcaaatttcttcattctttagctccaaaaaatcttcattctttcattctttttcctaaattttagccattgcccaaaactttacagaggattttcagacaaacaatgacaaagtgtcggagaagaagattacatctaagcaatatatacgcatttaaaggtcgtaaatcaaactttcaagaagatcattcacacataggaggacct

SEQ ID NO: 44043 - DNA, 861 bp, Arabidopsis thaliana landsberg
atcgggttttctcggtttaagccaaccgaccgattcttactgagcatttggttcgcacaacttcctgtgtgttccaaccatcgtctggtctcccaacaggtacacataatcctttgatatttagttattgaagcaatctatattagtagtaaatatatacaaattttatgttaagctcaaataatttctttagtaccaacgtttgatttccctatgatcagaaattttccacattatttttactcaaaaatataaatatctaaaatatagaaactccccagtcacaaaagaagccgtgttggagctagaagccacgggaaacctcgtactctccgaccaaaacactgtcgtctggacctcaaacacgtcaaaccatggtgttgaatcagcggttatgtccgaatctggaaacttcctcctccttggaacagaagttactgctggtccaaccatttggcaaagcttttcgcaaccttccgacactctcctcccaaaccaacccttaaccgtttccttagaactaacctctaacccttcaccgtcgcgccatggccattactccctgaaaatgctgcagcaacacacttcacttagcctcggcctaacctacaacatcaatcttgaccctcacgcaaactactcgtactggtccggaccagatatatctaatgttacaggagatgttaccgcagttcttgacgataccggaagcttcaagatcgtttatggagaatcctcaataggagcagtgtacgtctacaagaacccggtagatgataaccggaattacaacaacagtagtaatttagggttaacaaaaaatccggttctgcggagattggtattagagaacaacggtaa

SEQ ID NO: 44044 - DNA, 290 bp, Arabidopsis thaliana landsberg
tttatttctaatctgcttttatgtccgtaatttttgcaggtaagcaaaaggcgtgcttcaaggctataaaaacaaaccagttccttcatcgcaatcgtaaatctcaaacaattgacgaggttaattcctctgtgatatgcctatttgttatgtcagtaatgcattagtagaaattgtacttgtgctgtcactatttcttccttttccatattactactcagctatcgtgttcccttctattttggacagataatggtttgtcactgcaaaccatcacctgatggtaggtt

SEQ ID NO: 44045 - DNA, 717 bp, Arabidopsis thaliana landsberg
cattcaggttctatttttgcccaagcaatgcccatcattattcagccatagatcacaatgacgaaatactatttaatatcagattgtgggcattggtgttcattggcatggttatcagaggtgatctatttttttttccttttttagccgaggtgttctcggttgttataattatgattctttctattactagattttgtcacctcccacaagtcagacagagagtgaggagcaaaggtcatcgtaggggaaaaatcaagaataaggattacctccaatagtccaattattatttagttgttgtctttcactctcgagccttgtgctcacctttcttctagctgcatctcctatctctctctctgctatatagtactagtatctttttatatggtaggcaatcattctcctcactaacagtattttcccgacaatcttctcaatgattatatctattatatatacgctgtgtttaaaattcttttaagttccaggctttttaacttatgtttggattcaataccaataaaatttgtcgaaaacgattcaagcagacaaaatttgtaacaattcatttttagtgtgagggtaataaaaatcaaccgatgcaaagtcactgtgatcaaaatttgaggatttatacttaaacctaaatacaagtgattgataaaatgttcgtttaaagttgtttgaccaaaagaaaaaaatgttcttttt

SEQ ID NO: 44046 - DNA, 370 bp, Arabidopsis thaliana landsberg
ttcctgtcttgagatgaggcatacggtatcttcctattttttacattcttgagcggccttcactactacaagcttctccaagcttccttcgaaaggaggctaactatttcacattacggcgcttccgattcaactagtttgaagcacagaaaccaccgcctgttggacatcaagatgcacatctagaggaaatgagattcaccaagctctaaaaagcagaacccccaacttgcctttatttgaagcattgtcacatcccaccattttactccaaggcctgctagacacccaaatgcccatttaatccgagctcaaggaaaacttgcgggatacgtacattgggaagcaatatgatcctgacatacattat

SEQ ID NO: 44047 - DNA, 790 bp, Arabidopsis thaliana landsberg
ccccccccccccccccatggagctccttgaaccacacatattttatgaaacaaaagtcaaactattcttattgaacaaaaaaatatggaaaaaaataaaataataataaatatggcctcttcattactcctcaaacatttcactgggatcaccaaacacaaaatgtaatgcaatatgaataagtaaactcattataatattcggcctaacaattcacttataatattgaggaatgataaatccaacaattttcaactatatgtcataatttttatgagataaattaaagatacaaatgattaatttacccatcactaaaaatattacaaaggatcatttcattttatttttatttttgatgaaataattaaaatctatatgtaggtgaaatcatggaatcctcaacattttggactgctacgattaacaactacaagaagaactactcaacttttctttcattgtttgctttgttgatcttttcgaattgagtcttaaacaaatactcacttggattagtctaaaagcgtttgaatatgttagagacacatttacatggtcatcaacggacaaaatccaataatagtcaaactttgagagtgtggtagtttcaatattcttttggacggctaagatcttagtataaattaagggaagatccttagatccgcgaagttctcctaaaactatggaaatttgtcgacagttgtaatacggaagagtcgacattgccttattcgtatctcagttataaaatataaatcggctatatagtggcctaatcaaatct

SEQ ID NO: 44048 - DNA, 413 bp, Arabidopsis thaliana landsberg
actgggaaagtaattgaaataaatatttagtgatgtaatgggccattttgttcttctctatgtcaaatctcgtcaggcccagaaggcccatttattgtgtgttgtgtcaaacccaataacattttagagtacacttcggatagtaccatgattcgatatgctaattacctttatccgatctggactctggagccgccattgggtgtaatatctttgatccaaaatggaaaaggtctagttcttgagcatgagtcttaattattcttctttgttctttttccatctagtttatgtttcttattcttgtttgctacaatacgactgacataaaccctcatcttctcatacaaaaaaaggttcgataccatataagtgatgcatagaacaatagatgaatatattgttcactcaat

SEQ ID NO: 44049 - DNA, 859 bp, Arabidopsis thaliana landsberg
aggcctgagcgttgcacatgcaaaatttaaagttgataatttttttttgatcaattttaaagttaattagttttatctttaataaagaaacagtttgggaaagggaaaatagagaaacatatatcgattctctttctctgagaaagtttctcatgttgttagaggaagcactgaacaaattcttgagggtgggatctctttagttgtcacacatgcaacgaaaagagaatgctgatcttattcaatgacaaatagcaatcagtgtagcctaacacaaagaaaagagaattagatacaaacaggttaacagaaataaaaaggaattaggtacaaacaagttattggcacttgtgtgttttatttttgttattgatgaataataaaattatttagaaaatttaagattgagagattgattgttatctctaaacttacctttgaagatgttgtaggctatgtccatgacttgttttaaacttttagttagaaacgaaagacatttgtaaaagctacaaatcacatatagatttgaataacaaaactgtattttatggttgtacgaaggagaaattgtgggaggagagatgcagatcctaggtagaagactataaaagtactagagaaattaacatgcaaatccaaatttaaaattcataattttgaaaactagaagaaattgtgaaatagaaaattgggtgaacatgggaattccaatttcttttactcgacagaatcgcaggaagcggcaatcagaaaataataatgttgtttcattgttgaatatgagaagggaaatggaaaatcctaaaaacgtgggagaaaaacagttaaattgattttatttttaatttggcaagtt

SEQ ID NO: 44050 - DNA, 556 bp, Arabidopsis thaliana landsberg
  unsure (1)..(556): unsure at all n locations
tattgatggctcgggggtcgttatatctacctcaccatcactcgagcatatctttgctatctgtctcccaatttatgcaattaccgcttgggggtcattgaggcggcactcagtcttgtttgttatctcaagggtacaccatctcaaggtattcttctttgttcaaatagtcaattatctcttatggcgtactgtgactgtgattatggggcgtggccgcttacacagtgttctctctacctatattannnnnnnnnnnnnnnnnnnnnnnnnnnnnnnnnnnnnnnnnnnnnnnnnnnnnnnnnnnnnnnnnnnnnnnnnnnnnnnnnnnnnnnnnnnnnnnnnnnnnnnnnnnnnnnnnnnnnnnnnnnnnnnnnnnnnnnnnnnnnnnnnnnnnnnnnnnnnnnnnnnnnnnnnnnnnnnnnnnnnnnnnnnnnnnnnnnnnnnnnnnnnnnnnnnnnnnnnnnnnnnnnnnnnnnnnnnnnnnnnnnnnnnnnnnnnnnnnnnnnnnnnnnnnnnnnnnnnnnnnnnnnnnnnnnnnnnnnnnnnnnnnnnn

SEQ ID NO: 44051 - DNA, 123 bp, Arabidopsis thaliana landsberg
ctagttcccatatgacaaagactactgcatcaaccctgttcaaaagcaaactaaacgaatagcataagggcgactttttaatgttcattgggcttattttaacaatagaatccagattgcaac

SEQ ID NO: 44052 - DNA, 272 bp, Arabidopsis thaliana landsberg
gtcgcagcttaccgacggtgcacggcggatgcgcttcagaccgggcgagtagagccaggcagcgcggccttttttaccggtcgaggccttttcaagcaccggggtgaatgtacctgccagacgcggttgcgcaaccgtgcgcgagagatagcgcaggaactgcttgtgaccggcgtcgagcacctgcgggtgcttgatgctggcgtagtcgaactgcacgtcttcgatgatcttggtcaactgatagctgccatccggctgcacgatcatct

SEQ ID NO: 44053 - DNA, 792 bp, Arabidopsis thaliana landsberg
ttcccctattattttttataaaggccaaatgaaatggttaggcaaatttaagagacttcggggtaagggaaagtggttggatggagcgggtaggctatgctaatcacgtgactcccaagctttccatttcaatcttcaccatttttaattccacttttccaaataaatctatacgactatatccttttgatttcctctcgttgaaatttttagttgttaccaataggtttgttaactttttttgttactcttatttcctgcttaaggtttttactttttagtctatgaattgtttggaaatcaataccaaagcaatttaatagtagtataataataagaaagtagcatccaaatctttcaattctgtcccaaaaaaggattgagctatatttgattacaaatctgtactttttcttttacagcaacaaatctgtctgactgaaagaactcgattaagtcttataatttgtcaacattaatttattccatatttctgtttataaaatccccttaagtcttcaatagatttggtaaatttgtattcagtttttttttttttgctagccagcttttggttcatattttgcggagcgcatacctgttgcactgagaatccagcatctactgtatattagctggtgaaacacgagtttagagacttattcattgcacacgatctatggcaccttgggctaatcccaaccaacagtcaaacggctttttctacatataacaaatgcattaaagggtccaatccgatgtttatttatttaatgagtacaactcttaatc

SEQ ID NO: 44054 - DNA, 969 bp, Arabidopsis thaliana landsberg
ttgtataccgttaagtgcttcgtttccgccttctttgaacaagaatgaaaatgccctcttcctataaaatttgcatttcattagatgtttgtcatcaaggaaatagatacatagtggtatagatccaaaggttgttatctatacctgaaatcagaactagaagcagcgaaaatcgataagaactgattcacagaaataccaacttgaagatcccaccatggtactaagaactcaagcttgtccttcttgttcttgcgtgcttgccattgcactatccttaggttgcttggtactgttaaacctcctcctacaaaaaacaatttagatacagaaaaagctgtaatcaataaataagacaacaaagcaactcaaaatctaaaagcaagggagaagtgtgtgtacttgagcaagggaaccaatgatcaaaactccaagcaagaggagaagctgaatcagcgtggaagtaaacaacattcccatatggatcaatccgaataacagctggatcaaatcctgcatttctgcaaacataatcataatcataagaatctgaaaattgactactagtgtgttaagtactgtgaagagattaagcacttaccctagatgattaagctgtttccacaagagactgaggaagatcttgggttttgttgttggtctcgctttcggatcaatcactggaaacatctgatctacttctctgcatctcaagctctacaagacaaacaaacaaaaaagataacttttgtcattacagagaagctaccagttattccaaaaaaaaaaaactctaattctaaactcaatctaggtctggctaaaacatgaatggatcaaattacctcgttctgctgaagaatgtatggcatgaaagtgaaaggaggaccatttttgtaaggaaaagcatcaaaatcgcgacagatcttagtgtaagctctaggatagccttgagcttcctcgatcacc

SEQ ID NO: 44055 - DNA, 663 bp, Arabidopsis thaliana landsberg
ctgtatgatataaatactacataatactaaaaacgaataatatatttaaaatcaagtaaaggtaatctctaaaacatatattaagaactaagatagaaaacatatattaagaattaagatagaacagaaagaaattaaaaatgtcattgacaaattatatcactagttttattttttcaagtcctttaccaatatatttttgatatgtatgaatttcaatgttcctttatattattatcaaaaataataaaaatattttggtaagataccgttgtcgacgttagctgagacatggtctggtgatctgatagctgatgacgtcaagtggctccaatttaccctgagttaaatcaaataaaatacgtcagcatcatttattactttagcccacataagtccgtccatgtgaccactctccgcttccttctcctctcattcatctacgtgtgctacacgctccatttttgtcaatactccttctttttaactattgttttcaactccaaattaattacctaaacctgtaaaaaaagttcatcaaaaaagactgtttttcttcttcttgtatattgcatgtattagtaacaacataatttttcaaaaaaattctaaaactaacattgatttagttgactacaattgttcatattcatgtgcggtaga

SEQ ID NO: 44056 - DNA, 468 bp, Arabidopsis thaliana landsberg
tatgagtcacatgatcatagtgctaaaacaagcctatgttcattgacatatgactgttcagtgccaaaggactaagagaaaacatattaatttaggtgagaaaacggctatcatcttggacctcaaaaggatactggcaaccaagtaagactttcggcgatctgtagtaacgactctgtagaaagattgaccagcaagcttaggtatttttttgttatgacataatctagcagatatataaacagaaagcaagaagaaacctgagtatatgaataaacagttctatcttacatgcacgctgatccaaaggcacttatcttaatttcagttggcttcacactgataaaattaaaaagaaaacaggttaattaaagtttttaactaaaattttgataggattggtgctagaaagtagacctggcgcacagaagaatattctctggcttcagatcacaatggattatgcca

SEQ ID NO: 44057 - DNA, 669 bp, Arabidopsis thaliana landsberg
  unsure (1)..(669): unsure at all n locations
tacaatagatataataaattacgaaattaattaactgctcaagattcagattcagctagtttacattaaaacgaaaatcaaaatactcaagctctacattttcattatttttaccataacaaaattcagacaaaaaaacattgatataatgtcatcattctagcgtcacagcagtgacgtcatgaatgattgttgtccaaggcttacgactgtgtcatctcagcatcatatcagtaataagtacttcgaatgagattgtttttttttattgttcgtcgacttcggaagagaaaaaaatgagattaataactgcattgataaacattacgatgacagtaaataaaataattatttttgacaacaagggtttgattaactatctttcctctttctttgaccttttcaaattgtgtttacgaataaacattatgataagtgacatactaacgtacaatatttcaatgttgacttttaaacatacaatataaaatataagcgattgtgaggagtgacagagaatacaaaacgaaccgaaccaaaccgatctagctaaatctatttaaattgttgttgatagctattctccagttaaccgaatccgcaccataaaattcanatctctgtttggtttggaaaagcccattctgttcttgatcgtagtcctaaata

SEQ ID NO: 44058 - DNA, 849 bp, Arabidopsis thaliana landsberg
ggccataaacaattatgttcatagatttccttcttacactattaaattcccataggacatctaaatgggctttttactgagccataaacaattatgttcatagatttccttcttacactattgaattcccacaatatacacatatagatttccaaaactttcccaactcgtagttggttgatgatctcaacgtcaaatatggcccagcgttatgcttatgccacctgttgcatctttggaattccgttttcatttttcatcatcagagataagaagaagcatgtagacaagtgtgggtagctgctgcgaaaagaagaagagaggaagtattaggaaaatgccaccgctgttgaaacttaagttgatgcaatcagaatgagacgtatgtactgtacctcattaaaatgctgcccttgtagatatttatgcaaatattattctcctctcttctcttctattctgtgaagaaagcttcacagcaacacaattgctgagggagtctctcttcctttaacacgcaagagaaactgacaagggggaactaatatttgataagagcaggaagtgatgcatgaagttctgacaagcactggaacatccagttcagtaactgttctcttggtagctccaacagaagttccgcctgcacatatcatgtaaagcccttaagttcatcttaagcgtctcctgaaattgattatgcaaaaaccactaatttactctctttaagtaccattatttgatctccttcgtatatcaaggagcttcggtaaacgtcacaagtcatggaatctgtgatcagcttgaacaccttcttactcatatttgttttcatgacgaccatcttgc

SEQ ID NO: 44059 - DNA, 864 bp, Arabidopsis thaliana landsberg
tagtgagaccgttttctgttttcttgtctcggacaataaaatcaattcattctggctacttatcaaagaagtcttattatagtatgtgaatttttattttttttattttgttgttgcaaacttcgtatctagaagaattaagcatcaaactgatagaataaagtatatatatcttcatcttccttaaaattcactgtgacaagggctaaggtcttggcgaggctctttcaaatctaaagttttcctggtttgtcattgatttctattttgtacatcaaatcaaaccacagagtataggagaaaactatatgtattatggaatactttatttcaattctatccaaattttgaatagaaatcattcaactataaatttatatccctgtctaaacaaaggttagaaataattttatgtcaatacaaccatacattctataatctaattgactacatactaattgatatatatatcccgtgatcttattatgaagtgattgccggatggtataggaaagttgcaacgtctaaaacatctcaatttggagatgacgaagagtattgatgagatatcttaaattcaaacttttcgtccgatgctagcacaatagaggagctgcattaacgattggaactactagaaatctgaaacataatatgtcctaagttcaagaatttataaacgcaccttataacttataacttttagataaaatctaaacttcaggaaaactgcggactatctaactacaaaaagaacaatgagacatatattttatctggaaaacaatatgcaaaaatacatctttggaatgctcctaaaaaactaattattatttttgaattaaggacacatttctctttttg

SEQ ID NO: 44060 - DNA, 807 bp, Arabidopsis thaliana landsberg
gctctattggttcgtgtcccagttggatatctcttgtccatgtggctagagagataccattccctctcgtctcctgtccctcttccacataactctatatgttcccagaaggtaacattttcagcagtgattttgaatgagaagaatttgagtttttattagtattagtagtatatgatataactgatgaaatcataatgaatgttggtaatgcatacataccttggatgtcccatggctcgattttgtagagatcaacatctttgataacatcaacttgcattcccgggaatgcaactttgttcttgagataatagtcaacgagttcttcatcggtcggatggaatcgataaccgggaggaatgtgtgcgagactttccatttgatctttttaattttatattttctgcaatgtggcaatttgtaacacatactttatcatcggtacatagaaaagatatgcatagaagtaatgtgaaatcaagttttcaagtaactaagcatatgtaggaaaaagattaaagtatatttgatccgtttcattatgaaaaaggttacgtttggttactcataatatctcggctgaaccaactataaacacataaaaactgataataaaaacaaaaactactcactttacaaaatcaaaaacaaaagttagttctgtgcatggttacataaatcacttttatgaaatacttataattatatatacgactgtgtaacatcttgacaatcataaatcatatacatggtttctctatgtactgaaagaaacttacttgaaaccttcttcttatttatgca

SEQ ID NO: 44061 - DNA, 539 bp, Arabidopsis thaliana landsberg
actgggattgttgcgcttgcatggctgggattcattcttgcagctgcaggattatttttgttctaccgctgttttaggtatatgctcaccctgtccttgctcgatttccatttcgtatatcttctaaaagtagccatgtctgctctctgttgctatctgattattagtatacagtctctctagctctagactatgcataagtacactatgtctcacctgacggttgcagattaagatattacattatagtattctaagccgattctcttgatggttacattcatcacctagcgatagcaggctgtgaccgcaggcctttacttcgttccagctagagattctatcgtgaactccttatttgtccatgtagcgtaaatacctgcgtgtcacaagaagcggtcttactgattgatttatattggaattttattttttctgcaggaaggatccaggttacatcagaatgaatatccatgatccgcaaaccatgaaagatgatgttagctagcttattgattctcaggttaacttacataatt

SEQ ID NO: 44062 - DNA, 677 bp, Arabidopsis thaliana landsberg
ataattttacagatttaataatgtatctaaatatgaatattttggcctcagcatgttaggttctctcatgagagtttacaagcccttggccgatcttatgttgttttaagtttattctgacacctctttttttaatacaatctcctgtgtgctctgattgacagcattgataccatgatcatataaccgttacatgtttctgaaatcaatctcaaaataattgcttcatagtaaaaaatgattacaagattcgagtttcatttattatcgttataacactcactgtctcattcgtcaaagtctttaacaaagtcaacgaacgaccattaacttgggctttctctccaccgacgcgccgctctcagaatttccacttactcattgtctttatattcaaaaactcaaaaaaaaaaaagtattaagaatggcttaagaccgaaacgtgttttctcctattctggcaaaacacaaaataataaatataaggaaacgcttatgaatacttttaaatattctacataaagtcattgaaagaaggattggaacaaagtgagaagcaacaaacagaaatcaaaatcgtaactcctaaacaatacgtttcttcattggcaaacggttttgattccatttcgactcgaatgaaaaaaaggccaagagtattcatgcaatttccgtga

SEQ ID NO: 44063 - DNA, 846 bp, Arabidopsis thaliana landsberg
attcgaatgcttcttggattccgtaaaagcctggtccaatggagcctggccctaaagtattaagtgggatgatgacatctattttgttgctgtcacaaatttgaaacgttaacttcatttggtgaggcatggttgtgagataagaaacatcgtcacttttgttggttgcagagcgatcatttcccgttcatatactgtgtcgagaagttggtgactgaacataagtatgacaagtgggagacgtgttatgagaagctcaatctcaactcgaaacctgttgcagattgtctcagcagtggacatgggaatgaggtttgtcccttctccttgtgtagcttgcttgttttgccacaagttcttgttgctgattgctttttagcattggaacattcggttaccgtatccatgataccgttttgcaattgtattgtcttaagcataggcttatccgatttaccatgttgttgttttgaagcttctgggttatgattcacagacatgtgcattcaatttctaatctttttatttctgcagcttgctttgcactatgctgcagaaacgaatgcgcttcagcctcctcacaagtatgtgccctgggtagtcgtggatggtcagccactttatgaggttcgtttattatttgcttcttttcaagttcttctgcagtgctgaatacttacatagccaatccacacttccttactagttgtagatgaatgatattgttaggactcactggtcagtcattgagacttacgatttgcattcactccagtgattgatttgggatttggttttaaatcactttaaatttaaggcctttagggatttggatcatctttaacc

SEQ ID NO: 44064 - DNA, 803 bp, Arabidopsis thaliana landsberg
ttcgttaactagattaatgtcaacattccaacacagccatcgatgatgatgatgattcatcaagaagaagaagagatgccctcaaaacattcaatcgtcattagaagatccaaataaataaatcaagacaacttgcttgaattccattattcatattatcattagtacatatgcaaacatgcacgatttaatttatgataacttattatcagtatgattattcattattcataacaatatcaaattaagaattcacgaccacatacagatgataaatcatgaaggaacataaccaagtatctcaaattccatgagagtaagtgacaattgaagaaatccggtttcctcaggaccagagaggttaacttcacggtaaaaatcaacccctttaaccgttggcaacaatgtgactcccctcccaacgaaataggtaccagttgaattcgttttgaaaacatctacatataaagattctacgggaaaattttgatcttgaaaaagttgtagttcttcatcaaactcaggatctccttcggttgctacaacctttgtttcatgtttctcgttttcatttgtccaagcttcaaccttgtattgatatgggcgaccattggtgactccgattgtaccaatgatattcacaagtagcttcacatcttcacctgtgattattatctatttccctcgcatttttcttcttttcaaataataaatctgagtagaataatatgtgtgattgatatgtcaacttaaatacacctcaacaattgtttttggggttttttctctcactaattcacgaa

SEQ ID NO: 44065 - DNA, 712 bp, Arabidopsis thaliana landsberg
tgttttgtccagtttagtgatcaattttgttggattttcttaacaagggaaaaaggttggtaggagtactgaattgttgaagctggaagatttgattgagcaacttaatgctagaacagtagctgcgtcacctttctcctatgatgttaaaagggaagacgtggaatcctttttcagtcagtatggaaaggtaatccactatcgattgaatcataagccattgttcaaaatttagattggttatacaagtttttggtatatatatgtgtcgtccttgcaggttaatagtgtgaggatgcctcgtcatgttgcagagtcgaggatattttctggtgttgccttggttgagttccctacagaagaggatgcccagaatgttatgaagcagaatttggtctttgctggtcaggagttggagctgaaaccaaagtaatcatacttagacatgaaaacatgtcctgtttgctgactgtttctcattttacaagtctttccattgaatgtttggatgggttacttaaaaggtgatattttcttttcaggaaagagtttgataatgaaagggagaaggatgaagtaaaatttgctaattaccaacctcagaagggatctgcaaatcagaagaatggttctgatcacaaaaacaattctgcttatgagccagagtaggggtttgactgttgctatctaattagttgtcttttcatggtaa

SEQ ID NO: 44066 - DNA, 633 bp, Arabidopsis thaliana landsberg
tccgcgcgcgctcagggtgcttgtgccggccgaggcggggtcccgaccctagctcgcatctgtggcgcctggaatattttgcggccagacggagtcgattggcgctgcacaaatgcggctagggataccaagccggagcagaggggcacgctcgtcaggaagctcgctgctccggcggcggaaaatgaccgtcatccgcggaaatgtgcctttcaaaccggtcgaccaacgtcagcattttctttcgggacatttcgaagtctttcgaagtctttcgggcggccctgtcgatttcataatcctccaagcttgcgaaagcgcattcccatcgcacgtcgggcccgtctccttcgatctttaccagcactttgccgggagcgagcccgagtgaaaccctgatggctgtcgcccgccgccgttgttccaacacggcgctcgtatcgccgtctttcgcaaagtaattggttgcctcgacgatcatctctgcctcctgcgccattagcgccgcatcgtttccggctagggcctggcagacgccgcgacccttcttgacggctccgatctatgatcataaagtgtgatcacaaatgcggatcgcagtttagctgcgcccctccaatttgacaagaaaga

SEQ ID NO: 44067 - DNA, 552 bp, Arabidopsis thaliana landsberg
accgggcaagacaacaccagtgttaggacggacacagtatttgcgaggattggttgttttaacctgtgtgtctctcaattaacatcaacactctctcaatgtgtactaataagacagaattgtaagaagagaatgtaaaagaccttaaaagcgacacattgagtagttgtcttgttggtcaattgcatcgaacacgaactttgtttcttcaactcaacttctcaccaccaacaacaacacaaattataacagaggttacccaaacaaacaacgacggttcaattcggagaatcgaaaacgtaaaaaaggtgaaatgaatccgagagggatcgaatcaatcggaaaaaaaaaacttacaggggaatttaagctcagtaggatggatattaacgagatctccggtcgtcatgcttctttgtagatccttcgagattgaaatttgatttctctgtttttttttttagggtttacgactgtgagaagaataatgagaatcgaacaaattttgattttttgttatagatgaagaaaagtgaataaatttttttttga

SEQ ID NO: 44068 - DNA, 485 bp, Arabidopsis thaliana landsberg
ccgccttccttctcacccggcttgcggggacgcggcttgcgcggcgcttcggccttcacttccggctccggcacgtattcgtcgggcttgaggttggggttggagccacggccttcgacaatcgcgtcggccaggcactgggcgtagaccttgatggcgcgggtggcgtcgtcgttgcccgggatcacgcagtccaccagcgcgggatcgttgttggtgtcgaccacggcgatgaccgggatgcccagcttcttggcttcggcaatcgcgttcttttcgtagccggtgtcgatgacgaacaggcagtccggcaggctcggcatgttcttgatgccgcccagcgacttgcgcagcttgtccagctcgcgggtgtggttgagctgttccttcttggtcagacggttgatggtgccgtcctcgatcgccttctccatctcgtggaggcgcttgatcgagcccttgatggtcttgaagttggtcagggt

SEQ ID NO: 44069 - DNA, 615 bp, Arabidopsis thaliana landsberg
gggattaaaggaagttgcagtgtctagtgaaagtgcttgtactagtgcgagtttggagctttcttatgtgttgagagctttgggtgtggatgaagacatggctcacacttcgattaggtttgggattggtaggtttaccacgaaggaagagattgataaagcgggcgagcttacggttaaacaagttgagaagttgagggaaatgagcccgctttatgaaatggttaaagaaggtatcgatatcaagaacattcaatggtctcaacactgattcaacagttccactcaaactgtgcgggacaagagggaatctccagtctgtggtcagccggggtatatgagagccatactgagatgtgagtatgaacgatgatatgatcctgtgttcttactatgttctgttggtaagttatctatctatattgctttctagagagaattgcatgtgagagtttcttgtgtggttttgtaataaaacagaaacaaaggttcatttctggttagattgtgatatcctttgaaattgaatgattaatttttaggtgttgtgagcttagcttttttagctacggtaatggtgaagtttgttttgtttttcttcttatttatgaaaat

SEQ ID NO: 44070 - DNA, 739 bp, Arabidopsis thaliana landsberg
tatacataagtttattaacccgaaaaataagatgaatatgaaacgaccaaacgttccccagactgatggaaactaaagtatcactgattttagaaaagcggccataagacttgaggggatcttcgattagtttcccaagtacattacttaaactacaaaaataccaaatacaaatactagagagttataaggatccaccacaaaaatatattgatggatgtggaatttggtacagatgatggatttggggaaaggccaagacgagtgtgactgggtgttgaggcacattcggtattttcacctttagattgcctttcttgatattttcaataaataacaattttcatcttttatgatttttgtacttttcgcagtaatccaaatttggtatatatcatatgacgctcaagaaacaatagtgtataggaaatttagattgtctcaatacttcaaagcaaaatatggaatcttgaaacttgtttgtcatcatccaaaacataataatctttcatctggaaagtcataatagtgtcctaactccaatgttaagatgcttcttcttaacaattacaaatgttgtatatgatacacaaatacatattagaattcaataaagtgactttcaatggtctttgatcttctccatcagcaaaaatggcttgtatgtcaaggaaaacaaatgggcattatcggttcctctgaaaatgaacaaacgtacgtacgtagactaccccggcaa

SEQ ID NO: 44071 - DNA, 804 bp, Arabidopsis thaliana landsberg
aagtttgtctcaataacaagtaacggtgataaggatttatttgatcggaggttgtttatgggatttgccgattcggtatatcaaattaaatttagctcgctaaaaccttatatatacgaatactttattttacttatattatcttaagcaaatatcagtttcgaggatttattaatgcggccaaggagatctaattgtggaaattaaattgattggtggtaagactatatttatcataatcaggagaagcttgaatacaataattgatctgaacaaccagacaacttacactaattgaccttgaattatcacaaatatatcttttgaaaaattaaagcatatatttacaaaagaatatattttttaattaaaatgattaattagttacttaaataatcaagtgagataaggaacccaactaggcaacaaaataacaagaggaaaccatcaaaattcataaaggagcaactaatattctgtataatttaataaccctacaatataataaaatatattctgtataatataataaaaaattaaagacaccaggaaattcagagctttaaataaaagcaacgcaaatgtttcttgttgtcttttttcaaaaccctagaatcgatgcatttgacaaaacccaatctttaagacattataatcgagctgattagtgtgggtgatatttttaattgtcataagaggataaagctagataggtgtgtattggcttctttaaattgaaattaaataatcaatttcttgattcattttccctagctaaatctttaacttctttatattatcata

SEQ ID NO: 44072 - DNA, 447 bp, Arabidopsis thaliana landsberg
caccactttatgtcctttattgttgtggcattcttcgtcttaaagtaacaccattatagtattatttaaaaaacatttatagctttgcatcaattatcttaagtaacatcactatagtattattataaagatttataaaaatcttaacaagacaaatttgagtcatatccaagaaatgagttgaaaaatagaattattcaggtcattaatggattgataagtctttttttttcttccattagttgcacatattttgctcattctttcgtttatatttcgattttgccaacaatttttgtatactaaatgataaagttggaggaaatgtttttactacataccttaattggataatttagaaaatatattatataaataatattgattttatatgatcaatatcattagacgctctaattgataataagagtatcaaaaagtttatta

SEQ ID NO: 44073 - DNA, 1028 bp, Arabidopsis thaliana landsberg
aatgaattaaaacaagtaacgatcaagtggagatgttttggccaatctgaactctgggaaccacttgtcatgtttctcgacatctgtgacacgtaccttgttcagtgcctcttcgatatcacatttgctattggagttttcgagatagacatcgtcttttagacatgctcttgagcttaattatccctaaggttttccattcatcgacgagtacctagtcatatttttcagatcctctacattatatcaattgcttcccatacccgtcttctcaataacttctgatgtttataatggtcgcattttagttatatataacaattgaaccactgatcatctaacctcaagtgttcttaatttaatatcgataggtgccttatgactttcgatggtggaaagatcaaagatgtgtatatgtgtttcgccagcctcctcctggaacctatgacattcgaacagtctgagtaagatgaaatataaaaaaaaaagagggaccctgagagctccatctaggtcccatgggtatgcaaatatttaaggctaggaaattaccgtaagagagttgcaaagaaaatcaatctcatcaatgaaattattggtcacggcccgttttttattgggccattactgggcctgttttataagagaatccagcaaagtcagcggtaaaggagttcttttttaataaaattaaaattttcttataaaaaaatgattaaaataacgtcacaccactatataacgcgacgggaccatcggtctgaaaaacataacataaaacaaataacatatttcttttaaaagttttttgtttcttgaaatttttataaagccatggttactattatactcacgtgattgtactgtagaatttaaataagtatgaagaaatggaccaccaccaaacatatccattatgtaaaatccaattggttcctatcaattcatgttctaacaaatgtacatcttatatagttaatgcgataaggaggaatggagggaaaatctgagttcaaaaattggaactt

SEQ ID NO: 44074 - DNA, 598 bp, Arabidopsis thaliana landsberg
ttgtgttgcttcctttgtcgttgattttaggaagtggcgaacggtcgcgaccgatctctgggcgatagccgcttcggcctcggtcttgagcctcgggatggccttgagaatgtaatacgacagcgccgggcaccagatgaaccaggtgaagaacgcgatccagaagctgatcacgccattgaacgcgagcgggccggtgctgacgaacgggatcgcgctgacgacgaagaacgacgcgaaggtgacccaaccccaccagttcacccacgacggcaccagcggcttggtgcgcttgtcccgagcgaacgtgatgctgatggccgcgatctggaacgaggtcacgaagtaggcgaggtcgatcaggagccagccgccccagtacatcatgtgcaggatgtcagggccgagagtcgtcgactcgtgagcggccgtgagccagatggagcaggcggtcatgatgggtgcggcggtgatggtcgcacccatcatttcaatcttggacagtagtccgttcgctccctcgatgcgctgcatcacctgggagatggcgcagccccacgccatgtagcacgcggtcaccgtgaggcagaccgacatg

SEQ ID NO: 44075 - DNA, 568 bp, Arabidopsis thaliana landsberg
ccatgccaccgatttcaatcgagctgcatcctggttctttcttaagtccattgactttttatatgctttctcagctcagaaacgctctcccacttacccaatttagcatatatgcttgacaggagcacatgcgcgccatcattcctaggttccagctcaagcaaacgggtacaagccatttcagcaagattcagattggcatggatcttacaagctcctagaagcgctccccagacagaagtgcttggaggaatcggcatcgcctctatgaacttcactgctttttccaaataacccgagcggccgagaacatcaactatgcaagcataatgcttttcctcagggacaataccataattcgattccatctggtggaataaagactcagcttcatccaccaaaccggtatggctacaagcacagaagacattggtgaaggtcacaccattaggctttacattagcctcttgcattttataaaacatatcaacagcttcatttccacatccgtgcattgccaagccaccaatcattgcactccacacaaacacatctctcttctctacag

SEQ ID NO: 44076 - DNA, 619 bp, Arabidopsis thaliana landsberg
  unsure (1)..(619): unsure at all n locations
caccattagttttgattctagccgtttaatctcctcagttgatgcgctttttccatcatcgggtactnnttctttctcaggtttcagctcattcggccagaagacgagagtagggacataacagtcgctaacattcccagttccgagcactccatttcttcctcttccccaagaccacagcttgtaaccaccatctaccacaagaactgtatgtgcagccccacaagaaacctgaaccgggtcacgaaatcttgacgacccacctgaaatctttcttggtacactatcatctcctgcttccacctctgtgaagttgacatcggggcataatcctaatcctctttccattccccacgaccacacgtatccctcagaggacaccacgcttgtgtggaataatccacagtctacagaaactaagtaagcgtgttctgggagatctgaaactggctctggaagcgatgagctcttgttacttctatgcccaagctgaccattttctccaaagccgaacgtccagcgaatgcttggtccaataggtgtctccttcctgtaggtgagaagagctgttattgagcnccacaagatatgtcgtagactgtaagacccgacttgggtt

SEQ ID NO: 44077 - DNA, 451 bp, Arabidopsis thaliana landsberg
  unsure (1)..(451): unsure at all n locations
aaaacttatagatccaatgcaatatctgtttttctaataaattattgatcaatacaaaagttcgcagctataaaagtttacaaaaatgtaaatgtcaggacaaatgacgacgaatatacaatacaagtcgtagaacctaaatctaaccctagagttcgaattctacgctatattaattaactaatctgacacggacaaaaaataaaaatatgtttttcttattacgttaccattacacaatcaaataaacccgnnnnnnnnnnnnnnnnnnnnnnngtacccaaatacgttaaccgggtcaacactaagaccctgattagccgagacgttcgagttataattaaaccgaggaatcccgtcaacttgttgctgcgatccaccgtcaccgtaacgaatactcggatcgttatgacttagtgctggttccgggaccgagatctgtccaatcaaa

SEQ ID NO: 44078 - DNA, 800 bp, Arabidopsis thaliana landsberg
tgggaaggaccactattttgtgaaaacgaaaacagttttacctttttaattttttttgcacctttttttttctttcacattgttgaatgttgactaataacttctttgatttatttttgataaatttgatgaactttatttgatgaactttatcgtctgaccttttttgttgttgatatgacaaaacccaaaataaacttggaaaacttttttctattaataagaagaaaaaacaacgttcataaaaaatcataaaaatctcatcaacaattttcactaagtattagtattactaagtaaaggtttcagcagagccgctattaaacctccttgagccacgtttagtcgccactaaatccggcgtcttatcgggctgtggctcctccacgaccatctcattagctagattatccgcagccttaaacaccggatgtgcatacgcattttgaagaaacgttttcaagtttagattcggttctctcatgcgttccaacgtatctttaaccattgcatcctggaaagaagaagaaactcactaagaagaccaaaaacacaagaagactcatttcttggtaagagtagaaaacctgtaaagggtatgtgacaaatataggttggtaacgtccttgacagaatttgtggaatccaatggttaacacaggaagtatgaaaagcaatggagtcgaacgagcagcttttttcgtgctaagcaatcccatcaaaagaacctgagatacgatcagtgcaatcactacacgtaaatgaacatctggccagaacgctgcagcactctcatactc

SEQ ID NO: 44079 - DNA, 1256 bp, Arabidopsis thaliana landsberg
aaaaagtacgacttgttctccactttcttcgatgcgttttgtcacacagactgtagtttgataagttaactaacttatcattgataagtgctttcgttgtcgtataagttgataacctcgtttggttaaactgtttggtctgatcccttagcttagggttttatctgatgcgggtgagcccaccgaaagcagatgtgggatctcagagtattctccgtatctgaattgtattgacacttgtcgcgcttgtgatgcatttttaggtgggggtgcaaagtagtggattataaacccttaggtgggttacgtcacgcggattcgaaaaatggaattgaagtgaattgagcagagttttactggcgtccgccacatgttgttgccttgttagggggaatgacgtggtctcgatatctgcgtctatctcgtagaagttttcgtcagagcgtgagaaatacgagatacttgctcagctagagattctcgtaataatattagttgagagcgactgctaatggctgcgaccaaatccagccaataattctttgtttgatcgatattataattagtctaattaaattatgtacgcaatgccataaacaaaacatatgaacatattttaaaaaacatttaaagtgtgactgatggatcatcttagtttttttttttaaaagtaatgattttcatagtgttataaacatctaagagaattcatcatcaattaacaaatctaagagaattcaagtcctaacaatactattggtcaaaaagttcatgattatgttttctcctatgtttttggagcatatgaggataactagaaaaaacaaggttactgtaacccatttttatgtatataacaagacagaaaagaaacttgaaatttaattacacaaactctctaatgtttccacatggtgctaatcatttgtttttgctatacgatcaaatacaaaaaatgtattggtcccacattaagaggccgacttgataactgaagcccaggtttaagccagtgagttgtgtcttcaattgctgttacatatatagccggaaggtacgaaaagagttgtagaagctttgacctaacttggagatgagagattcaacaacggcgatgtccgatcttccccgaaatttggaagaggaagtgctctctagggtcccgttagcatctcttagagcagtgcgaactaattaatcgaatatggttgcctcgctcttgacataataatggtttgatcattaatttgtatgtc

SEQ ID NO: 44080 - DNA, 673 bp, Arabidopsis thaliana landsberg
tcggtttcttggtcaccggaaaactatctctccggacaggtgataattctgttttcttgtttgttttggttttaagtcatgtaacctcttgtttgcttacatcttgttggtatttgtgattcaggaaagccattgtaaggttggtagacagaattggaagaggagctgagaaagataaccgaaaagtgtatgaaagaatcaatgagattcacaaaacccggtaagcaaaaaccaacatttcatagaactagacctatcaccataatgtactggctctaattgttgtggttataacacagacaaggatcaccgaggaggagaaaagggccagcttctggaacaaaaggtttggagagacatcgttctgaagaatccttctacgagaacccattaccagactgtctctgccagagagacccaagtaaagcgagataatagacatgacacttggaatttcaagtaaatttagcattggggataagtttcaatgatagtaataggtatattataggttatagcattatagacttatatcaaacagttttggtgattaatgaatgatataccaacttttatacatgattctgtttattacttcattctattattcaagatgtcatttgaaaaaataagtttcttatatagaaagcaagtacagtactttgttcatgta

SEQ ID NO: 44081 - DNA, 245 bp, Arabidopsis thaliana landsberg
acaacacaatgaataatgcaccacaaagccagtctattcgccaaagcgaaggtaaaacaacacaggggggttttttaatacccgcgggtgtttataaacactgctaatgatagggatcctatctctagattatattatacaccataaatactagcctcaacgtgccaaaaactaatattagacgcacataacaagattttaccctgaactaaataaaatatctcatatcaagaactcacgcagaa

SEQ ID NO: 44082 - DNA, 255 bp, Arabidopsis thaliana landsberg
  unsure (1)..(255): unsure at all n locations
gactctgtaatccccatttcctatcgagtaattgagacacaaactcacgtgaatcgagctcggaagaaatgggaattctctgaaatnnnnnnnnnnnnnnnnnnnnnnncgcaatgaaatcagaaaaagttaagattttttttctgcaattgcaaatggggtattcttagaagtgtcttaaggaacgattttttattcattcttactacgcattttatttcaccgagttccttgtctagtcgcttttctactctt

SEQ ID NO: 44083 - DNA, 618 bp, Arabidopsis thaliana landsberg
gaaacaattcctagaagacatcaatatcaatagaaatcgttgaaggcaaagatgcttagcttaaaaattatagttttgaaaaaacttcagcaacttcaaagacacacaaggagattacatacaagtaaacgataacgaaaaagtaaagttaattacagagagaatcaaaactctccaaacatagaaatttccgattacgtctaaaaaggggaaaattcaaacccaaaatcaaacgatcaaatacatcacgagagtaatcaaatcacttattcgatctctcaatctagctaaagatcatcacaggatttataaagtagtagagctagggtttaccgaatctcacaaatcacacactacggaaacctaatcaagcttcgtggtgttaaacgacggcgttacggcggaggaagcttgtacaccgtcgaaaaaaactgggttgttgcggcggatttacgtttgtttcaggtttagtgttgttttgctagcttctcaacaagagaagcgtgatttgtggttgtttttttttctttttcggaaattcaaatgaaaaatagtgggttcgcttaatttttattaatatttgatcttgtattcgttagcttaagctttacttttctg

SEQ ID NO: 44084 - DNA, 553 bp, Arabidopsis thaliana landsberg
tagtggtctcggaattataacatttttgtacatgatcatgatggcgaacgtaattgggtcttttataaagttacaatgtgaacgaccagaaataatatcgactgactcgacaactgcaaggccaaatggccgtttattctaggttaccgcgatacctctggagtatactgtatacgttctctctaaattctggctttttttttggtgaatttaaaatggaatcacttcaccaatatgtacatgggtcaactccaaaattgaagacgacgaagagaagcggaagaccgcaagaatgccaatcaacatcacaaattgtttatcgtcttctctcttctcttccattccacttattttcagaatttatcttcaatattttcaaattacatcaatagagtcatgtagtgaaatagatatgccgtccggcactataatgctaattagcaacaactgttttatttatttttcatgtcatgagtttgactatcttatttcatgaatctataaaacgaattaaattttggtgcggtgtcgtgtggacagtaacctaatgcat

SEQ ID NO: 44085 - DNA, 278 bp, Arabidopsis thaliana landsberg
gtcctgctcgggcagcaggcccttgggaatcacgatgtacaggcacacggtgacgaccagcgtgatcgtggccaccagcatggtcagccggcgatggtcgagcacccagtccagcgagcgctcgtacagccccaccgtgcgcgaccacacggtgcgcttgccggcggcggcatggcgttcgtgcgcgtcgtcgccttcaggcagttcgtcgggcttgagcaggtaggcgcacatcatcggcgtcagcgtcagcgacaccagcatcgagatggtcaccg

SEQ ID NO: 44086 - DNA, 814 bp, Arabidopsis thaliana landsberg
agtcacagtctcaacctttggctccttagtttttctcttcgactattatatacagagagaacaaaacacatttgagaaacaaattgttcactggtatttaaccataattacataccatcagctcaatatcaatacatggagattaatcagacaacccctaaactatgaatcagacaagccaagatcaataagtcaattttgcatagctgaaacaaacgtataagtatggaacatcggaaactagcaggactaagtgaaatcgcagatctcaatttcctaacagactaacgaaaaccaaatgatctggaacagaaaaatgttggagagaaagagcttaccatcttcaacaatggatcagagaagagacgaaacgataagtgtttttagattctgctcagtgtaaacaagaaggacactcacggcgctacaaatgcacgttatatattagggttacatcggagtacctctatgaattgacgtaaataccctcatcactttcattacccattacgtcgtcgtttggtgttttttttccttaaacattacgtcgtcgttcgattattactattagtcttgttaattttcttgatttttttttgacaagtaacaaaattcaccagatttcttattggaaattattatttgacaaatgtgaacaacttcacattgatcgtaccatcgtacttggtcttatgaagaacaaagaagttttcaagttataacagataactatgtaatttgaatttgactccatagttaaagaatatgatgggaaaaagaccaaaacgattctgattatagaagagaagaagaa

SEQ ID NO: 44087 - DNA, 386 bp, Arabidopsis thaliana landsberg
ttctgtcaagaaactatagggtgacgagaaaataaaagaagaaatgaaagtctataatctactacatgcggtgtaaatgtagttagtacgacttatgctaacattctacaaccaaataaaaagttgatgtatctcagtatctactattgaagtgaaccatttgagggaaaaaggaacaaagcatatatataagattggaaagagatgagagcagggccggtacaatgttttttcttaatttctgttggtcatattctttaatttatatcaagtgattggtcatatcaagtaccttttaaataagtagaagaaggctggtcatatcaagcacctttcactagggatagttctatctaaaaaaagtacctacagaaatggggttatag

SEQ ID NO: 44088 - DNA, 758 bp, Arabidopsis thaliana landsberg
gactctgtgaccctaaacaacatggaatctatcaaactaggatctgtttgtaccaatcaaaatgatatgttccgctgcggaattccagcgatttaattgttttttttattaactataaatggctttcaatatatattggttgatattagatatatacttataaaacggttatacgttttatattcgttttgatgcttgtgttcttaacaagattcataactagagctagggcaatttaaaagaagctatacttatgcatatattgaaagtaatacatactcgcatatgcatacaaaaacaaacttaaatcttagattacaattgagtcttaaaatctaaaaacactagatgaatattatagcatacggtagttaaacgtaaccatgaatattcgtaatccaagaaatattggcatgtaaagccagaactaagttttttttttttgtcaagaagctatctcacggtatcagctatgaagtttttggtgccaaaaataaatttggcataattattattataagaaaatgcagatagcaagtgaagtatttctttctccaaccaaaataaaataaaattacaagaaaatgaaaatcatcattttgtctctctatataatgagatcaagaagatcagaatgaacaccacagagaaccacaacatacaaaaaaagaaccctatagaactctgatttttttctttggtgcaaatagtcaatggctcacagtcacactaatggcgccatctctacttctttcttc

SEQ ID NO: 44089 - DNA, 979 bp, Arabidopsis thaliana landsberg
  unsure (1)..(979): unsure at all n locations
ggatgattaagttagaaacatgcatgaatctaactaagatcgtatcatagctttaatactccttatgtcctttcgggtggtagcctatggaaacacaatcattttccttttgatttttctcatcatgattgttttaagccaaccaataggttcttactcttaagactcattaattaaccctaaccttataatgctattaataatctcataactaattttttttttgtaccatgcatatttgttatatattctcattcatcatactcattacataatcttaacatgcatattactacactaagattaaggaactactatccactgatctaattacccgcgatgagatatgattgacgagtcaacaaacaacacatttcactaattacgatcgagtatcccattcaaatttgaatccagggcatgatgtagaaacaaccaaccaaaattgtttccacaacttacttaaatttttcttatatatatatatatatatatatatatatatatatatatatatctcaatcccaaaaaatgaaaattaattaattaataaaattacatcaaaatgaaattaaaaataccaatattccctttaaaattatatattaccatgaaaacaccaaactaatcaaatctcaaaactagtgctgctttatagaaaagtaaagttaacacattatgatatatcaaatttaatgtacttatgtacaaatgctattttgatataaaaaattattaacaattgcgataatacttaacagaaatgtcattttaagatatattcattttaaatcacaacctcaaaaatacttgacaaaaaaaatatcacatcagatattgaaaattatacgtgtacatcatatattgaatattggngacatcatatatatatgaccaccatatattggtcaactctttactccaattaaccctacacaaaatgtggttgacaaaataaaaacaacctacagtgcacaaa

SEQ ID NO: 44090 - DNA, 696 bp, Arabidopsis thaliana landsberg
aaaaacgtctactcttctctcatcctcgcgcttgctctctcttctcttttttgtctttccctttcgtttctctatctgtctgtatcattcattcgtgtttatttacaatcgaaccacgaaacggctcttcttctctataaaaaccagatttttctcaatctcaatctctctcgctctcgctctcgttttctttgatgaacccttttacttcattcttactcttgataaatccaaattcccgagaaacccatttcatttccttcttctgtttctagaaagacctcttcttttcgataaaccgagatccacgaaacccgcatttcctctcgctaatctattctaaatttcgatacttttttttttttttttatcgggttgaatctcgagaattccgaagattcagagtctccatagtcgaaggtgtgtcacgactagagatggggttccgtttgatcaaactggcgctttctctgctttcatttatgagaggcccattgatctaataccgagttcgtaaactatgatagaggatgtgatggtgttatcatatgtttgattgacgtccgcctattttctaagcgcattattcagaacggctttttattgcacacctaacatttaaattttttggaatactggcaaacaggggaaccttcacccttaaaggatgaccccaagcttcctcctttttggggg

SEQ ID NO: 44091 - DNA, 516 bp, Arabidopsis thaliana landsberg
cagactgctccctctcccttcagggcggggcgcgcagccgagggctggggagaggggctcttcaagctccacaagctccataacttccacaagctccacagaagccatcgaagctccccctcacagcctcacacctgacccggccctcgtcggaggcactccctgtacccctgggtcgctgcgggctcaccactccccccagcatcccggccccctggtcatgcgccgtcgccggcgcggattcagtaccagttcggatcggccttgagctgctcgtcgagcagctgctgcatgccggcgtccggctcgcccagccagcggaagctggcgtggcggctgggcgacttgtccggcggcaggttttccggcacctgcacgtagagcgcgtaggcatccttcttgttccagctgaaggccacgtagaggcggttggccgcgcagtcgtgggccttgcacagctcgcccaccaggtatttgtcgccgtcctcctcttctacctgcatgggggtggcggtg

SEQ ID NO: 44092 - DNA, 938 bp, Arabidopsis thaliana landsberg
tttctccgctcttatctccaaaactagttcttcatttacgtctttactttcagcgcattgattctcgtacgtcggttcaataattgtccagtgttcaaataattgtggagtgtttgtgtgtcgtcgattcttgtacgttcgagagcgtaccgatgttccgtgtgttatggtcttatcaccgtttagattctcaccgcctttcatgcagatctttattctacggctagatctattaacctcagtcgtccacttggtatttcgtgtttttataataatcgtatatttgggtttgtctacactagataaaattagcagggaaaatatctaaaaatatctataaaaaaattgtttgatattgttagacttcttttttgtcgtttctgatcaaaagataaattacgttgaaaaagagaaggagaaaatcttaaaagggtgttcagtatgtatggtccagagagaacgtagcaaaattcagttccgaattccttatcctagttcatcagaaaagtaactttttcttttgctaaaccgattttgtttgtttagtcaaaagtgtataactatagtttatgaaaatataaaatttatgactttattagtggcaagcatatctgcaaaaagcaaaaattacgtatactacgagtattataaagttcaagtctgttattttcattcacggtaactaaagttcgagttcaaaatttgcgttagctttgctagtaggatagttatataaattattcttacattatatttttcactaacaataacgtatattgggacacaaatgcaacatcgttaaaatatgctgagtaacaaaatggtaaaacctcagcgaaatccaaaaaaaaaaaaaaaaaaaaatctattctaaaaagattgaatcaattctaaaagttactttagtaagagtctcttcaaaagattagtattcccat

SEQ ID NO: 44093 - DNA, 858 bp, Arabidopsis thaliana landsberg
caacgagaatatgatcataacacccaatcatagaacctatgaacatataattctacgagccatcattttttggtcggaacaacttgtcaaaaaactgtagttccaacacttttcgtttccattcaaaatgttttgtcggccaaaaaagaaactaccagaaaatcaacacacattattaatgaagaaaccacaaaaataataattactaaagctttctgagcagtaaatcatgtcaagagaaactaattaaaagacaagaaggaataagagaatacctgttgcacaaaaaagaaagaatgagagaacacatagtcgttccaactttgctggagccattgttttcagtgagctatgcattgggttcggcgcagcaataattttaattaggattatttgagagatagagggcgatagtaagaaatcagtttatatttcaaggaaaacacagtgaccctatttataggccaaagaacattaagaaaaaaaacaaaattaactatttggacataagttttcgttccttatattttgttcattattttcctaaaagagtagatttaataatatattcaactcttattaactagacattaaaaatttaataatataattataagaaattacttgtgttaaacttttactcataaacttcctactttcttattttatattaaatatgatacaaactcgcattttgctttatctcttttgattactttgaattaggttatatttattgagattgtgatgatcatatggttgtttacattgattgtttatttgcttagatagaacattcttcttctttcttcatctcttttatttgctttaaattgggttatatttgttgacattgcc

SEQ ID NO: 44094 - DNA, 634 bp, Arabidopsis thaliana landsberg
actcagtatcccttgttcttattagggctctttttcttatgacaaaagaactggcatgtggccaatacgatgtgaagagtgaacgagaacctatgtcgatcgataaatcaaattagtactgggccaatttataaaaagatagacaagaaccttagtgggcgtaaataccagattaaagcccattataaaaggagcaataattggagatggaagttatggtcacggacacgtaaacttttacagagctttattatactttatggtaataagactttaacctttttttagtacataaagaattgttacacggctctatgtaaatcttccaagtagtagtaactccgacaatagtactatcatgcacagaattctcaactctgttttggtaacactatagttaacgaaagtagaaagaatctagtgactcgaatggttcgtgctaactcaacaaccttaatttggttgttgaataaattatctcatacaacaaataaaacaaaataaacgaggtatggtcttaaaatgtattcattgattacgacaaaaacagacaacaattataatcttgcctgatgtcaaacatatgcatgcacgatattattagtcaaaattttcccatgtagtagccagaaat

SEQ ID NO: 44095 - DNA, 221 bp, Arabidopsis thaliana landsberg
ggtgcatattcagcatgtgcaggtgggggaggcagtggtgaaggtagtggcggtggtggtggcggtgacggtagtagcgtttgtggtagtggaagcggtagtggaagcggaagtggaagtggcagtggaactggaaccgctagtggccctgatgtttatatgcgtgtagaaggtggtggaggcggtggtggaggtggtggcggcggaggcggtggtggtgt

SEQ ID NO: 44096 - DNA, 800 bp, Arabidopsis thaliana landsberg
ggcctcagactttatatgtagactggtcctcacgaatttcataagtagacctgtcctcaggactttcatatgtagacgggtcctcacgactttcatatgtagaccggtcctcgggactttcatttgtagactgatcctcatatatttctccagattgataagtctcatagaagaagtttaccccattcacaacatcataaaccataagtccaacccgtgcgccaacccaattccctaaggtacttcccacaagataaccgaatctaccaaatctctgctcacctacgtaccctcctgagtaagcaccaaccatagttccagtaccacgcaagaacccttcagttaaagtccctccaaagtaaagcgcttcaaagaaatcccacccagctgctactattggtcctatgatacgtttcgcttgccgcgtcgccagtttagccgctttttcacctgctctctgcccctctttggctgcttcttttgcaagcatgccattatccaatgcctcgtgcaaggctttctcaatagcgacgttcctggccttctctacatgaatagatcttatattgtagaaataaagcttcacaccttctttaactgcacatgctaaagtccctgaactcatatcaaagcaattcaagaatgtaaactgtccactctttgatgcagcttcttgtccaacaagttcccgacatttttcagctgtttaccatatacaacaaagacataaatatattcagacagccatttgtatgaacaacccacaagtaacaatatttaagtcctaacggatattcaaa

SEQ ID NO: 44097 - DNA, 820 bp, Arabidopsis thaliana landsberg
ttttagggagtggagaatcaaaagaaactttatgcccctaagagacatgaaaatcaaacaagtgtcaatcatagatacgatcttgatcgagccaatgagcgcaaagatgcgaggaaaaagaagcaacagatcgatcacacactttttgcgttttgcatgtttgatgcattttgatttgacaaagattctttatttacttccttcttccttacttaagctgaccctctttcttaaagtttaaactgtttttagaacgatcaatcatttcaattttggaagcatcgaaatcaaaatgtccaaaatacatattttgacagcgaaatattttgactagatttcaatagtttagaactttggttccacaccagtttatgttgtaatggcaaatgtaaattatttatagaggaatcccattctaatactattttgaatactaaccttggccttttcaacaaaaaaaataaatcgaaatgtgtacaatcaccacgaaattatcatattttttagttatggattctgtaaagatggattaaattagttaaagggaatatactcttacattagctatattaaaaaaaaaaaaaattagctgctaaggggatttagtccatggaaaatgttatttaattctagtttgattaaaccttactttcttcatggtgaaatttaaatttgatgatataatccacgctaaaaaataccatcgtaaaaaacgttgctaaaagctgtgtcttttttttttttttttggtaaaagaagctgtgagtcttttgttatatgatgagttaaaccgctcacagaataccagttagtgacctta

SEQ ID NO: 44098 - DNA, 1081 bp, Arabidopsis thaliana landsberg
tcatctctgttcccatgtctctgtgttgaacttgagcttcctcgtaccggagaaacttgtcggaatctttgaatataaacccttccgttgatggaagaatctgaggaacttcgtttgctaacttatctaaaagaacacagaactttcaattcatcaaaatgatcaaaacttttcaagattctattagaaaagtttcttctttttatatacctttaaggataagatcttgtggagataatgagacagatccatggaaacattcttccgtaaccctagatttctctgagtatacaacttccacctacaaaaacacattcttgatttcaattttactgctacattcttatttaaagattcaaacttcataagggttcttgtagaagcaaacctggtgtttaaagccatcaaattgggtgtttttgagagaatgtgctggagaatcatgaccagaggaagtgacccatttctcagcatcaatccatttagaagggaagtttcttcttctaccagagacattgctactgaaactgaagactcctctacctggagtacaaggagactccattaacatcaatcttctttgtccattgcttcttccttctccaatgctcttttgtgatgagaaacttggtcttctctcgtttaccatctcattgctgctactactgctttggtttgatgaaattggcagtgacttgatgaaatctgtagtttcctttagattgattctgcttgtaagtgagtcttctgcaaatgggttggcgctaacatttgagtttttctcctgtaaacaaacaaacaaagagagactcaattagaacaatgaaaagaagatactttctgagttatgtaatcaaaagacattgtgttcttttaccatattagggggaaacagaagctgagtttggggacggagcttggtgttgctgtttcttgtgaagtccatggagttttcttttgttttgtttctaccactgttggattattttggtttcagtggtgtctgcatctactggtgttggtatattgggttaagaagagtgatgaaagagaagttgtaggaaaatggcatctgcttttt

SEQ ID NO: 44099 - DNA, 822 bp, Arabidopsis thaliana landsberg
tattactttattagaattaataaatgttccttgagaagataacttaaatttgtttcttttctgcccaaatcttccatgtgatgtccgtttgttatcgattccattttctatttgaacttataacaccttcacaaatagaaagaggtagctccaagagtggactgctcataacgtttttttctttctaaaaaaaaaaaggcccataagaatttttaaatacattcaacaatgagtttcattaattgtatactttcattaattgattctctattcagaggagggtttatgaatttgtatatgatggattaattagtgattctgagagctaaactatgtatggtaatcctcttcttcgatggaaccttttgtcgccaaggttgtaatgtcatgattgagcaaaccttttctagttagaggtataattctctgtacaccctttaaatttgaaaaaagtacaaattaaaacagacccgttaaaagaaaatacatcatggaacatgtgagggttggatttgggttgcacagttgcgcctgtggtggacgtggattccccgccacagtagttaaaagatgtggtccttcaatttgaaagttaacgtgtggcctcaaactgtataataaattgtatacatttacgcatgtatctacattttttcaatgaccaattaattttttcccggtcaaatagagcccacatataactacgttaaattagaaaaataaataaataataataattagaagcaagaaagcacaataggtaaacagctatatatcgtttgaagttacctattgtttggaataataaagcaaataaccaac

SEQ ID NO: 44100 - DNA, 557 bp, Arabidopsis thaliana landsberg
atcacaaaccaccacgtcgcattcatatgctataggtcacataggcctcaatcatagtcaaaagatacatatgcgagcatcggatgttactttaaacagatggtgacatgtacctatacataatttcccctgcatgtagagagattctattcgactctcaaatctctttggctgacaaagcttatgggtatgttttaatctgccaatgctatcggaatgtaattaagtctcatatagcaaatgtattaaccactaaccgctttcatctaagtgtatatgggccttattatagtctattagttaacatgattcgctaaatctatgcaattacaataaaagttttcaacgctaccgtaagttacacagctccagtgattattatctacaagtggaatattttcattggtaaaaaatgacttattactaattagcccaaacatgacatatgatcaattgcagacatgacactcatgcactatgcggtcacttaccacgtgcagtaatgcacactagtaacctccttggaatcttatccacagataaaaagcccattggaa

SEQ ID NO: 44101 - DNA, 1514 bp, Arabidopsis thaliana landsberg
tctcatgtcgagattcttatcaatgcatgacacatcacaaaccaaatgccttacaggattaaggtcgacctatataaaagcaaaactcaagattcaaagttagatattaaaggaagaccaagtaaaaatgtgacatctatcaaattcttgtttgtttttcttgctagtccgagaacaataaagaagagattttactattggttgtagtcactacacacataaaactcgagacttgccttgtacatactgagccgtccatcttccttacgggtacatttacagttgatggttgcattaggacgagaataatgcgatacctaaaaatagaagccaaacccaaattagcacattcaaatgacattcgaaatatagatctaaatctaagaaaatgaaacgagtaccttcacagtgtatgtttccttctccttatcaatagagaatccatggcttggtacaacattagattttatgtgttgtaagtaagacattgggagatcagtagagaacatcttattcaagttttttagtgaacattcagccacaggaccagcttgactcctggtttaaagttgtatatgttagaaaaaatataaacccattcctgaaaacagcaaaatgtgagatcagacggtgaatcgcttacccatagaagaaaattttaccaaaccgagcaaccagtctcgatacatgatgatgctccttcatttcagtcttaactcgctcatatgccaacacaagatcctccataaccttctcagctactaatagccactgagttctctcatccttcctctctccaatattcatattcactgaatataaacatataaaaaaccatactcaacatagatacaatgcatcttcttttggcaaaaacgataatagcacaaacaaaatagttaatagtattgtttatttcagcatctagatgatattcattttgtcaaacacatagccaaggtctactaatagtttcttaccattttggacattgttgttcatcagtattgaaggcttttctccttttctacactcgacagaatctgaggacaagggcacaaacttaacatacgaaggaacatcgtcctcaattccatttgaaccaacaagaaaccatttggaaatggaatctcctgaatagataatcttgttgcgtttaacactgctagtgctactcttaaagtcaaggttcttcttgaattttgtaacaagagaatctggaacaggggtaggctttgtcggatccttcgaatgcctcttatgtggtggaatataagacatgtctaaacctgaaactcacaacaacatcaaccaaaaacgatttcaagataaaacaaaaaaatctcaaacttggagctcaaataagaattgctttacaacgagcgaagaagaatataaagacagaaactttaaggtgagaagagagaagtcgaatcatacctgtaggctgtagtcgaaaccacgtcttttaatattcctgcagagaagtaacagtgacactcaaatggagtctt

SEQ ID NO: 44102 - DNA, 562 bp, Arabidopsis thaliana landsberg
ctgatatttatctacgcccggagggtacggtagtatataagatgggtacgtcggtagtttagcccagcattgcatgtgtcaacctagataactaggccatctgtcggtagggcataggctagataagccagccacgtcagcattcagccaagcatccgtccgacgaaggtacaaccgagcattcacatgatacggcagttcatcaagctgggtcgtcgcaacttttcgacccacggtttgtgtttggcacggtgagcaagaatttttacgtcatgaggggaacgcagcgtgcatgataccgtgcggtacggtaccttgcagctgcagcaatgccgcccatgcaaggggatcgtgattgattataattcgtttatgcacgagcactgtgctcctacgagtgcatccgtccgagcagaccgtccgagcagaccggccaactgacgggggttctatgccgtgcgcgtgtgcgcaaccgagccttgcacaaagtgtggcaggggtgcatgcaccggctgcaacaccgtgcagcgttcgcccttaccgcaagcggcatcagaacatc

SEQ ID NO: 44103 - DNA, 396 bp, Arabidopsis thaliana landsberg
ccaatagcagtatttataacttcctcggtaattgttatttacaatcgcttttttaaataagagctttgcttgttggattttcttacttattaatggaacgtacgtgaagcgtaatggagtgccatacgtttcgatcatttccataaggttaagatcatgaaagtataattcatcatcgataacttcaaagccttcttgtggaaaaccaacgctgaggtctataaattcttcgtaactctgcattatttaattttggcaaaaatgagatttttttaatgaaatatatgcttattctttttatttgaagtttttgttacagattattggtgagaatgctcctctacgcattcaatatagggttccaataaattccagacagcggtacatctgggctgt

SEQ ID NO: 44104 - DNA, 533 bp, Arabidopsis thaliana landsberg
aaaaaaaaaaaaaaataaatttaaaaaaaacacaaaaaaaaaataaaaaacaaaaaaaaaaaaaaaaaaaaacaaaaaaaaataaaaaaaaaaaaaaaaaatacaaaaaaaaaaaaaaacataaaaattaaaaaaaaaaatcaaaaaaaaaaaaaaaaaaaaaaacaaaaaaaacaaaaaaaaacaaaaaaaaaaaaataaaacaaaaaaataaacaaaaaaaaaaataataaaaaaaacataaaaaaaaaaaatacaaaaaattaaataaacaacaaaaataattaaaaaataaaaaaaaaacaaaaaaaaaaaaaaaaaaaaaaaccaaaaccaacattaaaaaaataaacacataaacaaaaaaataaaacaaaaaaaaaataatacaaaaaaataaaaaaactcaaacaaaaaataaaaataaacaaaaaaataaaacataaaaaataaaaaaacataacaaaacaaaaaataaaaaaaaaaataaaaaaaaaaaccaaatctaaaaataaaacaatataaacaaaaaa

SEQ ID NO: 44105 - DNA, 851 bp, Arabidopsis thaliana landsberg
atgtttttcttcttgccaacaaaatgtcctttattttaacttttaacattattgtagtcatttttttccctacattgatattttgcactattaactttaactttcttaatagtgatcttctgttttttttgccgtccactctcgtcagcaccaaaactaacttagtgctttgtttatttcttttgaattgttaaaaccaatttgctcctaatttatcaatcagtgtgtgtgataatctgttaattcattcctcttttactaagtagttgatttaaaaaagggtttttgatctgttgccgtgaatgtccagttgcccactttatgtttcacatttttcctttttacgttaaaatgttaatcggaaatgtaaatccaactttcccctctttgattttggattatccaaataattctttatgtaaagtaattaaataaactttggtagtttgtcattgcagcaaataagttgattccaaagcataaaaattgtataccactggatctctgtggcgtgtctttctaatgccatgagtacgccaaacagccacggtctcaacatatattaggataattgtaatcatgtgacaaaaaaataatatttttgcgactttatcttttattttaattgttacaagatattgttttgtatcagtactatgtaggaatgttttacctcctccgctcctcgaccactttagttgcacaattttttcctcgcgatcaagtttaggtttttttctcgtgcagtggtggtgtattctgataccaataggcaggcaacagggttgttaggagaatgaggaaaacaaataaaatgtataaacaaaaactagagcatagacaaatcagta

SEQ ID NO: 44106 - DNA, 425 bp, Arabidopsis thaliana landsberg
  unsure (1)..(425): unsure at all n locations
ttctctatactgggacgaaataagctcnnnnnnnnnnnnnnnnnnnnnnnnnnnnnnnnnnnnnnnnnnnnnnnnnnnnnnnnnnnnnnnnnnnnnnnnnnnnnnnnnnnnnnnnnnnnnnccacagccagggagactccgattagcaacattggcacgatgtaacacctatagttaaaccttaatcatcgtcgccttcataaacacgactcctacgctaccgagcattttagaccagagatcttctacagctttagcatagagaagcgtcttgctctgctcgtgacacgaatagagtgtttcgttgagccgatctatgtcctgtagctcttcactcacagattcaacatccttaaacaactcgtctaggatcacaccaccggttgatcccggaggattagtcatatgctctccactttcaccgt

SEQ ID NO: 44107 - DNA, 840 bp, Arabidopsis thaliana landsberg
aaatttcggtaaagaccattttacaaaagggagtgaaatgggtaagttttggtgttaataccaaccaaaagtttctttgaactttcctaaaattttttctatataaatcaacattgacatgcaaacccaaccccatattattaaacttagtttgctttattgttatatttcgtaagaaaacaaaatgataggtttgaacaaaaaagttgccgctgttgtaataatgttcttttgtaataatgttcttttgcattgcactcgaaggattgcaggatcagtgctggttcattctattccccggacaaccactcgctaaggctatggtgaagggtatatgcttctttccataagaatcatctggtcgtttctataatcaatagctcttggtatgatgagcaagtaaacaataaataatgtgcgttgtaatgcatgcgttttatcttcttctttttagtatctctttggttcttgttctttttaaactattatttgggatcaaaaaatatataaaaatatatataatgaagaatatatcttattgagaagtttcccttcttccttctgtttgaaacatttcctatcagccaaagccaatccgcatacaaaaataaaatttgttgttatacttattttcatcactcatacgtagttagtgtttaataattacgttcaacagaagaataaactgttgcaggatcggttggatatatcagccttttaagggatatcagccttatctgtatatattgttgaagccatgcatatatatatatgtgaatggtgagagtactgcctgaaacgaccatcatggcactctcttaaaataaacgtgaatcacta

SEQ ID NO: 44108 - DNA, 740 bp, Arabidopsis thaliana landsberg
aaattaatgatatatttagatctttttttatctcctaaataattgtgattgcatatatttagatattttttgatctcctaaactaaatagagtcggaaccactcaattctgccgaaccatcacggcctcaaaaagagtcggccattcagtcactctttctttcagaatttcgaaatgaacttaatcctcattcttgagccaattttaaccaccaaaatcatgcgacagcagaaacttggacaattaataaagatccgtcctaagcaggaaaaatatagaccaagtgtgattaaaaatgattgaagaaggtcgagcttaatcttcctcgtaactagctacttcatcgtcaatcctgaagtagggtacctcagagacatttttgtctttgatagatgcaatcactcgtagccaatcacggagattgtacttgttgaaatatttatttgtcagatacttcaagtacctgaattccaaaccagatttttgcaatttaagagcaagttagggtttctaaagacgtgtgagagaagaaaacaagtttaccgttaggagaaattggaattggcgctgacattgatctttccattatatcgggtgatggagacggagttaccaagagcaccggctatacctatgaccttgattcgatcctgaagaaagatctcaagcgtggctatctccaagatcgtatcatcaactggattagagcaggcgatgacaaaagaaactcctttcttctt

SEQ ID NO: 44109 - DNA, 1058 bp, Arabidopsis thaliana landsberg
atatgtatgtatatgtacatatttttgtaataaaaaaatgctgaattcatataggctctaaacaaagaggttttggtgcattaatatgctctattttgataaagatggatgtcaagcggatatcaaacattttgtagtatttgtgatccgtttctttatgtttcgatttatgattagtccggtgtttgatgtctaatatcataaaatgcaataaaatgggatcatacattaattttcttaataaaattttgaacgtaatacatctagataagtatagaaaatagcaatatctaacaaataaatgcgaatgtttcataaaaaaaattcttgtttgttaataaaattttaataacaaattcttcgaatttttattttccgggtgtttggtgaagttcggatattggatactaaattaaaaagaaagaataaataccaaaataaattgagaagatacgttgtatcgtgcaatgacggcgccatatatactcacatcgctctctctctcgaactccaactaacataaatactttataatttaaagacagtttaattgatggatcaaagtggagtttgtcgttattgggttcgtccacgtaaagccatgatagtgatattcatgtgaaccaaaagacagattcagtcggcaaactctagtggccacgtgcgcatttcacgttttcttttgtcctttttaaaattttatctttaaatcttgtttttttctgcattatgggaccccaaaccggcgatgtgtctctgccggatacattgagtctagagctattcggtgatttaaagaatggttaaacatgttgatttgctacattgaattgcaattagataaggttgcacgagtgataagaccgtcgtgcatattcttaatatatttagattgagtagtgtgaattttatcggtggtgcaataatggaatcattatttgaaattgttgttatgtctcgatcatgcagatgatcattcatcgtatgcaataacattacatttttgtttgttggcttagcgagtctaggcatcccccaagcatattggtttaagtttt

SEQ ID NO: 44110 - DNA, 519 bp, Arabidopsis thaliana landsberg
  unsure (1)..(519): unsure at all n locations
nnnnnnnnnnnnnnnnnnnnnnnnnnnnnnnnnnnnnnnnnnnnnnnnnnnnnnnnnnnnnnnnnnnnnnnnnnnnntgttactttgtttcttttacatccttttctcttttatttatcttctattttttttttttttttatttcttattttttttttctatttttttttatattttttttattttaatcttttttttcttttttacttctttttatatttttttttttttttactttttcttcttttattttttttttttctactctttttttattcttttttgggttgggggtggcttcttatttattttattatttatatattttcttttattttttatctttctttttttttttattttcattttctttctatttttttttgttttttttctttctatctattgttcttatttttttctatttcttctttttatttttttcttttttttattctgttttttttttttctatttttttctaattttattattatttttttttatctattctttttt

SEQ ID NO: 44111 - DNA, 725 bp, Arabidopsis thaliana landsberg
attaaatacacattttaaaatgtgtgaaaacattacaagcatttagttgcatcatcacccttgcaagatttatataccaattgatgaatattgatttggaaaatagcatttccactctttaacagctcaaatagtttgagaactttttactccaacaatttctaaacttggttccttgtataaaagtattgtatccttttgacgtattaaatttatttttctatatttaagacatttacctttattaaagttattatgaatcatatatttataaattaaattttagtatatattttaatattatatatccaataaccaatatataagctggtcagaaattagttgaatatatggtcaaaaattggtagaaatataatttcaaccattctttttgttttggtcagaaaattgcaaccactttttggtctgctatttttgatcactgttattggtcaaataaatttaagatataatgaaaacaattgttcaaatccttgtaacaaaaagaaaattctctttaaaattcaattatcaagtctcgtctaagaaatatatcttattcacatatcttttatacaacaaaaacatatttttctttttcaatttctatttcttttatctccatcaccttgaatcttgatcattattagaggacatacattggactgtcctatatattttggtaagaaagcgatggattatcataccggaagtgatagtctcca

SEQ ID NO: 44112 - DNA, 162 bp, Arabidopsis thaliana landsberg
aaaaaaaaaataaaaacaaaacaaaaacaaaaaaaaaattatcaaaaataaaattaaaaaataaaaataaaaaaaaaaactaaaaaataaaaaaaaaaataataaaaaaaaaaaaaaaaaaaaaaaataatacaaaaaaaaaaataaaaactttaaaaaaaa

SEQ ID NO: 44113 - DNA, 980 bp, Arabidopsis thaliana landsberg
tttccctgcttcctaataccactattattgtccaaatttgtcattatatgcttttcgctcccatgcgtgttgaaacaaataagcagtttaccaattttgtaagaaaacgttagcttctgtttacgtacaaaataccatacattctttcgcaaccaacgagttaaagtggtgaacataacttttattatttgtgctaacctataaaaaaattatttgcttgtccaaggtaaattctctttgatattgtttgcatatatcgtagttgttctctacttctcttttcctatatgaaaaaaattgaaagttaaaagtcaaagtcatagaaatatggtaactaatatgaattattattttttgttaaactagtataaatatctgatatacaagatatgaacgttttcaactccctaccaaaaaaaaatatcaacttctcatttcttgtgacataaaataaaatacagttgtttaagcacaaaatttaacaaaattcttttgcattttttatactttaagaaaaaaccaacatttgaaaaggattaaaatcaattaacatttgacaccggttttaaacttcggagaacttgttgttgattctgaaattatatgaaaattgggttgttaaagcaatttattctacgaactttgtttgatacctaacctaaaagtctaaaacacaatgttcaatcggttaaatatatttttttttctcatactctgaaatttagtttttacaaaattttcttgtgaccttcatccttaatgtatatagttgactacttgtattattaaattgatatccaaacgtaaaaacctaatcaactacagttaatttccgaaaatcttattagttggaaaagtttcgatcatacaatgctaccacgagaccatcgtctaccaaaagtgggtataatttcacacggacgaactatgcagcttactataattattactctgtagaatcaggcaattattattaattt

SEQ ID NO: 44114 - DNA, 663 bp, Arabidopsis thaliana landsberg
aaacattaaaagtttttttattgtttgagtgtacttttcacttgttattctgatttgaaatcgactcaatactctcattatccaccatattagttaaattttgtgatttatatcaacgactcatgaaactcggttttttcacaatagtatactgatttttagacttcttatgcagactaagcccgataaattttttgcctaaagaaaaacaagtcctttagcccattatcaaaatatgttaaaacaattttgggattccaacttgtgtcatttgactaaacagaataaattaacagagttaagtctcccctgaaaatcttgttttgtagattaacatctactctccacgtttcaattttatgtacttgaaggcttttttttttgttgcaaaataagctatggtttgaactttcaatgcaaacataaatgtatttaatattttctgaccaactttattttacaatatattttgtatcggttaaatttgtaatattcaatgagattttgtgaactcttaatctttgcgtaaaagattatcttttaactgtttaagctgttaacatgtgtaaaagatcatttgataaaaaaataattgtaaccattcttgtgtaagaatattcaataatattttacgtaaaagagatatattaaatgagatttttg

SEQ ID NO: 44115 - DNA, 1177 bp, Arabidopsis thaliana landsberg
gtaaaatctaatgattattatacaaataagaaaaacaaaaaaaaaagagacagggaagggaatgataagtgggagaggcccgagaaaaagacgttcagtgtcgctcgctgtctgtcccttaaacatgtcgagaggtctctcgagccctgtgtgtgttcgtgtttgcctctcctttgcgttgactctctctttcttcttcttttttttttttttttttttttgtgtgtgcaaccaaactctctccttctcttcatatagtttgattaaatatcttattttgttttttagtttcatgaataaataacaaatagtgtcccttggggttagggttggggttgaatggacgtaagccatataaaagctgagattgtcgttgcagatgagataatgaaatatatattgattgtaattgatcaaactacgaaactagaaaacaaacaaaggaaaaccacgaaactctaactatatagtcaactttaatacattaaatgaatttacaatttatgtgaataagggaaattgaaaggtgtttgcttcatgaaaggagtacatcgtttgtaagtctattctctagaaggtcttaattatcggatggttgcttcatgacaggagtacatcggagcaaatgggaacaacaagaacgagacaataatggagaaaaaaacgaaattatattatactgtaatggctgtcattttctcagcctttaaatgtggctttttgttgataataacatggcatatttgagtcttttagagaaagagtctaatctattattggatatctacatcaaccatatagttaaaaaaagattaacagttatgcaccaaacttaaaagtatatatccccttccctttctgattaaaaaacataagatactgctaactatatcttttgatatcttttttgcgtttgcatattggatatagagatatgattgcatataattgggtatctttggtgtgttttctatttatttcttggcatttgattttagctggatacataaaatgttcatctatacattcgtctttatatactaaaatattacatttataatttttaaatgcattatacttatctaattagctctcttaaacaaaaaaaattaaaaataaaatttcgtaatatatatatatatatatatatatatatatatatatatatatatatata

SEQ ID NO: 44116 - DNA, 553 bp, Arabidopsis thaliana landsberg
cacgatcatcacgaccccgacgtgtcaggtcccaaggtgggcaaatccatgaaggcgctcttttggggctcggtgattcaaatcggcattctggacatcgtcttcagtctggattcagtcatcacggcggttggcatggttgatcacctgcccgtcatgattgccgcggtcatggcttcagtgggtgtcatgatgtttgcggccaaaccgattggcgaatttgtggaaaaacacacatcgctgaaggttttggcactggcctttttgttgatggttggctttctgttggtggctgaaagtttgggctcgcacgtgccaaaggcttacctgtacagcgccatgggcttctcggtactcgttgaattcctgaacattcgggccaaggccaagcgagagaaagcccacgcgcattgaagtcaggtctgtattttgggtgacttcacgggtataatgctcggttaactgaagaattcaaggcaaacggccatccaaggccgtttcgccgtcatcaattggagtttcccttgtcgaaattagttgcaagcgcactacc

SEQ ID NO: 44117 - DNA, 149 bp, Arabidopsis thaliana landsberg
ggagcaggtggtagaggagggagagggggacggcttgttccctcgttgaatccaatataattcttaattttttgaatttagacggggccgctagactgcttatggttcttcacaaacatccgattgaaaccaacatgtctagggaacac

SEQ ID NO: 44118 - DNA, 976 bp, Arabidopsis thaliana landsberg
  unsure (1)..(976): unsure at all n locations
ctacccctttatttatagtgaacgattgtgtttgtaacttgtaaatgttatgtttaagcgaatctttttttctttcgtagaaactagaaagataattcattatatcgaaaacaatacattttttttttctccttttcaaaaagggtaccggccggacgtaatacgtttctacttagttcttttggataagagtggttgtgatgcaaacactttaacaaacaaaaaaaatggttcttaactcctcaagaaaagtgctgggacttaagtccataaacgcttcaagaaaattgccgggacttaagtctcttcaagcatagaaccataaggagtttcccgaaaaaatccaaattattattctttaggtggctaatttatatactggttgaaatatcgatgttgggttatatggtatagtttagatttattcgttgttgacggtagatcaccatttagctgctttgttttaccattgcttttcatttggagtgttattgtttgtttgcttttattcatttgagtttagtttccaaggatatcttgtcatctgtcgggttagtttcggggatcatgcatttgatcgcaggctccttaattgtatttcatcttatatatcatcaatgaaaatcaaaattctagtgagaaanagacagtagatattattttttcttatacaaaaatctagtttcagtttgatagacatttattataaatanagttgtaaagatcatgtaatgatgttttatttatggtatttaatatttttgtcattcaattgtaaaattataatatctataatcataaaaaaattatgttcaaaaaatanaattgaaaattataccaatatattcaaattgaaaatagcatcataaaatgttattcacattgtgtagcaaaacaatgcctaaaagctcatctcaataaagaggataattcagttagtgaaaagtaactaaccagctcattcagtttagtgaaa

SEQ ID NO: 44119 - DNA, 871 bp, Arabidopsis thaliana landsberg
attccctgctccagccaattgccaaccgaagacctagaagcagagatttttctttatcttgtcgacaatttctcgaggtattcagggtgactcatttgtttcaatgcacgctatttccaattgagtgagttctttgtctttttttccgctgtaacctctaacttatccatatagtgaagcatcaggggtttttccaggcatgtgggaaaattctgaagtctcagaggcagagggaagcttagaactcgggctcagtaaatggaaagttgaactacttgccgcactacaagtgggtgctacagaggtccaatctatgattctgaaggtagtcttgttttaaggtgtttcactttttaaaataatatctttgttctcaagcttgtgtttttgtttcttcaattttcttgcagggtggtggcatgatcacattcgccaaagtttatcagttggtatgaaatcgataacagtttgtgtgtttaaacttcttcttctctgaggcgatacaaataactggtatattctggccctatatagttggctaagaaactatctggaaaagtattccttgaagctgccaactaccagattaggaaagagatgctaaaaaaggtttgcatctgtatttatttcatcatgctgcataagaatttttcatcatcactcagggatttgcgatgcactatatcatgaagttcctgagaagcattacatgtcaatgatgtaactgattgatatgttgatacgttaacctctttttacagggtgggcagtttgctgccattaacttggaatctcgagcagctctgttagcaacgaagcatgtatttactttttccatctctcggtttttttcttttcttttctatctctc

SEQ ID NO: 44120 - DNA, 721 bp, Arabidopsis thaliana landsberg
agtctctctttgcgtctcatattcaaactgtaatgagacaacatttcattacagtttcaagataagcttttggatgagataatgatctcttagtggttttgtcaaagtaaacaagactttgactgttcaacttcaacccaatctagagtcaacggtcggaggtattcaaaacactagtttttaaatttagaagcttcatctatatataaccccggagaagcagaaatcctccaagaaagaaatggttccatacaagatttgggtgatgtctttcatcatagcaggttcaacttttaaaaacttattcctctcctcaatttggttagcaattacacaatcagaaatttaatcaaattttgtgtttcattgttttgaaaaatccactaggagctattttaggaggaataatccctggagttactacaacaaagacagcgttcgcgtgtcctctctattgcttacaagtagagtacatgacatgaccttcctctggcgctgacaagcttcctccaagatgcaactgttgtcttgctcccaaaaattgtactctccatctctctgattctactactatccattgtagcaaatgattatatctagtaagaaatacctgatggtatccctccttcgaatcccatccattcctcccactcgtcgatctcacccatttctgtaatcccatttcttcttcttctttctcaaacttttgcatcaaacactg

SEQ ID NO: 44121 - DNA, 4590 bp, Arabidopsis thaliana landsberg
tctcagttcatctacctttctgaatagtttttgtgttattatacttacttcaactattttagtttttagattattgcaatatgaacagtgcaataaataagttgcagctctctttgcaacactcggatttcctatggacgatttttatatgtgctatcatgatcaatatgtacattaaatctgattgattttctattaggattagatcaaataatctataatgataatgtagaagacaagaaaaaacggaaaacggccaaaattcacgctaatattgatttttattatagcaactttctaattatgcttcaagctacatgaaaatacaaaggtgacttgccaaaccaaaaaaaaattgatagaaggcaaaactcacatatttagaccgtccatcaaaatctttgtagtatgttccaagctatggaaattagatgcgtaaattaaaacctcaagagtacaacaaatcaagcttcaaaaaggtttcaagaagccatcataaaaaaaggtaacgggtctagaaataaggttagaagttcgtcgcataaacatcggcagaatctttcattgccacggagaatcgaaatattcgataaaaaaaatggaatgagaattcatagttacatcaagtttggattgttagcgatgagagcccttataatatcataacttagatcacaaaaaccattggatgtataaaaccttttggcacaaacaattcacaggagcccaaagtcaagacttttgaccggcatggcatgaccgtattagaaagctacaacctgacatcgaactcaccagcgcgtgtctgagcacgaaaccctttgtacaaacgaggagggatagtttgaagatcaagtttctcgattcttaggccagaaagagcaatgcccattatcttaaacccgagtttgaatgtcggaaacacgtgaagccgttctaaccctggttccagcgctagtgttcccgacaaacacggagttttgtcctttgggattcgcccgattgtccatgtacatgtctgcaaaacatagtccacaatcaaaaaacgtaagtttctaaatctggaaactgaattcaaagcaaaagccagacagcatattaccttgttagagaggattgttacagttccatgatttgatgagagatctgcagatgatacacagtgaggaagctggaaactcaaggttatcgactcaattgttttccctggatcgcttcggattcccactagcacgctaattcgacatgtacccgaatctgatgttatttgaggttttacatatacaggtgtgttctttagcttcttcaccctatattgaatcagagatacttagatattagaataaatcttcaagaaagtgtaagaataacgtttggttgtgaaaacacacacctgtaactcataagcttgaactctccatctggagggacaaaggagagaacttgatgagattcccatggtctgtagcggacacacgggtgaaacctcatgtcttctatgattgatggattcgcaaacgacaatgtcaaatctggaaaaccagtgagctgagaattcatttggactttgccataaatctcgcattttaccaattctccatccctgaatcagtcagtgtattcaaaagtatgatttgagtgagatgagtcgccaagattaactgacgattttgtgaattttcttcaagcacaaacctgttgacagttgcatccatctcttcaacacggtcgacataaacttcgttgctagagtactttggatctgtcggccgccagaggaacacaagagcccgccccactcggaagcgtggcactaacattcgaagcatttcccgttacaacactcaacattttgctgactagattcggtggagctgtcatttccttcaggatactaggttctgttgtgagagggaaaccattatcgatcatctcatccaaaagctacaagtcacaaatttgtgtaactattcagttaaggcaatccaagaaagggtgaggccatagcaaaagataaaatacacaaagaagctattaatcacacattgtcaagtctcagttactgcaaaccaacataaaaaaataatcaaatctctcaaaccaacacagtaaacctcaacaaaattatgtattttccatagcaaaactttgtttcccaatcaatcataaggatgaaaatgttacaattgtctactttgtgaaaaagcaatccaaaaacagtgaaactagaggaataagaggacagtatgatattaacatagcaaaacaagaacaaaacaagctagaatttgtaaccattactatgtattctccagatcaaatagaaagaatcaacaactacaagttgattaaacacacgaagacacgctgtgaccttatcccaaaatgcctttattagtatcacaaactttgaacaaattggtaaaccgaactaacaaatgagccacaacacacaagagaaaccataatgtccaccatagtttcggttaagaaaaaagctcattcataaaatgcatattgtttaacaaaaatacctcatagacaatgatgaaattatccttaatgagatcttcatttagcccaccaaggtactcagacaaaacatcagcaactctgcaaaggaactaaaacttcacaaagttacaaaaacttcacaacattagaatctacaaagaagaagcaaaatattcacctcgattgccatcaacggtggcatttcaacttgactacaagctaagaacgtaattccgtcacgaacaatttgaaatagataatgtgttggtgaagcaatcactggaagtgcctatccaaaacacaacaaagaagcataagacacacactaacacagttaaaatcaagagctaaagatgacccaatagataagataaagtctcgaactttgaatctaatttgtagatgaaatgacaaaagattgcaaattgacaaaaaacaaaaaaaagacaactttagctataatagtaccttaaaggaatcgccttgagaaatatattgatcccagaaccaagcacatatggatctatcaacgcgatgaccagtaagctgcttctctagcattacctctctgtaaacacaaaaccaaacaacagaagatgaattgagtccaacatttcagactgattagatctgagtctgaggacagaaatggtttgaagattcactaacccagaatcggagaggagaaagatacattgaagcatctctaacctcgatgcgtgaatctgcaattgctcagctttcttctcttcttcgtcgattttgggatttggcttggaagtacaatactctgacccagtcagaggcttcgaatactctaatcccgggaaaatgcaaaaaaaaaaaaaaatgatgattttatcttggctcttgggctttatttctggcgaggcccaatgaatatcatgggccttctatagtttttaacgttagttttagtttttgtaactttggcttgctataggattgaattttcatcgtgttattacgtctccgatttgcgtacctcacgactgttttataaattataccggtatggtcaatctgagatcacttgtactggtgatgaattgatataggtgtttgataggtcccaatcaaaacataaaggaactgaaagcaaaagagagaacggctatggagtgaacatttctgattattatctcacttaaaggtttcgattacattttggttccctttatagcaacattctgctagggttttacataaacctagagactgacaggtgtctctgttctatgacgattcacaggttgataggcagtcaaattggtttgaggtgatgattggagccgtacggtcttgcctcacaacgctcctcttcatctgttctgtcgtcactctgcttttgttgtttagtacacgttgagcagtcgaccgttgagacgctgaacactttgggctttgacattcagctttaacattgtagttgggcttctggcccaatatgccttttcctttgacgatgtcgtttagctcctttgttgcagcttcaactgagtttgtcggagcagacgagctggttctgttagcagacgagctggttctgttaatagcttcaactgaattcgtcggagcagacgagctggttctgttaataggaacaacacaataattttttagtttgtagtttttgactctctttttattttttggatttcattgattgaataagaaaacagaaacaaaaattcaggacagaaagtaaatatcttgaagaaaaatcatagaatgggaatattttcctattaataagcaacaagaaactttataacaaaaacaagactttttttttggctgattacaaaaacaaaaacaagacttagttttcgctagtcgatgtaatgcgggtcactcttcacgtgaaaatgagcctagtattacgtacgttgcatgtcagcgtcacgatgagtatagcttatcgccgataaggtcttttcactcaaatgggcctaatatcaacgtcatcttgagtgtcagcgtcacgttacggcccattagtgtttaattgggatttcgcgaacagttaggtcatataagttaaaacattaacac

SEQ ID NO: 44122 - DNA, 503 bp, Arabidopsis thaliana landsberg
aaataaaaagaccagtaaatgaatgatcaatcaatgtaaaaaaagatgtaatagtgctattatcaatgatcatcaatgttatagtgctattattatttgtgttttggcccattatcttattcttactttcagctattaatagattaagtttgttaataacaacaaaaaaaaagatgaagtttgtttagatatataaaaagaaaagttgaatacagtaagtaataaaaatgtattaatttaaatttaaaataattaaactggtgtgacatactgacatatgtcgctattgatttttttacaaaatttatctctttttatttgtttgaaaagagatttttttaaaaaaattagaaaagagatttttttaaaacaaatgaaaactggagagagagagagagatccatgctggccttattttgggcctatgtacattatttcttatgttatgggctttttacaaattgggccattcatcagctaaaaaatataccaaatagaaaaac

SEQ ID NO: 44123 - DNA, 141 bp, Arabidopsis thaliana landsberg
ggatccaaacgcacactgaccatttttgctaggctgccacatgccatacttcccgggggcaactatactcacaccccgagcgcaaaacatcgaaagtctaatggatgggtgggccacgctgctagggctcgtatatgtacg

SEQ ID NO: 44124 - DNA, 863 bp, Arabidopsis thaliana landsberg
ttagccccccgaaacttagtctatctcattaatctttctttccttcaatctgtctgatgctctctctctctctcacacacaatgatcagccatgggagacgaaccacttcttcagaaagtcaagattcaagaagacattgaatccggtaccacttcttcaaaaagtcaagattcaagaagacattgaatccgttaaaggaattcgtgtaaataatgacggcgaagaggacggtcccgttactttaattatactcttcacaaccttcactgctctctgcggcaccttctcctatggcactgccgtaattttcttcatcttctcttcttcttttcttttctctatgttttttttagggtaaacactgaatctaatcccataattaattagttaccataagatttaaccaaaattgtaagttatagctaattcgttatctatttgaaaaagggtccaaatcaaagagaatgatgtatcaacaaggattatgccgtcgcagaaaaagcaacatttttcaaatgattgataacgacatgaatattataggtttatgttatttttgtgtaggccggctttacatcaccagctcaaaccgggattatggcaggactgaacctttctttggctgaggtcagtgctgagttgttaattttatttccattttttattgattagttttattaatttgttaatcgttgtcttaaaaatatatagatggattgtcacaaaaaaaaaagtatatatgagatagaagtatatatgaaaagtatatattagtgacttagtgtggtagaaaaaaaatatgcaaagaatcatttatctaaaaagtaattagtcttcaaaatccaatatttgcatataaaaa

SEQ ID NO: 44125 - DNA, 611 bp, Arabidopsis thaliana landsberg
gaatcagtaaattgtgatgtgatcgcggtctactggtattcataaatccatcaaaaaccagagcaattttatttaagatcgaaaatataaagtcgagtggaatgcattttagaatttcatatacaatcccaaatttttttaaaaaaatggtgtagatttcgaccagtttgctctaaaagtaatttagagttttgtgaaaactaaacctccaactcaccaatttttgcatatttacatttcacctttagccaatgcagattaactctacaaagttaaaatagtatgcaattaaaccatttttcgctacagttaaggttgtaaaatgttgattaatattaataatatgtcaaatttaagctttagtgacagagagttcaactaaacctttaaattttaaaatctaatgaatgtgaccgttaaaacgtttacaatatatgtatataagaattaaattatttttattttgattttctatgattagtctataattttttgagatggaagataaaatagtaaaatccaaaatttaatgcttggacttctttatagaaattcatcatcttcatctccagccccaaatgtgttgttcttctccttctaaaacgttttga

SEQ ID NO: 44126 - DNA, 135 bp, Arabidopsis thaliana landsberg
ttgatgcctctgccgtctgactagctggctgagctgatcccacactatgcttctgacactaggagctgtactggcccacgctgtttggagtaccaagccacaccacttgaaacactggtgcatgctctcctgcta

SEQ ID NO: 44127 - DNA, 713 bp, Arabidopsis thaliana landsberg
cccccccttgaggtccattaaacttctccaattgtttttttgggccggccaaagttgattgagtcggctcgattgactgactcccaaataatcaatctcatgcagcatcacgccattcctatcgtcaaattacacgtgtctttttctgattgataagtttgtcctcaaacacgtggactctgccttatttcttttcaataaagaaaatttattacctaatgcccctacctcttcccaaaaccaataactaggcgtttttttttgtcccatttttctttgttggtttcatttatgaatacactacatattattgaaaaataacacaaatgccctccttaaattcataattttacaatatttatattagtattacgttttttgcactaatcactagatatatgaatataattttaattagtttatgcccaaaatacacagaaagggcatcaaaagcatcaatttatttttaattgaccaaatagctttagtgattcttattattagtaatttaatactagttggcgagaaaaaaaaattcaaagaagatgaacaagtgaaacaaacttgagaaatatccgtggtcaaagaagatagacgagtgggggtggcaatagagtaaatagaaaggaacacgaagggtttgtttgtaaggaatatgttaataatggaagggcgaaagaaaaagatgagcaccgagaggggggacccataaa

SEQ ID NO: 44128 - DNA, 124 bp, Arabidopsis thaliana landsberg
cgtggacctgagaatcgaaaattcagcttaccgtctaatagatagggaaggacaacagatcagtccgatggtgatgataggcttgtagtcaactagacacataaaagcagggctcctgatcact

SEQ ID NO: 44129 - DNA, 690 bp, Arabidopsis thaliana landsberg
gtagcctgggcaaacttttccttgggttctatttaaatttgttcattcgaaaagaaatcgcaaatttctaaattcctcaaacaatattcttccgcaagtcacactctcaattattacaaaagcctcgtttctttggtgttatgctttttctatggtatatgtaggtcactagtctgaaagccagcttatcagatttgacagattttctattttattattactataccttagacgtgaatcacgtgattcacgttaatcaattaaataccgaatgtaaccaatgtttaactactttgatatgcaaggtgtctctacttcaatcatcgtagtaaggttaaatctaaatttatctctattactctattggcctaaagaataatgaataatgaagaaccttaatcgtatagtttttttttttaaaggtgttttttactggtatagttacattggctattgaaatgaaataaatggtccaccagttacactttttgtgagtggttacatttaacatccgtgaataagaaatttaaccacccacaaagaaatgacacaacccacttgatgatggacttcatgctatgtacgtgaatgtattttcaaacattttctttgttttatccaaaaaaaaaaatgttaatctaatttatgaaacatttcaaatgattaaatcaaattctcgccatcctattg

SEQ ID NO: 44130 - DNA, 918 bp, Arabidopsis thaliana landsberg
ggcatttcttttaccttctcacgtcttttctcatcgtagaatgtttcatctttagtctatattaactcttgtgtaatcgaaagtcgaaacatacaaagtaacgaataaaaaaaatgcaagtatcaacttagataagttaaagaaataacgaatatcaaaataaaccacaacttataaaaactcttaataattaattaagactaaaaccctaaatataatctctaaaatattttaaggaaaaaaaacaaaaaccaaacacaaagacctaagattgatagttaacttatcatgattcttctgttctttcaagtttcattgaaatatgtagggatcccttttcctcaagacatcgatcactgttcaaaaggactagacttgccttacgatagatcttctcgtggctgttaggcaaccccatcttagcccgacccatcacaacaactccatgggaggttcccggatctttcctcgacgataatcctagcaattctacgtaaagataacttgcatgagaatctaaccgaatcattacttctttgttaaacttcaacttgtcaccataataaacctttatcacttgtgtttggtctcgttcttcagggtctgtatatagcacaactacgtacttcttaaagccctcgtaacgtttcagaagagttttgtcatcgcttgcgaatgctcctaccctcacgattaaatctgttgtttcgtcttcattaatttttcttttccctttgctaatcattagtcttcgtttcttcgccgctgcttgccccaagttcttcatcatctctagagaacaaagtgaattaagatttggagttttagggttttatatacaattatttcctcaattttctagggtttattctaaatatgtttttccttttttctttgcagggtgataatgatgaaatt

SEQ ID NO: 44131 - DNA, 717 bp, Arabidopsis thaliana landsberg
acgcactgttctatatgtggaaattgaagacttttggcatatagtttacacaaatttgaaaccagctattgacaataagcaagatggccgcacacgtatacttgaaactttcttgttaacgcgtatactatttcacttctaatagtaagacgatagaatctcgaacattaccaaacaaatataatatatttcagactatagatattcactttttttatatggttagaagaaaatatgagattgggaattgtacgttgaaagggttaattcaaatagaggagttactatcatcactcaaagtgtaacaatataatagattcaaagttacattcatatgtagcatcaagtcatctatcttggcttcataggttttgtgaggaactgaggatgaaagaaattcctctcacttgtaagagttgtcttaactctcatatgtccttatctttggctcattcttttggaagagtatgggtgttctatgttcactctattctatgtctatcttggttacctccttatgtttaaccagatattatattaaaaagattgctcgagtaaattaacgtgatagaaaagaaacgaattagttagttatatatagattacaaaattcacaacttctcagttattctaaaaaaaaaaaaaaaaagagataactaaatcaatgtcaattattaatttgaaaatcattatgtagttgcattaatgcattttaca

SEQ ID NO: 44132 - DNA, 495 bp, Arabidopsis thaliana landsberg
acaaaaacacgggtagagttacgtgttttcaaagttttaatactcaaaatattcttatttatttctcgttctctttggcggctattcttgggcagttaatctcataattatggggagaaaattagtaaagttattattattgttttcattacaataagaagaaagattatatgacagactagcttaaccagctgaaactaagtgcaataacgttttctataattgtgtcctcaaagtactcagttacgtaagtccactaattatttgggccagtagagaatatcgtagtttctgaatgcaaggagcaaaagtagcaacacatcaatctcagtacttgggtataagtctttttttattagtgggtatcagttttttataggtcactcttgtggacctttagtttagagtctgatcaaaataaaaaaccactttaaaactaaaaataagcatggtgacaattgacatattaaaaaatggtagcctatcatccaaaac

SEQ ID NO: 44133 - DNA, 172 bp, Arabidopsis thaliana landsberg
ctcgtacttgcacccagtatcttgaagatgtgaccataaccaggatacatgatcaagatcaggtgctacaagcgcattcctaataagtaaccagtataagggtgcgactacaacctggtgacttgactcgaacgtacgatcactaatctgaaccggttcgtgagaactccat

SEQ ID NO: 44134 - DNA, 556 bp, Arabidopsis thaliana landsberg
tgcgcggcggggaattcctgaccgcggcggtatgcgttgggctgcctgcgctgatgctgggtgtgacgggcttgctgccgccggccagcgtcgtctgtgcggtggcggtcggcgcgctgggagcggcgtggatggccaggatcctggcgcggcgcctgggaggctataccggagacggcctcggggcggcccagcagctcggagaactgggctgttatctgggcttgcttgccgccgtgggcggttgatgtcccggggatgcgggacgcgcctgccgcgcccgcctgcgatggcgggccaaccgtcgctgccggttttccgccgatacgaaaaagccccgctcacaggcggggccgtccggacagcgatcgcatggaccgcctgccggcttatgcctgggcaggctccgggcggctggcgccaaacaggacgtccagaatccgggcccacaggccttcctgcggccgatccgcgcgggcggcgagttcttccgccatcatgcgatcaaaggcttcgttcacagggtagttcgaaaagggtgccaacatgctgctct

SEQ ID NO: 44135 - DNA, 532 bp, Arabidopsis thaliana landsberg
taatcggtggtttcagattcgcggatggaagcattgggagaatgagacatcatcccataatttcgagttttcaacagggatacttatgcactacctttgacctttgagtcttctctatcttaaatctggtcttatagtttctcttcgaaatctttggggtgtctttggcactggttagtgactctgtgttctgtgtgttcttgctttttatagacacttccagattcaggctaactcatgaaacatcttttgtgagagcgcacaccagtttctggacccggattccattctttttctatgttgtaagaatcatcaccctcttgcttctattctcttcttagtcagctctagataatgtaacacatattacacatatcaaaaatacagttgggaactgtttttaacctggttctcactttgggttaatacaatatgtttcagggatgctttttcagacagtttttcagatccgttgggagaactgactatttgacattgagaaatggtttcatcgctgtgagttttttcaact

SEQ ID NO: 44136 - DNA, 709 bp, Arabidopsis thaliana landsberg
  unsure (1)..(709): unsure at all n locations
tacatctaggttagggaatctgcaacgaagctacccgaaaaaagaaaagaactcagaaacgaaagatatgttaaagataggcatgtaaccttttattaattaaaaacgtactctaattcccagtaatgaggcgatagcaccttctaaagaatgcccaacaatgcgaatgctgtagccatcacactcacaaccatcaccaatcaatgaggacaagaacccacttgattctgactctgcgtagtcatttgtatattagcgtaaagaagcttgtattgtggcaatttatgaacacatatcacaaaggtacaacatcaagggtcagttatagcttaactcgtacctccagatttggggtctccttctatttgcataaatagatctcttgcagcttccactattcctgaatgtccatagtgtttgcgagatgtatccataccatgtacatgactgacagaaaaacacatgaaacagcaaaaaggagaatcattactactgacaggcggagtagtgtgtagtgagacctcaacataaatcagaagaaagagaaagcatgcgtgacttgaaacatcagatatcgaagttttgagttctaaactaacagaactgcagaaatgtttttagatttacacatcaactaataattagttaacttgtgaaaccgtanggttttgattttgaatccaaactcacaagcataaatattggtttt

SEQ ID NO: 44137 - DNA, 512 bp, Arabidopsis thaliana landsberg
cgcatcgtacgacgggaatctcaagcccgggaaaggttctgaacgagccttcggtttgtttagacctgatctaaccatgacttatgatatcgggctcaccaagactaccaattataaccaagtaagttctcgtttcaaacattaaatagaaatattggatatgaacttaaacgtatagttttgatcagatgttctacttcataaaagtaaaaattgtaaactgaaaaccccgaaccgaattttggtaactagtcaatggatacttaaaattgaacatatatgattcatatgatgttaatttaacttgaggcaagtccatgaaatgcactacaatatagcctgttattgatgttaatttaactatcaattatgtatgatacgtattcaagacttccctggctccatggcatgcaatacggccaggtattataaaatatgcgggccacggggcgaaacccgtgtcgtacttttttgtaataaatgcgttccttacataattcggggtttgttgc

SEQ ID NO: 44138 - DNA, 461 bp, Arabidopsis thaliana landsberg
caatacataacattttatttggctggaaaattcaactagtttcatacttataaaaaattggcttaccagagagtaaatacaagaggtgtaagtgtgtaacattgtgcaacttccgacttctctgttgtgttgacagagaaaaaattaatgaataagaaaaacacaatacatgaaaattggtcagatttgaccttattttatatttagcgaaaggtacagttttgcaactctctcgaagaccaacttttggttccattctcaaaacccaaatgaagtaaagaatcatctatacaaactgcaattatatattgttgcctgccactataactcaagaagaatacgtaaatccaagctccatggattggtttctgtgtcgaaaactttcctacctgtaacaataaccaaaaacgttgtgaaattttcagttcctggtcacttagagttccacttcctgaagctcc

SEQ ID NO: 44139 - DNA, 1149 bp, Arabidopsis thaliana landsberg
tagggactcaccacagaagatgacattgttgtaattaagacgtctgagatggaaaagatcagctctaaacgcattgacctctgcatcaagaactgaattagcagggtcaacggatgaaaagcctcggagtatacttgttcagtttttccttcatttccttgcacattaagtagaacccatcctattcctgcccttgaattcggatcattccatgaagcatctgtacaacacacaaaggataaagtatgttgcagaattgcttgttgggtaagcagtatttgtttgttattctcatgcttcagaagatatgcattggagtcattatgattttttttttaaactagaaactgcatcttttgaaaatctttcaactttctttatcttatcgctagttttcgtaagaaaaaaaaatgttacaaacttacaatcatttggaagacagtgattataagggacggaagatgaaacgtgagggtatgtatatagcatcattgatctcccttttcatttcttgtcttattgtttctacattgttattttaaacccataaaattatttttcatacttcatagtaaacatttagatttatagtttattcaaaaataagtaatttaaaattacataatttataatattaactaatagacaaattaaattaacattcataattttttctccatatattcaagtagaatttattttattctatctttaataagatcaattttttcacatatcggcttatatttaatttttgtttacttaattttcttcttcatcgacttattttaaacgtaacattagattttcgttttggctagtcaaattataaaatagtcgatttgatcacaggcgaagttcaattatccttccaaaatttggtatactgcttcatgatggcaaatcatattgttccaatttatgaagtcaagaatgagcgaccctttacgagtcaagcaatcggtacaactattgcaccccatgcgatgaaactggctattcagatgaaacaagatgccttagcagcagggataaaaactgttgtttttgttttcttttttgcaacaaattcctattatttcagaattttcgtttctttttgaacatgacttattttttttaatcttattaagttaaacatggcagttt

SEQ ID NO: 44140 - DNA, 756 bp, Arabidopsis thaliana landsberg
ccaggaaccaccattttttccgttcaatcaacgaagctctctgaagaagaagaagagcggttaaaagatacaggaactcttcagtatttgatttggcgaaaaaaaaataaacgcgtgtgcgtttgtgtgtgcgtttgcaaatggctgaatagtcctcgtgagagagatgattcagtgcgtgtgaattgtcccgagacgaaatatgagaaagacgtcaaaagagttcacatttcacaaatctctccactgtttatgtcaacttgtgtgttatatttcttgaatttataaacaattttggatttttttttatttgaattgaaattttttaattgattttaaagttaaaagttaaaagtacaaatttcttctcatgagttctacaaaatttagtttataatatatatatacatatatatatatatatagttaatatgcatctttgtcaataaaaggcgtaaagtagattttttaaattaatcgggaaaattaaaaattggacaaatctcctaaatttccattaaatttcaacttttttttttttttgttatccactaaaaattttgcgagtgacgaaaatggttaaaatctgtgtgaaaaaattcgaactctgcataaaaagacattcattagaaattttttaacttgtggaccactaccatttggttctaaaaatgtatgttaaggggtaacataattggttgtagacatttttaaatggcaaaaattatctttactttttctttcgggatttttaaa

SEQ ID NO: 44141 - DNA, 732 bp, Arabidopsis thaliana landsberg
tctaggcccatgatacgatttattcaatgtgtatttttttatgttacgtactcgtcacggtaattcttcgtcatattttctcaaacgtaatagttaaggtatatcacaagttggcaatagttaaataaataatcataaaataaaatagatatccatgtaaacataaatttcagatacaaatgaaacttaatataagtgagtaactttcaaaacttatatatgtttcttcagttttaatgtatgatatacaatatcgttactgaatatcaaaatttaaatttagacgtatgttatgaaaaacatcaattgttgaaatgttgaggtttactaattatttagtagactttaaatttggaatacattaataataacccaaaaccaaaattctaacttagactcataactattatttgaaggaagaaaagaagtaaataggaacataaaatccattgaaattaagtaagtattaacatcgaatttggattcagaaaaaatgtttcacaggtgattttgaagccctgtttttgaatggaaaaaacaaaccaagtcggagttaaatacttaaataagataaagatgtgccaactttcaagcaaattaacatgaagaagctaacccattcatgtcggtcatgataaatgaatgatatgctgatatctaattcatttgattattttcttgtaaggctttttcatattagtttttcgtcaaaagtctttttcgtattatttt

SEQ ID NO: 44142 - DNA, 568 bp, Arabidopsis thaliana landsberg
taagtttattcaattaactggtccatgcaattctattctcaccgttcaggtaattacaagaaattgttatttgttagttaaatacgatgtgtgtgtgtattttgaaacgagcgtttggtcgatggaacggcagatattcggaacgttatccgcatctcaaaaacgatcggattacaaagatatcagcaaatggataatgtttgatggcgttaacagtctatcagtcgatggaggcgacactggggttgtggacggaaacggcgaaacgtggtggcaaaactcatgcaaacggaacaaagctaaggtgggtatatatatgtaaaagtataaatcttctctttaattaataaacagctttgaatattgagttattgctgatattgaaacttttttttttttttttttttttttttttttttttttttggaaaaggcgcccatgcaaaaaacccccaagggaactttgaaacatttaggattccaaaaaaaaaggttgagggttttgaccaaattgggaaaagggttttccgaaaaaattttttaaaatccgggccctaactttttaaaac

SEQ ID NO: 44143 - DNA, 666 bp, Arabidopsis thaliana landsberg
ctatttataattccattttttcttacaataatataatagatgcttctacatagttgttctttttttggattactcgttgataaccatagtttgcatttaaaacacattaatttgaatggtaaaacaaacgccattgtttaaaacgagaaatgaaaacccatgtttttcggatgaaaacacggaaattaaattagtagagtggtcgaagttcgtgttagtaaaaattgttaatagaatattttgaaaaaataataattaggaaaaaactaaaatggtaataaatagggacaggtaagagacagtagaaagagagcggtccaaaatcgaaagaaactaactttcttattaatttgccactcaaaaacagatgaacatttatttctcaactctcatttcgatttcacatgtggcactatgaggtgtcgttggatcttcttaaaaactatttgtcaaaaaaaaattgggatttgtatcattgtgtaccaaacacaacatgattctatttctctttggttgaataactccaaacaaagacgatcgtgttaataaaccataaatttactacctgatttcgtaatttccaaatctaatttgactctgaaattatttctttttctggattcatacaattttgaattaaagatctttttctgaattcatatttca

SEQ ID NO: 44144 - DNA, 646 bp, Arabidopsis thaliana landsberg
agtctcttttgtttatacgtttataagactttatagcttcttgaaagaaacgactcatcctacaaattacaatctttgtcaatgtttaggattttttatttgcatttttatcttctgttttgagaagatgtccgtcgctcacaagtagatagggagacatattattaattttaaatcaatactagtataaaataacaaacgacaccaacaacacgataatattaataacgaaaatgagactacgataaaaaaaaaaaaaaaaatcagatcccaagaaaataatgttaaactactgggacctgctttattacaggttggtccaaatttcaatcggaaacatacataatgataattaattattccaagacttttgcggtagcattgccaaacaaaaggaaacagtttaacctatttggtatgataactttgttcgttttgatatttaatcatatgctcttcacccacctatttggttgacaatggaatgaagagtcaagacatctgattgattatcgtatgaaaaattcaatcgctaaactacctctaaaaacggtatatgactaattaatccattagcgaaagcccaagagagcagtgagagtgggctcaatcgtgggtattaactacatgcctactacagtcatga

SEQ ID NO: 44145 - DNA, 399 bp, Arabidopsis thaliana landsberg
cactcattaccaagctaaccgaagaaaaacagtctgccattcaactgaacaacagacttaaagagaactggtaaaacaactctcacttggatcctttattatctctgaatctcctccatgctcttgttactttgatgattagcaatctgtagcgtttgtagtgtttttccatggttttgagaaggtatgcttaaagtcatcatttgtttttgtgaagagatgctttaacttatcatttgcattggctcctgtttccatggttgacttatctcaccataccattaatcaaaaccagtcttgtatgaatattccacaggcttaggttagaatcttgagattgtttatctgacaaagattttggcttgatgtggcaggatcagttaaggcgtgaaaagcaaa

SEQ ID NO: 44146 - DNA, 525 bp, Arabidopsis thaliana landsberg
gcgcctgcggcaagtacgacatggtgctggtgtcgggacagaagattgcagaccgcttgctgcgcgccggcctgctcaagccggatggctacacgatcgtcggctatccgaaattcgatctgcacggcggcaccgccgcgccagccaaactgttcgacaacgaccggcccactgtcctctacaacccgcattgctcgccgagcctctcgtcctggtatcgcgacggactcgcggtactcgaagcgttctaccaatcggacaaatacaacctgatcttcgcgccgcacgtcatgctgttcagcaagggcgtgcaggtgtcgctcgatcgtctgcggattgactggccgggccggatccccgagcgctaccgcaactgtccgcacatgctgatcgacaccggcagcgtgcgcagctgtgacatgagctacacgcgagctgccgatctgtatctcggcgacgccagcagtcaggtctatgagttcctgttgcgtccacgtacctgcgtatttctcgacgcgcacgcca

SEQ ID NO: 44147 - DNA, 569 bp, Arabidopsis thaliana landsberg
  unsure (1)..(569): unsure at all n locations
ttctatcatcctcttctgcttcgttatctgttacgacatgatctgcaatcttccttacaggnngnaagaatacacgcattgggagttgtgaccgcagtaaaccataaacagaatgttcaaacaaggcaatggatctatctagcaattataaacctaatattacgtcaatagaaccttttcacacagatatggaagaagacaggtaacaaaaatagcaagaataattagtaatatccacggaactcagtaatgtttctcaacactcaaaaggaagtatttatagcttttacgagaaaagacaggacgtaattccaaattgatctcaaagaaatgaggaccatgcagagatgccacatcaaactcagagagaagaacaggatctcttatacttatagacagggaaaatataacagatgcagcatctacctttttcagaaagatacctattcaagaaactcatgctttcagtagacaaagatccccgtttttaatctatagtcacaatctatagttgaccaataggctaacatatagtatcattctaattctactaccaataagacaacaca

SEQ ID NO: 44148 - DNA, 932 bp, Arabidopsis thaliana landsberg
  unsure (1)..(932): unsure at all n locations
tcttcctttctgtgattttttttatttaaaattgtatattttatagcaaatatccatacaaatttttcttttattttattataaaaaataaagctcattttttcccctccaacaaggaaaaacaaaaacctgtctttgaatccaagtctttctctctttctctccacacttcatcatctctgctacttttttttttgttctcgtctcagtgagttttctttgataggtttattgctaaatcaatcaaataatcttgtccagtttcacttctctcttaccatttccttgttccattcttcagcttctctctctctcgctctntactttactaaacttggtctcttcttgagcttatactgttatacatctcatttctgcagagagtacttgtcaaagaaagttgttgtctttctccagattcttcttgagcttatactggtgattatccgtgaaagaatctaggttccgcttcttttttaatgagccgaatttgaaggaatctttcaaaagacgatgagatcgaagtatttttgttccttagctcttgttcttggtctcttcttcgtttcttgtgatgggtttgcctctaatgaaggtaaaactatttttttaatctctttgttttgtgttaattttcttaaacccagatctcagatttcaattgttttctcgcttgtgttaggtttactaagaaaatgctagataaagctcttacctttttagattcttcagtctccatgaatctctgtgaacaactttctcacttaacttgaacagagttgggattagtgtagaatcttaatcagcctgaaaaagttatacttttttatggataagatcagaagaatctgtgaagttaaagcttttaattcaaggtctgatcatataaatcatctaatagatttatggatcttctgctctgtttttgttag

SEQ ID NO: 44149 - DNA, 619 bp, Arabidopsis thaliana landsberg
  unsure (1)..(619): unsure at all n locations
gtgcacttgaaggtatgcctgtctaaggtggcatcacagctttaagcaggcagcatgagagctttgctttgttttggactgttggcagtcctcgtcgtgcaatcatcaaaccatactgtcaaccagttggggttctatcagttcgcgccctgcttagctgcagaacttatgaaatatcatgaaaatagcagacagcttgtacccaaatggtacatgcactggcaatgctgcacctcgcctggagcatggacgctgttactttcaagacagggtggattctgtcatgattaacagggacacggcagccctaggtgctagtgcattgcaaagcgtgtgtgcatatcgtgatggcttgcaagtgcccatccaatacaaagttgcacaaccatacctcactgacaaagttgacaaaggcaaacagctactcttccagctacgtgcaagtacgttgcatgtgaacagccgcagagtcaagtacggtggaaggggcaggagcgagaacgaggtggcggcggcagagctgtgcccagcatgcggacagtcaaaggagacgaggcagcacttcttgctgcattgcgaacggacgtcaggagagcgggnacactgttcagcacatagc

SEQ ID NO: 44150 - DNA, 640 bp, Arabidopsis thaliana landsberg
aacacgaaatgtggttccgctcattagacatcgaaaatggtcaaaatgcagttgctacggttgtaccgctccaaccgcggaaacagaaccctatatcattgcttaaattttgcaacaaaattaaacacaggtttaacagtgtgaggagagaatcgtttgcttttatcaaagtgaattcatttacgcaatgaggggcgttggttatgcaattacgtaagtagattgattggtattatgattccttatgtgaagttgaagaaagaaggttgtcgaacaacaacgctatggaccacattcccaactaaacaggtctggaccacaatggtgtcttgtggtccaggtttatctttttactgaaaacggctgcttcatgacgaattgaatgaagaccccatgtgtcaccacacggtcacgtgactaagaccaatcactcttagacaggacataatcgaacagaggagaagtactactacattgataccatttttttgtccggtttaagagcagactcatatgaattagagaaaacagtttttttttttcagaaaaagtttttataaaaaaccagagaatcattaaggctagggacattaacccgaactatgtttttcaggaaattgagaaactttaaccaaaagtt

SEQ ID NO: 44151 - DNA, 564 bp, Arabidopsis thaliana landsberg
agctatctgccgatgacgctagagaccaagcgggggctgccgatcacgctgagcctgatttataagatcgtggcggagcggctggggctgcgggtgtggggcgtcgggctgccggggcattttttgtgcggcgtggacatcgacgggtcgatcatgctgatcgatccgttcaaccaggggcggatgttgacccaggacgaggcgatggaccggatgcgggatgtgctggggcaggaggtggagtggacggatgatgcgttggcgccgatctcgaacaagcattggctgacgcggatgttgcagaacctgctgaacatcttcggggcggccgggcattatgccgacgtggcggcgatgctggagatggagatggtgctgtggccggaccaggatcggttgcagcgggatttggcgctggtgctggcgcggatcgggatgagtcagccggcgagcgcctggctgaaccggtatctgcggaataatccggatgacccgcagcggacggatttgcggcagttgctgcaggtacttggcgcttaagacgaattttagtgcgctttagga

SEQ ID NO: 44152 - DNA, 574 bp, Arabidopsis thaliana landsberg
tttttttttttcccttttatcacaactactttacttccgtttgctatattatttcactaaattgatctcttcatgtgcagttgtgaccatgccatcgttttccagataatgaccgaggtcagtctctggttgacaaggaagttcgagctggagggggagccagatactacagtataatttagcaaaatactaaaataatacgtactagcttaattatgtttaaaataataagaaacgattatatagcgaatatatttaagtgtttgttttctttctagtattccatttgttggcttggcagtttctcatcgtcgtttgtccttttgtcgttgtcggattctcgtttttgaataatttagtgcttttttaattaaagttttcttcttaccaaatgcaaagacttttcacttgccatgtgactttttgaccatgagattatcttataagttcaatcgcaaccgaacttttttttttttttttttggttaaacggccgcgtacaaaactggctcgtatcctatttgaactacatgaatcttttcggtatttagacaaaacaaaaaaaaaagagtctt

SEQ ID NO: 44153 - DNA, 709 bp, Arabidopsis thaliana landsberg
ttttatttttgaatggtttgtttcttcttagaaactttggtttgatttcaattttttttttggggttttaaaaaactatatttttgataactaaatttctagatagtgcagattaaaaaaaagaggccacagtagatatatattttaaaatattaatcttaaacgtttgtatttgaaaagttggtttcatgttcagtttttattttctcggggtttttaaaaaaaaatgtcttgcattaattaattaaaagaacaaaatgtagcccatgataattggaaaaagcccacaaaggagatacttaaaatatcaactaagaaataatccaacatacactaatatggcccaatggaagaacatcccaattatctatagctaaaaaaaaccaagtcttcaaatcagcaaacaacggggagataaattttgacacatttttcttgtttgtcaattgcttattaaaagtttctatgttgttcattgtatagacactcaggattcatgcggatcttatcgtttctaaagatggtacgggtgattacaaaaccattaatgaagcggttgcggcggcaccaacgcggtagcaaaacacgatttattatatatgtgaaaagaggaacttaaaacgagatcgttcacattggtaaattgaagacaaacgtaaccattgttggagacggaagcgatgcaaccattattaccgggagtttaaat

SEQ ID NO: 44154 - DNA, 419 bp, Arabidopsis thaliana landsberg
aatcaacccaccattacatatgtacttttctttatatactcctacagttccctctaagaattaataacttcgcgttctgtttaatacatagtataatgtctttatttgatcagtcgattgtctcaaatgactttagttctatattcaatattgaatgctcaaaaactcaatcgttatagatagcatagcacaatttacactataagacgtacagtaattcaaacatctaaatgtacgaaaatgaaaatgacaataaatatatagttagggatgcaatggaatatgcaaaaaaaagggaaagggaaaactaggcacgctttgtcccaaagaaaggaccaatttcgatatttgttaagaaactcttatggtaacaccatcatgctatttcccactaccatcaactatcatcattccctttt

SEQ ID NO: 44155 - DNA, 1069 bp, Arabidopsis thaliana landsberg
gaatttcaaaatatattgcgtggttgaatttgttcattatagaaaacatcagttgaatttattcattatagaaaagattagttgtttcaaattgcttttcaagtattgttaaatagaccgttggagagcacaaatgtagatttgtttttagtaatttgttcttgataaataacggttatttgttttgttaattaactgatatgtaaaacttaattcaaacatttcattcaaatcaaaaagatgactaagacactttgtgtcgcaaattcgaacacgcctactatgggttttgtacggacgcttgatgtagatcatgttgtgtaatgagcagcaaatatcgaagcaccatccttccttcgtaacaatatttgaaatatactcctgtattaaagatgattaattttatttaaaatatcgtaaagttcgtgtaaaatatcctttatgtgggagagtgtgaaccacgtattgcatagaccaaacaaaaaaatcattgttaaataatagcaacagttatgaatatgattgagcgttgatgctgcatgcctgcattccatatgtaatttatctatggatgtcatgtcagtaacgattttcaatttatttatttaattgatttgattatacaaagtgtcatcattaatatattgcgtctagaaactaatctcatattcatgtcggctgtggatttttaagttcgacctaagtggctacttacgaattaaaaattaattaaatatttacttttctctattaatagttgatgtttataaaaatatttttgagagctcataactatcttttggagtaggaagaatatgtttgcaggatggactcattctagtggattcctttctaaaattataggcctaacctatgatatgtcatgtattcgatcatagaggatttcgattgctgtcgaacatttgagatggactgcttagaactgctatcgatggctcaatgtccgtcggattggacaacaattttcaatacttgggataatttttcttggttaagcaattggtttaattgctctgttttcctatttacgtatattaaattcttaaac

SEQ ID NO: 44156 - DNA, 643 bp, Arabidopsis thaliana landsberg
catacatccttaggggtcagggggaaatttaccgaattgaatcaaatccacagatgaaaatggttgaaacttttccaggtatttggatacaagacaaccaagaattgagactcttacaagaaatggtaagcattacttttgacaggaaggaaataacaatgtgacccaagttttgcctacctggaattgagatgagatcagggcttccaaccattgatctaagccattggattttactctttccctctttaccaccaaaataatttccccgcacagcatataagttagtatggaaaccttgtccttcaatctctagcttctctatcctaggaaaacctgaagcagacacaaagttggtcacatcttcacctcgtcagagatattggtaaacaagatgcaatggtaactgaaatgcatgaaacctggtgatattggatcagtctcggcgtatgctagttcactagaccttccaaacacatcatgcactacacattcacatttgagacatctgccaatatcctcaaaccgcaccttgtatgaacacgaaatttctgaagagagagcctcatacgatatcttatcccctgattccggtgagcggaacctgtcacagccattgttatgtgagattaaatcatggata

SEQ ID NO: 44157 - DNA, 604 bp, Arabidopsis thaliana landsberg
  unsure (1)..(604): unsure at all n locations
cttgttcgaacattgaatgtagtccagcctcagttagtcgattatatgtttaaatctcgctcatatgggttctaaaactctacttcgaacttcgttgtattctttgtcaaggagaatctctatcaactttaagaactggtttggaaggatttcaaatcataatatcttctgtgttttggtacaatcagttgaagtacctcgaatcataaaaatcttgaaacattatcatttactagtcacacttgcgttaagggaccaagaaaagctgaattggggtgtggggtttggcaccctcgangggaaaaaaggagcgaaccggagactgtaaacagactacaatctttcctttggaaaggggaacttctttgccaaacatatcttgcttccttcagtgggcgaggtacgccctgaaactgttaccacttggaggggagagcccccaaccctaaatgtaattgcatgctctgtctcctcttgcatttatctggccttttgacctttctttccatttcttctttcccccaactaatttacataatcccgtccttctttcagcttttttttatccctacccaccctcctttcccccattcccttctcctta

SEQ ID NO: 44158 - DNA, 180 bp, Arabidopsis thaliana landsberg
  unsure (1)..(180): unsure at all n locations
gtttggtgtcgggaccctgcattgctgtgccggcgagctgatgacannnnnnnnnnnnnnnnnnnnnnnnnccgcttctcggcaccaatgggtacacacatagtcaggtcatgagcggctcgagcgcatacgcctagggtggacctatacgaactgattgctagaaaccatcggctcaaa

SEQ ID NO: 44159 - DNA, 469 bp, Arabidopsis thaliana landsberg
aaatggacttatacgttgagttatggtttggcttttctccttaaaaatatttatataggaatggttatggtgggggttgtggtgcaaaacatccatttcaaaaaataaataaatttgattgactatataaatgggtaaagcgaaattgtcacgagttcaattcaatgccatactcttttaaaaaaacttatattaggtatgcatgcagattcatggaatttggaatcgacacatcatcatttgttttccttagccatgatttcaaattatgctactcgtcgcacacccatatcatgtacacatatataagaacactaattcttattcatttttttttgccttagtttctatgtcgaaatttcaatttatttacagctggtaactaacaagtattacaatgttgtaaatatttggtccaaacttgatagccagaaatcaaaatatgcattgactacatgtgtaagatcag

SEQ ID NO: 44160 - DNA, 1042 bp, Arabidopsis thaliana landsberg
attgaagatatggtttatataaatgttcaaatattaatttaacaattttggcaattgaaatgattaaaaatgatatatattcccttccaactatggatacaaataaaatctatggattgttgttgtggaatattaaaaagtgaacccatatataatttactgttaacggcaaatcattatccaaatagcaccatcgaaaagatacatatccctggcttagcgtaataacaaatggtcatgtgaaattcatgggcccgaataaaacacaaagctgggccctcttaatattcctaaatccaaataatcatataattatgttttctgtttgtctctcccaaatatgatgtcgataaaattataagggttcgaatagttgcgccagttaggacgaaccaattcatttccgggttatactacttttctttagtatttatgaactataatttgttgtcgtgtaaaaaaatagaacaagtctgcggcaaactaactatagatcatttttatgtagaaaaagcttgatttacatcagtttattgtccgttccaaaaataaaaaacatttctctgctttttttattgcaaccattcaaaacctaaatttataaccatttataacaccaagaacatatataaatcatcttcactcataaaacataaacaaactactctacttacaatatgcataacctccactaaatatatatgcatccacaatttacaaaatcatcatgtggaaattatctcatactttagtgtaatggttttaactgttatatcacttataagaaatcagcttaaaattactcgtatatggggcttgtagactaccttaaactccaaaaaactagattttgaagctctaaattgatcaattaagatgtatagttggccactctttcagctgatcgatcatgtatatatgaaacaaatctacaacgaataagtaaaacaatattgcttgtttttcaagacgcaatggaattcaagagatcagtcaattctactaataaaataatttttctaaataaaaccatgaataaatt

SEQ ID NO: 44161 - DNA, 641 bp, Arabidopsis thaliana landsberg
  unsure (1)..(641): unsure at all n locations
ggagtggtaacatgtaaaagtgaaccttaccgggactgatcaacgcaaccattttcccgttctttcatgtgcgaaagtattaattttactatatatcaaaaataaaaatctcaaatataaactattttgaaacaagaagatatgcattcaaaaatgttcacatatagtcaacctcgagttaacttttttttttctttttttccggttcatgttaattagtctcttccccattgttggtgcttagacaccttccccacttgtctcttttaggtggttaagtgtataccaatttaactgaacttgaaataaatcatttcatactttccaaattagtggtatctcttttattgatttcggttgttattatttgtcacgttcatatatatatatatatatatatatatacatcaatacctctcgcgtgctatataacattgcatcgatatggacatacatcatctcatttgcttgccgtcgacatctntatatataataatattatgttcatcagtttaaanttgctaaatttcgctatcacatcaccgaattatacatgttacaacagtactcattatatgaatttgaactttgactggaaaatctactacatgtcacaaattgtagaataatttggaaaaaaa

SEQ ID NO: 44162 - DNA, 853 bp, Arabidopsis thaliana landsberg
gtttaatattatgataccagatcggaaaaagatgatatgttatgtgttttagagcttagggagcaatttatgatggaaacgtaaataattatttgttgagaaagaatcgactagaagcaatcgaaaaattgatcgaatggtcaagatatgaccgagaagtcatcggaaaagttgtgagcccaaatcttgagagcaatgacatgcaaaatgttttgaaagtgctctcatgaattaaaagtgaaaaaagaaccactctctcgttacatagagggtagtatataaagaaatttacctatctcagactaggaaaccaagtctcgcattggaatacgactttggtttaaacatgtgagctgactgacaaatcgattttatgtgctttacaacttagatataactgaatatattggtattggatgaggttggacgatagactcatagacacaatcgttgcctcgaaaaatcacgagtttctctcgcttaaaggattttttttgatgaagtttatggtgatcccgttcgagaacatcacaattgtttttgaatcaactttacagatccatattgtaactaatgattatagactacatagtttaccaaaattacatttactcaaaagaacagatgcggttgttgatggcaaaactctttgtggaatggtagacatcccattgaaagaaaacacattgccatggtatggtattcatgataatgatttaactcgttatagtctggacaaattgtcatggtagggtttcattgctctttcttagggtagttacctcaaaatatctctttgttcttccttgtgatagttccaccttgatatgtacaactccacattaatctgctt

SEQ ID NO: 44163 - DNA, 758 bp, Arabidopsis thaliana landsberg
ttcccgagactttgtcaggtttagccaaaatcttcctcgtcctactgggtcgggctagagcttgaggagtgaagaaacagttaatggatatggaagccatttgtttctctgataaatcttaacgggactttatgtgatataaacaacattttgtactaaatattgatttttcaaagtaaagggggttacaatcaaaagtagtataaaattgaggacttatatagcaaacaaggagaaacttttattacctttgaagtttgaagcttggatctcgcagattgagctccagagagggagagagagagaaagggggcgctttagggtttctgcagttcctggttcagtctcaccattctatttaagggttttaatctctctgcttcatttggtgactaacatttatcgtcgagggttgtgacgatctccgagaatgtatagcggatctagcgatggtgagagtcatgatacatcgacgcagaggaagatcccaccggcgtcttcgatgctttgggttagaaatctacgacgatatattggttccggtgccggattaggatccgaaagctctaatgggtaatgttccttttgccggttggtgcgttttggttgtttgggacagtctgtagttttttttatcttttagcttgggatgatgtcataaattctgtaaagtttgaatctctgatcacattttagagctcgttgtgttttcaatatgagtaaagctcctgaattacatgtctatgtatggaaagact

SEQ ID NO: 44164 - DNA, 704 bp, Arabidopsis thaliana landsberg
aaagggcatttttgctaagtcaatactattcttattgttaaactcattcagtctggattaatgaagaggacaactcaatattgcacaactccacagtagggtagaaccatactagataggcttttactggcaagagtgtttagtatgtcacaccatctttggtgccatgtattattcaatcaccttagccataagagatttctggttttcttgaaggttgaatataatgttcattgtttccaccacaggaaaattggttactcttgacggcagattattcacagatagagttgcgacttatggcacacttttctagagattcctcgttgatttcaaagcttagtcagccagaaggcgatgtctttacgatgatagctgcaaaatggactggaaaagccgaggattctgttagtccacatgatagagatcagaccaaaagattgatctacggaattctttatggaatgggtgcaaacagactcgcagaacagcttgagtgcacctcagatgaagctaaggagaaaattcgaagctttaaaagttctttccctgcagtcacctattggataaacgaaacgatttcattctgccaggaaaaagggtggggatgttaccgtctatttccccttctatttgttttgaatgcagacctatgtgtttcttttaaccacatatttatgtgatcaattcacaagctatatttt

SEQ ID NO: 44165 - DNA, 592 bp, Arabidopsis thaliana landsberg
atgtgcaagagaaacaaaaaaaatattgaatctactttactgtaatacaagtttgaagttgatatataaaacaaatgaaactccaacaaacaatattgtaaacccatggtgcaagagaaacaaaaaaatattgaatctacttaactggaatacaagtttgaagttgatatataaaacaaatgaaactccaataaacaaagttcacatcaataacttcgtgaaaaggtaatataaccatcacagaaaagaactgcttgatctatgaaacagagaatatcaacttgcagcatacctcaataaggccagctaaactgacaccagatgcaatccagtgaaaaaggattgggcccaagagttcttccaggtactgcacaaagcagtttaagtcagcaggcacattaacaaggttcagaggggattaatctcaagtaagtctgctgaaattcacagaaatgtaaaaacaagaggaacatttatcatgcagttgtggaagagagaaaaaaaatacaagaatcagcaataacaccttgaacctaaatgggtaatggagttgtgctgataaattgtcaagtgcggcaatgattaattccct

SEQ ID NO: 44166 - DNA, 674 bp, Arabidopsis thaliana landsberg
caagcaacacaaaagcaagcgacatgaacccgtaaaagtacatcaatggagcctttctaccaggtagatatccagtagggtttttccaaatggtcttgccttcaacaaccaaatccttgagatcagaatcacaatgaatgaagtagaggttgtacatcccggtcctagtgacctggatcgatcttgtaggcagtataacagaaaactcattctcagccaacgagacaccaaacacttgtggccaaccagaatctttagcagaaggacggtaaatgacatctccgtgtgagcaaacaccgagttttgccagatcagatgtgcaacacacagctctttgcccaccataagcagatcctccaatgttttcccggtcctctacctcgaaaaccacggcatggatagataacgaggatcggttagacacttcctcaggcctctgaaacttgatcttctcaaacctgccaatagcattgcgccgtgggattaagatttacacaaacaaacaccgagtttttaatggattaagaaactttaacagaagaaattacgtgtttatctataagatccaacgccgtaaaagaacaatcttttaactaacaatgacaccagtgactaacattgaagttgatgaattgtgattaccaaataaatcctcttaagtagatttaaaaaag

SEQ ID NO: 44167 - DNA, 485 bp, Arabidopsis thaliana landsberg
ctcacgctcatcgccgcggatcgacacgacatggccgtcgcgcacgcgaaactccaagccgcagatcgcctcgcagagattgcaggcgccgtagtggatctgttcgtccatgtgttctcctcgcgatgcagatcatagtccgccagcgcgctaccatgggcgcatatcaccgcggagacggacatgctgatcaccaacgcccacatcatcaacgaaggccacgagacggccgccgaccttctgatcaagaacggtcgcatcgaaaagatcgcgaaaaagatcgatgccccagcgggcgttgaggtgttcgatgccggtggccagtggctgctacccggtgtgattgacgatcaggttcacttccgcgaaccgggccttacgcacaagggcgacctgtacaccgaatcgcgcgcggtcgtcgccggtggcacgaccagctacttcgacatgccgaacaacatgccgtcgatcaccacgcgcgcgtt

SEQ ID NO: 44168 - DNA, 667 bp, Arabidopsis thaliana landsberg
  unsure (1)..(667): unsure at all n locations
tccctctctctctcacacacacacacacactcacttacacacactttcttacacacacaaacacaaacaaatatgccatggtaggatcctaagattgtgtttatctccacaaacattttgcaaagaaatgaagaaaagaagggaaggggcaaacttaaaaagaaatgaaatgaaactgtaaatgaattctcataatggctatatatatttttaattaaagaaatgtcttgaaagcaaagtgtattttgctcactgatattttccagtttcaccttgtgggcagcaatgcctggtgtagacgtgagatttaatcactaggatacaatgtcctgttgataaaggcatccctttctagctgccaccttcctacctttgaactgcctgtgtaatgagttcccannnnnnnnnnnnnnnnnnnnnntctgtaactggcccacctacctttctttgcaaggtgcacagcttctgcatgctcaacactggtgacctcagtgccattgacagacagcaccacgtcttcaatctggagtccagctttctcagcagcactatctgtaagtagacaaatgacaaccggcttcttaacagagggtcccacattgaatgtcccactcgttgactttaganaaanaaganananagagagagagagagagagagagagaga

SEQ ID NO: 44169 - DNA, 525 bp, Arabidopsis thaliana landsberg
caaataccttatcccccccccagtttatgaaccaattttgacaaaagaattttttaattttttaaagtgcaatatagcgtatcatataaatttatctgaatttccgaatatcaaaatggtgcaataaacttcaattgtgtttcaccttaacatgaccaaaatcttagattacaggatcaaatgttccacaaatgcctctcagtaactttttttctggctatgaaagaaattacaagctttagccaatggttttcatggaatggtacctcaaactcatgtctgttttataggtttaattattcttttaaaaaaaaatctgataaataaactaatgttgaaatgtgactcatcacatttatagttttatttgtcggacaacaagtataatttccgtgttgtttggtaggcttttccagtacgttctcgtaagatatgatatactaactactatacattaaacatttaaatacggagatgtgtaaacactaatgcgtgtttgtaacacatggcatgaaaacaaggatg

SEQ ID NO: 44170 - DNA, 563 bp, Arabidopsis thaliana landsberg
ttcaaatccggaaatatattaaaaatgttgaacaaaaagaaaaagaaatatattaaaatgacactgtttcgctgtagactgcttggtgtgggaatccactacaacacgctaaaggtggaccacaacgaatctggaccattgaatttaaaagcaaagcaatatgaaccgttagatgttagagtccaggctaagaagatggacccaacaattgtacctttaccacttacctccactggctttgaagctgttcctctctcacataaaaaaagcaaacacttaacgaggaagaaacacactcatatctctctcacgttccccaaatttttgatttttattatctttttgggtttggttaaaccatttatgggtctttagatctctcttgatagtaaagataagtaattttagggtctgtttggttctgtttctggaaatttcacttttttcacttttttgggatcacatttagcttttttggttcctttattttgtaacgccatttatgcgttaaacttgtgtgaagtgtttgtttggtctgagcaggagatggtgagaatctcact

SEQ ID NO: 44171 - DNA, 287 bp, Arabidopsis thaliana landsberg
tcaacctcatttgggcaatattttaattatcttagtggatccggaagagaacttccagattattaagtttttaatctatgttatgttatgtttttaatatttaatgtcagtattaattatgcattttaagttttatgttgggtatgttatttgattctcagacagaataaaaagtgctacgttggttgtggtaatagatgacttctcatgttaacgcatgtttctcacttattctggactttctgatcagccgacagatgctttggaatatcagtccgttcacctac

SEQ ID NO: 44172 - DNA, 800 bp, Arabidopsis thaliana landsberg
ccattatcaacatttgactcacataagcttgcagcaatagaaactctaatacaaactttgtagagatgacctgccgtgaagacttgctctttaaggaaaaacctaagagctataagtatataatctttatgtgttccttctctgagcttgctagttttatttacaaacatggaacctaaaatgtttcagaatcttcatcagaatcttccacaacccaactcttcctagccatctttttaggacgattatcgccactttcttcttctccttcatcttgttcttgttcttcttcatcgtcctcttctgttgctgctgctattgttttatcagaatctaatcctggtgatgatactgaactagcatttcggggggacaacatttcttctgaaccatcatcatctgactcttgtcttaaatcatcctcgccaatattattgttctgtgtctctgtctcttcttcctggtttcctccatcttcgcctcctgcaggagggtctgaatcttcaattattttgaagtctctggcagtgctgcgcttggcatgcctcaacaaattcaatttagtaactttgcttagctgaattaggtatctttcacagtcttctatctggaatatcaaatcaagaatgcatttgttctcctgtttgatcttattgattattcccttggaattgtgactcacactctcttgttgttcctgaatttggaaaagatgcaacacttcacgcttttggatacgaagaaacatcaatgtaatgactgcttgaacacttttaccctttgcatttaaataaaaaggg

SEQ ID NO: 44173 - DNA, 631 bp, Arabidopsis thaliana landsberg
gcgctggtttacaaaaatattttttaaaaagaaagagtcaaagttccttccatatttgaccaaccaagcttgtccttctcgattcaatgggtccaaagtcatagtggtcgaggtaattggtcaatcaaaacaccacgggctatatgaatctcgcttaattgctaacacgacgtattgacaaattttccattcgtaatggtgcaactattcaaaaacaacaaatacttgattttattttgaatttttattagtgtttgccaaatgattttagtccaccaactaaaaaatatagaaggagcaatagcatgccgctaacaagaaaaaaatagacatcttacaaaaaaatgttttttggtttgaccttagaataaatgtatttagttagcaattctaatttaataaaaaaaaaaacattttactcgttatacgcttctattaaacatctattttaataagttaatctaagctttgtgtaacgacctctcattttcaactaagtacaacgaaattatcaatatacaaaatacaaataatgctacataattcgcttaagaagaattcaactattttattttaccccaaacaagttaattcttacttttttctattttgctcttaatttcccattctg

SEQ ID NO: 44174 - DNA, 877 bp, Arabidopsis thaliana landsberg
tggttaatgctccgcccaagaattagttgagtatcggtccaaattagcgccaacaagccattggaggatggtccactactttcatttgatatctgactatgaatccctttggtccgctaacttttcatctttatatatattcctatgtcaatacgaattagaatcagtattagtccaaattgaggaaaaaaagagagagagagagagagagagaggagaaaatgagaatgaagatcgacacagccagcattgtagtgccattgagtttgttgatagctgtgggataccatgtctttctatggaacaccttcaagcacaatccttctcgtacttcacttggcattgattcctcaaaacgcaaatcttggttccgtgacatcaaagaggttcttcttcttttctgtttttagaagtttgtttacgtacactttgttttgcgcttatatgtatataaacttatgatataaaaattattttaaaactttaggcaaatatacaaaattttagaaacatttctattgttcttttacgtttgctctcaaaattttcaaaagatgataaatatgaatacgtaaacatgcatacacacttttgttttacatattaataaacaatctagatccttaattgtttttaccaaaaaaaatctttattagttgtataaacgcaagcggaataaaatggtgtttgcgtttagatgtatttagtgaaaaatcgaaaagtaattcacatgttaacacagacatatctctgcgaaacactcaacccccttatgtctttggattgtgtatcttaacaactattaaataccctctgagcaatctataggtattactttacaataatcttccaggaaaccgaatatcatatcgtcgtg

SEQ ID NO: 44175 - DNA, 560 bp, Arabidopsis thaliana landsberg
atcattgatgaaacaaataaatacgttatcatttcattttcttttgtcaacgataaatacgcattatatgagacatgaatcgactcatttatatttatggttggagcgaatctcaattagagatttggcactaaaaagtcagctcgaccaaagggaatgaactttgcataactcataaatatcttaataatcgacttttaaattacgattttattttatagccagcatggaactacctactatccaacgtatatctgcaaatagatgtgaaattacatttatatattaagctccaccatacaaagtaattaaataacgatataatctaagtgcatatccgtatttcttaatcttttaagatcattttatatgttccgacttgaagataacctaaaacatagaaaagaaaatgaatgtacaaaaattctggcgaaatacgcaaccaaagagagaagtgttttgtaagattgctttatttgattcaaaactctgatattattgtagaaacattttaacatcagtcaaatatttttgcaatttcgaggggttatcagtgaaaa

SEQ ID NO: 44176 - DNA, 485 bp, Arabidopsis thaliana landsberg
tgccgagcttgttggtggccagcacctgggcaggtgtcgcctggggcaggcccaccagcatttttgtgagctggatcagtccgccgtcaccgacgaccgtgttgacgaagccagccgcgagcgcggacagggcgagcagcagcaccacgccgaggtcgggatcaggcacggcgatccccggttgtctcgtccgcgagacccggtgccgcgccggaggctggtgtccggcgctggttccgggttggctggggcacgtggagaccttagtcgcgcccggccggtcgccagtggccacggtggacgacctgctcgaggggcttgcgggtgcgtcgcgacggcgacccggccgcccctgggtcctcgctgcggtggcccagggtgatcacccccaccggatcccactccgccggtatggcgaactctgcgcggaccgagggcaggtgctaattgggaggccaaaaaaacaggcaccgaggcccttggtg

SEQ ID NO: 44177 - DNA, 673 bp, Arabidopsis thaliana landsberg
taggagagccttctttttctgtcatcacttattactgttgcctgatactattccggtaaagattggtttttaatttcccttcatgcttaaccagatattcacctgattctcccagtacacatgtaatttatgtgctttacataaaacttaaaaaaatactgacaataattaaaatattcgtttgcagtttcataatttagtttatgctgcttatggacgtgggaacatgcttgtagtttaacttttatttggtcgtcaatttgattaaaaattataccttcattgattctttttgaaagatacgtattgtgaataatgtataaaggatttagaacataattatgatccttgagacttgtaatattttattaactaaccgaaaacataagcaagagaatcgtggataacgacctaacgtataagaaacatgagacatgtcacaatcacttaaaaagttgtcctatcaaaactcgagtagaagcacatgaaatttctggatattaaaaataaataaatcaaaatagccttatattattgctgtcaggaaataattctatttagactacctgaatttccagttgaacggcgtttttccaaattgcaagcatcatatattatgctcatcgtatcattagtgcataaataaactatggaccaatttcatggtgaaaaa

SEQ ID NO: 44178 - DNA, 605 bp, Arabidopsis thaliana landsberg
ttaaactataccaacataaactttatttcaaaagttgagagtatattaaattaattaatccagatcttggtaatggtatctcctaattctcgaaattgaagatatccatcccatatgtgtcctggatagactaaacgtacgaaatgtataggctgaagaaaagagggttggtgaggacaactttggagatttctttcactcgagagaatatttctgtgaaacagcaaaaaacgaaaacatgtcaggatttgagaactatttacaccgacacagcttattggatttaagtgtcgatttagcagaattggatctacatatatcaggggtatggcgctaattgaaaatagagagacagagagacctgtattcggcggtttataatattctgatagtatgagagatgtgttaagtttccattatcattatcttttccaagtgtataggtctatctgtgtctatataaacatgttaaaacttgaatcatgactcaataagaaatccatagcagatcattactttagccacctataattgttaatcatgttacctcacaaagacacacaacactgtttctactattcggtcatttgcactggcaaacttta

SEQ ID NO: 44179 - DNA, 569 bp, Arabidopsis thaliana landsberg
atgtgcctgtcctgcgcggcgctctccgtgtcaccggccaggcggtgatatcgacgtcgacctcatagagctggccgctcgaatccgccatcgtgatgcagtcgaaaccatcgccgagcgtgaacctctcgccttcgcgcgtggtccaggtggggcagctctcgaagtactcgatcgcgcactggtacaggtgatcctggaggcgctgggcgacctcgtacttctcccgcctgttcacctggtcaccgcccgacgtagctcgtcggcgccgacccagaccgctcggccggtggtgacgacgccgaagacccaggcactggcgatgatctgcgcggccaggtagacctgtcccgccggactacgcttggtcgagagcttcatgactggctgtccttgcgcttcttgatcgtcagtacgaccgtgccgttggcgtagatcttgtagccgtcgacgtaggtgtccccatcgacgatgaccatgaagtcgttctcgatggatgcgctgtcggactggccggtgacggtgtcctcgtaggtaatgtcggtagccatcagcacttctccaggacg

SEQ ID NO: 44180 - DNA, 638 bp, Arabidopsis thaliana landsberg
atggccaatcagcttctcaggttagaacttgatgtatatagcttcttgatgaacctttaatggaagtagcttaatcgaatgtatgtcctgtattgctgcgtgaaataagaaatattattacgcagtcattggcttaagtttgggcgaaaaactcctcttattcatatcgttatagtcatttttagtaatagtctttcttatttttccaggatctggttcaaggaacaccgcctctctcacctatgctctcctgccctctacctaccgcacaacatgtccaatacctgaagcatcaaggaaaatacctgagtctaccttgatttgcctctttggaccaaaccaaaagattgtgccttaactagaatgaaccattatgtgatgcaggtgtagtagcagctggccagccgctaccgctatgtgtctccctaccattcacgactggtggaccgcaaccttatggcattcccacccaattcccagctatgcagcagcctcctttccccacgaatcagccaatgacagttgcagttcctaatggtttctacacaaagtttccataaacaaagtctcattgtttttggtttcatacctttattctttgcctctccaacctaataagggttaaaaaggtcctagtt

SEQ ID NO: 44181 - DNA, 557 bp, Arabidopsis thaliana landsberg
  unsure (1)..(557): unsure at all n locations
aaaataacgtctgccgtgatttcaagcatcatcaccacaagtgcgattccgcctatcctttcaaacaggtctgagccccgtcgcagtaatttttccatgtctctccagtccctttcttnnnnnnnnnnnnnnnnnnnnnnnnnnnnnnnnnnnnnnnnnnnnnnnnnnnnnnnnnnnnnnnnnnnnnnnnnnnnnnnnnnnnnnnnnnnnnnnnnnnnnnnnnnnnnnnnnnnnnnnnnnnnnnnnnnnnnnnnnnnnnnnnnnnnnnnnnnnnnnnnnnnnnnnnnnnnnnnnnnnnnnnnnnnnnnnnnnnnnnnnnnnnnnnnnnnnnnnnnnnnnnnnnnnnnnnnnnnnnnnnnnnnnnnnnnnnnnnnnnnnnnnnnnnnnnnnnnnnnnnnnnnnnnnnnnnnnnnnnnnnnnnnnnnnnnnnnnnnnnnnnnnnnnnnnnnnnnnnnnnnnnnnnnnnnnnnnnnnnnnnnnnnnnnnnnnnnnnnnnnnnnnnnnnnnnnnnnnnnnnnnnnnnnnnnnnnnnnnnnnnnnnnnnnnnnnnnnnnnnn

SEQ ID NO: 44182 - DNA, 460 bp, Arabidopsis thaliana landsberg
taaaactaatcagatagaaccaattttgatttgagaagatgctttctcataatctagtgaacgataataacgtctcctactaggtcttctccgtatgaaagtgatggcataaaaaaccatgaacagtctgacataatgatgtatagttatacgcatttattaggttttccgattgctaaacacgttttaactaattcgatcctgaaaaatgtattgagggattagtaaacttaaacaaaaaaaaaattgtggtcatgcaggagtattactatattgtattagggtatactttttattaagcgtacctaatcaaatactaatactaattcacttagtcgaggacgtggcaatattaatatgacgattttgtcatttcactgtggatacaaatggggcccaaaatcaggccatgaaatcaaatgcccattgaatgtttgcctaccaaacagacttttttttt

SEQ ID NO: 44183 - DNA, 694 bp, Arabidopsis thaliana landsberg
agagtgatgatctcgtctttcaataattccaggggagaaaagttgaacttcagcttgaagtaaaagataaaccggattgccataaagtaatggcgttcatctaggagttttttaaccagatctgcaaagacagagacgagtaaaatatactgtcattatttgagaatcactactgcaaggaagaactgttaaaaagaacagacgactatgtcttgcaaaattaaaacttacttggcatggcataactgagaccaagagattcaaagagtttcggagcttgtttaaagtgagcaacatatgaggcaaatcgtaaagtattatcttgactggttgcatgcaccaatccatatgccacaataagttggagaaaaccccaagcctcaagcggtgacatttgagtactatttcccatcatccagctccatcgagttgccacttgtagtgcatctgaaagaagatgtttgctagattttacaacacgtggtagctcctccaaaaggggaatcaaagtcttaattacaggctctgctaaacccaactctcctctctgttgagcacccaagagttcatcgttgacaacatttagaacatgcgaggctggatctatcataccttgaagtccagtaaagacctcattgggtgaaaaggaagttgagccctcagggtccaaaagaacatgtacatgaccctaatg

SEQ ID NO: 44184 - DNA, 631 bp, Arabidopsis thaliana landsberg
cggtgctagcttgcgagaaagcatcaatgataggtgtagagttgtcgtgtgttaaccaattcaatagtccccaaccagctacttcttttgcattgaatttctcttcggctttatgatttccggttccaagcgaaagcacaagaaaccttccgtaatcatttggtcttattgggaaaaagtcactgcttcctcctgagatctcatttgttacttccccaatggccaacaaagcctatacttgacatataacaactatatcatgatctattcaagatttttaaagaaaactcgtatcgattattataagaaattccatagtaaaaaatgaaatatagtctaacattgtgtgttcatgttataattattcaatttaagtccataataattgttgatatattatattcttcgtataaaaaccctattgctacataaataaatccaatatttagaaatttaccgggttgttagctgcaactccaccatcaataagattgtattctttagcgtttccgtttaaatcttcaactttgaagaaatgggcaggccagtatgtaggggcagctgaagttgagatggcaatgtctgcgagggctgcgtccctgagaggaggttttttacctataaatagtca

SEQ ID NO: 44185 - DNA, 213 bp, Arabidopsis thaliana landsberg
tcaatgtattgcattggctgcaggcagttgcagtgtgcttcaatgaatgttgaaaatggtttcagtgtttgttatgccttcgattcctggtcatgctttagatgacctctaactattagcttgatgtgctgtcgttcatggagtatgaagcatactatggttgctcctttcaattgcaagtgacgtagcagtcagagctatcataggctgact

SEQ ID NO: 44186 - DNA, 678 bp, Arabidopsis thaliana landsberg
cgataaatagcacaagtgaagaagaagccatgtatagtgtgagtagagtctttgcttaccgtgaatgaaacactgcgaaacgaatctacatttggtataaacattttcgatcttctctggtgctatatattctccttgcgccaacttaaatatgttcttcttcctgtcatgcacattgaagttttaacaaacatttcaactctttcttccgcaaagaaagaaataacaagaatgttttgatttataaaacctgtctatgatcttgagccgaccaccaggtaaccacaacccgatatctcctgtgtgtagccagccatctccatcaagaatttctctcctgctcaagtaaatgtgtcaagactcatgtccacttatctatacatataactagagccactaatgatactggaaaatgtgttacgtttgttcttcatctttgtagtagcctttgaagatgattggtcctcttacacagatttcaccacgtgggtatggttgatcgtctgatgtgtaattcatttcgggaacatccacaagttttacctctaagaaaaaaaaacattttcaaaacacaaaaaccagtcatacaatttggatacaaaagtttggattctgatatatacactgtctttaaaataacacattgcttaccgcaagctggattaggggaaccgacat

SEQ ID NO: 44187 - DNA, 1308 bp, Arabidopsis thaliana landsberg
caacaccaatgctcacaggagtaccaccgtctacagagtgttgcgggaaactttttttttcaacagccgtgtttttgtacatatgtgagagatccaagatatagtcaatatgttggttctgcaaatgctaagaaaacgttagcaacttgtggtgttccttatcctacttgttgatttttgagatattgctaaaaaaagttgttaatgataataatatttaacaaacataagcacacatgtttctacatttttgtatgctttttttttcttcgtttccgactttaaaatggttaacaaaattatagtgttatcctacttgttgatgtttgagatattgaacatcatagtgttaacgttagaaaataactaaaatacttatgttttagtttaaccacaatttttaatttaactatatgaatctttaatctaaagtatatttacaacaaattaatattcaagttattgtcgaatgtcaataactcaattagtaaagtatttcaacaaaccgttaaggtagatggtttgaatggagcttgggatgaaagaccccaaattaaatactctggtctctcccgacatgaggggatgtgcgagccaatgccaagagtctcttagtaacaaatggattttggtcgcataaatccatatacatttataaaatgagattcatttttctttttgcttttatgaaacataaatatatatatatatatatatatatatatatatatatatatatcttacatgtatttttttaaaaaatataattttacgaaaaatacagttttgtggtttttgatggatataattttaatgagaaaaccatatatattatacaattcatcggttttaatgagataatgtgattttacagttttggcaaaaaatagaacttagcgattttggtgaaaaaagtgatattactgtttttatatgtgattttatagtttgatggaaaaatatgattttctgtttttttttaaaaataattgtaaagatatcatttaggttatatatgttcggtcctcatctaatatttggagccaacttaatcatttgaatattcaaggtatattcatttgttatttttgcctgaactatcgccattcaaatgctctaatttggtgtatccaagacgagtttgaaaatcttaaatggaattttaaaacactcatttaaatttacccattttttgcctatattatgcacaaaaagcgaataatcatttttggagcgagcaaaatgaacatgctttatagtcaaacaaaaaattaaaaaattttttgagaaaactttattttaaaaaaa

SEQ ID NO: 44188 - DNA, 804 bp, Arabidopsis thaliana landsberg
tatggctgacctgaccaggctcacataccaaataagaaaagtgcaacatatatacttgtcatggctatatttacaaaataactacatcacctcatcatatctataaccatattcttataccatcacaacatctcatgcatatcatattcatcaaatcatcaatcaacctattctctgaccaaatacatacaaatttcggctaaatatccatggaactcgatgtatcatcatctgtagtttgtcaaaaatgtatacactaataatgactaaattaaataaagcaaacaaactaataaagcaagtaaatgaaagaaatgatataaaagatgaactcaataaaaagcattgaatctaggattaagttaagcgattaatgaaaacaattatcaataagaatgcaacgaaaaagattaaccttctaatttggcatatcaagagattaacaaaggctgaagaatatagtcattcccatgttttttttttcaatgtacataacttaggatttaaaatcaacaaactctaaataaatcaaatcaaagtctcaataacctcttggtcaaactgttatacaatatttataagaaaatattaatagtttttttaaaaactcaattgatctcaactacaaataataacctttttttttagtgaatgtttgatagctctagaaatacataagcttaaatactttattaaaaagttcatataacaaaaaatatttttagtttcaaaataattcatgatttaactttgtttatggagtttttatattattttatcgatatatatatatattgaataaag

SEQ ID NO: 44189 - DNA, 533 bp, Arabidopsis thaliana landsberg
ctctcagtctaatcataacaaccacttatcatatttgaacttctccatcaatgtttatggccaccgtacgatccaattccaaccaccgcgggatgccttctttgtacagccgcctttcgggtgcccacgagatgatgagggctaaagaaatcagagtagacctccatgaaaaaattctcaaccacgtcgaggtaagcagtgtaacgaagacgagagtagcaatgcaaaaattctcttacatctgagacataatattcatcacttattatatcatcattcatcattttctccatctcctttagttttgtacgaactagattaacctttggttgggaaaagagtgtctcgtctctgtctcctattctcggttgtagactcgaagctttgtttgtagtcacatagtctttgggtttaggttgaaattgcttgtgtatggatgatgatgatgatgtgatgatgttggagtttggatgatcattattaatattggtagaggtgttgttaggtgtttttggtagtttgtgataagtacc

SEQ ID NO: 44190 - DNA, 1095 bp, Arabidopsis thaliana landsberg
ctatggagaagcagcgtctgagcgacaagccattggttcaggactcttgtttcatggagttaaccaagtatgtttcactctactttgaatgtaaaacttatgcagctatggttcttgtaaagaaaaagtttcttcatttaatggaacagggagcttgcgttggactctattttattaacagaccagagtggttggttgtggatcatgcttgtgcagcatattcatttgtctctgttcctttatatgatacacttggtaaccaatctaaatttgattttttctctttagttttcgagttttgcaagccttgtctcttcttaatatgattcttctggttacgcaggtccagacgctgttaagtttgtggtgaatcatgctaatctgcaagctatattttgtgtaccacaaaccttgaatattgtaagtgtgttttggtttgttaaagtggtagctattatcttctgagaatcagttcaagtatagtctaaattgcaacactttcgatcatgaattgtgtttgtctttttttgttgggaactttgcagttgctaagcttcctagcggaaatcccatccattcgtctcattgtggtatgtacttctccaatatgtaatttcactgtaagctaaaatatatactcccacttataaatatgttttgcactgtgattaggtggtgggaggggctgatgagcatttgccatcacttcctcgaggaactggagtcacaattgtttcataccaaaagctattgagtcaggtagccttttacaatgggttttaactaaagtactaaacatgtgttgttatcttggtgaatgatgtctctgttcctgtaatgagttttgcttggtagtgaaagagacttcatgttgccaccggctatcttgtagggtcgaagtagcttacattcattttcgccttcaaagccagaagacattgcaaccatatgctacacaagtggaaccacaggaacaccaaaggtgagtttcttctggttgaaatggtgcataaatcactttaaagctaatacctaactatatagttgattcatatgttttttgtttcaagggtgtgtgttgcttatgaaacttat

SEQ ID NO: 44191 - DNA, 454 bp, Arabidopsis thaliana landsberg
tgatttatttcaatttttcaagatgagaaacatttaagagaatcccaagaaactctgtctgcccttacttgatatctaagttggtcttaccataattatttaatttttctccacaacttacatatacttatgaatgcacatgcatgtgcatataattttattatgtagtaatatagttccaagaccccttatcaaaattgaagttgtgagcttgattctactctaagtctctctttcacttttaagtgttcgatcaaaagatcgacggtcatgatgatgagcaatctaaaactcggcgtggacgtgatcggagcacacaatctcttcccaaaagatgggcaaggaacatcgaacgcttacgttgagctttacttccgatggtcaaaagcaccgagcaacgatccaagatcgagacttaaacccggtttggaacgagaatttcttctttaacatc

SEQ ID NO: 44192 - DNA, 801 bp, Arabidopsis thaliana landsberg
gaatcttcgaaatggacaagaatcattcaatgaaaccgtttttgttttattaaccaaaaaaaatacagatatgctaaaaaaaggaattggcctttttgtggatgatgaatcaacctaatgttatacagttctagagtcagacaagactcccaacaaaaataagtttctttcagacaatctctagatttaaagaagttgcaacagaatcagacatcttcagatttctcactagtgcagcatatgccataccagaaggcttcaaacctaaggccttaagctccttgtatagtttcaagcctttctcaaccttgttttctttgcaaaatccttttatcaaagcgttatacgtgattgcattcggtctaaccccggtttcagacatattcttgaaaatctcgaaggcctcgtctgattttccatgtgagcagaaaccctttatcatcgtattgcagcttaacattgttcctccatagccatttctcaacatctcattgtagaatgcttcaacaagcgaaatttcgcctcttttaaaatgcccgtgtatcatcacattgtaagcgaactcgtttggtcgcatccctttctttatcatctcaaaccaaagcttcctcgcgctccctaaccatcccttctcacagaatcctcgaatcatcgtagtatacacaactctatcaggtgcatagcctttatctttcacattcttgaatatacaataagccttaagctgctgcttattcatacacaacccctttatcatcttctggtatatatacatactcgggaaatggctccacgctctca

SEQ ID NO: 44193 - DNA, 594 bp, Arabidopsis thaliana landsberg
ccacctctttccgattagcttcgttgggtgtactacgtaccttctttttatttgtccgatctttgcctaaaaggctaatacggtaatacacaaaacgttcctttgcataattgcatgcatggctctcttttttctttaataaataaattagtttgtgttttttctttaaaaagtattttgttcactccataagtctcaaatcctatatgattcaagacactttttttgctaaatgatctcaaaatattacgagaaaaatgtaataaacttatcatcgttatgtttgaaacaatataaacttttcctatattttaattcagtaggaaactaaattatcaatataaaaaatttgtatagtgatgttgcattttctcgatccaatctgtcgggttgtgaatttgctatattgtacatgcgagttaacacaaacttcaacttgtatagttgtatttatgcttacgagttatatttgcatacattttctcccattactctcatcacccactggccacttcatttcccattatatcaaaaactagtgtgcatatgccagtattttttagcaataaaataaaaactatgcacgtataaacg

SEQ ID NO: 44194 - DNA, 777 bp, Arabidopsis thaliana landsberg
cgtctttcgatatatctaaacaacgataagctttaaataacataaagatcataatactaacacacggtggtagattagtcggtgtaagaggcggaaaaacaaatatatgttgactgagttcattgtatcattcgagactttcgagttatttaccatttagtggaattttatttacaggaatgaaaattgttatcttgtcccaaaaatattcgtatgaatatgttctctacacatatacaaataataagtaacatttaggataaactgtattcggatttattaagatattcatgttgttgccgttagtcatattgagtgttagttgttccatttagccgagctctcttggtagcaagggttcgataccattctcttccaatgtggttaaatgtgtaattgtataaagttaattcatttttgttacttatatttaaaaaatagatatagaattgttattcataactcaccgtagacaaactaaaaatttagaaagccaaattggaatattcaaattttagcattttaatattcatttggttgaggaggaagagccaccaaccaaaccattgagtctgatcatcttgatattattgtaatttatgtttgtttaatatgatctttttaatttcatttaaattaatattattggttattataattaatgaaaatctaagaaacaaaaaaactttgtcttcttcgtttattcatcgttcgactatgaaaacaaaacatatccaaaaaatcaattgcgagattgattgaaaaaacaaaaatcaa

SEQ ID NO: 44195 - DNA, 836 bp, Arabidopsis thaliana landsberg
attctttaccttcataacaaaagtcactatagaaattaccttttgattcattagcaagaaacaacaacacaaattcattcttatttacgttcgtcaaaaccatgacgaaagaaaacccttcaaccctaaatctcggacaacctaaggcacaagaaaagtattccacaagtttagccaagatcaaccctaaaccctccggtagctctaccgttgaatcgaagagccaagacaataactcacctagtttaaaacgttggagatcgtcctccggtaaatctacgaggctaaattgtttatgttctccgacgacacacgccggttctttcaggtgcaggtatcaccgcgttgattcgttgacacgtgccgggtctattgggtcgaacctcgctgttttattgtcgtccaagtcgagccggtttagtgactccctcaaggctcagtaaacccggttactggatttgttcggtataataactgtcggttttgttatttgtttgtttcttctacttcttcttttgacattgttcaataatttttatcgaaaaagacattggtctgtattactaaaccgcttgaaatcggcttaacccgattcaaggtaaacttttatctaattttcaccaatttgattcaaatttaagcatttattacatacacattttatatgcttcatctggtgaaattggctatgaaaatacttgaaatgaatttttctgtctacattttatataaagaaaatataaaataattttacgaagtcagaaataatacgcaatataatatatttttgcaaatttatatatattgtaacggtttgatgacacattattttaaaa

SEQ ID NO: 44196 - DNA, 728 bp, Arabidopsis thaliana landsberg
aggttgccttttggagtgtagcttcaccagtaccagttttccagcatggcttgagaaaacaaccaacggttaagaagcaggaaagccaagaattcgggtaccgagacttggaggcaaaatcaagtaatgtagtggtttctaggaatgcttccaaatcaagtaatgttgtggtttttgggaaaagagaagttgcagagaggggggaaagagaggagaaggaggagggatcgaagaagaaaatggacgagtttgctgaagattacagagaagtgatgccgcatggaacattgaaggtagatgaactagctaaactacttgcataatgaaattttgtgtatgtatttgttgactagtgtataatgtagtctaatcatcattgtcaaaatagctttttagaaattggaaaagttatatacaatccaccttcataagctggtaatagatttcttaacataaaatcctgcttacaaactcaagtgaaatttcttaccaacacctaaatactattcaattttttttttggatacttttatctattttagtaaaaaatacatgaatattatttttcttttaatattcggaagggaatcgactcaaacatgtaaattctcgggaacttgactactaaaaattttaaacttaaggaattcaaaacaaatattagggtagttcacataaaaaaaaaaaggtttctttactccacaaattcaaaattcaagacatatatt

SEQ ID NO: 44197 - DNA, 784 bp, Arabidopsis thaliana landsberg
acttcgcatgcataattacaccaacacacatatagcatagcatggtgacaaagctatatctggtcaaataatattggaaaacattacaaagttgtataatgatgataagactagaattaatttcgtttggccatggcaaaggatgagaaaacagataaaacagcaagacagatgaaagcaaagagaagaagactggccgatgcgtagcctttgctaaagaacttatccactggatcagtcgaatctaatgcgactaatgctagaaatgtgtctttcaaatctttggtcactccaaatccagctgcagaacccgtcgccactaggtatgatattaactgccaaattttcaattatgatcattagttagaaagaaaacaaaaaaacacattttcatgaaagtttcgtttgattcaaagtatcaataggttcaagaaattaatttggttagaaattaattaaataccttgtcaccgtaaaaatcaagttgataattaaaagggtttttcactccggtggcgaattcggagattgtgaagaacagttgtatgacggcgtaaaccagtccaatgacggcagctgaaagcatatatcttcaagaaggcaaaaaaaaaaaaattaaacgaaaaagtttgatactcttcggtttaattaataaccaaaaaatgcccaaatttaaattcctagtttaattaataaactcataaatgacttattacaagcacaaaccaaaattctttgatcaaaacataacaaattactttagtttatgactattgatttcctc

SEQ ID NO: 44198 - DNA, 139 bp, Arabidopsis thaliana landsberg
tagtatggacagcaacggggcagggaaatccttttgtttgtggaaacaattgccacgggtctaagaacaggtgaatatggcgggagataggtattcagatatattacatagacagagcgattcgggatgatgattcatg

SEQ ID NO: 44199 - DNA, 553 bp, Arabidopsis thaliana landsberg
ccccatatgaagctgggtcttcggcatcctcacttctttcggcaagctataaataagtctaaagatgttgtactaatctgtggagccatgccggatatgccgaacttacaccatcaccgcctacttgatctctccattctagaaaatctttttgtgaacagagggaatcataagaacagagtgaagtgtgttttctcgtccatgttttgatgtcttatatgggcgtttcaatggactttggtgaagtgcagatagtgagagtctaaaatgctttttgttttgtctattttgctcaacatctggtgcctccatttgaatctttattggaaagtggctttgttggctgggagacttctacatttttttggctgctgtgggatactttttcatttgtggcttctaaaaagagaagagaagatgtgtttatcaaacacttggggttctacgttggggtcgcaacatgtcttaggtggaaagataatgtgttgaattgtaacgagatcaacacttgtggacttttcggaaatcatactattcacgagaacagtcgctt

SEQ ID NO: 44200 - DNA, 818 bp, Arabidopsis thaliana landsberg
gaggcacctattgactacaattacggtattacgaacgtcacacgtgtggagatctctccataccctgttgggccttacgacgagccaaccattaccatatccggctttacaagtgatgatagtacgtaataatttctattctcttaattgttttcatttatagtttccaatatattatcttgtaagaaaatatatttgtgtttacaggctacatcatctatagagcaactatacatgtgttgtataaatatgaaaatgtgaatagcactataataaattacgacctcagtgatgtgatgggtgacgatccatgctctattgaacccggcgaaaaatttgtgttaactctttccaaagttcctggtttgcagtcactccctcatgtaagtattttttttacattaattccataactaagattgtgattgttctttgtgtcaaaagaaaaaaagattgtgattgttcctttaccataggacgatttagtttgttcgtcatatcaacgctagtttctgattaattactctctatccagtctaagagtgcttggacagaaaattttgatatcgaaactgaaataacgtttttatatggttttaatagttttgtttattttagtaactgaaaatgcaaaataatggaactgaactttaaaatatgttttgaagtgtaccaaacctagctacaaaaaaaacatcacgaaatcctatgatatttccaacaaaagtttggcctatatataccaatttcagtttcactttgataactgtgtttttaaactgaacaatgtagtatatttacttggttagcctgactgt

SEQ ID NO: 44201 - DNA, 684 bp, Arabidopsis thaliana landsberg
tgcttactccaggactcgaagccctagcaaagtcaaaatttcttgttccaactgcaaatttaaataaagaatatgaaggtttccgttgctcaccaagaattaatatctacaatcacaatctatcaacgacctatctaacaacaagaataatagttccctgcagaacacacggttgcaataaccaggagcagagtaattattggttctaggatcctaagacagaagtacatacaacaaagagcaatggcatgcctcactaaaagtctaaaaatcagtaataacatcaattggattcttgaatctacaacttataatcatcatcaggaactgaacaagaatgccaattagctgctctaccctcatcaccatcatcttaacaagctattaagaatcagctgatctcccctcatcagctattaagaactataccatagttttgaatgttattcaaagtgacagaccaacaacacagtatgaggtttccacaatcacatcaaacacaaaaaataaaataagcagaccctgctttctggaagacatagcttctaaatcatagaacaagttctggtggaaaattcaaggactggtctctctttattcttctttgcaacaatattgatgaatagtaaccgtagtaagaaaattacctgcttgtacgttagtttcaagggggatcatgataag

SEQ ID NO: 44202 - DNA, 992 bp, Arabidopsis thaliana landsberg
taaaaataaaatctacgtatacgaacggtatactagataacaatctgacgtatgtctacattaatatttaagaggaatcctatctccgcaaaacaaagctttaaattcagtaaaatatgtgtaattagttttatctttgatcaggttaccttgccaaaaccaaaaagccctagttgatcctcatcgtttttttcatgtcatataacgtactagcgtgccacggccggtgtcacactgcctcatcgctacgaactataagtagccaaattcaacaaatatgaaagaaagaaaaaaagtaaaaaaaaaactcaacaaatatgaaaactttgaatttctttcaacaaaaaaaaaaaagtgttgaagttttgtacttctatcaaaaaaaggtaacctaatatgatagtattttgaaatttctctatcactttctacttgatatataaaatggtaagatgagctaaagaaatgtttaagcaacaaaagaaaaaaaatgaaaaacattaaagaaattatactttttctttgttttcaaaattataattatacaaagcaggacactagtgacaggtccttttctcgtctcttctagtataaaactaagagaggttattagtttattacgtaatggaagtcacatgcttaaataacaacgatttctcgagatctggtccatctgcaccgttcaatttcagatcaatctgcgaatttaaacacatcataaactattagctaggtttatgacctgacttacttttatccgtgcttttgtttatgattacttcactaggttcttttagcatttgtcttttttggtttattggctcattgtaaacacaatttaagcccgatagtccgataccacaatatatctattcggtcgataaaaataatttattttattttgtataacaatacaaattgtcaacaaaaaatctactacaatttttacattccataaaatacaaacaaaacttgaatttccatagacttca

SEQ ID NO: 44203 - DNA, 439 bp, Arabidopsis thaliana landsberg
  unsure (1)..(439): unsure at all n locations
ctgccaggctcctgaatcttgtccagcatctcccggccctcgctatttagctttcggcttgaccaggctcgccgtctggttcgcacgactgcgagcctccttgatttccttgccacgggccagcgccacacccatgctgtggcgaacgaattgatcgggcttgccgaacagacgcaggtcagacttcggcaccgcaagcgcggcnnnnnnnnnnnnnnnnnnnnnnnnnctgttttccacgccaccgtatatcacggtgctggcgccgggcgccgtcagggcgacgttgaccggcaaacccagaatggcacgcgcgtgcaggtcgaactggctaaaacgctgactggtcatggacaccatgccgtgattcgtgcggacgcggactgaattgctatgaccagaccatatcgccctcgacgaacaatttcacgccgaacag

SEQ ID NO: 44204 - DNA, 1087 bp, Arabidopsis thaliana landsberg
ttaataattgtatcaaatgtatcttaagaatatgcaatactgtacatgcatactaaacaagaattagtgaatgtttagttgagtgagacgattggatgctggaatgtctaatagctgcttttcaacgtgcttcttattgcctactctagctctgtctctctctaagctgtttaattgtgatgagtgtcacgatctcgctcgtgaaatttcatctaaaaagtaatgtcggtaatatataagatgtttaattagaataaagcagtgtcggtaaaacgtttaatgaaatgaaaacagtaaggtaaataatgttgaaaattagtcaactaggaaaaacagtataattgattttttattagaacaataaaaagtaaaacatccaaaaacagtatgtgtacgactgacggactgagacttatatttttctagatgcttttgttaagagtagcatcattgtatcaccatccacatgaccatattcaacacaagcctgtatgtgcatatgtgagtgacgatagacataacctgtatgaaatatataaatatttgaagagttccgagttagatatataggtaacaaaaaggatatggagaggcgtgtggcttgtaaaatactaaaggtttatagcaaaaatatgataaatgaagatttggaagcattagagtttggcggtcaacatctatggacaacagcttgtttctactcaaaatatttattttataaaatagagtaatttagtggcttgtcctattattagggtttaaatttgatcacctcaccagtccctatctcctttaataattctttgtcattttcctctaacctttttatctctttcccctcaatttgttttattcatttatcactatttaacttctttaataattaacttttgtttctttagatcaagtacataaacgagtagatggatcatggatgttacacttatttattacgacgactattcatcatcatcggtctccactattctctcggaattatatgtttttccgattctcatttacatgattttctttttgggtttttctcctccattaaacatacgactaatctacaagatcattaatc

SEQ ID NO: 44205 - DNA, 502 bp, Arabidopsis thaliana landsberg
gggtcatgaatctagtaatcatattattatgaagatcttgcccaaggaattgcacggaattttttttgatattctgcctctttcgttgaagctcacttctatgtccttcatttcgtttgtagatctcaaaatcagctagctgatgctttggcaaagtctgccctccttatgtggcgtattgtaccctaaattaagtaatgaaatcctttctttgttaaaaaaaaaaaaaaactttatttaagttcttttttgagtcggtaagattacaaaagtggatataagaaacaattatttcgtgcgatatgagcatgatatctagggaaagaaaaacaatctgacaatttatattctaactatttttgccttcaacgtcatatctcataacaatgagcatagcttattgaaaactaactgcaaatgagttcgaattgtttaaataaaacacacacttaaatatactaattttttatcacctcgcacatattacctatctatgtatcat

SEQ ID NO: 44206 - DNA, 546 bp, Arabidopsis thaliana landsberg
aaagcgttatttaggtttagtgaggaggcacaatcattcagctttggcagccactagctcgttctagagatgaaggcaacacatagagtactgtactgaggcaagaagagacagtataggtggttgatggcgatggaagcggttgattgtgtctaaacctttaaagcagtaccggcttgatttggtttgaattgaagacttcttctgctgcatgatatgaaccttaaagttgtcttctctcatctctaattttcatgttcttagaaaccttttcaccttttcattttcatgttctctcatcttgaagacttgagaggaatttccgagtagtgagatcaaaccgaagaagacattttaacttcattcgcttgtttattgcttttagatctccacctgtgcctgaactgtttaaggattatagttggtgtgtgtcaagtcaagtgtcttagcattttaagagttacagatctgatgtgaagtcgtacaactgaaacaaaaggcaaaacaagatttgatgcttcatacaattatactccattaatcttt

SEQ ID NO: 44207 - DNA, 1373 bp, Arabidopsis thaliana landsberg
  unsure (1)..(1373): unsure at all n locations
tttctcgacagttgtttcattttttgatataaaaatcaaaaagaatgtttggtttattgaaagatgactaatgaagaatgggagancggtaaatgagagagatatgttgaattaggttttagttagttggtgaagactgaagagtgagatgtggaatgtggttgcttgtgggagctatatatatatacttccgttttttacttgacgtcacgtagctagtaatttattagtaatcatttattgtcagttagtatatattttgctaatcttatactacaaatctaaagaaaatctctcttcctatctctatataaagttaaattgaaaaagactcaacaattatttcaaattttgaagtatgtgtgaaattgggttaattaaaaacagaagtagactaaaacgttataaaattttagaggaagtagaataatattgtttaaccctcactatatatattattacacaaacacatgagagatataaagaaaacgataataatgataattggataggtgaagtagaatagagaaaagagaaagcttgacacatagttaaacaaaacaaaattagttttgtccataaaacgcgttttcggtcaccgcccatacatacatgacaatgaattagcgaccaaaacaatacaaaatctatttttagatcgaatgtcatgatattgtgttggggatttcaccaattgtgtttcgggagttatctgacatgtttatgattattactgcggctatgcttataatacaaaactagtggacattagagatattaaatctgaagaaaaagaggccgccaaattgaaaataaatagtaaattttgattgggagttttgggaatttgaatatctccgaagccagtaagacataaacttaaaaaaaattttaagatccatttcggatttggacaatttaaatccgaactcgataatttcatgatcatgccactagggttaatcagacacaatgtccaaattaaaaaaaaaagtgtattattcacaatttctggttatgaatattttgatttaaagatgttattgaatctaaatttacaatttttttttgacgattttaataaaagcatacaaaataaagaattgaaaggattctaaactattggtgagatcctggagagttttctataattcattgttgattagtttatccacaattcttaaaaaagttttccaaataaactttctattttaaaaaattttttggaagacttttattttgtaaaggaaaaattcaaaagtttttaaacctaatacactattaattaaattcatttaacaaatcataaaatcttttattttaattggaataacacaaaaattttattgacttttttaaaagtatgaatcaaa

SEQ ID NO: 44208 - DNA, 1086 bp, Arabidopsis thaliana landsberg
ggtagacgtatagaatagccaaaatagaatgattatgaaatttatataatagaaatagttatgtaagaattaagatgagctccaaactataaaacagcaatgctttttgtttgattttgaaaattgatgaacatagaaaacagtttatatactttttcttaaagtttacaagatttagtttctaacattttgagatatagattttgtaatacaaaatatttaacgatttaaaccgtagttcgttgtatgtgaattatcttctcgttaaaaaatgtagctgattatcattatcacatatataatcattatttgtatcacaggacaccctcaatttctcaataaaaatagttaatctcaaagtcaacccacaaagtggaataaattaaatttgctattgatatatcgacaagatcatggcgatttagtggtcacttaacatacacgacacattgagtaattattatatagctttggatattattttcaattcaacgaagttgttgacttaacaaatgtcaactcttcctccacaattggaggtcaagataagatcaaaataaaagctatattcccagaccgtgacacaaatttgaaatttgtgactacattcttttcagaccaagatattatctgatcaaaaactgtagctaaacccaaaaaatttcaataactcaaactaattagtgtctaaacatattgggcttttaagtgttatggcggcgggaatctatggttaacttatcggtcctgtcgtaagcccaatgtattccaaatggatggaaatgtgtaatactcatattaaatcacctgtacagaaattgcgaagaaacacacataatataaattaaattttaagacagtaaatgccataggtgtacataattttgttcaacgtaattacattaatacccctccttcaaagtttcagtacctatcgcagttagaattatttattagtgtaagcaactctagctgcttcacttttcacctttacatcttcatacatttttaaagaagcttccgaaaacttttttaacctctttagaagcttcgccaaactcgaatgcacactcgacaaatccgaaa

SEQ ID NO: 44209 - DNA, 566 bp, Arabidopsis thaliana landsberg
atatgaccaatctcttgaaagttactgttgtgtgaatgacctatttaattgttgtatattcttattgttcacaggtacattccccttaatcggctaaatgaatccattcgcattaaggaaaagttggaaccaggatgttctgtttcttctctgtcaacgggaaaaggagttgaaagagctaatagtagtcttatccgatgcaagctaggctcaactgaagcagttgtgaaggttttgtttttaccttttgtaatctctatctgtttcacgaatgagtaaatttactgaatagtttcttatttcctcagatgcgcacattagaggtttctggagcttccttagatgacattaggacttttgagtatacatgcttaggagaagtacggattttaggagctttgaaacatgactgcattgtggagttatatggacatgatatatcgtccaagtggataacctcagaaaatggaaatgaacatcgagtattgcaatcttctattctgatggaacacatcaaaggaggatctctaaaggtaaaattctttcttactcaatctatatcgaaa

SEQ ID NO: 44210 - DNA, 531 bp, Arabidopsis thaliana landsberg
  unsure (1)..(531): unsure at all n locations
tgtaagataaatcatccataattctctgttgttaatttttcttacaagtgttgcactggctaaggtttgaaatgggctctcttggagtaatccttattttcatcagcatttaatgagattttatggatttttttttttgaaaaatttccatagaaatgaaatgtaaataaagattttatcatgcaataatccaaaatttagttttgaatcttacatggatgcacatatatcaaaacaaatcagacaaaaaaaggtaaatataatccatgaaattcaatgattcataacaaatctcaccttcataattaacaaacaaaattatttctatgcctcatcgatctccacctatttatatgaacattgtaaacaaagaaaaacaaataacaaaaaaatggagattaacaaatttctggccgtagtcgtagtcgtcgtggtcctctactccgtcgaagcgacggcacaaggaggaagcctcagtnnnnnnnnnnnnnnnnnnnnnnnnnnnnnnnnnnnnnnnnnnnnnnnnnnnnn

SEQ ID NO: 44211 - DNA, 941 bp, Arabidopsis thaliana landsberg
acaaaggtccgcaaaagaccattgtggcaaaaaaaatgtttcacatcacattgactctttttcatacataccaggcaatgaatcagatttctcagtctgtgaagactctgctaagtcctcgacaggttcctgaatcacaaccttcttcttctttttcttcttggaaggatcaaagggtgcgagctgctgtaaaaggatgaaccaaaacataaaaaccattcaatcatgagttcatcaaacaaaacaaaataaaaaagtctatatggctacacttgagccctatcattaagaaacagagaaaaaaaccaaacttacttcttgctcttcccttatctcattgatttcatcagccatgattgcaactgagatacagaacgaaaacacccaatgataatcagacctcagaaaccaaacatatacatattagaatcaacataatctgtaacaacgatgagcataggcaagtccgaaattagggtttctaaatcagagaggtaattcggaacgcaacgaaaccataaggagattcagaacaaattttcgattcccaataaaaaatacccaaataaaatgtacgacaaggcttcaaatcagaaacgggacaggtaggtttaccaatctgtttatactcaattcttccaaaacacgatttgctttgagatcgaccaaagaatttcaaaaaggaatcgaagaaaactcacacagggatgtctaagcgctgaaactggcgtacagagtaaacgaggttgcttccggaggaatcttaaagagagtaaacggcgcaggggttgttttaatctgaaataagagttaacccttgctcctcaaaaaaaataggacatctcgaattgttacttttttttttaattcaacagtaaaaggtctctgtaaatatctcatttggcctaaaccttaatattacatttttacttttttctttt

SEQ ID NO: 44212 - DNA, 1057 bp, Arabidopsis thaliana landsberg
acatcaacattgaatcaaatgtgacaaaagtctaaaagtcataaatggccaaaccctacattaaaccccttattcatgaagtagtttgaagcaactaattaagaaagacaaaaacaagttgaaaaataaaatctatttatttcctacaacaaaagagacctaaaagtgaagaagaagctgcttctagattgtcggtatgacgtaagcttaagcacatgcgacatgttcttctcattctctttcacatcttccttttgtcccatgtgtcttttcctcaattattaatctctctttattaatcttcctccatactaacattaatagtatattgatattttatataactttgacgaatgattgattgatcacaatcaaaattaattgattaactaaatattatacatgtataaaaatggcaaaccggttagtgtataaaccaaacactactaatccacatgcgagaacaggatggttctcaaatgcatgaaatcttttcccttgaggaaccggaagaggaaattatattggtttagatgtaccaaacaaagcaaaagtatgcagcttttcttttcttcaccatggaacccacaaaccaaagcaggggtggtttagttgggtccagctatccactgaaacaaccgcatcatcaagcgactctgtacagaacaaaaaggcaaaaataaaaccccaatgagtagatccaacggtgcagattggaacagtaagaaaaaaacagttgtcccaccatctgacgagtcggtgaatacacgtgtgtgtctctcgtttggttggactccaaagagatcaaagagaagagaacaccaatagaatattatagggccatttgggttcaagtataggtacctaaccaatgtacgacataaaaattctttatacttataatgtaaaaacagagcatgatttttacaaaattatagtcgaaacctgcaaaatattgacttttctttgattaacattttgatattttaagttattatttcaataaataagctgaaagctaataagtcattgatccttattcagtttgattttattt

SEQ ID NO: 44213 - DNA, 214 bp, Arabidopsis thaliana landsberg
ctcattttttatagagtctgcatgagactccaccacgtgagtgctcaacctgcgacaggtgatatccggcatatctgtgccatcctatgtgcctccattagtcgtaacatataaaatgctacctgctgtagggacgaagaagcgcttcactatggctgtagccttactatagttgcatgctataatagtgtacaaactaatctttggttgatgc

SEQ ID NO: 44214 - DNA, 120 bp, Arabidopsis thaliana landsberg
aggtttcttcgcttttttttttccttccgcctaaccaaactttgaaatgctttatattacagattcggagcgaaagaaagacctatctaagatgaaaaaacccatatacccgttgactac

SEQ ID NO: 44215 - DNA, 376 bp, Arabidopsis thaliana landsberg
catcttcattgcacaaacacgaagcaagtcaatgaacatttattgaaatagtaggcaacacaaaaaaaaaaaaaaaaaaattgccaaaacaacttacagagctctgtacatggctttccaggctcgattctgaggttcttcgagattagaaaaggcgaaaacttacttcacaaactaaaaatctaaactctaaatcagtaagcgaacatttccatttatcgaaactcgtttcaattatgtgtatctggttctagcagatgcgaccatgttagaagaggagagaagcttgccgaaaagaaaacatttcaggtttatcattctgatggaaaaaaacaattattgggccgtattcttcacatttggcccatttatgcat

SEQ ID NO: 44216 - DNA, 692 bp, Arabidopsis thaliana landsberg
ccatttacttttggaaccaaaaaccacgtgttacctaatttatttttgcataccataggacgatttttttaactcgccaagccgttattaaatcgcacattcattcggatggacatacattgagggcagtcactgtcttgtggtcaaagtcattgtattgatatatagagcaaacctaacgaatacaaaaagcatacggcccatggcatgacattgatatatataccttcacaacccaaactcacatccaaaatacttctcttctttctttaggttcttgagaaagatgattacttacatgggtctgacccacacgattgtcttactttatttatcccgtcaagaatgtttggaacttaataatgttggttcttaatgtaataaatctctaaacgttacgagagaaggacatatattaccatgaaaagactatgattaattttattttattttaattcattttccagatgcttcgaaaacaaggtaccatttgaaaatacaagtctaacgatggatgttgctaaaccattatttatcctcgtgagtgtcttaagatataacatatagtcaaaacatcatctatatatataattaaaaagaaagtttccttccaacgattctaaaaatatatttaatggtaagataaactttagaagatctttgctttacatggtttgttattattgacatat

SEQ ID NO: 44217 - DNA, 1252 bp, Arabidopsis thaliana landsberg
gtatggggatggtacagaacgtgatagacattccgactcagctagagtatttcagagaatacaagagaaaattggagggtaaaatgggaaaacaagaaatggaaaaacacatagaagaagctatgttttgtgtaagtgcaggaaccaacgatttcgtcattaattatttcacaattcccatacgaaggaagacttttactatcgaagcttatcaacaattcgttatttccaatctcaagcaatttatccaggtgaaaattcttatttcctgattttccatatacctaatccgtttttaattatggatgtttatgctatgtagattttggtgtagtcaattaggatatgtagatattctttttttttcttaaacacaaaattataacctaacctaatcttttggttccaaagataccacaatgttgataaagttccaaaaataccacaaacattaattaggcttacataaagtttataaagattattctagtatcctagaattttatggcttttatttcttacatcttaaatcagtgatcttttgtgattttttaaaacttatcatagctttatcaaacaaaacataaaagtgtagggaaatataatagtatcccacttataattaacgtgtaccaaagtttattttgttctctctttttttccatatacacgttaatttgttcaaacgtttggtacaaattaaactaaactttggtacacttaaaatgttaatttgtttaaagtttaaacgtttgactttggctttgatctcattcgaattgttgaaatcggattttatagactggtttatttcaaaatggtccatattggttcggtttggattagactggtttaatttcttttatgaaaatacttatcatatggttattaatggtttagggtttgtggaaagaaggagcaagaaagataacagtggcaggtttaccaccgattgggtgtttgccgattgttataacattattctccggcgaagcattgaccaaccgtcgttgcattgaccgtttctccactgtggccacaaactacaatttcctcttacaaaaacaattggccctcatgcaagtgggtttggcccatcttggatccaaaatcttttacctcgacgtctatgacccagtttatgaggtcattcgggaccctcgaaaattcggtaagtacaaaacataacaagtaattcggatataaaaattttattagcttagttaacatatattttaatgaatatattttg

SEQ ID NO: 44218 - DNA, 594 bp, Arabidopsis thaliana landsberg
ttgaagattataacaaaatgacaactatatgctgtaatctgtatgttgcatatttcgtattatactaatctctataacaaacatgtttgcatacaatcctagttttttcttcagctatgacaatttatatagtccctagaaatcgatatataatcttgcaaaggtatataacttcgactctttcgtatacaaatttgaacaattttcgtttacgctatatattaattaataagaaaattgttttacaaattctaaacgcaatgttttttgttgttgttgtatgcgtatgaaatagaaacaacttttgactaaaacagtaaagttacacgattagatctagattgaatgatttgccaaactgaacatctggctatctgagttattacatattagaaggatcaccggcgaggattctatgattcaacaaacactacattaaaccaatgatttcttataaagaaaattattctctctttagaatatttctgaaaagggatgttgtattttaagtgtcgcctactcgcttcaaacttaataataatgatatgaaatttgcttcatccaggcgggttattacaattattattaaaacta

SEQ ID NO: 44219 - DNA, 738 bp, Arabidopsis thaliana landsberg
cctgacattgattataatgttcaacatcttcatctggactctatctatatcaataaaagagtaactttccgggaaaaaaccatgaattctgctgagataatgagtggaaaaagtctgttgtgtgaagttattgtaaaacttaacatatataaaataaaggttttaatattctaaggatgtgttgtacacatgtctgtttcttgctgcgcaagttctaagaatttgtgtatgtgtacctttagtattaatatatatgttcttgagagagaagtttacgattcttgaagtgggacacaatgagtttttaagttatgattgtaacaagtatgtcatttatctcattttaaaagtatgtttttctaatatttaaatctatatatgtagatgagaatataaaaaatatggtgtaatttaatttaaggtttttgtgatccttactctaagatcatcaaagtatgaacatgccaataacaataataattcgtattgaagaactttgcacaacctatttataggacctaaacccttaaatccccaccattgtataaaatcttccaaatcaagaataaagtaagattcaaaattctaatcataccacattttctacgtacatttcatctagatcaaaccttttctaccatgcatctacaaaggaattgaatccttaagccaactcacgtgaaatcgaataatccattctcgcttctaaagttgaggaaaatgcaaatattttcaacg

SEQ ID NO: 44220 - DNA, 718 bp, Arabidopsis thaliana landsberg
ctcaggtaaattcatggtcagtctaaactcttacatcttcacagattgaatattcaattgccgatattcatctagcagttgagaaactaaacctgactttaaccatttactgtgctgtgttgtaatctgtttgctacagattatccatgttggtgtgacttcccttttacatatagcatgtaagtctactaaacttattgaaatctaaggtttaccggttaggcggtttctcaattcctataaacagcttgctcttgatatggattttggtgcccaatctgtttctagagcttattgtttcaacatgtttcatgttcttgcaggtgtataggtttgaatagagtaaaagtgcagaaccattcttttaaccatcgaaaagccaaagagatgggaaaatttttggtatagaatataaatcttttaaacattatagaatcattcagtttgtttgtttctgtacataaacattttcgatcttgctccattgtaaatttaccccaccaagtttgccaaatgagtgaaagtgtacagtttttttcttctgtttatagttgttcaaaataaactttattttctatttcgtatatctctgttttcattatgttaaaaatcattaaaataatttaaaatcgactgtgacttgactcctcaggcgtctgaaggatttatgtaagaaaccgtgggtcaaaacattagtttcccctaaaaaaaatcaatg

SEQ ID NO: 44221 - DNA, 729 bp, Arabidopsis thaliana landsberg
tgggaaaaaaattttgtttttgaagtgaccgtgatattcccgtttatatgtaaaaacctaaggttaaaaaaaacaaaaaaacctttcgagcaccatttacgaggtctcaaatatgaaaatattttccaccacaggtttaactattgctcccgggcgtcgggatgtttcaaatctactttcactctggggtccttgtttctctttttgcaagctttttgtaacctcacataacattctcaagtaggtgaccactatcgctttctctctgcgattctttttctggtggtcagagatccttttaacacttatccgcaagttttatcgctccgtcggtccttcattccggtgagatttctattcttcctccgccgtttgactttgtcgtcagtgagatccatctccggaacttggcagtacagagatttgctgatgacctctcccctgtctcactttgcggtgaagacatttgtgaagagtccacttaatcgtcttgctatgtcgacaatcccaaaaaaacagatccttgctaaatcagatcattattcgctgcctaaccatcttcgcggatgagaaactagggtttcttggttgggtcaagatttgagcatgtagcaagatgggcctggtgaatttaaagaccaaacaatcaatttattttgtaacccactcgccaacgttgttaaggcctgtttttcttaaaagtgataacccatgtcatttcttcatttg

SEQ ID NO: 44222 - DNA, 454 bp, Arabidopsis thaliana landsberg
  unsure (1)..(454): unsure at all n locations
tgcaggcccaattcgagttcgttcatcattcgctatccgccggagccggatcaaccgcgagggagtagccgtattggaaattggaannnnnnnnnnnnnnnnnnnagggatcctcgccggtcctggcgtaatgaacttcggccaccagccgtccgtcgagcgtgagtctccgcgtccccgcaaacggctccgacacgtgccagacactgcccttcaggccggcctgcaaagccgccagcggccagtagcagaactggatgtcgcgcaggatctgctcgggctggatctgttcgggcacgcctggcgcccgttccaccgtggttttgtcattttcgacatcgactctgaacaggcgcagtccgacggcattgagcgcgatcacctgcatgcgctgcggacggacatcaatcaggcactgcatcgtcgcctggcgatccgcgaacgccgcatggac

SEQ ID NO: 44223 - DNA, 1088 bp, Arabidopsis thaliana landsberg
ttgcttgatgaacctagaggaataacttctttctttgttttgcaagatacctatccattctttatatgcaaatgtattgctagtaatgtatatatatttcatcacaatttcattttctacacaaaaaaaaataagatctagctatattttatgtgtactatagcaacctagcttaggttttgggtagtgttacatttgcgtttaaaccgtacatggttaaggaaacaaataaattgaatacttaaaaagttttagatcaacttgatttcaccagtaaaatggaaaagaaaatagatataaattttcaccccaacaaagatagtgaataaagaaatccaatactggaaaactatataatttttgtagtatatatacatatatatatacactttaaaaagggtagaaattcattttttctgataacttttgtttttcaacatctgtgatgctaaatatagacttgttctaaattaatagctttagatttttattttattctgaagtaataatatttcacagtttagaagaaatagtagtaaatttagtttttatttttattttaagtaatgatatcttagattttcaaagaaaattattgtaaatatctatacagtaagagaaaaaaatacaaaacttctttaaaaatgagaaatatattcgggagagaaatttaaatgattcatcctttagcaagtatttgccttgtgtttatccctagtgaagagggctcagcttgctgcttatccagttgcgtaactaatttggttaattaggtaattttattgaagtgatcatattcatacacatgtagtcttgtttatgattgtttacatgtggtaacatagaagtttacatgtggtaacatagaaacttaagcttggccttaaaaactatatggtgcgaattggttttataaatctttgtttgattgaaactaaacgtgattttttggtcaagttgaattatggatctgattcatgatttttgaatttcgtttaaaacaattgcattgaaatacaaacgatgtgaaacaagatctaagagataaaatgatagggagggaatacattttatggagtaataaaatg

SEQ ID NO: 44224 - DNA, 613 bp, Arabidopsis thaliana landsberg
gacgttttttttaaaaaactacactattgacgatggttatatggaagtctcaaactaaaagctaagacttattggttgggccaaaaaattattttagtaattttgctatattctcttatatctcaaattcgagccaaatgattagcatgtgttttctttacatacctttaatgctttcgaaatgtaaaatttcagtgatatttttttggtgagtttttttcctctagtaaagagaaactctttcgatagaaaaactctaagctagttaaaatacgaagcacttattttaatgtccaaaggctattcattcttctcctgtttaaatgctttgttttcttgtctaaatcttatacgtgcacataacaacactttgttcaattacctatatatgcgcattaatgctcgtttcacaaaagaaacatagtttggtttattatgccttgacggtcgtactcgtattttcaatacttattttgaatatagtaatagaacttgcgtatcggcgaaaaccaaggaggaaagcgctaccatgttcggtgacgaaccattattctagactctgcctttaaatttcttatacacaagaaaagaaaatcttttttttgtcttagct

SEQ ID NO: 44225 - DNA, 619 bp, Arabidopsis thaliana landsberg
tgtgcttcctttataaccaaaatcatatggaggtgatgatcagtcattacgatctttggtcttaatgttttttgtgcagaggtcacaaaggatggtttgttctctgttggagagatggagtgcatggtatggattttgcgtcacctcaattcattaatccatgcagaacaataaccaagattagtactttcacatgaaaagattcaatgcagatctaatgtgtttggttttgttacagggatgttgtgttaatgcacccatgatcactgtggctgactattccaatggatcagaaggatatacatataactatttcgtatgtcaaatctcgttgaacaatttttctttttctcctgcattatcctattgtttatgtgggttacgtcggaagagtgaaatcatacttacactgtcttatgctacaatacacaggaagatgttacacctgagaaagtcgtagaaattgttgaaaagctgagaaaaggagaaaagccaccggtaagacattaacaacccattgcatttggatactttcctgatgttcttctcttactattgcattacataagtggaagaaaacaatctggtttcggttaactttccaaattggagaaggtag

SEQ ID NO: 44226 - DNA, 658 bp, Arabidopsis thaliana landsberg
atcacatatacactaatttttacatgaaatgtgactgttgcaaactatacatgataataaccaaaggaatctgtctacctgatatataatctggaagagatgaacatatgactttagtgctttcaaaccagaagtttttctcttctcgaacgaaaccatgttgtcaccatctataagaggcgaacgaaacccgttctctgcatcgattcctacttgatcagcgataagtccagtgttcccttgcttcttgtattgtaaacatccataaattgaaagcaatgatcccatctacacaacacacaagtgacaacaaacattcaaacaaacttgactataaccatatacatattcacaacatcaaaaatcaaaacataccccgaagtagattgctatcaaagtgaatgtccacctaccaatcaaaacctcaatcatatcagtctcaaaacatcaaagatattcactttccacacaataaagcagagatctttaaagagaacttactgagtataatagtagtaaatacgccatccacgattagcaaaccgggcaatattgttagcaagaaggaaacaaaacccgagaacccgaaaacccaacaaccaacccggatggattcgttcaaaacaaggtctccaacatcatcaatgcacaaacatca

SEQ ID NO: 44227 - DNA, 470 bp, Arabidopsis thaliana landsberg
gttcggtgtgccaggaatcgggctgtagctggaggctttggtccatggtgctgacgatggacgacagcacccacacggtgatgaccagcgggatccagaccagcaaacctgccaacaggtattttttcatgtcagtctgaacctgaatcggttttgggtggcgaagcggctggggcactggcaccacctttgaaatcggtggcgtaccagccagaacccttgagctgaaaccctgcagccgttacctgcttgcgaaaggcaggctttccacaggaaggacaatccaccaaaggcgcatcgctgagcttttgcagcacatctttgctgaagccgcatgcttcacaactgtaggcatagataggcattttcttgaaacactcgaaaaaaagcggaaaatcaaaggttttagcccgccattataagaggtaagcgccctgccctcaaaacattgtgaacaaaaaaacacgcct

SEQ ID NO: 44228 - DNA, 510 bp, Arabidopsis thaliana landsberg
atgaggatactcatgttggagagggagagcaaacggattcttgatgtttttacgatcgattaaagtgaagacgttttagtggacatgatatatttctttggtatgacatattttaaaagtcaccctctagaattcaattttttctagatattatcgtcattcgtcaacattatatcgtatgatgttaacaaaattaatggttggtagagtactcgtcatttagaattagggctaatgaattgatcgttcataatgtcttgtcgagggcaaaaacgacgtaacgtgacaaaacgtattaacctttgtttctttttctttttttttttgttatttcagaattcatgaaccagagaatttcattaatccactagctaatcttgaaattattctattgccttttgaaaaagttgtaaagtataatttgaaggttgcaaaattttacttttggtctctagtgtttgagaaacaaatcaaaactggcacattatatacagaactatcttccctttt

SEQ ID NO: 44229 - DNA, 673 bp, Arabidopsis thaliana landsberg
ccctatgcactgattaatttccagcaagccatgtgatattatattttccttactttacttcatttacatattaaatttgaatgactaatgacaggttatgataggtgttcaaaacatagccttttaatatttggtgtaacatatatatctattcaaacatgatatacataaatagaaagcccttctatatcctctaaccaaacgaaattataacacaaaaatgtagccctcaatcaaaactgttacgagcatatcaacatgcaactatagatattcaatatatcaattataatacctagtgacaataaaacgatcagtaaattagtaattaaaaagtgtaaaacatcatatcaaagtagatttgaatccgtattaaattggccactgcaattaacacggcggaaatagtctcaagattcctagttatagaaagaagtttattgaaattataatatacagaaatagtaactcatgttttcggaggcatataaaaatacacataaatatctatacacatgcacacacacctaactttgttgatgaatttaatagaaataaggtagagaaagagagagagagagagaaagattaaaaggaaaactaagtgtttaaggcaatagacagaagagaagatggggaagtactaagagagacgcacgcagaatatgtgagc

SEQ ID NO: 44230 - DNA, 551 bp, Arabidopsis thaliana landsberg
cgaccgcgcgtacgcagcccatcagcgcaaacgcgatgcccatctgcgcttcgttgaagccgcgcgccgccagatacggcgcccagtacggcatgaacgcgccgacggtcgcgtaatagaaaaagtagaagctggacagccgccacgacaggcgggccacgcctgcggacgacgtggacacgacttacggaacctcgcccggaattcgtgacggcgcagcggcgacgtcggcattctggccacgatggcgcagccagtgatccatcaacaccagcgccagcatcgcctcgccgatcggcgtcgcgcgcagaccgacgcaagggtcgtgacgtccggtcgtgcgcatgtcggtgccctgccccgcttcgtcgatgctcttgccgggctgtggtgatgcttgaggtcggcttgatcgcgtagcgggcggaaaatcgtctggcccgtggaaatgccaccggtgatgccacccgagtgattggcgagaaaacctttccgtgacagctcggcgcggtgctcggtgccacgcatttttggccacgcgcatgccgtcg

SEQ ID NO: 44231 - DNA, 846 bp, Arabidopsis thaliana landsberg
ataagatcattcaaaaactaaagcgttaactattaagtattctttactttcccataaatatttgtcatctttatcttattattcaacagtggaagtgggtgtcattgaccttcaattgtcaaattaaatcggagtcatcatgatatttgaatcatttgctgagaaaaaacaagaaaattgaatcctcgaaagaatgtttattttgagccaaaggttgtctatatttattaatgaccaaccacccaacatttgtttatctatctccataattatacaactatgatgccgtttcccagtttgtggcttctcacatcattatctctcagcatgtgtgttgtgacttctcttggcttatccctacatcaattattattatgctcctcagtttttttccaaactaaaagcataatattagaccaatattttcacatattttttacgagatcaatatagaatttctaactatgattactgattaccaaatgaataaaaggaacagcaaaaattattataactaatagtttaaataaccgaaagatagaatagaggctactatatatatgataagcttcaatgttgacattttatatcaattctttgttttattgacttttagttttagttaaacttggttgttgcaaaagctttcaacaaggtttttgaagataagatacacacatactgggtcatgagtcatgactaaaagagtttcttttttccaagcatgcttatttattgttaaaaagtaaaacacgttttgaaaattttaataaggtgattaaatctatgaacccaaaccaaaaagatttttgattatctaaaaccccacaaaaaattattacaatg

SEQ ID NO: 44232 - DNA, 546 bp, Arabidopsis thaliana landsberg
aagggaacgttaattagttagtagatacacctgcctttcctagctgtttggtactatgccatttagtcctgaagaacctcactacacatttgatgtaaatttgtgtttcaatataagaatctatttccaacacctttttgactcgtcttcagacacaaggaatgagagtgggtatagtgccatacaaaagcacattttctgctttaaggagaatagcttatgaggagggaattcgcggattgtacaggtttttcatctagccaacacttttttctgttaacggatcaaatgtccttttattaaaggtcttcctttctctccctctttgtgctaccaaccagtggtcttgtccctgcactagctggtatcagtcatgttgccattcagtttcccacatatgagatgatcaaagtgtacttggccaagaaaggtaatccataaatcttttgaattggatgaagtaaaacaaaagaaaggtgaaatcttagtggagatatgataagataaagattattgaactcaacaggtgataaatcagtcgataac

SEQ ID NO: 44233 - DNA, 444 bp, Arabidopsis thaliana landsberg
cgacttatgtccctcctatctaatgttggatatttgaatatacgacaaagttatcattatttatcaattaccagcccctctagtgacccacaatagctagcttaagtatttggatgttccttgcccaaaatatatatatatatatttggatgttcttgcatcttataattttttttaaacgcggtagaaaaaaacacaatttagggatttcaaacacaacttattagtaactatccaattttccgaattttgaaacacaattagtttgttttgtgtagtaaaaatgtttaaaattttcaaatgagttgtcatagcatttacatgaagtgttgtgaactttaggacgtagactatgcaaatggaaacttcaaacttaattcttgaagatactacttgatagctaaggcttggtttcctttaaaagccattcaacactcaaaagtc

SEQ ID NO: 44234 - DNA, 322 bp, Arabidopsis thaliana landsberg
ttaatagaattatcttactggctccacacattccaaaacttttcttacgtccatcacataagaaattagatttgacagcaatcatatatctccaaccttggagcaagtgcaaaatcattattatctttcctagtttgagaaattgatagcattaccatcaccattaatatggagacacactttttgcatgttttcactcatatttatatttatcttgtgatgactactattactctgatattgtttctattactgtatttgtattatgtttttttttaatagactataatagtaatgttaaagtatattcacaattacaaga

SEQ ID NO: 44235 - DNA, 1032 bp, Arabidopsis thaliana landsberg
  unsure (1)..(1032): unsure at all n locations
ccactaaacttgtgctactatatgttttatgtagaagttggataaaatgctactttggcaaaatgttattcagcaactacataaataaagacaaaacacgaggccacacataatatacaaaagggaaaggagaaggaccaaaggtaaattaaaaacaatatttgttaaatatctttaaatttaataagctagtgcttcgtgccttgtacttgtagggtagaaagttgcataaatgcgtagaaacatacgagaactaaggaaaaaagtaggcctttatcgtaataatcgtcaaatttatcatattcatttcctttgtatagttgtataggttaggtgttactatttatatgggaacaagagacctataatctcgatacgtgccggttaattcatctaaccccaaaaagtatgataaaggttgataataatttattagaaacgttaaataaatcgaatccaagtgtttgactaaaagtcccatttaggattttattaccaacgggcaaatgaaaaagaaaaacagctgttgtactacatatttgcagattatttagagtttgtattttaagttaataaatctcaagtatctcacagttttgttactactaaatcaagtaatcatttaacttgaaggtgactaattattaataattggtagataaaatattacatttaagataacttttgtaaatcagtaaaattgaattctaaatcatcaacccaagtaacttcaatagtgaaacatttagttttcttattaaaataatgcaagattattagatagagattataaagagaaaattaatctttagtatcatgattatgttttctcttcttttttgtaggatttatatcttcatttatctgcttttccttttttcttgcctttntttttgtgtgtgtgacctcacttgcctttttattcttgttttttaaaaatgtgttctctattgcttttgtaatttccccgcaaatgagaaaattgtaaataaataaagaaatattcgctttacaaattagagagacctttga

SEQ ID NO: 44236 - DNA, 870 bp, Arabidopsis thaliana landsberg
tctctctctcgtgtcgaatgttaggtgatgatcgctctcgaagaatccctctcagtggatagagagttcacagcctacttgggttgactaaatgagcaaccaccactccttattttcaacaataaacactacttaaatattcaacaaaaaacactgctttgactaaaagttaccgcatgtgaaaatgatgatgcaattctttcaacactccccctcatgatcaactatcctcgtgcgtgtattcattccaagtaacgttcgaaattggaagaccttcgatgcagataagcttttcgcgaagatgtctgcaacctgatcttctgttttaactggtttcatgactatgtctccttgaagtaccttctctcgcaagaaatgataatgtacctcgacatgtttggttcgggcatgaaaaacaggattttcggctagacgaactgctgacaagttgtcacagtgtaacggaactccatcttctattggctggtttaaatccttcatgagttgaattaaccaagcacactcttgtgctgccattgctcttgctctatattccgcttcagtagttgaaagagaaacagtaggttgtctcttactacaccaagatattgctcctgaaccgagattaaatacataaccggtagttgaccttcgagtgtcatgatctccggcatagtcagcatcacaataactattgagcttaccttttccttccttctcatataagagtccccaatcaattgtgcttttgatatatcttaaaattctcttagctgcttcaagctgtggtttctttggtttttgcatgaacctgctaacaacgccaacagcaaaagatatgtccggtctagaaagagttagatagatact

SEQ ID NO: 44237 - DNA, 626 bp, Arabidopsis thaliana landsberg
  unsure (1)..(626): unsure at all n locations
gtggactctatatagagggaatctacaaatagtggtttgtggtcgtacacatatcaatatatatccatgtccatgtgaatgtcacattcatctttgttgtacatgtggtgaagatgactaactatgaaattttatctatccttttttgcaaataagtaaatctctcgaatcttagaagttaaaacgtaaaagaatggatgtttaacatttagaatcgaattagtataatctaacatcattgttatatcaaaactgaactctactcatatttcattatgcttttttcaacgtgatgaaaatattttactatgaaatttatattatctttttggactaaatgaatcttagatgatcgttaataattaaaagactttagatttttttttaaaactaaaagacttaagttcatttgaaatgtaatataactgaaaacataaaccaatctgatataaataaacacaaaaaaaaacactcagattttattaggtcaaaacagaaagataaacttagatttagcatttcaaaatatcaaacgttccaagttattgtgcatattaaagatatataaatccgtggttgntatatagttncaaaaccttttggtttaaggaatattgtttgaaccg

SEQ ID NO: 44238 - DNA, 435 bp, Arabidopsis thaliana landsberg
tgatgaaaggtggagatagttcgatgaactcattggtttggtatagttggcttggtggaattatcattggaaccatgactggtgctaacatggttttggaagatcattatcgagccggtccacggaatgttgttataaccggaaggtaccttctttacttttgtttttgcattttttgatttttgtttctttgtgttttggtttgatgctgatgtatgtttttatgctgtgttttagcactaggggactaggtaaagctcttgctagagagttgtttctctctggagacagagtcattgtcacatctcgcaggttgataaattgtatatatggaattatggattagtttttatcaagcaatgaagtcttaatatgattagttttttggttttggtttgtgaaaacactgctgaatatgttgatttgacttgttaa

SEQ ID NO: 44239 - DNA, 1102 bp, Arabidopsis thaliana landsberg
  unsure (1)..(1102): unsure at all n locations
tctgtattcttatctgaggattcatagaaaccattgtatctttcttcttttggaatttccctttaaaggttttcaaaaattccaaaatccaattctactaaaaaccattctttttctctctttttcataattttttttaatataaatttatgaaagtcaactcaatttatatgatttctaaaaatttgtaaagaaaatataaatttattactaaaataattctgtattgaaaacagtaaatatgctgaccaaataattattcttcaattgtagcaattaaatgactaaccaaaattatcatatttagtctaagtccaatttctataagaaccctaaaactccttttttcaacttctcagacacactacaactacaagatctaaaacaaaacctgtccaattcctccagaaaacaaaaatgggaccaaaacagatcgtcacagtgatgttcttctttttatctgttatcatggcgttgctttgtcatcatcaatccgaagctcaagcgccgattccaactcccggtgattgcttctcgtcaatcaagaaggttaaaggttgtgcggatgctgtgaaagctgccactaaaggacatcttctacgtttggtcaaggattgttgccacgtcatcaatgaccttgccgacgattgttttccgatcattttccccggaaaaccttacattgccgcactcgttaagcatgcatgttcttaattaataattagatcaaatactttttttcttgtaacgcaagacaccctgcgtttggggatttacctcttttcctaagaaaatttattaagtcaatagaagtgctgtttgatactctcacttaccaccacaatcaataaaatccagtcaatgcatgcactaaacaagttttcaacatccaaaacaaaatcctccaacaacattntagttctcaaattataaactcatgtacaataaanaggaagataaatatcctaaaaataccacactattaagtntttttgttcccaaaatatcatcattagtttatttcccaatataatacctcatatattcgtataaaatatgttccacgaaataaattcaaataaaaattttaaacttttttggg

SEQ ID NO: 44240 - DNA, 616 bp, Arabidopsis thaliana landsberg
gcattttctgggatttggtttccgatggagagtgagtaaaaaccgggcgatgggcactatctaacatcgatttagcagtagcagagtgagaattcaagctccatgaagaagagcttccccaaaatactctcttgcttcggagataatgctcattgcttttacaagctccatgagtgtaataacgagagcataaaatagtcctacatcgacataaacatttctcacaaacttaattctataaaactgatagaacttctctttgaggaattttaacaaacagttcatgcgcatgcataaaattcaattaccttggatactgagatgttcgatgaaggttctctaaatatgaagaaattcgagttcctctacaagctttcgaccacgacatggccgaagagaaattattttaatctatcgacacagtgagacacagacaccacacaaaaacacttatctgcacaataaacacgaacccagattacattacttgaaaatttcgaaaatttgaaacccaatttctcccttccgcaacctccggagagatcaataatcgggggaaaaaaaaaaaaatcacccgagcgtaatcgaatcagaggccaagaacgatgccagagtc

SEQ ID NO: 44241 - DNA, 708 bp, Arabidopsis thaliana landsberg
ataccacttatttaatatttaaattttatatacttgtatattttaccaaaacaatttcatatttttttcatacttgattaatcaagtgatatagaaacaaaattaaacgtcaaatttgagttaatttaaaaattctacttttggtaaatacaaataattttactttgcaatgttaaagtataataattttgttttaagtaaataagtggcaaaacaaattttgtaaatgaagaatctatttctttactcaaatccatactattgatttagaaagaaaagcaattcatacaactgaatagaaattatgtcatcaaaaattattttgtccttacaaaacaggaatataatactagtattttataaatttacattagtaagcaccacttttcttcttcgaactcaataatccaaatgagacactttcaaaacttcatctattcctttgtaaattaacttttaacactgtttctaaacttgcgtgtcatcttctcgatattgtcaagaaaagttatcatgttagattcactatacccaaaaagtttccattattcttctaagaaaatcatctcttaatatttattttttgctctttcatgggtataatagttacatttctacatagaattactcctatctttatcttgtcactcatgattaaaatataataaaaattaatgtcatgttggcttttgtcgaaaatagtattta

SEQ ID NO: 44242 - DNA, 201 bp, Arabidopsis thaliana landsberg
aaccttttagcctaccaccttaaaatatatatacaataaccagagagagtcaatggtaatacaagctagcctcaggaagattggagtagctagagcaaagtaaagttatgtttaccatttggtttgctttggcacgctcacgtgtattgcgcgtttggaccattctaattcttcccattctgtggttcgtccgtcgtagtg

SEQ ID NO: 44243 - DNA, 545 bp, Arabidopsis thaliana landsberg
ttatagtggctatcgcctatccaaatgtttttattttgtatcatattataacactaaaaaaaatagaattatgaatccatgtatataattgggtgcatgcatgtccgtagtttttccttgtgtgagctatagataagatttaatgagaaaacattacgagtttttgaaacgtttggttctaaaatgaatttattttggttaataaaaaaataatgagagatcaatagttaagtgttaagtgttaaataatatgttaaccccaattaaaagtttagctatttacgattaactaccatatgaacttctctgcgtctttagtatgtatggttaaagaggtagaattacaccaaaatgctaaaccgagtttaacattatggtgttaaactgttaatgacgacaagtgtttgaagatgaaaggtgtagttgtgtgtgcttcttccacgagtagaagacgatgtggaaggatatgaacatgccagcgaactaaagtccggatggctcccaatgggcaatgacccatctcgttaaaatggtaatgttcaaaa

SEQ ID NO: 44244 - DNA, 564 bp, Arabidopsis thaliana landsberg
aaaaaaaaataatagttgggctaaatgacatgattgatgattcaccggagacacggcgtcgcatgtgtccatgtgtcatgtctgtaccttcccgggaaattcgtacggagattcactgctttttcactttcgtttgctttaatattaatctaaagcaatagtatcaaattatgtattccgtatggatggatcaattacttcaactaaatatcgtttttttcttttatcaacctcactttgaatttaaacgaaaccccttgattgctaacaaattttataagtacttgttactaaatatcaaatgaaaacatgctatgtggagaaattaaaatgatcaaaaatattttattcactagttagttgtccccaatatatgatatgtttatatgcaaaacttttgaaacatttaaagctttgtctaaagcctgtctgattttgttttccatctttagttttcgctgaatcacacatttatttttgcattttctccattacttggagccttgaaaaatgaatgctataagcaagtttttggcttttcagtcttctcatattttacatttc

SEQ ID NO: 44245 - DNA, 730 bp, Arabidopsis thaliana landsberg
tctctcatcccttagagaaaaaaaaacagatatggaaccttctctcgctctgaaacttccataacactactagtaaaattcctcttattcatcttcgccaggctctgggattcctattctatctagaacagagaagaaggggcgtagctcttctatcggcttcttattagtcgtcgtctgactcttttagagaccagaaactctccgttcttgcatcagggcgcagtactaattgattctttcatcgtctttgattgctttcttgattgctaacccctagccaaccctttcctcagctgatgccgacatgcctcttttgggttattctctaatcacatctgggaagactcctctttccactcggatcaaaaagctgatcactgtgaaggcagatttatagccataaagatgatcaggccctagtgccccggggcaaaaagccacgctttgctcttgatggtcaactcgaaaaaggtttgaataacttatgttggaaggctttgtctacggtcttgttctcttaactaagattccattcgtcgaaacagaagtacggccagcccttttttatatatctcttttggaagacgccctgcctgaatataataccttatcctggcccgacaagcccagtggagtggtagttcactggtttccaaggcccatctagcctcaattcttgccggaaggctaccctcgggatatggcaatgaagccctatctggggctc

SEQ ID NO: 44246 - DNA, 671 bp, Arabidopsis thaliana landsberg
atatacacggccaatgaaatttaatagtcataattataaccagtcctgattataacaacaaaaattcaattcaaaaataaaaattagctcatttttcattggacgactatattgtattatcgttataacgatatgggcccaaactacattataaacaaatgttgttatctggcgactagcgttaaaatgtttttattacgataggccaaatcaatatattgctaggaaaatatagtatgtgcgttttggttttaggaagaaaatttcttccaaaccagcaaaatattcatagagtagctttggaaaacatctgtagtatttttccgaattcccgaatttatgtgatagtcaccttatgacacaaattctaataggtaagaatgcaaaataattacttctccacattctttaacacaatatatatactagtaagtattgacgaacatgcacatgctcactccaaaaccatattgttattaaacataatatcactaattacttcctgtacgaaacagaagcgaaattgtctagtatatctttgatcatggtgacatcgttttctttgaaaatttagcaactatttaaagaaaagcgatggaaagtcgtggaaaaatatgaaaccataattggtaggaccagatttaatttcaatttgttttcaaggaaaatta

SEQ ID NO: 44247 - DNA, 766 bp, Arabidopsis thaliana landsberg
cccttcttttacggccgtcactcttatttgtcagccgtgaggaactaccggctcggtctcggtgggaaaggaaaggcttgggcctacctatcccgataagacctcataaaggaacggcgggagtgataggttccatattgccgagctgaagggcaagacttttgtacgtgatcgtagtatgtgacgtcgtctcgtccacgctgcattgaagagtacctacgcactaagttccggttcactgataaggaagatagagttgggcgggggtctacgatgtgatactcaagtatatgacccggggagatacatgctaactatgggtaggaagcaggaacccttatgtaaataatttcgggggggggttacagatctcttatactaccatcgatcgacagagcggaacgaccagaaaaataagtgatgttagaaagccgtatgataggtggtaactatcttgtacggttcggggggtaatcggcgtactccgggagaaatctttcgctctatcgaacatacagggaattggaggtagcattctaccgatgttaagtcatggactggttccttcagccctttttctatgtgttggtgttttatatgaccgacataagactcgacttgttagatattacggaggtttagtgagcaccatgccgaatctctctaccattttcttttcttttactttggccaatatgagttcacctggtaaaaacagctttatcggggaatttctcatcttagtaggagctttccaaagaagagc

SEQ ID NO: 44248 - DNA, 602 bp, Arabidopsis thaliana landsberg
atgggggcagaaaattcgaccgtgtgtgttatataaatgttaatgtaataatacagtcattatattaacaaaagataagattagcattgatgactcctctggcataaaacaaagatatgtgtataattgcttccagccaataaagtagtgtcgatatagatcgaagtcgaaaagttacggttatagtatttctattttcgtttgattaaagatggaaaaagttttgtaattaacaaaaacgatagaagatactactcctacataattataaaactaaattgtaaagtagggatcatcagaaacatgttggggttaagtcacaggcgtaatgatttaagaataataatcaccatcattatcttgttatataattctcactttgttactttttctcttttcctttttggagtacatgttatttttttgttggttacacttttgttcgtcagatttttactaccagagcattatttcccgtgataaaaatgatggtacctttttttaccgtttactaaaattacttgcagagagatgcctacttctcttctgtgtattactataaccgtgataattccattcttaattttgaaccaagaaagtaa

SEQ ID NO: 44249 - DNA, 605 bp, Arabidopsis thaliana landsberg
ataaacctttcttgatttgggtctcaagtctgagaaccaaaaacccaatgatattttgataaaatactattttttacgtgacttcttgcagtaaatcagtatctataaattctagatgttttcctataattttcttgctttttgaacaagctataattaagaaaaatcaggtcaaacattggaaagcataattggcagcgaatcctattacagattttttccattagtcatatcgttaatatctaaaatgaaagtcaattgtagtggtcgttttggaaaatatgaaaggtggcaatttgatatgtttttttttgtagtgaaatttatttccaattacgttaatatttaaataaattccgtgtaaacattgatactcgacacaacacgcaaaaaaaaaaaaaaaaaaaaaaagagttatatatttgacatttcttgattttaaataaggaattgagttcatgtaccaactaatcaatgaaagacagaaataagaaaaatataaaaatgagaagggtaagcaatcaatatgaagtcgtggatgcttaccccaccattcgtcacaagagattcgtcatttaaagcattctgatcgaataacatttatc

SEQ ID NO: 44250 - DNA, 939 bp, Arabidopsis thaliana landsberg
  unsure (1)..(939): unsure at all n locations
cagaatctgattgggctctcaccgatgtggagagggtaaaaataatcaatagctttttatcctttgttttttttcattctagttcaatttattgatattcaatcaatatgcatatttttcagcagagtaggtcagcaggaggtggtgatagcaaattaaagtctgcctctggatcaatgaaaaagcgaaaaaacgtgtcaggactggcgaaggtgcggagctttaccttccattgatgtttatctctgtcactttgtggtaattgaacattgtgataacaaatattttcttgtcggaccttatttcttgtacagtgctctacaaaggaaaataaattggtaaatgatgaactgatcggttgccgaatagaagtttggtggcctatggataaacggtaaggatcttttagtgactttcattgtctttattcaagttttactattctgacatccatgcaagtatggagttaatttgttttgttcccattcttagtctcgttttgttacgttgaatccatctgatgcaatcaatcattttcaacaaaatgtggttatctttttctacatttatctcaccagaagttgcatcttggtgaaataaataggttttatgaagggacagtgaaatcttatgattccacaaaacagagacatgtggtaagctatcagcattttgcttcttttttgtccttttgttgggttagttgttcaagccaactctgtactttatccatatgatattgcagatactttatgaggatggagatgttgaagtacttaacctaaagaaagaacagtgggagctcatagacactggtggaaagaccgcaaaggtatttctggtttttgggttctgttgtcaatatctatcttcactatttctagtaanagnngagttcgttcctttgagcttaataaatattcttnccatatttgtacc

SEQ ID NO: 44251 - DNA, 843 bp, Arabidopsis thaliana landsberg
ggcgaaaggttaatgacaactgcctcttcctgttgcgagggccttgcacgaaaccaaaccgccccccgccccaatcaagtaccagttgcttcgcagcgcgggtagcctacttaggttaggagggcattgcccctcagttcttactaacctccggtgtgtaatcaacatgttgctagcttcaactcggttgaataagaatcattgattctctctcctgtccatttcttattcattcagggcgctcggccggtgctcctttctcaaaccaaaacgactctgaacgttagggaagataagaccacctgagcgaaccgatcaaagggacttgacttatccgaaccgaacgatagcagcttaaacttaaagctaagcctctcacgagcagcgtcgctgcgcggggaggagcatctcaaagtatggggcaaaggatcaagcgcttttactttgtctcccgggatccaccacaggttgggtttgagagccgtgtgatgggtgactatccagcacggttcggagagcacttttagtctttgttggtgaatggaagcccccctatcaagcaaaaaataagcggctctttctacggcggtgtcactattgactctatttattattatggtaaatttgtgtatcaagatgtcaatctgagatcttatttcggttcgatacgtccacctacgagactcaccttcggctttcgtctcggtaggtgtattattctacattttcctaaaagaacattcattcatttctttcttccccgtcgaccacgacgactgaaacgacgtgaaaatactatacccggaaaggagaatggccggtggtggacgacatttgggaaag

SEQ ID NO: 44252 - DNA, 642 bp, Arabidopsis thaliana landsberg
ggaatctatcagcaactatcaagtaagtgatgccgttccacaaaggggatcgccacaccaactctagacaagattaggagaaatgcaactatgatgcatgattcatcctatgtcaacttagagagagccatatgcaaaatggagagtgataagcttaaggattgaaagtatagtctgcattggagagtgaatgtcaagcactaattcaagctatgcaacattgctggattcttgaatctgttgaatcattttaccatttttagtaagttacctgttatctacaaagcctcgcatttattggtcggtgaaaaatgaatatgcctcgaatgattctctagagaataatggtgcatacatttttaatgaataattaatctctgtatattacacgtgtattattaagacgacgagaaataattgatttgattgtaattattaattgacatccaattattaattgatttgattgttcaactcgataatttgtgcccaaagtgttaggcttgattttcgtttcctgccttccaattttaggcaggttaattatctcaattttcatataattttgatgccaaaaagagaaacaaaactattttcaaagttgattaaaaacaaattaacgtttgcgtaggataacactat

SEQ ID NO: 44253 - DNA, 904 bp, Arabidopsis thaliana landsberg
actctttcagtccagttcattatacacactgaacatgactagaccaaggttgccactcccaggcccatttcttgttttaattccttttttgttttcttgttaataacatgcatttaaatttagatgacgacgcattaattgaccatatttaacacaaatcactaggttatatacgtctaattcaaatgattttgtttcataaaaaataaaattagatatctagtgatcttatagtaatatataacagtaatctaagtagactgctccacaattatattttactttatttaaaaagaagaaactacgtaagaggtaaataaagtacatctttaaaaacaaaatttatgaatgaaacattgtgactttaatctcggtttgatttcgatttcagctttggttttgatatgattcaacttttacctagagaacttgcttgagaagttcttatgaccgaagaagtcaataaggtccaaccacaaatcaacgttgtccgggtcgtacacgcggaattctgaaaactacacttccttttgtgttcgttagactcaaattaattttcaaccaaatcataaaaataaatataaaattggtagagaatgagtcattctgaatgactactttaacctctttgtggtcgttattgcaatactatttttatttaaaaaatacaaaaactttcccttgtggccttgtgggtcatatataataatacttgcaaattccttggcaatttctatttaaaccgatttcagtagacttgctattgtcatcatttcatatcttagatcatctctcttctctctctttctcttaagaatattggaaatttctgaagcttttctatagttgatctcgagccatgcctccaatggtacgccttttttttcctatgatatctcttaaa

SEQ ID NO: 44254 - DNA, 786 bp, Arabidopsis thaliana landsberg
cccaacacactctttccttcttttgtaatctcaaagttatgaatctttttaacataacttttgcatatgtttgctagtcttgtgtaaatgcggttctgaagtttctgtcacctgagcacgttagcgaatctattaaacgagtgaaggagctcaatcaacttcctcagagcgtcaaatcgaaagcaaataagattgaggtacgttcccttagtttaaaagttaagacaaggttgagttagaaaggtctggtgtttatgtaataatatattgctgcaatatccaggtgaagaaaatggcgattcataaaatcagcgaagctgtaaaggaaattcgggaactcacatcttcggattcaactggtgcattgagattatataactagagctagaggtaccaatcttgattcttgaccattggtaattaccctattcttctgggaaagattcagctgttgagtttcaaggagtcgtagaatgtaaaaatatatagaaataaagagacaatagctaagagaaagaaaaaaaaaaaagaattcatttaccattccgattgttgttggatgatataaagaagcattgatatcaaatttgatagtggaaaatatcttgattatacaaaagtctaattacatatgttggtttgttattgttgacaacctaatgatcatatatacacaacttagttacaaatattgacttgcttgggctcattttgttctaagaacaatcttaccttttgcatcgtcatgcataattggtagaactatctccggaggctgaaccctcc

SEQ ID NO: 44255 - DNA, 688 bp, Arabidopsis thaliana landsberg
aggccgttgaagcgatcatacacggacgttttttcaagaaacaaccatataaggacccgacagaaggagaagaaaacgaggaggagacgtgcgagcagcaaaggtgcaatatggaaagtgaatctgatcataaacactgaagagctgttaaagattctgtctgaagatggaagaacaaatgagctaatagagagtgtgagagccgtggccaagggtgaaacatcgagcatcacaagtagttcgtccgagaatttcttgtcggtggtacagacctagaatttgatttctggtagattttaattccctatatttaaatgtgtggttaatgttataacttataagtaatgaagtatgttatcttgcaccaatttgggaggaaatttggaggttctataaatttattaggttttaattgagttatttaacgtttttctattaactaggaaaattattaagccaacgatagagcgaataattgcgataattgcatatggtcggacaataaaaagagcttactctcttgtagtctactttcaaaatacacatttgatataccaaataatgcgaaggcgaaaggtttttattaaaaattatccgcaaatgtgagaactcttgcactatgtttttttgcaatcaccttaaaaaaaaatcttgtttaaaaagccgttgttgaaacttttatataaaa

SEQ ID NO: 44256 - DNA, 940 bp, Arabidopsis thaliana landsberg
aagtagggtttaagatgttttcgcctctgaattttatttgatgtaacttgtccctttatcatctccatgtttttcttcttctcattaatttaaattttggctttggaatttatggtgatgttaattgtaccctctcctcctttggattttgatgccactcatgtcccctctcatagattttattagggtaggaatatgcctttttccctctttattttcatatttattgaatttacgttggttaattatggttagtacgtttggtgttatttaaacgtcccgtattcacagtttacgcctaactgattactttgaactaaaaccagtgtctagtagatcactaaagtcgaattttgaacgaaagtttgaaaattcgcaaaagcgccgtgaaaatacaattccaaaacatatcatttttgtttttggaagcgtgattgatgaaataaaaacaaaatatgttttggaagtgcgacagaatttgtttttttgtttagaaatgcgataatatagacaaatagaaaatgtaatacaaatttaggtgctttcataactacaaaaaaaaaacacaaactaccctattgttgaaaactttcatactacaagaataacacaagcaatataaaagaagaaaaataattttcaataatcaaaaacagacattatattttagtagtcaatttaatctgtaaatatctgtaaagaaaattaatcacaattttattgttaactacaaagtggtgtttataatattgcaatttatagtttgttaactacaaagtataaacattaaagagtaatgatgcgtttttatgtgtctagatacacatttcgctgtatgtgtttataggtgagtttttaatcaataaatattgaagatgtaccgtatgctttattttggattggcatgagaataattatatacaagagggctgcgctttta

SEQ ID NO: 44257 - DNA, 503 bp, Arabidopsis thaliana landsberg
ctaattttctccatttaatcttcttgactgttgattgttttcttcccattgttattgtcccaatttaaaaaaaacttacactgtatattaaaaaacatttgcttgatttggttataaaatctaattgcaaatctatttatgatgatattttttgggaaacatttaagactttgttatcattttttgacccaaaagaaaaaaaaaagttattattgtaaatgttaggattggaagatttatcatgagaagaaaagtgaaaaatactaatatagtcaattatgaattttcataaatctgaattaaatataatttatttttacttaatatatagttttaattactttttgtttaaatttatgttattaaatttggtatttgtatatcatgtttaaaagatttagaagtatgattttattctatttctagtgattaaattattgaaactttgatttttaaaaaagtttatgtattaataaattagttggattgacggaaatatcaat

SEQ ID NO: 44258 - DNA, 574 bp, Arabidopsis thaliana landsberg
aaacaaagggaaattcattatatggaaacttagtttacatgcacaaatttaataattgtctatttgttttgaacttgaagtacataaaaactaacaaatgctaccattatatttcataatattataattatgcaatgttattggtacaaataaacatgaaaaataattttgttataagaaagtgtgaattgaattgtttttgccatctttaatagggtaccttgagctgctgatacacgaaaccgatgcctatgttttatactttctcaaatttctctaacgaacaatttttttgtttggtaagactaacaccacccattgataatacaataacacacattcaagacaattagacaacattcatttattaccaaatttattatttcttgctgtttgaaccataaacaaaacgcatataatgttttataacttctactaatcgttaaaaaaattctactaatcgtactaaacttttaattattatcgttcaaaatccaagtgatttttaatctttaaaatggtgtaagaaactcattttaaaaccattgaataatattgtttattttatttttag

SEQ ID NO: 44259 - DNA, 387 bp, Arabidopsis thaliana landsberg
tagtagagagacaaacacaaaaacaaaacaaaaatcttgtacattgatggacatgttacaacaccaaacgtgtataatcacgattccagttttacgaccaaagacgtaaaagttcgattctgccttaagcatagactactttggcttaggcctgaatgttttaaccgtagttggcttgtggttaactctttaactaatggttatcatacatcccacatcactaatgaatctatcttctgctgctaaaactaaaatggatcttaactctttcggatcccgggcttattggtcataaaccgaacctatgatcatatctaatgccatgcattggaggaaagcttgaagacagttgaatacctagagggcccatctcatttggtggtcgaa

SEQ ID NO: 44260 - DNA, 646 bp, Arabidopsis thaliana landsberg
aaaaaaacaaaaaacaacacacaaaaaaaaaaaaaaaaaaaaaaaaaaaaaaaaaaaaaaaaaaaaaaaaaaacaaaaaagaaaaaaaaacacaaacaaaaaaaaaaaaaacaaaacaaaaaaaaaaaaaaaaaaaaaaacaaaaaaaaaacaaaaaaaaaaaaaaaaaaaaaaaaacaaaaaaaaaaaaaaaaaaaaaaaacaaaaacaaaacaacaaaaaaaaaaaaacaaaacaaaaaaagaaaaaaaaacaagaaaaaaaaaaacaaaaaaaaaaaaaaaaaaacaaaaaaaaaaaaaaaggaaaaaaaacaaaaaaacaccaaaaaaaaaaacaaaaaaaacaaacaaacaaaaaaaaaacaaaagaaccacaagacacaaacaaaacaaaaaaaaaaaaagaaaaaaagaaaaaaaaaaaaaaaaaaaaaaaaaaagaaaaaaaaaaaaaaaaaaaaaaaaaaaaaaaaaaaaaaaaaaaaaaaaaaaacaaaaaaaaacaaataaaaacaaaacaaaaacaaaaaaaaccaaaaacaaaaaaaaaaaaaaaaaaaaaaaaaaaaaaaaaaaaaaaaacaaaaaaaaaaaaaaaaaaagaaaaaaaagcaaaaaaaaaaaaaaaaaaaaaaaacaaaaaa

SEQ ID NO: 44261 - DNA, 854 bp, Arabidopsis thaliana landsberg
tcattaggattctttcttctcaaagtcgtaacgtaaacttacaaaactctttctttttccataaaacgttccttacatttattctctgccaacactcttttttctttttcttttttggttttttcctctatcattgtcatcttctactatcactttcagtttccaaattttctaaaacttttttcctactattttgattttcacctctcttttgtggttttgttgaagatccacacaaaaaagcttccaccatttttttttctgagcttccatttttaagctattttcttgattttttgggtttcactggaagaagaaggataagaaaaaatggcaggtgatggcgtagaaaatgcaaagccaccgcagaaacaggaagatcttcagcctcatccggtgaaggatcaactttacggtatcacttactgcctcacaagtcctcctccttggcgtaagttcttctcacatttttccctaatcattatcaaaatttgtgaaaacgactaaagattttttctaaactaacctcttgttcggatcagcggagacaatacttctggggtttcaacactacttagtgatgcttggaacaactgttctcattccaacaatgttagtttcaaagattgatgcaagaaacgtaagtcttttgctgaaatttgttacaagaacataagactctctggtcttataaaaattcttgtcttttgtgtcaaatgcaggaagataaggtaaagttgattcagacgttgctctttgtgtctggaatcaacacgttatttcaaagcttctttgggactcgtcttcctgctgtcattggagcttcttactcttatgtgccaactacaatgtcg

SEQ ID NO: 44262 - DNA, 570 bp, Arabidopsis thaliana landsberg
gttgagaaaccttggcaccagtcgaaagaaagcgcgtcttgcacgtaacgagcgttccaatagagagcgtctccatagttgtaagggttgcagctcgacacgtccctctgcatctttctctctctctctaaagatccgatctcagattctgcggcggagctttttctcttcgtcgttgtttttgaccagcttacgaagtttgggcttattacaggcccaatacataatcatgtgaagctgaagagtgacacgtgctcacacgtgttattagcctcataattgggctcaaagtaaggaattaaagcctcatctccgcccattaattaatacggagtaatagtttactgatttgtgaaggtttattttatttttttctaatcaaatgataaaacttttgcagatttttacatgacagtagtaaactacgtattttgatttgtcgtttttataaaaaaataataatttctttatcagtgctgtgtcgggcaattagaaccttctttccatttctaaaagatgttaccaactattgaccaagtatttaaaactgataacgacacttatttatga

SEQ ID NO: 44263 - DNA, 207 bp, Arabidopsis thaliana landsberg
aagaaaaaaggagacacaagactgaaaaaacaaaacaaaaaaaaagagatttggaaaagcaaaaaatagagagagaggaaagaaaaaaacgaagcagagaccaaaaggagaagacaagcaggaaaaaagaaagaagcaaaaccagaaagaaaagaaaaaagaaaagaaaaaaaaagaaaaaaggaaagaagggggggaaaagaaaga

SEQ ID NO: 44264 - DNA, 1143 bp, Arabidopsis thaliana landsberg
tcataatccgaaatctttacctgaccgggataaagttcagttacaaccgcgatcagtactaatgaaaacagagtaccaaacagagatttttgtgatttttgagagagtttgtgtggtggggactgaagtgaatctaaccacataaacacttggaagagagaatctgaaaaactcaaactttaaaagcttgaagctttgagtaataagaaaaggtttggacttttgccaataggactgaagggaaatctcaccttatccacactccaaccacaattccttattacatcttagtccacgtcatcatcatcatcctcattcatctctaatactaaaatctaatctcttccttgctcactcaccaatcaaactcaaaaaactcttgaatttttcaagaacaaaagaaaaagacatctttaatggcggccatgaactcgagtgttctcacttgcagctacgcaattgctggctctggctcggtagagcttaaccagaaagttggtttggtgaattcatcagttgggtttggtcagaagaaacagatgattatgcctgtgatcaaagctcaacgcgttgttggtgatgatgttgatggatctaatggaagacgatcagccatggttttcttagcagctacactcttctccactgctgctgtttctgcttctgctaatgctggcgtcattgacgaatacctcgagaggagcaaaaccaacaaagtaagtctttgaatgcctcaatcttgacattgctaaagatcctaaaaagttttggattttttgaaattttgattataggaacttaatgataagaagagattggcaacaagtggagcaaactttgcgagagcattcactgttcaattcggaagctgcaagttccctgagaatttcactggctgccaagatcttgccaagcaaaaggtttgtctaatatccacaacgttttcttttctttgggaataatatttaacttgaagagattgtgatgttcttgttcggtttctgttttgcagaaagttccatttatctcagaagatattgctttggaatgcgaaggcagggacaagtacaagtgtggatcccatgttttctggaaatggtaaaaaaccttgtttggtttcatctaatcttatataaatccaac

SEQ ID NO: 44265 - DNA, 446 bp, Arabidopsis thaliana landsberg
ccttttacctacttacaatggcctactatttaagctagtcattagtttctttttcttattattttatttcgtataatggaactatgtaagtattttaacaaggccttgttcttttggagatcgccaactaccagtatgagaaattttagatgttttcttcagttagataaattgtttagctagcaaaatgttaactaactcaatctttttatgtatatacagtttacttcatatttatatttttgaataaaagagttgctacattagttgattacaagagacttgttgtagccaattacattcaaattaaactatcatgtgtattttcttagatcatattatatttttgaccagaaaatagatatttatgtcctatcttacatatccaaatgcactgatattcttattgtcttccaccttatgattgttgaattacatatgctttt

SEQ ID NO: 44266 - DNA, 1092 bp, Arabidopsis thaliana landsberg
atccatattagactcatcgatctatgcctaaacatatcaaaatcaataagtaaaagatccatgagagaacgtattaaaaatattgttttatatcaaaaattaaatacgatcttaaattacatatataaaatatgaacttttccatctatcgtcaattaactttagattgaaaactcacaatctaatattttagagttaacggtattttctaaaaattactaatctatcaaatattaatatattaaagttgtatcacaatatatcttaatatatgtatttaactccggtgcggttatgtggcgtggttaacccaaaacctcaaaaacacaacaatgcaaaattattaatactatttcacaatgtgaatatctagaatatatactattaaaatagtaaacaatggggacaaattttgttaaatgctgctgttacgttgtcttttcctttttaagttttgacatcatggtgctgaagctgatgccgtgtcttttatttgtttcccttattaagcatttagatttttttttttaactcgtttttttttcttttgtcacatatgtatacatattaattacttctttaaatgcggtcggtggtctaaaatatttaactaactctcaatataactaaaccagtgcaccggtaaatcttaattagtactcctccttacaaattattttctgttttaaaatgactactattgtttagagtttcaaaatgaatttccatagaaactacataattccagtccaattctaaactaatataaaaatagatacaataccaagaataattgatttttaccagatcattttcatatactttcttaattatgtgaaaatcatgaaaatgatatttattgagaaacggatgtagtataatactttgattttctttgtagaaatgaaagatttgaattttaccttgccataggcttgattatttgaaatgaaaacaaactgatcaacaaaagtaacacaattggccactgactgaaactttaaaaacagaagaaaaaaaacataaacacaagttagaaatttgaaacaacacttgacaaagttcacaatgttcaatgctgaaaatcctata

SEQ ID NO: 44267 - DNA, 953 bp, Arabidopsis thaliana landsberg
ttatgtacaaccgaacttctaacaaactaacaacactatggttaggtaaattaccaaaattaatccttcttgttgccatgcctctttcttacacgactttcatttaactgttctattaatatttgtttttttgagaaaaagtgtttattagttattccatctgtttcttaataaataatgtttttggaaaattttgtttaaaattaagtgatttctcttttttttttttaacataaagtttattaattttgatgttagttgaccatttgtgttctgaattttgttttatcataaaaaaacatatatataatttccttaataatcaactaattttatatacatcacccataatgacctagtttatttattttcatcaacaatatacatattctgaatttgagtgacaacacgactttaacacaaacaatgtcggatgtcatgatctcatatagttactttttagttgatcaataaatattggtcacattttttttgtagaaagtcaaaatcgaaaggatgaatatggatcctataaattctgttttgcaataagggaatacctccaaaatttgaaccctgtatggtgcatttagaagtcccccataaccttatgtccattttctctaccaattttagcccacttccccatcccccttgttttctttttgctctcttttccctctatttttttcctcccttttatcttctattttgtttccctcttctgaccctccatctctctgttttaaccctcctacttttctttttttccctatttctctatcatttttttctttactctcttcttttcttccctcatttccattacctctccttttgtgtgtctctttcctccatctatctctacatctttctggtctctcccttccgttatctctttctttctcttcatttattttttttttatttccccccccccccccccccccccc

SEQ ID NO: 44268 - DNA, 495 bp, Arabidopsis thaliana landsberg
ggttcacacattacttgtatcgagattcgagatttcaatgttgcattagaattcgacgagatgacaaacatggattatagaagtttacttgtaatcttcaagcgaatccgacgatatcgctcagcgattgagaaattagaacaaccgaattcagaaatctctcttgctggagggaaacgaagaattgaaatttagggcttcttcgccattgtagacgagagcgagaaatcaacgtggaaaaacaaaatactaatgacgagtggatgaacactcaagaatacaatttgcaacaatagataaaaaagacactcgaggtttgagtccgagccacatatgccactatggatttgaaccaccagcggagtggccataagtctcgctggtggctcaaactggcagattacaaactcgggcttagaagacattacttcactaccaatctcatgatcaatacagactatgagttaggaaatgtgttgtcgtgtactaagattt

SEQ ID NO: 44269 - DNA, 892 bp, Arabidopsis thaliana landsberg
  unsure (1)..(892): unsure at all n locations
tccattaccatgatcataaattcataattaaacacaaacaaggactaatacgagacgggagaaatatataaaggtacaacaaacataatagaaaggtacattaatattaaaactcaattgtggagaaactgatactctcacaaattatatgaccagagataaaccctaaaccatggaacttatcataatcacaagaaccaagcctagagaaatcactcccggagcaacggaaccggccaaattgcgaacagctgcggcgggccctggagccggcgcaagaacttctgaatgggagggatccactcccggagtaggcgctggcgatgacaaagccttatgnnnnnnnnnnnnnnnnnnnnnnnnnaaagccttacggaccggagacgctgagggggaaggggaaggagagggatgacgaggagtgtggctgtggtgtccggtagacatgaccgttacggctagcttttgacctttgagacaggatccggagttgccgctgacgaagaagaatgggtctgagcggctaagtaggaagagagagtcaccgtctgagagggaagtcaaagggtgagtcgtgttgcatgtgttgtactcgttttcactcacctccaacactgaatcttgtcccttcacgtacttaaaatctagcaaaatcaacaattgagtataatcatgcattaatgacacatatctgtggccaaatagaagagaagagagagacttacaaagagtgtcgttgacttgaaaccggtttcggtgagaccaatgagaataatcctcggaaggagtaaggacccaaccatctctcccaccaacatagaacttgtgcccatttgataactctatactaaacccgaaacccatcaacatcacaatcatcaagtaaacatca

SEQ ID NO: 44270 - DNA, 471 bp, Arabidopsis thaliana landsberg
ctataacgagccgccacgccagccagggtgcccgatccgagcgagtgcccgacaccgacgacggttagccacgtgcgccttaagagcgcgggacggtcgtgcagcgcctgggggacctgatgcacggtggagacctaggcgtcgtaggtaaccagcgggctcggcgaggggtacgtggagcggtcggtgccgagccggtcgatcgcgaacgtcgcgtacccggcgccggcggcggccttgaccaggctgtaggacgggagcgccggaagattccagtagtcggcgttctcgccgccgcctgcgaccagtagaaggacagcccggttgggcccggctgccggcgcgcacaggtcgccggtgatctgcccggtcgaggtacccggaatggtgacgggcacgctcacggtgcggcagacccgcgaccgggcgggcgggtccggattgccgtgcgcccctgcgctggcagggacg

SEQ ID NO: 44271 - DNA, 1068 bp, Arabidopsis thaliana landsberg
ctcagttcctagaactaacaatctcagaactaagaatcaaagaatcccagaactttgaattcaagaactagggacgataccggtgtgttgggaaggaatgttaggagcctagacccttcccttacccagacccagaactaggaatcttataactaggaatgtgagtaaccctgaccctaagccagagaagttgggtaagtgaatgtgaattagaagaagtttgaatgaagggaatgtaagtgagtgaagcaagaacaatgctagccataggggttcctccagcttcgctgaagaagctaggttcctccgcaactaagccagtgaccaatgaaatgaggggagagtagctgatgaaatgaggggtgagtacgtagattgtaaaccaactcatgggctattaaaatattgtcagatataagcctttccgaaacaaatgcagactgtgtaggagacacaagggaaggcagaatcggtttgagtctggccaccatgatctttgatatgatcttatacatgactgagcaaagactaatgggtcgcatctatgtcattaaccgaggattgagcttcttggggattaagcaaatctgagtcaaattccaatccaccggaaaggatcctgttcgaaaaaaattcctctcctcctggtagtagctattagtgagtgatcggctgctaggacaagagggcaatagcaccgaggaacgcctctgatcttccttgcgtctgtctcttccgatttcttatccgctttgagctctgttagtagcttgacttcctctagtagctagtttagagttcctatcctagctgctagctcttctttcctcgtagctctcttcttgtagctaggcagctagatgttcctatccgactagtaggaagcgcggctatggaactaacagaatagatagagcggcaaccaatgctattatgagttcttttcggtttctatactagcaactagtactcctatccctattagctttcttggtggcattcctttcggagatagagtgccctatacttgaattccattccgacttgctgagcttagaaaagcgctcc

SEQ ID NO: 44272 - DNA, 834 bp, Arabidopsis thaliana landsberg
tgtcttgcgtcttattacgtgcatgtgccctgatcatagaccagatagctgtctgaaatataaatgtctgttgatccattaaatgccatgatccataaaatatcacgcatcaattcatacaaaccgggtattctatattttcgaataattttaaaggtatgaagcaatcatatggttgtcccaataaagacaaataaaagtgatttattgagaactcgcatcgcatctaatactgaattgtaagatcttccgtatcaaaaattgacccaaatagttcgcatctaacagagaagtttccgaagcagtttcttctttaactattgcttttagtccatttttctttttcctataaagaaaagcctcgacaaagggctgtttttttcacttcattattttagtaaacaagtaaacagacactttttcatctatcacattccttttactgctttacataattagatgccaaattttactggacgaacttaactatcacaaatgttgaatcagtgatccaattgttgtgtatctgtatatccaagactgtaggctaggccatataatctggcaatctattatatatacgatttaaatcaaagcttttatattataaacataaaacttctcactcactaggccagccattagatcaaaattatataatttacagatgtacatgttagaacaaaatgaattttcaggaaacctactattgtgtataaattcgaagttaatgagttcgaagctgattttgtcacgggtttcttggcaaagttcttaatcaagaaacaattatttaaaactttgaaacgtatctggtcgtcatgagtaaattcg

SEQ ID NO: 44273 - DNA, 350 bp, Arabidopsis thaliana landsberg
ttagtgtactatcctccatagacaacatgtgtcccatcttgcctgttagggaacatggagtaacacttggtgagttgacttaatctttatcttacatatatatgatcaaaacccttcttatatctatagattctgaactgtcttccaaagggctatgatctttatgctttggaaagaatgtcccaacctcttgcacaacgtgacatcaaaaaccgctgctgaaattcgagaagtgtgggtacatactatacttgctaggagaaagaggaaagcttttgcaacccttctatatccaatggttcacatttgactaaacttctagtgctcaattagtcaattagtttcgattt

SEQ ID NO: 44274 - DNA, 482 bp, Arabidopsis thaliana landsberg
tcttggtcgacgatggttatgggttatagtaaagctggggatatggaaattgctttatgttttgtttgataaaatgccattgcctgctaaaaatgttgtcacttggacgataattattgctgggtatgcggagaaggggcttttgaaggaggctgatagattagttgaccaaatggtggcttcaggattgaaatttgatgctgcggctgtgattagtatcttggctgcttgtactgagtctggtttgctcagtttaggaatgaggattcactccatactgaaaaggtctaatctcggttcgaatgcttatgtgttgaatgcactacttgatatgtatgcaaaatgtggtaacctaaagaaagcgtttgatgtgtttaacgatatacccaagaaggatctcgtgtcttggaacactatgcttcatggtcttggcgttcatggccacggaaaggaagcaatcgagcttttttcgagaatgagaa

SEQ ID NO: 44275 - DNA, 171 bp, Arabidopsis thaliana landsberg
accgggccattcgcaccaggttggaccggtccgagtcgtccatgccgaaggcgccggtgtccaggtccagtagctcggcgaggcccaggccggccagtttggcgtgagcgatcggccgcatgttgccggtcagcacggactggtggacatcgggccggccgttgagctccc

SEQ ID NO: 44276 - DNA, 1198 bp, Arabidopsis thaliana landsberg
gatttcgttccccccccccgtaagatcaatatcacaactaatgaggtcttaaagtttcacatctaagtaatacccgatccgatagtttacaatataaatagatatttatctatttaacaacaacattctaaaaaaagatattaattgatatcggtagttgtccggtcgtacccaaacaataatattccagaggaaaatgcacctaagatcaaatatttcgagccggcttccgtggaaaattcagactttctttttgatgctgcgattacataaaaacataaactttgaggctcaatagctaaatacatggcaattaaatcatgagccgagatcataaagagcataccgcgagtaggaagtggaattaatacaatgaattcaaaagcatcaaacctctcttggtcggaagaatcgaaacacatcgaaatggtaccagccgtacttaataatagaaagatttggcagaaatatgtaaaattgtccctcctaaaaagattattccagaataaatgggcaatagttaggagaggtgcgccagcggcgagcagaagcaaggttattagatacctcaggaaagcccggccagaaccacacgtgcaagtttccctgcatgtggctcgtccgtgataacttcttcggatttgcgtgaactagcagaccgatcactaagtggaaaaaaccctccagcataagcgaaccttttctccactggttaggaatgggctaagagaggaagccaaacaaaccgacctattaagcacagctaagctaatatgcgccggggaaagccaggtgccggaggtaagctttattcggcccggagcattgattccccataacgaataggctagctctatctttcaattgcctatcctgtgctcgagaaggtctcccagttcctcggcagcacctcggggtgcatttagttgtcttacatgagactcgggatattcctcaccccatggcaccttttgctcatccattccgcccgcccgtacagacgcggcgccctttatcattatcatctaccgccctttctttcctcccggctattcacgcatgaagatcgtcctatgtatgctatacttcggaagccggtgctataggtaggaggacattatggcaggaacaggcaccccgggcaaacccaacccccctcccaagaggaaatgggccaatgccccccccgatccctaaa

SEQ ID NO: 44277 - DNA, 313 bp, Arabidopsis thaliana landsberg
gatggctaatcaagaaggacctacaattacgagaactaggagaaagacactacatggtatatgtctgtcaagatctttgtgtgttttctatctccttctgctttctatggcttggaactcttaattaattactagtgttctctggcaggaggttcaacgcttttggatctccatcaagctttgctagattatttacctgttggcttgggattaaccaacgatggtataaactattatgtgtttcttaaaaaagacctctctggtttcagagatgtattctgaccctaccatctttgggacgttgttcaggtac

SEQ ID NO: 44278 - DNA, 254 bp, Arabidopsis thaliana landsberg
aaacgatactcttcgactcagccgtcctttcgcagaaaccatttggagttggagctttggacgacgacaatggtatcatctctcttccttccatcttcatttcgtttcatttgggatctgttagttgtttgctttcatagtagaatcatcgaattagatccttcacgatagagttagtgttttctggatgcattctcgcttgaagatgaacacacatgggtttcgatttcctctcggcggtaacaccatcattg

SEQ ID NO: 44279 - DNA, 727 bp, Arabidopsis thaliana landsberg
agcccggcagcacatcgccacctacggcagcggcgggcgcccggtgtgctggtcggcgcagggctatgcctcgggcttcctcagcacctgcatgggcaagcgcatcctggtgcgcgagctgtcctgctgttcgacgggcgaggaccactgccactgcctggccaagccggtggaagactggagcgacgcggaaaacgacctgaagtacttcgagcccggcccggtgaccttcctcgcccatcccctggccagcgccacgccgccggccgagacagctccgccgctgccggcggccccgcagcgccccggggtgataggcgcgtcggtgccgttcagcagcgtgctgcacaagatccgccgcgtcgcgccgaccaacgccacggtgctgctgctgggtgaaagcggcgtcggcaagagcgccttcgcccgcgaaatccagcgcgccagccggcgcgccgcgcagccgttcctggaggtcaactgcgcggccatccccgaacagctgatggaggccgagctgttcggcgtcgagcgcggcgccttcaccggcgccagcgaggcgcgccccgggcgcttccagctggccgacggcggcaccctgttcctcgacgagatcggcaccctctcgctgaccgcccagggcaagctgctgcgcgtcatccagagcggcgagttcgaggccctgggcggcagcgccacgcgcaaggtggacgtgcgcatcctcgcc

SEQ ID NO: 44280 - DNA, 355 bp, Arabidopsis thaliana landsberg
agaatttcaaccagatagatgagaatcataccgaccaagtttagccgatcaaatctttttttttcacgaacccgactgttgttgtggattcgcttcaaatatcaaatttttcagacattaatcataggtaaacccttctgtctttctgtttttgtaatatcggaacttctatcagctgtggtcgagtccatcgtaatattggtaagccctttgatgatgatcggccacgtgtgtaccaaacccgatacggtttgaccttatttagtccggtccagtcatgtctgttgcagaaccacagcaggtgtgagttggcaagtgtggaatcaagtgaccaataaaaaagatttagaaatga

SEQ ID NO: 44281 - DNA, 638 bp, Arabidopsis thaliana landsberg
  unsure (1)..(638): unsure at all n locations
ccggaatgttgtgtgagtcttgcagattcgtttgttgaagcttgatttcgtatttggtaccaaatcgaatatatttaacctgactaatagattattatgatagcactaaacctaacaattattgtttgctactacaatcataaagaattcaatttatactctttttgagagtttttatgtttaatcttattagcatatctcgagaacttttacacaaaagaaccaaagtagaattttggtctttgtatcaattgggagagacacaaacatgactgagtctttaggaactgttgctttctcttgaatcatgtaaacagaaagacacgctgtaaaagcaaacagcccactggtgtgtagctaaaagacagaacaaaggtcacaaagtcatctttttgttaaaaaattttggtttcgaaattgaaaacaaaaaaagagagagtgggttcaaattttcaagtggtccatttcaaaatcttgtagggtttaaaaaaaagaagactttacgataaaagtgaaaatgaaaagtaaaaaatgggacaggaccagnggaccataagcttcatcatcatggccaaccaaagtaaccaactaccatacattatctacttatagtcatatatctgtactttgacccatga

SEQ ID NO: 44282 - DNA, 647 bp, Arabidopsis thaliana landsberg
cgcagatagggtagttccccgtaatccgaaatatgatttagtacagaggccggccgaccccaaagtcctccaagtactcactcctttcaacgtcccaaggggcattaaagacatagagatcttggaaccaaggtgtcctcctatggaaggaataagaccttgaaacaagacccccaaaaaagggtctttatgggacctttgtcaaggtcgttcgctctgggctttgggttcaacgggtcgctttgaaaataaatagtctcatcacatctaaggtgcaaagattgacctcgatgcatgtcaaattttgaatgcctcatgacctatggttcggtcgtggaaaaccaccaaagggtggttggttgagatcttaaggaagaaataccgacccaaagatctggcatgtgtccttgagtcctcttctgccacgtgtcgcagggcagcaaacctataaaaagggatcgtatccgagaaagtactcctgctagcactgagtgtcttctttccactaggctgaaatacggctgatttctcacccgtgcgcacgcatctcgcctctggctccctgaccgatacgacctttctgggtttgttaacatccttccttctccttttgggtatatgctatcttgtggtccctgattcttagg

SEQ ID NO: 44283 - DNA, 905 bp, Arabidopsis thaliana landsberg
cccttacacacacctaggagcacaccatcctgcatatccatacaagatccgagtaggcgggtcgaggtcttaggaggtacccactagactcggagtgccctcccaaaaggaaaaagatgtgtttgtcaggtacggttcttcgtagcaggattgggcgggttcgaccaataatgctatgcttacgcacaagactacccctcttacagaaagcttcgcggggacacatttacgacgcaggacgaccgcccgtagggggtttactgcacaaggcccctgcagaggaaaagctttctcccagcgaatataagatactccgctccgcgcaacatagggattggcacgctttcgggaaaaacatagaatagtagaagatctagcatgcggaacacggcgatcattagaaattcacgaattaaaaatgctgtaatatactctttcccataacttctcataccagaccaacccactgaaatgcaaatagggatcagaaatgtggtcaatatcacgaagaataaagagataccgtctatacccaaataaaaattgatgttttcataaggaagccatcgaaggctttccacaaattgagatttggccgtagaagagtcgaattgtatccgaggaacaggagaatacaaaaaagtaataagagaggcacacagaccaattaatcgtatcggtcgtattcttgaatttggaatgaaaagaagagtaatgcttcctagcacaggacacagaataagaccacttagattagaatagcattcacagaaatgttctaacatagagtagaatcgaacattgaagagatttgttgacaacagtcaaaagatgggcgctaaattccaatacaataagggtctatcagttcaagtcagctgaacaccgtgatttatgagtgggta

SEQ ID NO: 44284 - DNA, 559 bp, Arabidopsis thaliana landsberg
atatgttcttatctgatttacctcctttgctaaatttactatcatctttcttctccagttgctatgcgaacgctgttttgcaatccttaacatgtacaaaaccactcgttgcttatttgcttcgacgatcacattcaagatcatgtaatgcttttcccaattaatctcgtagcataaagttttgcagatttagtttacttcgtctgactaaactatgttattctttcgctataggttctgggaaagattggtgccttatgtgtgaacttgagcaacatgtaatgatgctaagagaatccggaggtccactttctgctagcagaattctctcacacatgcgaagtataaattgtcagattggtgatgggagtcaggaagatgctcatgagttcttaaggtttttcttcatagtccttcaagatatctgtgtatcctttctacataatgtgattatatctctccgtctatgttgaaatctcatgaaattacgatattcttttgacttaaatgtaggcttttggttgcctctatgcactccatatgtttggagagacttgga

SEQ ID NO: 44285 - DNA, 527 bp, Arabidopsis thaliana landsberg
ctagaaaaaaaaaagatataaacatgacgaagtttgtacgcaagtatatgttttgccttgtcctagtcttcgccgcgtgttctttggtcgttaactccattcgcacgccgccactaagtccgtcacatcaatatctttttgttatagtttatattttacttggtaatgattttcatatattaacattttatactttttaatgtagaaaacacggtcaatggcggagaaaagaaaaacgccgatatagaacaagctcaaacgcaccacaaggtaggtcctgtctcccacggtgcacttctaccatttttatttatgtgcaaaaataccattttttaatatataaaaatatttttttaataataacaactgcatttgattttttcttttaattaatttttaattttttctttataaaaaaagtcattgtcaattaattgttttttttgttgtaatgtggtgaagaaggaaataagccaaaacggaggggtagaaatggaaatgtacccaacaggatcaagcctaccgga

SEQ ID NO: 44286 - DNA, 763 bp, Arabidopsis thaliana landsberg
gaacgcctggcacagatgaatgccttccagaagcgccatgccgggctgcttcccacgggccaggcgtgacatatgcttgtatgacgaattgtcgcgtgactgaatatgtttcatgggtttttgtcaagcaaccggcttactggcgcgaagctgcgccgatgctgtgggcatggcccaaaggcattgaggcgttcgatatgcaatgccgtgccgtaccctttgtgccggtcaaacccatagtcgggatactgctggtgcataagcctgcagtaggcatcacgtgcggtcttggccaaaatggacgccgcggaaatggcggcaacggttgcgtcgccttttatcacggccatggccgtacatggcaggttgccgggtatgcgatttccgtcaatcagcgcatgcagcggtgccgggtcaaggccacggcaggcgcgacgcatggccagcatggtcgcctgcaaaatgttcagtgaatcaatctcgccgacactggcctgggcaatatgccaggccagcgcccgcgacttgataagcggcacaagccggtcgcgttggcgttcagacagttttttggaatcggccaacccgcctatgacgacccccggagccaggatgacggcggcggcaaatactgggcccgcaagcgggccccgccccgccttgtcaacaccggcaaccagtgtggcgggtgccgctgctgcaaataaagcagcctgttccattgcgggcttgattcagtatggcctgtgccgccagcgctgcc

SEQ ID NO: 44287 - DNA, 681 bp, Arabidopsis thaliana landsberg
ctgtataatcaataataccagttcagagcttctttttatcagtctaattttatctagaggaatttcttgaagcttgggtaccgcatctttagtgcactcgtgcaaaacttctctcgactcagcaacagaaacaccctgcctgttttctgatctttcatcaaaactgttggggcattcaataattggatcctcttctatagcctgatcctccacatcaggctcaaagatttcagccatgtcacttatcttggatgacgtttctccatgagtatgtgagttaaatgaaaattttggcctcccatgatctttgagacctgcatatacattagaaacccaactcagagatttcagaaaatcgtgcatacatgatctgtttctttgagttttcatacgtggtgcaacgttctttaacttgtacggtaaaaaaataccaagaagagttttggataaaacagtaccattactacttttcttggctctgaagccagatagatgggatgatgcgactgaagcaacaccattcaaatggattagtgacttggattctttacttatagcagaccaagttgccacttgttcatcatgtgtaatctgaaggcaacaacaatcaccattcaaaacataagtagaggatactgtcaccaatttgaagaacttatcaagatgcatgagtgaaatgga

SEQ ID NO: 44288 - DNA, 476 bp, Arabidopsis thaliana landsberg
agtcggcctcctcgatatagttctcctaaaatcaatagcatttcgtcagaatacatcctgtcttttcacttttagttgttcctatgcatagtcagtactatagccccaatcatggctactaataaaacaagactaggaaccaaaaaccagacagaatagtaggtataaagtaaattgcccaatgtttccaaattagtccaacttcgtacctttccggcataaaccttatatctaagagaggtcgtatttctttgtgttggtagtaatggaatgctttcattatctaaaatgaaaaacatttcccaccaaaagatcagtccaataatcccactcactcgtaaatagcgcaatacttcttcgtgaatctccgctatttgaatatggaacatcataacaacgaaaaggaatgaaacggctatagctcctatatgaactactgggaagatcatagcgaagaagtctagacctaacaaaag

SEQ ID NO: 44289 - DNA, 396 bp, Arabidopsis thaliana landsberg
gctggttttcaagctagctccttttgttctattttgttgcaagctgtttcacacacaaaagcaggcttgcagaatgcgaatgtttacacacgttagtgtgtttatggcgtgaaatacgcgctcttgggccatgccttacgacactggacacataccgatagatagtatgacgccatctgatcaggctaccttcccattatcggcatatttaaaccatattcatttcactaagtggaccatgtgaaatgataatgtctttacaaactaattaatcttgatacttgatatagacagctactttctggatgcttcatcaatattggacaatagaatagctagactatgtgcgtcaggtatatccatgccatgcactctccaccagagaagtaacataac

SEQ ID NO: 44290 - DNA, 862 bp, Arabidopsis thaliana landsberg
tgtgaaaacggactaaacttaattgtttcaactattgcgttaaactctcaaaaacatacccaacactgaagtttcttaaacactatataggttttagatacaagtgtagtatgataacgagtctgtttaattctaacgcttaatttgatgacgggactttttttctttacagatttttctatactagtttgaaatttggacttctaaagagaaaagagacacgtcttaattcacttttgtctgtttgtggtatctagaagaatattactttgtaaacactaatctataaagtttttactttacttgttttatctgttttttttagccatgcatgcaactattacgttctttacttcaattactttgactataaaagaaattgcagtcccactatgtaattagtcttttctctttaccgtttaaagttttaactatgttgattatatttacgtaaaatatttacaaaacaatatttatttcaatttttgtttcttttcggttatttatatttatctatagaattatgatctagaaatatgcacacgcaaataaaaaaaatatacacacacgcatctataagaattactttttttaggttcggatcactttcttttacaaagtttcgatctcttattaaaagccaatgttggcacttttgcatactacaatatccttttaagctttttaagaatcatcatttgtaggtttgctttatttatcctaagaacatctttcggatatcttaacttttttgtttcttctctttgacacatctttttttaattatcattaacaggtaataaaaagatcaagaattaaccttttattgcttttggtcgacgaccatgaacacgcactatat

SEQ ID NO: 44291 - DNA, 735 bp, Arabidopsis thaliana landsberg
gtcgatgcagcggatttccgcgccgagaaaatcaagccacaggctcatgtcgaactcctttgaagcgggggaagggagggggtgtttcactgcaccggcggcagggcgaagcggtggccccagtcgctgagctggctgtagttgcgaacggtccagttggcgtcgtcgatgaccacgccgccccagccgtactcgatgccgaagcccgagggcgtggccatgtagaacgacagcatgcggtcgttggggtggtggccgatctccatgatcaccggcacctgggcggcgcggacgcggtcgaaggccaggccgacgtcgtccagcgcctgcacctcgatcatcaggtggttgagcttcttcgccgagggaatggccgcggtggcgagggaatggtggcggccggtgcgggcatgcatgaacaccccgtcgatggccaggccggggatgctgtgggaatcgcggatgtagtcggagatgcgcaggcccagctgctcggtgtagaagcgcaccgactcctcggcattcatcgcggcgacgaacacgtggcccacgcccagctcgccggtctggaagccgccgcccaccagcagcggcgagtggaagggcgccgccagcggggcctgctgcgggccgtaactgaactcgtggcgcaggccgatgggatcgacgcagtagtacaggcgctccaccttgcgcgcctggcgcaaggcgtcgtcggcctcgctcacctgcacg

SEQ ID NO: 44292 - DNA, 732 bp, Arabidopsis thaliana landsberg
aacttcaagtataggcaattcagtaatgcgtcgttgactagcctccaaatgagggaagctcccgcaaccagagttcgagccttacttgagaagaattaatttattcgctatgacttaagtcctccaaatgatggaatctcccaaaaccagggttcgagccttacttgaaataaataaatttatacgctatgacctccacccgcataaatatacactaattggctctatagagaatattaaaattaccctgataatatttgattatttgcaaactatagaatgtgtccctagtagatacatcattcatgtacatgcacttaatgacaactcagtaatgcattgttgactggaccccaaatgagggaaactccggcaactagagttcgaaccctatttgaaaggaattaatttattcgctatgacttgaccttcaaatgagggaagctcccaaaaccaaggttcaagttttacttaagagaaattaatttattcgctatgacctccattcacataaatatactaattggcactatggataaaattaaagttaccctaacagtatttgattatttgcgaactataggatgtgtcccctagtagatagatcatacatgtacatgcacttaatgactttcaaatataacaacactttatatatttgagtgattttttggcgggaaaaatgtttaaaggtgatagtttggattttctactttttctttggatagttat

SEQ ID NO: 44293 - DNA, 715 bp, Arabidopsis thaliana landsberg
  unsure (1)..(715): unsure at all n locations
gccgagtccggcagctggcgcagcgaccaggacctcgccgaggtctacaccgcgtggggcggcttcgcctacggccgcgatctcgacggtgcgcccgccgccgacgacatgcgtgccaactaccgccggatcaaggtggccgcgaagaacgtcgactccctcgagcacgacatcgccgactccgacgactacttccagtaccacggcggcatggtcgccaccgtccgcgcgctgaccggctccgaccccaaggcgtacgtcggcgactcgacctcgccggacgccatcaagacacgcacgctgcaggaggagaccaaccgcgtcttccgggcgcgcgtggtcaacccgcggtggatctcggcgatgcagcggcacggctacaagggcgcgttcgagctcgcggccaccgtcgactacctcttcggcttcgacgccaccgcgggggtcgtgcacgactggatgtacgacaagctcgcccaggagtacgtcctggacgagacgaaccaggagttcctcaggaagtcgaacccgtgggcgctgcgcggcatcgtggagcggctccacgaggcggccgagcgcgggctgtgggccaagcccgacgccgacgtgctggccgcgatgcagcaggtctacctggaggtcgagggagacctgnaagactccgccccgtgatcagggtcctcggcttcggcatggggcccgcgcacgtcacgcc

SEQ ID NO: 44294 - DNA, 755 bp, Arabidopsis thaliana landsberg
acgggattcgaacccatgatacaatcttcttgtatgtcgatttagcaaaccaatgccttaagccactcagccatccctccaagttgttgatcggaattttttaaagagtcaagtcttacttatttaagctggaattaaaatcttcttctcttatgatattttatagagtttcgtttcttttatctatctccccattcgaacgagagaattgagttgatagcttcagtagtggttgcttgatggtgtgtagtgggatgacctggtagcgatcatattagtatgtatatgagcaggactttaaagatctgatatctttcaagaaagttggaccatttatcacatcaaggtaactacgataggcaaaagaagactcttaggtcgttgattcaaattctacctatatttgcattcacttaatggtcaaacctacaatggaattgactctaacatccgatccggccggaggaaagacttactactacaagggcttgtgccaaccaacaagaagggggacggagcaaagacatctcttggccagaaccggacattgccctttaccatctcaccactaggagactgggactcgaggcgtggttaagtattcccttccgctctggaagtaaatttatttcctatctttcggttccaaatctttttttcttataaagagtgtattgtatggtccagttggtgtggagagatgggtcactcttgcgcatctcgcgctgtggtgattggtagaggagccgaacgta

SEQ ID NO: 44295 - DNA, 763 bp, Arabidopsis thaliana landsberg
ttatgccaattgtggcagcatatatagtctgttttgaattatacttgtgtgagaggtaactttcgtgagcatctttgggttggtttccttaatatatactaatggatttattatcaataatattgaacgttctctagctttttttgataatattgacccaacattaattgtcaaactcgcagggaggttgatcaaatgcgtatgttttggaaactaatcaaaccacttacatataagcattatgaaaagtttagacattaaaataataatttatttagcaaacaatttaatgtattagatgacaaaataaagactaactgatttgtggtcattggtcaagcattgttgaagaattgttgggaaattttatttcttcatattagatgaaacatctcctttttaatgaataaataatcagcagaatctacatatctatcatttggtaaaaagtgactataatccattttttttttttggtcttttaaaaatattttaggatattgttgtaacttgaatggtaggtgtacgatttatattgaccgtattgaagtctatgtagttcttggcaattgtgtattttatagtcgtttcccataggaaaagaaaatatttgtattaagtataaagcctattttcagtataagaatacaagtagaatctgacaagtacctaaaagctttatataaataaggtttttttttttttttggggatattttcaaggcttgtataataaataaaattttttggttgggggaatattt

SEQ ID NO: 44296 - DNA, 757 bp, Arabidopsis thaliana landsberg
aaaccatgaccaaagaacgaccgagaaagaaagaaagagagagagaaaacgtttctccaacaggctaagtaaaaaagaccgagagagcagagagaaaaaaaggtcgagactttggagagagaagtagtattatacgtgtgtgttgatgagcgggaaatagaggttcgtttgcttccgaacctaagcttcgagcaaagcttctcaagaacacaactggctaacgttaggctcggagtatgtatctttgtgttgacttagcttgactagactttggtctggatacgaacctgagatatgtaaggatatttttcaatgccgaagcagtggagagcttcggaattcgagcctaaatgggacttcgtaaataagtggttttagtagggccaggcataccttgatcaccaagccagaaaataaccttattttaatctttagtttttaccccttttgttgtttacctgattagaaacagtacttatttcaggaaatgaccgtgactgctgtctgttgatataaatagtaagaataaaaatgacaattttgcgaaactttatcaacagtaggagagctctcaccctgctcaggtaaatttatctaatcggctacaatctccattggagatacaaataaatcacttggttgtcaagcaaaaaaaaagatacatatgctttaggcagagtaaataaatactcgcttatatacttatcttgtgaagatgtaatacaaaaagatggcttaaagtaagatttgatgacct

SEQ ID NO: 44297 - DNA, 593 bp, Arabidopsis thaliana landsberg
aacattgggcctgattggttgtgtctttagagttttttcacatccatattttggtctacattctatatttctacaacaatcatattttacatttaattttcaggtctacaacaacattttactttttccctttttttgggcactagaaacatcaaaagctatagtcgtaagttttggtctttggaatataattttatttaagttttatattaaacatttttgataaaaaaaaaactagcttaagaattatatatatatatatatatatatatatatatatatatatatatatataataatcaaaccttgagtggcagccataacatagagaagaagaaaggttcgcatcttttataaattttgcccctcctttcttgtgtgatttacatcacgaataattaatcagcgatgtttttttgttttgttgctaattattttctacgtatttatatgattgttatgcttttagatatgacaaacaacgattcttcttcttctcaaagagaggaaaatactttttaatgctttcatttcaaaataaagtagaattagttagggatatacttcgtgtcatagatatttattaaattgac

SEQ ID NO: 44298 - DNA, 978 bp, Arabidopsis thaliana landsberg
caatgtgtaatgttgcttagggaccaaagagcaccactgatgatgaatctgatatgagacaagatgggcgtgctgtgatgaaaaaaagccagcttctgcttccagtacacagatggaagaagctgatccccataattccaatgccacagctgcaagttctgcttctagcacacagatggaagatgctgagccctataatcctgatgtcacagctgcaagttctacttgtagcacacagatggaagtagctgagccctataatcctggtgtcaccgctgcaagttctacttctagcacacagatggaagaagctgatccctataatcctgatgtcacagctgcaagttctacttctatcacaccgatggaagtagctgagccctataatcctgatgtcacagctgcaagttctacttctatcacaccgatggaagtagctgagccctataatcctgatgtcacagctgcaagttctgtttctccgaggtatttgtttctggtttctctcgatagaaattcattagaagcaacaaatatagttaatagatttgctttctgttttctattaatcatatagcaagaggtctggaggtttggttgattatgaggatgacgaagatgagctagagaagagtaaaagacagaagctcagttcaactagtgaaggaaataagaacaccccagaacaaggtggtgaagctaaggaacctggagaactctaaggagctaatgacgatagcaatagtttagatgaagaaattgacagcaagcagatgtaaagagatgttgagattaacattcttgacaatagataggatttttcaagaatagaagaaactgtgtatagagggttaaaatgatgcttttgaagacaactcgatgatccgtgtaaatgactatgcaattgcattttgtaaatgaatcttgtgtgaaaatgaaattacaatttcttaaagagagacttggaggatttcttca

SEQ ID NO: 44299 - DNA, 589 bp, Arabidopsis thaliana landsberg
ttttgaaccacccaaaagatgagcccaatctaagcccattgaagatcaaatattgagttgacactacctactaatctaacacaagaacttagcccacaactttaacactactaatatcaaacttcaaaaaaaaaaaaaagtattccatagtgtgttttagtagaatttataaaagagtggacccaaaaaattgagtcatcaagttggaggacatatccattatccaatcctatcctgttttctgctttttaaaaacaagacatgacatattgacattgacccacacaccacaaaaatttgttcttaatgacccgccaagtcgccaactgaattgaatcttaaaccgagtgtttcatatgttattaactttcacttagtacattaaactttttctaatagaatataaaaaaataactttctttttaatgcataattacaagtaagataatttttttaacaaaagtccgacaacgaatctcttttcacttttcattttcaattttttttacctctagttttctcattaatgttgatgaaatttggctctgactaattaactattatgtgttttattttaaattaactatta

SEQ ID NO: 44300 - DNA, 110 bp, Arabidopsis thaliana landsberg
tgactgagtgaagcacactgcactcgcacatgtgctttgtccataagtcacagaggccgtgtctccggctgcagccctgcaagcttggcagcatgcgagagcccctatcc

SEQ ID NO: 44301 - DNA, 277 bp, Arabidopsis thaliana landsberg
aatataaactggaaaattaaatgtaaattagttaattgtacagaacacagaattatatcatttattattccgaaaattactatcaaatcctaaattcgaacattatcagaaattcatgtttatgatggaaatgttttggaaagagttccaaacacatcacaaactttttgtaaccattttcgaatatcattcaagaactctttctaaagacaagtgtgtggcaatgttctagaattcgaacatgttggtggtaggtgtctgttttagatctctcagc

SEQ ID NO: 44302 - DNA, 491 bp, Arabidopsis thaliana landsberg
aacaattataacggttttttattcagcatctacccacaacataacgaggacttgaagacctagaagattactaaagactgaaatctgttgttcctaatgatatgaacatcattaggcgcaaagtatctaatttgaattgtgcgtgcatgttttttctttttaattattgacttattgtgcatgcatgttaatttacgattctaatttctaaagcattagcctctttcgtaacttagtggaactttaagttacaaaaaaaattatgaaaatccattcgattaattaggtgtagttggatttgggtcaccatggaactcatttatattattgacctgtccttttctcacttgatctattgtttatttagagaatatggtaactgttacaagatgtttggtaaattatagcctaaccaagctaacataaacgtatataatatcgtattaactcaattttgaaggtgaaaatggattattgattattatttatat

SEQ ID NO: 44303 - DNA, 727 bp, Arabidopsis thaliana landsberg
accctattaatagcaatttctgagacaatttgttcactttctcggaaaatttgttgactttccctaaatcaaacaaaacccatatcttataatcaaaatctcagaaaatcaagaatgatcaaaagggaatctttctcataccaatttttttaaaaggaccttttttcaattctcagaagtcaaactaagaggagtagaagaagaagaagaagattgttcttagtttttaccagtatgagtaacggtagcctgaggaacagagattccacggcaagatttgatcggataaatgaccaaagattgaatctttagaccttcctccatttctctctccctttcacaaacacttgctaatgaatccttttagctttagtaaaaagggaacataaaaagaagaatcattcaagaatttgccatcgttttcaaaatgttgtcgtttgagttttatgcatttttcacacgtggattatataagcagacaggttacaccaaccatcttttaatatttggttctttttcaactttttgatggactaaactcattcaagtaaatccgtggtaattaggatccctgtaaaaaatcaattctcaataagaacaagtaacaagtgacacgttccatttcagtattagaatggtcgacctaccacctcaaaatagttgaactagtactcagaaattaggaatggccgaaccttacccactttcagtaattttaagttcaccc

SEQ ID NO: 44304 - DNA, 854 bp, Arabidopsis thaliana landsberg
  unsure (1)..(854): unsure at all n locations
tctttcatattcattaaggaacaaactaaaaatatttcatcctaccatctactgatctacaataaattaatttgtgccagtgttgtgaaattttgaattaaatttgacaccttatttaattatgagttcagtgcttgtttcgcataggtaacaacgaatcatcatttgagaatgatataaaacaacctaaatatatgcaagtgtaaatcatgaacctacgttatagatcctaatataaaccatatataattaacaaactaatatgtgctggatttggtatgtccagctgggtatgtcttcatttatctctcaaaatttactgatactatagctaatagctatatctgaaaagagtaattcccaatttcaacatacaataacaagatattcatcaataagatcacttttactagttatgaacagtacctggagaaacaattgatatttttcaattatctaccatacacatcatcgcgtaaatcaaaccctcaaattctgaatgaattagaaggaaaactcatgccaagacctctgacaaactacgtatttttattatgatgaaataatcatttacaagaattgtagacagatttggaaatctcagtatagttaatgaaggggtctgcctcgacaaatggcattatggatacggttgagcatacgtgtaccacttgcacggccagtttcatcacatatatacatactcctttgacctttcttaagtttttttttattttaatttaggattaccccgaaactacaccataaaatttgttttcaaaaaaacgtcacaaaccttttttttgtaaagaaagctttttctaccaaacttaaatctaantaaagaaattttt

SEQ ID NO: 44305 - DNA, 253 bp, Arabidopsis thaliana landsberg
gtgcgacggatcactgagtgtaacacagtgcaaacgcacacgtgattgagcaatagagctgcgcgcgacacctgacccatattatgatcctccgaggtgctcatgctagagacactatgccatagtcgcttgatggaggcgggttctagaagcacctggcatctggaccctgcccctgcgagccacatgtcaatcagaccatcgtagctcctggacacactcgaatctttgcaatggccacggactgactatg

SEQ ID NO: 44306 - DNA, 190 bp, Arabidopsis thaliana landsberg
  unsure (1)..(190): unsure at all n locations
ccatttggggctccgagggcatatccgatgctaacaggacagcctaaactgtgtattgatgtattataagannnnnnnnnnnnnnnnnnnnnnnnnnnnnnnnnnnnnnnnnnnnnnnnctctgactgattttttcttctatggcatccgggcgtactggtcgactaatcctcgcacccggtggatgaac

SEQ ID NO: 44307 - DNA, 651 bp, Arabidopsis thaliana landsberg
ttttaaaaagtgataaagatacgttgaggatgacgtcatgggaacacgtttttgacagttggagtgtaaactgctctctgtggttcgaaaggtgagccacgtttgaagggacgggttcgtccgctgtctagccacggtttggggtttcgctttttgtaatctgacccacgcgcttttagcttttggtgtgggtcccttttcttattcattatttttggcaattgtttggattatatttatttctgtgttttattattggaaatccattggattattctatgaacttcttctaactattatcatcatcagccttaccaaaaaacaaaagtattatcatcatcaactaagccaaagatggatacgtggccaaggcggattgtgtatttttttcattatgtacccaaaatacattgaaccagtagtttaaagacaatccagtcttgttgaaccagtcgagttttttattctttaatacaacaaaaaaaaaaatcaatcaaaatggagttgtcttcattcgattcggtttcaaaaataattagaccctttcgcataattttataaatgaatatttgattttataatcatccaggccaacgagatttcaagaatttgcgtaacttttttactaaacgtgtaacctttctctaaaac

SEQ ID NO: 44308 - DNA, 558 bp, Arabidopsis thaliana landsberg
caaaactatgcattttatatatatgctagatatgtagcatgtatgtcgtatacatgtgtgtgtgcacatgggagatgaatgagatcggggtttgttaattaagtttgatttgtagtgtttttatattatactgcgaataaaagtagtgctttcaaagctgataaaataaagacaatgggtatgattgaccacaggatcatagatagctaactgctaaagttcacgagaccagatctaagaaaatgtatatatctcattatgggtgagaagaagtggtcaaaagtcaaaggtgttgaccatcagttattcaaccaagcttttacactcgagttatcctaaataatttcagatttcgattgcaagttatcacatgtaggtatttttctcacaatttaattcttaatacaaaaatttcagcattccaaaaaacaaaaattttagatccatagagagtaaacttttacaattacaatttgttagagcatgatagtaaaaaataaaatcaggagaaggtggtggcataatgacccaccctaatattttaggggtagtgccagt

SEQ ID NO: 44309 - DNA, 285 bp, Arabidopsis thaliana landsberg
tttgcttgttcatagatacatgtggaaacacatgatcggtgacgtctaacgtagtgtggtttgggcagccctcatatgatttgaggcaagaccttgctatactggagtgagtgatcctgcgtacagaccatgatctgctctatcttactatgacagctacatacgtacaggcactttctgtacattgtcacactgatgcaagcttaactcgtattaaggatttacccatacgcacaccatcagatgttgccagtgtgttctgctaccattatcaagctcttacgg

SEQ ID NO: 44310 - DNA, 329 bp, Arabidopsis thaliana landsberg
aaaaataaaaaaaaaaaaaaaaaaaaaaaaaaaaaaaaaaccaaaaaaaaaaacaaaaaaaaaaaaacaaaaaaaaaaaaaaaaaataaaaaaaaaaaaaaaaaaaaaaaaaaggtcaaaaaaaaaaaaaaaaattaaaaaaaaaaaaaaaataacaaaaaaaaataaaaaaaaaaaaaaaaaaaaaaaaaacaaaaaaaaaaaaaaaaaaaaaacaaaaaacaaaaaccaataaaacaacaaaaaataaaaaaaaaaaaattaaaaaaacaaaaaaaaaaaaataaaaaaaaaaaaaaaaaaaaaaaaaacaaaaaaaataaaaaaat

SEQ ID NO: 44311 - DNA, 757 bp, Arabidopsis thaliana landsberg
tttttaaaaaacctaataaaagcatttctaaagatgattattttattatgtttgccaaaaccttaaatttgaggtagaaaggtgttaaaaaatcttattatttttgcattatagtcttcactgttgacagatcaataaaatttacataactataaaacatacattaaaaacatcttaaaagcaatattagttaataaaacatacattataatacaaaattaacaaatgaatataaacatataaactaagtgaaaatatacaaaaaaaaaagttgaaaatgtaatgaatttactgaaatgaatatactgaaatgaatatactgaaatgaattttttggtcacttggtgaaatattagtagagttttattttatacattctaacacatacaatgcttttagtgcatacagaaaaattgaaaaaaataatgagatcttaagaatgatctttctttattatttttttgacaacaaatctttttttatttgataagaatgtttgtattatttaatttatgttatattttacaaatttcaactcatttaaaattaatttgtcagccgataaaataatatgaggaaaatatcttaaacaatgttggttttcgatttttttgtgaattatcactttcttttactaaattggtttttgtaaaattttttaaattcccacctaaaaatattaaaatttggaatatggatggcaataatatttgggggtttgggaaaaaatacattggtttttccttagagccttttt

SEQ ID NO: 44312 - DNA, 728 bp, Arabidopsis thaliana landsberg
ctagggaccgccctcatctggcgccacccggtggcaggacgggcagatccgcaggtgctccggagcgggccaaggccagcagtgcctccacatcgaggtgctcctcgaccaggtcggcgagcaggtcgatccgccgtgaccgtgcggcggggaaggaggcctgcgacgtcacgccgagagcgtcggcgaggtacgccgcccgggtggcgtcgtcctcgagcgagccgtgcaccatcgtgcccgtcacctttccgctcgtcgtctcgccggtgacccgtccgtggtggatctcgtagccggccggctcgtgcagtcgcagcaccttctcggcggtgaacgccgtcgtgtgcccggtcagcccgagcccctcgaccaccgcgccgcgcgcgccctcgaccccgtccgggtcggcgatcgtgcggccgagcatctggcagccgccgcagatcccgagcaccgggcgcccgcgccgggcatgctcgacgaccgcgagatccaccccgcgcgagcgcatccaggccaggtcgctgatcgtcgcgcgggtcccgggaaggaccaccaggtcggcgtcgccgaggtcgcgcgggtcggagacgaacgtgacgtcgagctccggctcgaggccgagcgcgtcgaggtcggtgaagttgctgatccgcggcagccggacgaccgcgaccttgcgcgcccccgcgcccgcggcacgccggccgttcaggtccagtgcg

SEQ ID NO: 44313 - DNA, 337 bp, Arabidopsis thaliana landsberg
tgctaatcaaagctttgatggtgcatcccctgctcgtacgagtggacgaacatgtatcttcttgcaaggacacaatactaaggctcaaaggattcaattgaggtgattgtagctatactcacttatacacatgatatctactaatatctgactcataaacagaatcgaagctgcttgtaagttcacaacaatacagcacattggactgaccaatagtgaacatacgtgaccattaaaacatagcagcctagatatatatatctagacggattaactttgaatggccactttaacctggatgaagaaaacttacaccccgcgacaagaggcgatcctc

SEQ ID NO: 44314 - DNA, 758 bp, Arabidopsis thaliana landsberg
tttttaagactggtggccctttaatccggtttccaaaagctgttgatttcgtggacaagtagttgtgtatggtgtcaaccgcttcactttttccaagaccttttccagaatactcgttgaactttatgtgaacagaattcgccccccatcccatcaacttgtaaatgtatttctcaatgtggacttggttgtacatcgcccagaagaacataaggctcgtcatcgttgagcctgtgaaaccccaaatcgatccggtctcaaacatctttgtgtttgcttgtgccccacgaaactctctctgctttctgtttcttatgagacttgtcaagttttgctctgttttggctcacttcgcttctaaaccactcactctctatttatcttactcttgttttaatttttgagtgtctcaaaaatgccacgaaatttattgttattttgattaaaaaaaaaaaaatctttataatacagtgaaattagggtttgttcgtatacatatttttcgttcttgagtacgaatttgactaaaaagtattcaaagatttttgtttatctgctcatgaagatgctatgagcttgaagctaggtgtggggaccaaaatgattctgagttctgaccacaattatagagcaagcagcaaagtgtgcagtgtaaaaataaagtggtgatgtaaaagttttggtactgaaaattcatttattttatagacagagagatttgttccatcaatattaaacttgtaaattttatagacaga

SEQ ID NO: 44315 - DNA, 676 bp, Arabidopsis thaliana landsberg
atgtacctaattccgtggtcgataagaaaccaaatttcaaatcaaaaaaccgagaaactcaaaaatcaaagctaagccggatttaacattggttactcccggtacgaagcaatgtaccacattcatggagtcttacacgtgtcatccatacctctctgtcttcttcttcttctgttcttcattcctttttcctacttcgtcgattttccatttcaatttcttcttcagccggcgattaagcttcccaataagacaatctccgaccgccgcaacatcacgaaggattcttcaccgtgtgaactttacgcagtctttcctctttcgtagacgctaaagaagttgaaattgatctgatctcgtttaggtaaaaactttttctttcttcatctatagaatcaatcgttcacctaaattctgattcttatatatccaagatcttaattgcagcagatctaccttcgattcgattcttctccttcctgatatcgcttcattgttcaaattcggcacaaaatggtacggatcaccattttcttatctttcaattagcattaatcgcatttcatttttgtactaatgaaattagattagatcttcgatgagattttttttatttattgagcttgtttcactttgatttggttccatggagtatttaactctgcgatgctcattt

SEQ ID NO: 44316 - DNA, 551 bp, Arabidopsis thaliana landsberg
gatgtttgcaagagttggtccttgcacatgacgtactctccagttcggagagaaacacgttacttcttggcgttgatagttcttgtttacgcattcaaatctaaactacgaactaaggctaatcagtttaatttgtcggaaaaggtaattgaaaaatccaagcggtgaggctatccagactctaactacataatcaaaccaattttgaataaaaaacctttctcactctctgttttccttttctgctttcttctatgtattgttaaatatctacattagaacttcttagctagttgaggttctttaagcctttataaacaattataaagacgaccttcttaaagaatgcaacatgatcacttggatcggcatgcatgacaaggtggaaaggaccatatatgtgaacgaaagcaatgagcagggaaaagataaaggactagaatcgagaccaatacacaatccattacataaaagaagaagaatcaagacaagaaacccaatttttttatcgttggagaatgccagaattcaaactagcactattttaggat

SEQ ID NO: 44317 - DNA, 545 bp, Arabidopsis thaliana landsberg
cggcgataccgccgccgaagaaccgttgggcaacgagctttattgaacgaacgcttcaatgccgcttgaaatactgcacttcgcgctcgtgcttttccgccgcttcgcgcgtcttgaatgtcccgaggttgcggcgtttgccggtgtcgggattcttcttgcgcgaatagattcgatactcgcccgatttcagtttgcggatcatcgcgaccacctcctttccgtaccctcacatcgtgagggtcgcggaaaggtgatgggagtgcctggtttcgtcatgccgcaacgaacgctgccggcttgtttcagccggcgctggcgcccgcgtccgcactggcaccggcgaagtcgatcaccagggcgacgcgacgattgctggcaccgctgtcacgcgtgccgccaggttcgacctgacgattgcctgcctcgtcccaactcaccgagcgcacctggttggccgcccatgccgccggtggaaaccatataatcgcgcaccggttcggcccgcctctcgcccgaggcgccgggtgtaccctggaccaacc

SEQ ID NO: 44318 - DNA, 1409 bp, Arabidopsis thaliana landsberg
tattatttgataaaatattacattaggatgcttacaaaaacgtttcaaaacactatcaaatgccatttctcattttggtcgaccatcgatgataagattaaaaatcttctattatgaaatcttacaccacttcctaacatgaaaacgattaaaaatctcattctatattgtgaagaagttgataagttgatggtcccaagatgatttcatcttgcatcgtaaaatatcaaaaactcgctagacatatgtaatatgttgatgtagagaagtaatcaatgaatgtgtacaaggcatatcaagcccaagccaagatatgggaatacatatataaccccaaatccaatgattcaatccttttgggctaaatagagtcatcaaaatctaggtacattctgtaagcatctctatcagccgagtagtagcttttcactagacagtctacttggaacccaagctttttgtacagattcaccgcagaagttctcgtggggtcgacatgaagtgaaacccgttgcacctttctgcttctgcacttgtcgatagccgctctcaacaatgcttctccatgaccttgtcttctgcaattctccttcactacatgattccaaaacaacagaagaaagtaaacttgggatacattcttcctaatgtttttgctcttaacttgcctaataagaaaaattccatacgtgttcttgacttatgagctatctccattaatctttaagcatgcaaaaccaaagctagaacaagggctttgtctagtcagaatttctattgaaagctctcgaatttaccagaatcattggtccttgactatataataatctacaggttaatttatcaaatggttgaaagatttttcagtagaagtttggcagaataattccacttcttctctaacgaaattatattttctgaattttatcactgagtaatttcatcgaacagttggcggacgtttgtctatacctgcgagcttggtgattgaagcggaaagcgaagatggccaagaatacatggcatagcctactgtgtctccttcagcatccacgtatagcaaaccggcgtttttcttacgcagctctgcatcgaaagtttgagcgagagattcgtgtttagggaacgttttcttctccagcttcacgatatcttccacaactttggcccaactggtcgaccctctaatcagctctaccacaactcctttgtccattgtacaaaagattcgattttgtggaatctctcgttggtttcgcagccggtgagagcgagtgagccaaggaaattgtgatttgattttgatgaaggtgcgtagcgacggcggggacgacttttagaaactatttgaaattgtgatttgcccctcaattttacctttcgtgccaatttagccccggaaccggagg

SEQ ID NO: 44319 - DNA, 931 bp, Arabidopsis thaliana landsberg
tgatgaaaaacgactctttattttttgcttgacctaagttgtttaatggaaagatatactttattaccaaagtctattacgtcttgtatcactaaacagctcagatttgtctccaccaagacaaaagttatacacatctatccttttgcatacatattagtatattacttaattttttatttattttttgctttcatcattggataagatctagcccgcaatgatggatttcatacactagtttttccattattattttattgattttgataaaaacagtttttcattctccatttcatttttttggtggattacaatactactaaatgagttcttccgctttgtcagtttgcaacatacattatttgaaacaaatttactctttgtttctaattcgacagaacagctgctcataagacagtggtttgatgaaaattgatcaaaacaacaacgctcaaatcaatttgatcacattcacttaagaaaagaaaaacatcaaaagaagcaaagaacaaactaaatgagtaaatctcaactcaatagcaaaaagctcacaaatctacaaaagtctatatgccaaacaaaatccataacttgtttaaccgattaaacattatcatcacaaaacgatacgctaattgttgacctaaaaacatgaaatatataatttataacaagagactccatcagaacttgatatttcgaaaatttggatcggagaaaatttctcactgatctccggcgaaaagaagcctccgagagacggcgattcccgatttcttgttgtgacttctcggaacctgaatccgttcgtcgtgatccatccactgactctgcgttcgtgtcgatctgcgtatctatatctaaaaacccgatctacgggaagtcagaagcatcggagtgaagtgtgtgttactctctgcgatgttgt

SEQ ID NO: 44320 - DNA, 842 bp, Arabidopsis thaliana landsberg
ccgccagcgactcacagccgaatcggtgaccttgagcttctttgctaggtcaacagcacgtatgccctcgttttccatcatcgtattcaaccattgagcgaacctgtcctcttggttgacatccatcgtatgccctgcttacccccatgggtggcgttgtggccctttttaggccggtacaacatgtctaccggcttgcgggtgagcgggtcaaacggtccggacggtcttgcctggaccttgatggcaacgcgcgcgcacccttgcgcgaggcgtgcgtcgttactgccgcgtaaggaagtcccggaacttttctgcgtgtggcgcttgacaccctcgcaagaacggagcactcttgaatcacaagaacaaaacagggcagacagggacaagatcacagcccccactccagcggacatgagagccgccggatacccgctcagcaggggagtccgtaggggtaagcctgaaaaggatcaaggaccgtcgagcccaagttacttaataactacacagagtgagcacaggggcatccgactcctcgtgtccggcgaaagctggcttaagaccctccaggtcaacggatcacgcgcagtacacacggcgcccacgtcgatcggtgatcaatacggtcgttgggttggagcgccgtacgggccagtaataaccagtcggtcacatgggcattatgtccccgggtcggttcaactccggtcactggcacgcaagttcaacaactactagtcattagagaagatgatcagtcatgacctacgtcacctacgaagagaagtcccgttcagagcgcgccgccgaccgtaaggcccatgagcgttggatga

SEQ ID NO: 44321 - DNA, 940 bp, Arabidopsis thaliana landsberg
tggtccaacaattatatatgaaattatgagccaattgtttaaaataatggaccatgcataataataacgaaatttttgaagaaatgaaaacatgcccacattatgagtttaatagttctcatgaaaattatttacgtcaacttcgcatcaaaataacgttcatcgatctacagacgaaaacttcagttgtttgtttttgaaaatatcaggaagaatttgaatcatttagtgttatcccacatttaactagtatatcctttattcatgtcttctttttttgtctaattgttatgttatatataggagaatttatcttaaaaacctattaaaatcagttttttttgttgattaaaactcttactgtagccactaaataacgaacgaatagtaaagataataaaatttgatcccaaacttagatctgtaagaatatattatatctataagaataattatatatccattcgaattttgccactcaacaaccacattctttggttagttagtttttttttttggttcgttagttataggtagtaacgttatagtatataataattggtcataagctcgacaactattagtattgcccacatgggatactatgtccgaccgacatatatgcacatgctctataggttcaacaaagtttatccattctcacttttattcggttgtatacattagataactaaaaagaaaaagtaaccaacggcgagtcggcgacaaaagtaatgtttggattattttatggttaatgtgacacaaaagtaatgttctacatgtcatacgttcaaatctttcttttaacattatcttggatatattttgacatcccataatcaatgttctacgccttcattttattgatcttaaaaattatatgcttttaaaaaaaaggaaataatcccgagaaggggattattgtcccctttaattc

SEQ ID NO: 44322 - DNA, 1060 bp, Arabidopsis thaliana landsberg
taaatctatcttcaatttgctcaattgaagtgaaaagaaaaacaaaagagctcgattgtagtgtctctgctttcatgagttcatggcactcctaacaaactatattgtagctgcttcttggaaataaaagcatgtagtttggtgatcaagctgatttgtgtagctgctgcttctttttgaccacataaaagatttagtttgcataggatatagtgactaacttttgaacccctactcaaaaccattagatcaaaacagaagaatatttcttagaaaagttaatatcttttagcttgaatactctctttttttctttcttggattgcttgtgacaccataatctttttttctcttctatatcatcattcactgggttttagccatgtctcttctacgttttgtgtcgatggaaacttttaagtcacctcaaagtctacttctaatactcgcctggatatggatgaaaatctttgtccaagaagtacttgactactggatcacttcatctttcccctaagattaagtgtttttttaagaaagcaatatgaggaatccaaactatttgcagtgagaagggaacacgtcgtcatctacttgttcatcctttttgaaatagcacatttgacgcgcttggacattacttttgtcttacgtaatcataccaaaacttctcttatcagggcgcttgttatgagaatttgtttagaccttgatatcttatgtgtagtcatatttctcgttcatccaaatacggttacatatagattccgtgccgatgtcgagaagatggaggatacgaacgatggactgcttgttagcgattccccaaagtcaaccaaaattgatatcataacgattccctatgtaataatgtttagctgctagctggctaggggtttgttcatgtattttttttgttctactactaatgtaacttggtcgcttctaaaatttaactatttcatttatggttttgtttttagggccttggtttgagctatagcttgttctgatttattggccttataatctaaagaatagattaaaagagaaatctaag

SEQ ID NO: 44323 - DNA, 763 bp, Arabidopsis thaliana landsberg
tactgagactgactctcttggtcagaagactagtaatgagaaagaaaccagcaatgttgttgactctattttggttgtggaagatgactatacaaaaaccgaatcgcttacaccggtggtttcaggtctctcttcagccaaaactaagcagattgatgcaatgccattagagcaatctgataaacagttcaacacaacagggtttgtagcttcgtttaatattgtctttcgaaattttcggttttactctgattggtggtttttgttgtttaattttacagaatggttgatttcattgatagattgaagcaaagcagctcagtgaaagtgactgatgcacatgtaagtactctgattttctaactgaatcttactttcttggtttaagactagattcatatagccaataattccattgaaatttttctaggcaagagtcaatgaaacaaaggttacaacaagcaacggtaagaaattctacctacaaactttgtatcaaatactgttcagttactgacttatgttcttctaaaaggtcttgctctgtggcctggcctttcttcaacaactgttcattcaggagctcaagttctttcaaagtaagtcttaacctttaaactgtctgttaactttcgttcgtgctgctaggtttcttctcttatgcgggttttctttcaatgatcaggccatcttcaacaaagctttcacccgggatgggtcaagctgtttctccttccaatactgcttcactcttgaactggga

SEQ ID NO: 44324 - DNA, 631 bp, Arabidopsis thaliana landsberg
gtacaaggatatgtcaatttgtagtaatcatcgcaataaagctgatcaggactcatctccttgttgtaacacaatccccaagctaatggtccgcccgttgcaacccccgtacccgcctttaaaccgaataatcgtaacggttattagtgatttcaattcccggttaataataaataaaccggtttggatcgctctaaaattaaacttacatgaggttttgctcccaacgtggccaagaaacgcagcgacttccttcatcccttgaagtttctcaccagcagtaccgaaaccaagaggctggtactcggcagccgcagtaatgaatgatcggtaatcccaaaagccgacggcgtgagccactggactgttacgcttagagaatagattctcgaattgatatgtctcaaaaaaatcggagattgtatggttgcaacaatactcggaccatcctttgcattcccatcctttgtcgcataattttttacctttcacaatcttcaccagaggctttctcgttgaactcgaaggctcggaatattcagcgttgacaagggttccggtttgaaacacaaccaatgcaaccgtgagaagcaatagggagaatagcggtttcggaaacatgttattgaaa

SEQ ID NO: 44325 - DNA, 123 bp, Arabidopsis thaliana landsberg
gaccccccaaaaaacaatccctatttctacacctgtttttttacacgtacaatgaccgagcacctggagggatttatatcaatacccgagcccgtctctcgaggttgactggtcattcttgga

SEQ ID NO: 44326 - DNA, 606 bp, Arabidopsis thaliana landsberg
acaccacatggggccctgtgcgatgatctaaattatccatagaatacctaaagccaacgacggacttctaaagaagtgtatggaccttaacctatctttagaaaaatatgtcaacagaactgataacttttctgtaaagtgaaatgatgcttcaaaaaacaaagaacattatttgcatattatacaaaagcatggattcagtttcttaggccgatagatatcatataagtggatattacacacttcttctttgagtatagaaacgaaaactacatttttttccttttcaaaattagcataaacttcagattttttatggttttaattattttccatggcgtccgttcgacccattatttagctcagatgggatttggcccaacctatcggtgatttttcaggaattgatctatacttagccgagacattgctttcgaccaaatttatttatgcaagttaagacaattgaatgagataaacaaataatggtagcattagtatactattatacactaatggaaaatgatttttcgatgatcgaaccaaacataagacaaaacaacacttaaacccacgaagaaacaaaaacaaccgacccataaaaga

SEQ ID NO: 44327 - DNA, 759 bp, Arabidopsis thaliana landsberg
gaaccattaaaaaaaatattaaatgttaaagaaaacaaagagatgtcggcaaagcttagtagaagcccaacaatttaaaatataatcgctacctcgctagaagcaaggctcgttagaaaatatgggtacttattgggccataactttgggccggaattcaacagaatttttaatatgtattgtgcaatcattttctagagatccgagtactttcattctttcaagttaccagcaatgtcacaaattggaggaaaaatacaaatgagtaaaaaatccaaatattgagggagatatttttgaggctgggaaaatggataacgaaggaacgtttgtgaagccatttacctatcaatttttggaccgataaggtatttgcatatcaatgggcccattattgacattgacttcttagctacaatatagtttcaacttgcttatttcactttcctcgaatatgacttgtattttccgcttattggccaatactcaaagaccttaatatattgctattcttttatattatcacctgatagaaaaataaatcttaaattcatattaaattaacttatgtatttaagcttataaaataaattgctcattaatacaactctttatttaagatcaactattttatttttgttaatttataaccaaaaaggtgcatctagaagctggagaaaaaatacttaggatagaaaagagagcccatgtttctaataaattctactactaccttatccaaatccatctgtgtgatac

SEQ ID NO: 44328 - DNA, 586 bp, Arabidopsis thaliana landsberg
cgggaaccctcttggcgccaccgccggcagggtcacgctggaacacctcggcgccgccgagatcgccgcgatggacgaacgggcggcgcgcctggcgcgggcgctggaggccaaggccggagccgcgggcgtgccgctgaaggtgagcggcgacggctcgatcctcggcagctacgtggtcgcccccgacggcacccccgaccgcgagctcggtgcgcgcttccacctcgctgccgtcaacaacggcgtctacttcggccaggacggcgagtacgcgatgtcgacgccgctcgacgacgagacgctggagctggcgatcggcagtctcgaagtggcgatcgacgaacttgccgaggacgtggccgcggccccgaccggcggtgtcgtgtgagccgcggccgccgcttcaaggtcacttgcgatgtcggcggcaccttcaccgacgtggtcgtcaccgacgacgcgggcagcaccgcgatcggcaagtcgctgaccaccccggacggcctcgtaagcggcctcgccgcggcgatcgaagcggaggcgggagaccttggccttgacacccgcgcccggctcacgggct

SEQ ID NO: 44329 - DNA, 713 bp, Arabidopsis thaliana landsberg
cagtctacatgcgtagatccttgagtatatattaatactatttcacatgtacaaaccatttacaagttggcatttattttgcatgacttttttgtttcgataatattttcgctttttaactacttcatcaatcatgtcattcaggctttgactaccatagtagaaaatttgtcgtttccacttttaaaaattgcttttagttacctaatgcaaattttttgtcaactatataaaaggctaaaacgcaatcaagaatactgatttcacaaaaaggcagattttagatgcttctaactaggcatagacattagacatcacacggtgtttgttacctctacattgtagtacttgaaaactcttctttaaaagcgacgggcaccggtaaaatatttggattttttgtgtgtgtgattaattctacataaattcacagaatttgaacatttttttactcaaaaatagtagtatgaaataagcattaatggaggcaactatgggaaactcacacgaaagtcctcgacccatgcatatgttagatgaacaaacaccctttacctaattggctaattcacaagtcaataaaacccatttcgccacgtgtcatatgttcccaccgatatttttaatttctcgttaccccaagaaaaagaagaagaaaaacgtatttggtaatttctactttaagaaactttagatatgataggtggactctt

SEQ ID NO: 44330 - DNA, 601 bp, Arabidopsis thaliana landsberg
tccaatacatttttgtgccacaggcccaccgagcctaatatatctattatctaagatactaatgggctctagtctggtgggtaagttttgggccaacctgtaatggaaaaaaacacagttgtgttcattaaacggatattaattacaagagactgagaacttatgcaacctaaaagatatacatgtcaatttaaatgccaataacaaaaatctgaaacaagaacttatagaatgatctcaaacttaacctaatggcatatcatatttatttaatgtctctatatcaatggaaacaaaatgctattgttgtgtttctacatagaaacgcaatgttcacacttctacacaaatgacttgattgatttaaaagtgattgatagtaaatgcagtatatcaatgccattatcatgtaaacaactctatatatcttattcccataaaaatatagtacgatattctaatgatacacttgaagaaggtctaaactttgtgtgagatttcttactcaaaaaaaaaaatcatttaacttgagattaatataaacgagtcttggtcttttggtcaaaggcgatgtatttgattttttaaataatagtattta

SEQ ID NO: 44331 - DNA, 188 bp, Arabidopsis thaliana landsberg
ccaacatagaacttgtatccatttgatatcgtaaacttttaacccatcaacatcacaaacataagggagggatcaaacctcatgaccaagcccatatacaaggcaaaacgttaatcaaactcgcaactcgttactaactcttttgaagtgagtgtgtgtgggtgagccagtatagatcttagaggtgc

SEQ ID NO: 44332 - DNA, 1001 bp, Arabidopsis thaliana landsberg
tgaaaaaaggatccacatacaacttcgatttccttcccttcaggcaaatggcacaacgtgaaaaagctgcaacaatgaaacataaaattcaacgatcacaaagcaaagatggttcaatactaatagacaagtagattccgcagaatgaaaaaacagtcaaattacaactcttccatcaatcaaacgagactgtaattagttatcagaaacagattcaaacaacatacaagacttaaccaatcaactgactttcaagtaagaaatgttacctatacaaagcaattggctgaccaagaagtggtatatactgctttggcatactcatctattcacattacatagaaaaacaaacaactcaacagaacaaacaattaaaactcgagcataaagtttgaaactttcatcccaaaaacacttactttcattctcttgccttgacctccagctaaaagaatcacagatacactcttctccttcacaacaacattgctctgaaaaacataagagataaaaaaaaagcttcaaaatttgagttgattcaaaactttaaacttacattcacagcattgctctgaaaaacaaaaaaaacttaaactagagataaagcttcaaaactaagtgattccaagttttgaactaacacttacattatcaaatccagtcgatgaagaacacttgattgacaataataaagcatctcttttgtagcttctattaacccttttcgaaaaatccagtttttgaactgaaaaatcaacattcagaaacaatcaaaaatctcctcaccgaaccagagattcattggtttgaacgtatataaagagtatgagaaattgccttgagaacgatagctaaaccccagataagagttcaatttgactttaagcttcggacacagaaatgtcggagaagtaatgaagccaagattcgtctgaagcatcgccatgttttatctcgcctgagagaaaaaaaaagctccgggttctcggagaaccaatata

SEQ ID NO: 44333 - DNA, 1199 bp, Arabidopsis thaliana landsberg
gtcaaaatactcaaccaagagtaatcatgaaaattgtcaaaagccagcttttggaaatagcaataattttggaatagacaatttaattacggttgttcttttctttcagaatggatcaataattagtttaaagcaagtggagtttacttgttgtaatttaacgttgaaagcaatatcctacaagctcctcgtgaaaaaatagcaaacatatttgatctttctaataacgaaataattagtcaaagaagattcttgcttagtaagatcatgcatgcgattattaactttccccccatggaacatcgcatacatgcacatttataatattatatagttatatactcatgaaatagatcgaatggtcatgtgaatggttggttcaatgaaatgagctttttccagagataataatacaaagaaagattgaatgtgaagcatatggttcgtggagacaaagaacttaatacccaccaaattattaaattgaaatctaatactactgtatatatgccatcgtgcgcaacaaactatttctatgtgccaattttattcccccatcttattaatgccttcttactctacctatggcgtcaccaaaatatacataccatgtgcatatataaatatatacatacatacattttgtgaagcaattcccttattaatagactcctaccaaaaatgaaaagtcaacgaagacatgagatttgttttgtcttcggttcacataaattagtcatttaactcttataacaatccccaaaaaacacattaaatcatgtatgtgatgcatgtccctagtatatatatatatatatatatatatatatatatatgtatatataaggaccatgaaagaatgaatatttatcatcagtacactgaatgaccaaacgaacataagtttggtccacactttttaatcatgtatatgcctaaaacgtcaaaacactcgtaccattatttggaacttactagcttgtttaggattagcaaggacgaattggaataaattaacgtgacctcaaggatccgtctctttagattttaagatcgtaaatttcctagaagttcttttctatttcctaagtggaaatattatttatattccaaaaaagagttgactatgaagaatgcaaatacctatgcaggttttcgtcacaaatcacaatgagactcaaaaaacattgaaaactgag

SEQ ID NO: 44334 - DNA, 674 bp, Arabidopsis thaliana landsberg
cttctttagcttccatagagtgtattaagattccttggcacatttaaagttgctcagtgtccactgttagaccatctggaactatatagaagccttgtcattaacactacagttactatatggcttaaacctttcttaaacaggttgggagagcagctggcgccataaggaaacctttgttaatatggtatgataggaaaatgtttgcacatctacaaggactctctaacttaatttgtcatccttctttcttacagggaatcattttgttcgaccttacatatgactatatgagtgcttccatatcatctgcatttttcgtgataccatgctcttgttcttattagtattcttctagttttggtcttctctcatctttttttggcacagttgatttataggtctataattaatgcttaaatttgagaagttctagatattagtttttgaagttcgcatttgattgctgaaacggttgctttgtttctttcgtggcttgtgttttgtctaagatgaccagttgtatcttatgtgaggatcttaatcactattgtctcattttacagctgaggaacttggtatgggcaacatcaaagcacgatgtgtatttcatgaacaactactctctcatgcattggtcatctttgctgcaaaggggcaaagaagtacttaat

SEQ ID NO: 44335 - DNA, 1091 bp, Arabidopsis thaliana landsberg
ttaacctttttgttatttcataaatagaatttttgaccttttttgttagttgatccatatccaactatagtaacatcattaatgtatttgttagtgatctcaaataggagaactactttggagatttacaaaatttgttcatgaactctcctctgcgtgtgtataggaagctattgggacaaggaattgcttcttgttctctagaagagcttcaagaaatcgatagtcaactccaaagaagtctgggaaaggtccgagaaagaaaggtacatatacttcatcactatctaattggtatatgatgatgatgtaatgtaactatacaacacatattgacttgaataatctccatctcagtcatctagttatagtcctcatttagatatgaacttgaacacagatctttgcaaccttttagcgacatatctcaaccaatatactaacattgatcaagagtcaagtcacatgtgtgttttgtatattagtgttgttatcatggaaatgaaaaaaaagttggacaaaatgttttataggctcaattgttcaaggagcagttggagaaactaaaagcaaaggtttgatacattatgttataatatataagatatgtatatcatacatgcaattttttaactagctttttatatgaaattggtgaaagagtgtcggttgtgtttcaagagaaacaattgttagaagagaacgtcaagttacatcaaaaggtgacccatctctctttacaattcacatatttagaattgtatataccaatactaattcaactgaaatttacatatatatcatatatgttatgaattgctaatgctttagtatgctgaaaatattacccaaagaactctgattgtttttcgtcggttgattttttacatttttagattatttttttccggcaaaatcattgttagagattatacggtgctattcggtaaaatttggttctcgttccaagtttttttttttttgataaagtatttgattagttttaaaggatttaaaaatttaaagtttgagtttgactttttcagttgggtttggtttacaaactttttggatattattttttaacattt

SEQ ID NO: 44336 - DNA, 707 bp, Arabidopsis thaliana landsberg
gataagtataatatcaagaagattataattataattctcatagttataaaatatacccacatcatttacaaataatgacatatagaacataattttttttttacttatttgtagttttactattgcgttatgtttacaaataaatgtcaaacataaacaatctaatagaaatacactcttaatttaattagagtaagagatcaacaaaaatatagaattttctttatatcgaagtgctacgaccttatatatatagaaaaaaagcataggtgaatctctaaattgagattgtgctgtagtaaacatattaagtttttagtttttttaagaaatgaatctttttgttgattaattcaaactagtagtcattaagattccggagattccaatttagaaaagtcaaagattcaaagaacaagtccaggtccacatgttgaatccgattcatcatccactcatccttcatatcttcctccaccgtctccgcccaaaaaaacaataacaataaaaaatcctaaaaaacatatttgattttgaaaaaactttatcatatattatattaattaaatagttatccgatgactcatcctatggtcagggccttgctgtctctgacgtccttaattatcattatttttaaatttgtctctctcagaaaattacgccacaatcttcctctttcccttttccgaaaacagctaatattt

SEQ ID NO: 44337 - DNA, 867 bp, Arabidopsis thaliana landsberg
attcctaatttcgtaaggattcctgaagcggatgtgattcatctcgatgaactcgtaaggacggccatggagtcgtttgaggaaagtgcggagagaacagagattgctgaggaagaagaagaagaagaggaagagatagagacgaagctttctgatttgataacacttgatcataatgaggaagctcctgcctctcctccgagagttgttgtcgttgatattccagacttaattagcttttaactatgattatattctgtattaatttcgattgttgttattgttcatatggtacacattcaaattaatttcgcgcttgggacaaagctatacttcctttagttaatgattattcagacatcaattctagtatgtttttcaactatatataagtacaaataaaggtaatctgaaaaataaaaacatttaattaaaagaatatctgttacaagtcagtaaaatgtttataaaaagataacaaaaggaagaaaaaaaaaaagtacaaaaaaataaatttccctgcagattttttctcagacaccttcttcttcctcagacacacagatagacaaacaaacaaaaaacaaagcaaaagtgtgataaaaaaaagtggtaaagaaaacagagaactctgcttccaaaccctacaacgaagatggtttacctgaaaacagaatcgaactcagattgcagacagaatttttgaaaaggtcacagatttcagatttgttgtatatacatacaccatcattgagagattccatcccggaagagaaacactcacttggtctgttttactaatcaagcaactaatcatctgattgtgacgaacttgttagttccatgtcttgcccaatggctcttaag

SEQ ID NO: 44338 - DNA, 698 bp, Arabidopsis thaliana landsberg
agagtagtggaagattcggattctaaatctttgtttgttggagtttttgttttcaaattaagttttgcgaatttgtttagatgtatgtgagctcaaatgttataggattttcgtattggtggtattgattgtagctagaacaaggcagattgatttagaggaactgatttcattgttaagagtaagtactggctcagtgactctaggatttttggtaatgatgcagtacaagttttcgatatggtacactcgtcgcacaccaggggttcggaaccagtcttatgaagataacatcaagaagatggtagaattcagcacggtaagtctaaatatactactggaagttcattgttgaagctgtttgcgatactatcttgttcgtttctgagttatggcttttataaactaggttgaaggattttgggcctgctactgtcaccttgctcgttcttctctcttgcctagtccaacagatcttcatttctttaaggatgggattcgtccattgtgggaggtacgtattcccctgtgttgatttttcttattgtgttttttatctggatcatcgatatagagggaaccttttatacaacaaaggtttctcaagagttgtatcttcttcaataaaccaactaaactagctaaattcatcacctttaggatggtgccaactgcaatggaggaaagtggatcatacg

SEQ ID NO: 44339 - DNA, 504 bp, Arabidopsis thaliana landsberg
gccccaggtggtcggtcgcagcagcaggtcggcgtaagcgcaggtctcggtgccgccaaaggcttcctgcactactacgaactcggcgcgctgcagcgcgcggcgcacggtggcctggtcgggcagcgactgcgccgggttggtgcaggtgatccagagcgcgcggatctcgccgtcggcggcggcctggaacatctcgaccgccgtcttgccgggccgcgcgggcaccgacggcacgccccacagcgcggccacctccgcgcggtgcgcgggatcggccaggtcgcggtgcgccgacagcaggttggccatgccgcccactcgcggccgcccatggcgttgggctggcccgtcagcgagaacggacccgcgcccgggcggccgatctggcccgtggcgagatggcaggttgatcaacgcggcgttcttgtcggtgccgctcgccgactggttgaggccctggcaggacaggctcagcgtggccggcgcggtggcgaaccagcg

SEQ ID NO: 44340 - DNA, 1647 bp, Arabidopsis thaliana landsberg
  unsure (1)..(1647): unsure at all n locations
ctcttttattagcatcaccaaagaatttgccttttattttgcataagaatcttgagttcaatgttgggactttctatactgactggtcggaagatctatataaacatgtgataggctcaatatgaaatggttcaaatatggcgaagcagcctctcaggaactagctccagtattggttaaagtgggatggtgtagacttttggttaacatatgatgtatacgtttcgtttgacttagcaatcaagagcctagacttgccttgtacacttttgcttaacaatgatgtatatgtttcgttttgactaagaaattaagagcctagacttgactagttaggttgggattttctcggatcggtctgaggactatactataatcgaaattttggtctactatgcagattttgatttaaaccaagattttctccaaaaggtactccgaatccaaatgttgctttagatgagctggtgaagatcaaagagctggtggacaaaggccaactcgtgaccattcccatctcctacaagctagagacatccgatgtgagattgcttaaacaagagtttggtactaacttcaaggttctagctgatgaaagtgagcaaccccgagactaaaattgggagactctaaatctttccttttacgtagagtccatcaaatgcatatgcctatgacgttaacatgatcttagacgtgaggaacttgcttcaagagttcagtgcaggctgtggaaccatgttaaaattgttcgcatgttcggtaagagaaattgattacaagagttcacaaatattgaaaccaaacctcgattattgttttactaattgcttgtctttaattggttaaacagaccagtgagaggtggcattttaagatacactctcaattgcaacgaattcaaataaatcagatcggatcgccgttagattccgacggaggagagagttattggcgatgttgaggtcacggcgttcacgttcccgtcacggtgcacaagcttgcgccgttatgtctgccgttcttcttctcgcttccgtctcacttctctacactcgtctctcactcttctcatctcactcgccgaatcacctccgctctggctccagcgaagacacagttttgttccctgattctgtcctcgtctcagattccgacgttgaaaccaccggcggaggaggaagaggatccactacctcaaccgaagacagaatcgacgagcacgacgatgcgatcgaagacgacggcgtttcgaatgaggaagatgagaatcaagacgcagagcaagagcaagaagtggatcttaatcggaannnnnnnnnnnnnnnnnnnnnnnnnnnnnnnnnnnnnnttaatggagttataagaagagctttcaataaacgatctatagatgaatgggattacgattacacaggttttagtatagattctgatagttcaggagataagagtagtagagctgcgtttggatctgatgatgttcctttagatgaatctattcgtaggaagattgttgaggttacgagtgtggaagatgccttgttgttaaaatctggtaaaaaggtctcgcctttgagacaaggttggggagattggtttgataagaaaggtgatttcttgaggagagatagaatgtttaagtcg

SEQ ID NO: 44341 - DNA, 737 bp, Arabidopsis thaliana landsberg
taataaaacacgtggtgtaagaatcagttccgttgtcactaattaatgacttttagctttgaactttaaaagtctaaattctgattgacccatttgatttttcgattgaatacaaaacaaaattaaataacaaaaatccgtttcaatgcaagcaccgacaaatatccaagtaactcatacctagacacaactttaaaaaaaaaaaaacagatgaaatcataaaaatacgagaaaggagtggcgagaaatgcagatcgtaatttggtgtcgtatgtgtagggacgtaaacaacgatcagtacgaccagattcgtgtttggctttttgtcgtttaactgtaagaagtgatcacacaattcacagacaacgacgttagctctctttgtttctttactactgttcaaacaaatcttattgtatatattctttgaattgaatcatataacattaaagtccaatataattaggtggacgaacaacatttgagccgaactaaaaaaatggaaaatcgccatacctaaaccaaaattaatgaatactacaaaactgaatttgattaatgtcaaaatctaaagtggtcaaaatatgtactaatctaataattctaactactactagtagattatagcctccctatataatgagatctttccgaattttcgttatatggaacaaaaaaaccttgtcgagcctcgtgacaattaattacactatatacccaccgatattaataaatat

SEQ ID NO: 44342 - DNA, 567 bp, Arabidopsis thaliana landsberg
atttgcaatattgtcttaaagtgtttttcataattttggctgtttaaacaaaaacaaaagtacatagaacataacaacgataatcttgtgtccgacaatggctttgttggagacctagtgtttgtttggaacctttggacgatgcttttgtgagaaacagatccattctcatacagaatcgtcctcgccggacactcttctctggtctcgtggcacacttgccaatttttctgtacgtctttccccattcgtactattccaaggagatattcctgcataacttattctagttaacaaatgcctgaattatatagttttgcaggagttagtgatcgaaggtcggttgatccgctcggataatacaatcaatcacatctccgttgaggctcttttcaaacaaaaagaaagtcaaaacaattaaactaattttgcataattgcatttgtatatgtaacaaagaaaaatgagaaataaataaaaccaagagtttattacttacgtaaatagtagaaactgggataattgaaaccccaagctgaatgaagaactgactaatgataaggacat

SEQ ID NO: 44343 - DNA, 473 bp, Arabidopsis thaliana landsberg
  unsure (1)..(473): unsure at all n locations
aaaaaaaaanaaaaaaagagagaatgtaaaaaaaaaaanaccaaaccccacaacaaaaaaaaaaaaaaaaaataaaaaaaaaaaaaaaaaaaaaaaaaaaaaaaaaaaaaaaaaaaataaaaaaaaaaaaaaaaaaaaaaaaaaaataaaaaaaaaaaaaaaaaaaaaaaaaaaacaaaacaaaaacaaaaaaaaaaaaaaaaaaaaaaaaaaaaaaaaaaaaaaaaaaaaaagaaaacaatagaaagaaaaaaaaaaagaaaaaaaaaaaaaaaaaagaactataaaaacaaaataaaaaaatagaacaacaaaagaaaaaaaaaaaaacaaagaacatatacctaaagaaaaagaaaaaaaaaaagaaaagtaaaaaaaaaaaaaaaatagaaaaaaaaaaaaaagcaaaaaacaaagaaaaaataaataaaaacaaaaaaaaaaaaaataaaagaaaacagcaaaaaaaa

SEQ ID NO: 44344 - DNA, 638 bp, Arabidopsis thaliana landsberg
cctaatgggggagattttaagaattgaggaaggaggaaggaagaaggaggagcctgttgtttgaatatttgaaaacagatcggcggactcttgtcaaaattgtaacgttactcttctcctcgattataatattaataatctaattaatactataaagtataggctctatatgggccaatttacttaactttcaggcccatcaacattaaacaataatcttttttttccttagatacttactctcaggccaattgacttaactttcaggcccatcaatattgtaacgttactcttgtccattaatatttaaattattattatataaagtataggctccatttgagccaattgatatttgagccaattgacttaactttcaggcccatcaacattgtaacgttactcttgtccattaatatttaaattattattatataaagtataggctccatttgagccaattgacttaaaactcggtccattaacactagtgatattccatattttgcgtgactttttgttggctaaataaattttgggaaagaaaaaaaagtaagatattaatcaaattgcgttctattttatggttaaaatctttttataaaattatttttcttttattttggataaaatgaaag

SEQ ID NO: 44345 - DNA, 825 bp, Arabidopsis thaliana landsberg
gatttttatagtacacacagcacgtacagttttgtcttttttttttttactctgaaatattttaataataaatacgatttgctgcttattggacaatgaaataggcgtttgcttttttcttcttcttcattttagtgggagctatctcagtcgttcaaatatgacaatattttcgttggctgaagaatatccaacggctacaatctcttgtatgtttggtccagtgtatcacagtgcacatgagctaatgcagttaagcccgacgtggtactggtacatctaatttatttctaaccgccaaccggtttatattataagctctttgctattcagtaacccaagttgataaagctcatgtcttttttttgtcgaataataagcttactaaacatgatttgttatgtggagatgaaatatttggttttggataacagataggaaatgaatatagccaaaaaaattaattgggggcatttcatgaaatttatagcaaattagtattacggattttattgatattttcatattttgacatatatgccagtgccacctctatctcatatttggattggatctgcccaattgagtatctatatgggcttgagattactggcccagccttacaatacccataaattgaatatcaacgctgcaccgctgaaagatgacttgtaaacttttaagaaccccactaagataagaaccacgatccctaaatcaactgtcaaatgccaaccaattttaaattatataaagaattatttttaagatttgaatgtgattttgcaattctattaggattacttttcttaatttttggtttag

SEQ ID NO: 44346 - DNA, 528 bp, Arabidopsis thaliana landsberg
ggcaagagcataccttgcagagtctcgcgggctgacactttttgtttcaggaaatgtgacccgagcagagttcgcaacaagtctcacgatccgcgaaccacgacgcatcgcaagcagttttcgaaagtccgcactcaaggcagtcgccgggctcatgaagaccacccaactcctggtagcggcgccaatggctcgtcatgccggctacttcgggatccggctggccagatcccgcacgacgtcctgaagctcggcgaccgcggacttcagggattcgatctcctcagcctgagcccggaggaccgcctgatgggcaaccgccgagaacttgcggtcgaccttcgcctcgatcccgtcgaggtcgtcacgcaggttggtgctgtgcgtgttggctacctgctcgtgggtcgcttgcactggtgccacgatctgctcacggagccaggggagggctacacgccatacgatcctcgcgagagtaaggattgcgagcaacgcgccacagacggcacctgcgccgacgagtgc

SEQ ID NO: 44347 - DNA, 652 bp, Arabidopsis thaliana landsberg
gtcagggttattttttggattccaactgtagtgacaatccatacattccatggctaccaaacttatcttgattcacattatgctaagaagctaaaacatacaaaaagaaccgaaattgtcgtgagtttttttaatacgatagggtattaatgtattcttaacaacgttatggtcttgagaaataaaatatgcaaatctcgggtagggttatttggattagtgaaatttgggattttcttaatttaaggctaaaagctatgaaatttagagatttatgacagttaataaatacgaataacggtgttcgttgcaattttatgtggtacttatttgtttaagaaaaaaaagtttagtactaaattgttcgattttgaaagttaaatatatttttgaaagttataaaggaagaaaggatttcttagcaaatttccgttatttaagttggagagaaaaggtttatttcaaaatatcgcaaaaccctaacaaaaagttttcattcttcctccactctctcaattccaaaacactgcgccgggaagacatggacaccgagatggagacagaacaaatataccaggtcgatgtcggaaatctcttggctttcaatcctaatcaccgcttctcatctgctccttcttcaaggttcgtcctt

SEQ ID NO: 44348 - DNA, 641 bp, Arabidopsis thaliana landsberg
tttctctagttattacaaaggctcttcttttcttttctatttgatcatgaattctatgttcagtgccttcgactctctcttcgcagaggtcatgggaaagaaccttatggcttcttcgtttactgctactaccgcaacaaccaaacctgccgccgcgccgcaaacacaaacgcaggagaaggcaaacgcaagtagcaagaagataggtttggtgcagaagactccgaggtttgctttggagcttgatggtcttcactgcttcgaaacaatagtccgttcttgatttgattcgttcttggttcttggcttcaagatcagaaacttagaatctgagtttcttatatttttatttattttattaattcattataacatgtgattgtgaatacgttttggaattttgatattgatcgatttgatctaattatatatttcttggattctccgattttgtgttcatatttctccggttctggctagatgcaagggtttcggtccggttaacaaaatttagatttggttttaatttagatttaacttattttgaagttatatcaaatcagacaagtaccttctgaaaatcgaatttcaaagttaaacaaccccttttattaaagttagataccttaattttttaaaaa

SEQ ID NO: 44349 - DNA, 742 bp, Arabidopsis thaliana landsberg
tgatttgctaagtcaattttatcatttgcttgtacatcagtgcatgaaaggagaaaagggaagaacagtaaacagatatgtattatctacatgaatggacatatcttagacctcgtgaagtaccttaaaaacttataggagaaagagggttactacttactacctcatctagacctcgattacgcgatcaaagcaatactggatatcagatagatgtggtcttatctatcaaaattgtttagtccgttttcgagtttgggacaaatctccttagaaaccagctagaatggcttaatctatatataagataataataagtttaacaccaagacttgccgaagttaagttacatgtaatgctacgagattctctgatacatatgttataaagtgaagttaaaacacttttctcaagaaacacacttacataaaaattagtcacgaaggtaaacaagtgctaaaaaaaatgaaggggtcttctccaacaagaaagaccgttttaacactactacttggggttcgtaaattaatacaaaatcctggaataaaaccatttatcatcttatatccaaccaaacaaattaatataaacactgttaaaaaataagaaatgaaatttaaattaatgatagaaataatcgaattaggtgttttgatttttttttctgtgactacaatatatttaaaaccccaaaattttacaaaaatcgttttagtaaatcggtttaaatctgaaacaaatg

SEQ ID NO: 44350 - DNA, 892 bp, Arabidopsis thaliana landsberg
  unsure (1)..(892): unsure at all n locations
atatcccatcgtatttttttccctggtttaattttacgtgaaagggaactgttctggtccaagaatattttttaatttattcttaaatttgttgacgtttcacaaaaaaaaaaaaaattgttgacaagttttttttatttttttgcgatgtatggttttttacagtcgtacgtatgctaagattcgatattctgtgtattgtcatctgttttgcgttcttgtttgtcaatcataataaattatttttggaaaatttgcaaatttcgaatcaaactaaggtgatagcgctagttatattagtccttttatgaaactgaagaaaatcacaatcactatatttttttaattatataaagtttcatagtttcccaaaaaccaagtttatggtttacaatggaaataaaagattgaaaggtgttagctccataatgcttcgacagaaaaaggaagataggaaagtgatgagaaacacacttagaccaacgacgtagaataagcttctttacatgtaatcacactctcatttctcacttcatcacaactctttccagcgcatttcttctactttcttttcactcccccaaaaatcacatcaacttttaatattttcctctctcttttatttatatagaaaatgaaatagcaataagttggctaatattccaaaaccctcatgtcaatttatacacgttgaatgtctccaactgatattgaccttctattattgccactaattttaagctttgcattcaacatgtatatatgtttggtactcgaaaaatcatgaaatgtaatattagttccagctatttttctgttgtaaaatgttttttttttaagattgacggttgcaatcttgatttaatttncaatatataagaaattaccaaat

SEQ ID NO: 44351 - DNA, 322 bp, Arabidopsis thaliana landsberg
ctaaaagataagctgttttacaaacatatgaaacaaaatcataagagatattgaaattatggtccaacctatacacacttgcaaaatataccaacccatccggattactacaaatacaagttacttcacaccctacagagaccaaactaaaagctctttggtctctcagaaacacaagctttcataatttaaaaacattatataaaaaccaaacaacgaacaaattaaagactcttaaattatgagctaattaaaggtcttagattcatgcttctgtatgtacacttgaattttcattgatcatgttgttttcctggagtct

SEQ ID NO: 44352 - DNA, 510 bp, Arabidopsis thaliana landsberg
aagaatatttgtttcgaattatgtgctatgcttttcttcttctctcgtattctagttttaaacctgcaataatacggtagtttcatgatcttgttgatgttttagtagctttttctaatatctcttttgcatgttgttatctgaaaatggattggagttaactagggtttatggtataaatcgtattatgaagtctttacgattctttatgttttctggatttcatttttaaacccagaggagatgaaaaaaatggactatgggtttaataatcctgcagcgcactacacggtacaggagaaaagaaacatctacgaagacaatgtgtcttgttgttgttggacctgggacacaactcaaaaggagatggagagagccaatcaagaatttgaatggcaaattatcaaaactccaacaaagaactttaatactatactcttttaatttagtagaattcaaaacataatattctgtttcctacaaaagctagttaagccatctgacaacgat

SEQ ID NO: 44353 - DNA, 597 bp, Arabidopsis thaliana landsberg
ggaaacaccatgtcataatgtgagggcccgcagtggtgatctgagtcatcagacgagggagcttgaagagtctggccaggaactcgggaaaggccgaacatctgaagtaaacaagctgggccattgtgagtcttaagggaaaagcctatacgaaaacccaagaaggaatcgaatttgaacactgcaacacatattacgcagtcaaaacagacacatttataaggaacaattacatttattagccattttgatatttagtttgtagaaatttagagtccttgggcattagaaagagacaaaatatttgggaattcaaatcaataattcagtgttttatatttctagtacgctaaagctaaagataatcacaaacattttggtacttttgttcttcatagtcccatattttattacaaattctaggggttggatccaagatccacatgcttgccaaacataacacatattgatatacaataattattttgaatcatgcaggtgatgcctcccaatggtgaatagaatcttggcggaattgcattgtgttttgtggtgtttgaaaagctttattacctttatatcgactcatgtgagatc

SEQ ID NO: 44354 - DNA, 673 bp, Arabidopsis thaliana landsberg
aatcaaggtttgatcaagtaactaatcaagatttttattttttgaaattatctctcattcaggaggggccagggatgaacaagagcgagaagaagcgtatctgcaggctaatggactgcagaaaactatcagcagaagcctgcgctcacgcggttcaaaacgagcggttaccaatgcgtgtggtagtgcaagtgctcttctttgaacaagtaagagccaacaacaacggttcatcatcaaccggaaacagcacaccagaggttatacctgcttcaagatcaacaaacactactgatcaagaagacacagagtgttgggacacagaagatatcaaagctttgagaggtgaattagcaaatctaagactcgcaaagaatcaacaagagagccataacaaagggaaactgatgaaaggaggaggattaggagtttctagagtgttctcgaagctttggtctggtaaagagagaagtggagatatgataagtagctcagggactttaagtcctggttctgttaatgatgattccaagtcttttttttttcacaagcaagaatcattatccagttaacgtaagaaagcaagaaaaaagatggaatttatgtttggctaaaaatgtttcattcctaattacttaaccttaattctttttttttaagaattcccaaattt

SEQ ID NO: 44355 - DNA, 542 bp, Arabidopsis thaliana landsberg
aattcggcaaagttttaatgactattgctattatttattcgctaaatgtggtattgttctaataatgggtttatcaaactggccgctatcgttgtacttaattgtttatataccaaactagatacttagtttatactaaaaaaactaattatatactggaaacacgtctgaccaaactagaccaaactagaccatatacgaacaaaaaacagtccatataattaaatagaaagaaaccagcaattccaattatctttcagatataaatacaacgtgtcactgaacaaaaccttaacacattaacaacacgtcttcccttttcaatttgtgttcttcttcttctacaagactacaaaccactttgataaaatcaaatcatattatcttattggtaacgagaccacgaatattttttgcgtttgtgttttcaattaaaacctgcgtttgcgttttcatatatacaaaaagaacgtttgtaaatagttaacacaaaaaacgttaattagattatgcgttaggcttggacattcttctgatcaact

SEQ ID NO: 44356 - DNA, 278 bp, Arabidopsis thaliana landsberg
gtgctggtgatggaactaaaacccatgtgccacgttttttttgaggttcatgtacatgttggagtggaggcctgcatttatgatcgtctagtggttgaacatgaggtagtgaaacaggggataaggcatgcgtctgaacggacagggcttgtttcggatcctagataccgctattgcttctagtctggatgttacacaaccggcggacctagagatgtggacctatacaaaaagtggagataggaattgtctggagcgatgtcgcagtgacatgaaca

SEQ ID NO: 44357 - DNA, 1167 bp, Arabidopsis thaliana landsberg
ggttactgcaattggacttcagataatggaatataaatgtatcaaaatgaccctttttatatgtgtagatttgtatatgtggtatatttatgaaacatatgattttgaggcaacgatattaacctctttacaatttttattagctagcaatttatattaggatacggtacttattttgatgtaattttcaaccattcgtagttcttcatgtttatcttgatcgagtgcctctgaaccctttagccccactccaaaagaaatatgtcgattgttatgtctactaatgaaagcctgatgaagatcataaagatagacacttaaaaattgaacacagataaaaaaagtgagattataagaatgtataacagaataaaactaggaataatttaaggggagacatggggtatttgctgaaaaagttgggcggagactgagaaaatggtgtaatgatgataggatgtggggaagcaacataattaagcatgagcatgagatgtaattatttggtatgagagacagtgtggttcttctgttattcgtattaatatacgattagttatgaaatagcattatatatttatttctcttaccgtcctttgaataagataccaatcaaagttatatatttgcatctatgtaaatgatatgatgcatttgctagaaatttgactttcagtaaacaaaaaaaaatgttattcgagtagtttttatatatagtttaatgagtgtttgtgttagttggcaatgaaacaaatgatatttgagtggaaaaaatattaatgtctagcaaagaaaaatgaatttggatcattttggtcgttttcacctttccaatttaatgatcacggacagaaataattaatatgttatttttatataatttattaaatataagtgtgtgagttatttttttgtaattatatcattatttaacggattatatattgatatacgtggtacatcaaataaatatatttttaaaaacttgttatatatattttcacaattgtttactcatagtttttacccttttttattagcaattgtttactagtttttttttttttttgcgccccaacttatcactctactagtctactttaaatgtatttttctattttatttatgaaaataaaggttcgggaacaaatcttaggataataaact

SEQ ID NO: 44358 - DNA, 105 bp, Arabidopsis thaliana landsberg
gtgtgacccgctatattcaaacattcttgaccctgcaccttttttttggccgcaggccgcgtctggaacctagggggccgaaaccaaatgcgtgggaggataact

SEQ ID NO: 44359 - DNA, 562 bp, Arabidopsis thaliana landsberg
caactcgaccttaaagttaaaagttaaaacattcaggtccatcttttattgtacagaaatagcatgcctggcccattaaaggatagtgggcttttatagtaacctaggggaaatgagatttgaagttttcaacgatcatcacattcacgtattttgaaagtttttttcacgatatacaccagaaatagatattttgaaagagaaagctactaaaaaacggaaaacattttgccttttatcactcaaaaaaataaaaacttcatcaaatttttaattattttattgtttttatgtgtgattctagatgtaagaattaagaaacgaaccaatattaatcggattcgttatctttgaatatttttgcgttaagcacgtcgtactagctagcgaatacgtttaccgcaactgtaatctaattcgtcacagaatatcaatgatgtggtataatcaactataatcttcttctttttttgggcaaaatcaactataatctattaatatatacttactaatataggtgatagacatatattatttaaaataatctaagaaaacatgcata

SEQ ID NO: 44360 - DNA, 241 bp, Arabidopsis thaliana landsberg
cgcgctgacctggaacccttagagggtgtagatcgactcatacagcgagccggcctgcatggacgcgtacatcggctacggcttgggatacagcgaacgtggccaatgaactacacatgaacttggatggcacataagcacgcgagctatacccggccacacctgcaagagctagtcctctatgagtaagaaggcactggaaccgatgtagaacctatggcacgagcccaaacggggcgac

SEQ ID NO: 44361 - DNA, 586 bp, Arabidopsis thaliana landsberg
actagacctatcctcagatgcgaatcccagtttccgattaaacgcatcaatgatactctccttattagttttctttttttcatcttttgatttactccaccaaggcatgatcttcttcccacaaaccaagaggcacactcactcacactatcactcttttaaaagctcttgttcaacattacaaagtaactctccttttgaccacttcagagatcatacttggttgacccaacataggtcaacaaacgaagaaaagtcccaatataaacaccattttattattatcccattggtgttttgaccacaataccaagaagaacctgaaagacctgattacaacaacaaaacccagcgttagggtttacaacaactatgattccgtgtgaaattgaagatacagacagatacaaaattcaccagaattcacaaaagcccaattttttcagcaaattctaaaatgatagaacacccaagagataataaaaaaaatagcatcttgagtgatgataataaaaaagtatcatcttcagattagtttgagctagtttcaaaaatcaaagtgatcatttttaacctatgctacaca

SEQ ID NO: 44362 - DNA, 533 bp, Arabidopsis thaliana landsberg
  unsure (1)..(533): unsure at all n locations
cctaggtgtattaatgaacatttggtcaaccaaaccattatactcacgaaaggggcttacacgagctttactttggtttagaaagaaaaataaaagtcagttcaagaaaatacattgtccgtttataatgggcttttaacgttaaagccaagcccataatgatacatgacagcccattcattttagtactgtaatttggggtgaataatccgtcccgcgttaaaaaacacagaatcaaaattacttcatatcttcttcacgtgagagtcacgtgttcggtaaaagtggttgaaagttgaaacccattggggaacaaaaacctaaaggagtctcatttctgctgggtcgagaaatcgctgatagagannnnnnnnnnnnnnnnnnnnnnnnnnnnnnnnnnnnnnnnnnnnnnnnnnnnnnnnnnnnnnatccgttcttgttaaagttttcatttttaatcttccaatttcaatctgggtctacttaaatcaatcgaaatctcaatttcaagctgattcttataaagtttcgat

SEQ ID NO: 44363 - DNA, 867 bp, Arabidopsis thaliana landsberg
gtttaacatatgccttaaccttactcaaattatttggaacaaacatgtatctattccagtattttattttttttctccctaaaatcgtactttgagtctaagcatgtactttggtgcagaagagctggacagaatctgtttttggtaactattaaaagaatctattaaaacgttttttaaaatttttatataaaataaatggatgttattgtaattaaaattttacttaaatatttttagatacattaatggaacctggaagtaattttctttaactcaattaatttataaaaattgtaattgtttttgttttgccacttgaaaaaaaatattgtaaatagaatcttgatggtgccaaataaggaaagaacacgaacggtttagaatacggatggtgccaaataaaccacatgaaaaggtggttgttgtggttattaacttaagcttaaatatgagtaatgaagactaaaaatcagatgtaaaatggtggcattttgatgtgttcgtgtgtgtgtggatagagtaagattgaaaatgaataaagaagagaattaaacgagaagatggtcaaaaaagggtaactactgttgagttatgcctatcagtgtttggtttcaattgccttggcttcgcagtacggttggtgaaggattttgtggtactatttttttttctgcatcttttttgttttgcttcttacgtgtacggcactatttgcattgtagttacggatattataataaatttttttgaagaaaattttaaattaaaaaattacttattttgtcaacaatgagaaaaaaaaaaaaaaaaaacctggatacataatttggatacggttgaaaacaaagaaccaaaattttttgt

SEQ ID NO: 44364 - DNA, 680 bp, Arabidopsis thaliana landsberg
cacagggttaaatgaacggtatagccggattctaaccggtacgttttcttgtaaaagattaattttggtgatatataatgtgtaattaaaaattttgttattccaacttccaagattataaattataagtaatatatgtatatatacaaattaatttctattaaagtgattcaaaagtaatactccctcttttgccataaaaaaacaaaaacagtaatactccctttattttaatttatttgtagtttacggaatttagttttgttataacataagtgatgttcttattattctgtgcaagaaatttgtattccacatagtatttcttttgaatatttgtattccacatagtattttattattgatttaatatataattttcaaataaaaatgatgagaaaattcaaatattttcataatctatgtaatttttttaatgtgtacatgtgcaaaactcttaactacaaataaattgattttaaaaaatattgtgatcacttgaagatgtatcttagaaattgtgttgacaaaaaaaggaatggtcttaccaatggtacaaaattttaatgatcaatcgatcaatattctgtccttcactaacatattctgcccttcactaacataatttcttttccaaaaccacaaaacccactgaaaatcaggtaccaattaaatatttt

SEQ ID NO: 44365 - DNA, 590 bp, Arabidopsis thaliana landsberg
caatcttggaatcttgcaacttgttttacatttccttattaagaaatatctctagatgtgttttctttaaacagaaactctctttcccttcaagtcaaaatcatgtacatcaaagataaatcttagaagcttgtttcaatggaattccatgtcagacttatgaatattccacttgaagttcaatttttgttgttgtttttcaaagtgtctagattctcaacactatgactcatcttcttacttttaagatttaacctctgttttacgatctccttgtagcactatcaaagtttctaaagaagttttggtttcttgttttttaaggatcatctgaagcttaaggagaaagtttctcgttgttgcttgatatattaatcttttggggtatttaaaagatgggacatttgtcatcgatgttcaatggattagctcgatcattttctataaagaaagtgaagaacaacaatggaaactgcgacgcaaaggaagctgctgatgagatggcaagcgaggctaagaaaaaagaattgattctgaaatcctctggttatgttaatgtacaaagatctaataatttagcctctcttttc

SEQ ID NO: 44366 - DNA, 750 bp, Arabidopsis thaliana landsberg
aactcttcttttcttcttcacttgatgatgaagatcggccgagaagcgaagtgaggtcgtacaaaacgtttaaagaggtttgatagaggttaaacagaggaaaaatgatggagaatgatttcaaaggagaacaaacaaagaaagaaaagatgtgaagcagcggtgaaaggaagctgaaatcccgacgccggcaagcaaaagcttcaccggcatcggaaaaattaatcagtggaggagcctcgataatggtgccagagagaaagagagagtagcgctatcttttttttggtaactcttcaaactctaaccttacagttttgctaataaatcacggttcacaaaataaatattttcttttgcattcataccacatgaagttatacgttgctgagatgttagtcagttgtttctcaacaatagtagataccaaaaattcatcacggtacaattagagatgagggtaaaatttatcagttatttttaaaaagactatttagagatgacggtaaaattagaatttttggtgttgtatgaaataatcaatgcgtaaataacaatatttaattttttaaatattaaattgcacatatttattattatgtgtattatttttctaaccaaaaaagtttggatattaaatgtttaaataaataaataaaaaatatttgggatttttcactaaagttaaacttaataattaaatttaggggatattattggtttgtgatttaaatagtgttttaatgactt

SEQ ID NO: 44367 - DNA, 721 bp, Arabidopsis thaliana landsberg
acaacactccctctttgttatttctcatataactacaaaatatgattccatttttttgtttttatgcatctagtatcattttttaccaggggaaattaaatctgttggggtagaaaaatgtgttaaaaagaactttgattcttaacctagactcaataaaaacgatgatcattaatactccttttatgacccaaccacactattaatgatcaaataacttttacgtataagctgccttgaattatatttattgatttctttagtattttggaacatccatcttaactatagcctataggtgataaacaaaagctaagcattagtttttttttaataatctgagtagctaacaaaaagcaataagctattcgaccagtagtatgatgggtcaaaacccaaaacaatattttttacaaaagactcttctgaaaaagttgatactttttgcagagaactttgttcttgtttctttatcttatctttaatttaataacatcgttcgatacgatgtttcagaatttattcgtttcaagattataaatttaacagaaagaaacactgatttaaagaggaatatatgcttgaaaagtacgcaaaacatttaaattttgaaaacataatgtttctccatcgttagtaataaggtccactaaattaccaaaattgagtgatattattagtttgatgcaattaaatgcaaggaccatttcatataaagggg

SEQ ID NO: 44368 - DNA, 848 bp, Arabidopsis thaliana landsberg
attttaataatatttagtcttttaacaatcactactatttctttgttttggtccaatactccaatcatatgtaaagatagtccgaacagtcgatcatcgttatacattaattcataatagaaattgattttgcattaaccattttgttatatcagcatcacaagttttatatggatatatataaaaaaatgtctatggcagaattaagtttgaaaacaaaatttctcctatcatcatatatatatgtttcttcctcgcctaatgttcaaaactaattaaactttggaacttattaggttaagccaagagcaacgacccacctaatatctatataatatattacatgctcataacttagctggttaatttgataaaacttgttgattatctttgtttagttgttagatttctgttccatcatgatactttactaaaccgaataaatatttctccatctattattatatacacagttcgcgcgcaaatgtatatcatgtctttatcatggaaaaagtcagttacctgcaataccataatttctaaaattcaatcagatgtaacagtcaatttaatttgaatctacctaatttattatcgtgaataaatatgaagtgtattgggtataaaatttttaaaatattgacaagaaaatttcaagaatagtaggaggagcagtgaataataaatttacacgaacgttctactcttttcggagaattacatcattttttttcttatagtggattaaacaaatcttaacatagtaatttttgaaatagatcacataaaccaaagaaaagaagaatagtaaaaaggagacggtgccgttcgatagcatcaatcaaagc

SEQ ID NO: 44369 - DNA, 571 bp, Arabidopsis thaliana landsberg
ggcgggacttttattaatcgtgtgatcacaaattttacacacacgttgaatattcgacaaatatgtcttgatgtggtcctacttcgatgacttctacgttgacttttgctgtttgaggtagagaaggaaaattacctgccatctttttcttactataattaaataaaataaaataaaaactttactttattatattttcgggaaaataaattgacttcaaagtttcatcatcatacaaaggagaaaactttgaagcttcttactttctttacttcacgatccttcttttgcctaatttctcggtttcattttcaaaattctcttttgattctttcttactctttagctagagaagatttagactgggttttgagtatttctcggaaaatttcgttttttttttttctgggagagtttccgagatctcggtggagtactttttttgacgacgaaccagtatggtttggtactcaagctgtagaatttcgtttctgggtctgcttattttgctagcttcgagctgggttttggatagatgccaaggatttggtgaatttgggtttgaatttca

SEQ ID NO: 44370 - DNA, 577 bp, Arabidopsis thaliana landsberg
  unsure (1)..(577): unsure at all n locations
ggaacacactgcctgttcggcatcccgatggaacatggactggcggtcgccggcatcctgttcgcgctcggtctcgccggcgtgatgatgcggcgcgacatcctgttcctgctgatgtcgctcgaagtgatgatgaatgcgacggcgctcgcgttcgtcgtcgccggcagccgctggcagcagccggacggccagatcatgttcatcctcgtgctgtcgctggccgcgtcggaagcgtcggtaggccttgcgatcctgatccagctgcaccgccgcttccgcacgctggatgtggatgcggcaagtgaaatgaaagggtgaggaaccgcgccatgaaaacgaagttttctgcggtgccgcacgcccgggcaggaatggccgggccggggccagatcaaacaacgaatgtcgcgccagggatggccatgactgcagctggggtcgtgcgctgatgaatcttctcttcctcgtcttcacgttcccgctgctcggcttcctgacgctggcgctcggccgcacgcgcatttccgaaaatgccgcggcggtgatcggcgtcngcacggtcggcgcgtctgcg

SEQ ID NO: 44371 - DNA, 585 bp, Arabidopsis thaliana landsberg
agcatggattgggaaaggtttactcatgcggggcaatgaaagagttaatgaaatagctctggtgctagtagagtgtttaaaatccaataactgttctgggcatgcgctgcatccttctgccatgaaacatgcagcagatgcattctctataataatgtctgattcggaagtgtgtctgaacagaaaattccatgcagttatacgaccactctataaacagcggtgtttctctacgatagttcccattttggagtctttgattatgaattcccagacttcactatcgaggtaaatatatctttaagtatatttattgttactcttttatagttctactctttcatagaaaaatgtttggtcattagcatctttggtgctcttgtgtgtactctgccttcatcattaagtccttctatgtcatttccctagaatgcaattgcacccacaagaaccgttttagtgttcctttctggaagaataagaagacctcttgaagattgttagtttaattttggttagatgtagctaccacataaactcatactagtttaggcttcgttgctgctccaagtttgaagttgagat

SEQ ID NO: 44372 - DNA, 750 bp, Arabidopsis thaliana landsberg
aggggttgtcaagttgctctaatgagggcatatgttcttgccagtatcaatgcccttaatttttattttttactatgtaaatcaaattatatgtaaactttaaagtaatttgctttacatgttttttatatatgcattatccattagaatgtattggttctgttaaaaaataaattacaatttctaagttagtaatttaattaactgtttttataagaaagtatggtaaaacgcccggagatgagattagatgcaatgtggtggatattttagcatgggcagtgaaattttgctaacttaattctgtaacaaaaatgtgaaagggaaaacaatgcaatctatttatttatgtatactctactaacatgtatatgaatcagaaccgatctagttgtacctttttcatacatttaatgaaatatttctatagatttttttccccaaaattgtcgttaataatgtgaagcccaaagctatgagtttttatgcttatgctctcgaacaagcttgatataaatatgatcgatttataggttttcaattaggagttatatgaaaagtttgtgtgttaaaaaaaaagttacaacttatgagtaacttaattgttattaattataagtaggcatggtgaaacggccggagatgagaccagttgcaatgtggcggtaagccgcttcagtgaggggaattccgtcccaatttgcgtacgttgatggatcttcccaagtgattgaaccccttttttcgcac

SEQ ID NO: 44373 - DNA, 553 bp, Arabidopsis thaliana landsberg
aaataattaaaaaattaaaaaaaaaaaattaaaaaaaaaaaataaaaaaaaataattaaaaaataaaaaaaaaaaaataaaaaaaaaaacaatgaaaaaaaaataaataaaattgaaaaaataaagaaaaaaaagaaatagtaaatcaaaaaaaaataaaaaaaaaaaaaataaataaaaaaataaaaataaaaaaaaaaaaaatataaaaaaaaaataaaaataaacaaaaataaaaaataaaaaatcataaaaaaaaacaaaaaattaaaagaaaaaaaaaaaaaatataaaatattaaaaaattaaaaaaaaaaaaaataaaaaaaaaaaacataaaaaaaatggacaaaaaatttaataaaaaaaaaaaaaaaaaagataaaaataaaatagaagaaaaagtaagtaaaaaaaacaaataaaaataagtaaaaaaaaaaaaaaaaataaaaataaaaaacaaaaaaaaaaagaacaataataaaactaaaaataaatatataaaaagtcaaaaaaaaattaatataaaaaaaaataaaagataaaaaaa

SEQ ID NO: 44374 - DNA, 372 bp, Arabidopsis thaliana landsberg
gtgcatcccacaacgagatttgatatacttgttttttttatgcgcatcacaaggcccgtgtgagtcatgccggccatgagaagcgacgctcaatttgcatacaggtaaactttgtttgcggagccacgatagatggagagcggacgacgcactatctctgtgccgcctgcttatgctcttttcaaaaacagtcgctaggatcttagcctctcgtggatcgagggcgataactccccagcagtgactgaaggtgataacaatgactactccgttgccatggattactttaaacgtctctcttagctcgtaacagatatgcccgctgctgctgacaacagtacagagttatacaacacggatctggatgttcct

SEQ ID NO: 44375 - DNA, 844 bp, Arabidopsis thaliana landsberg
cttgcgtttcaaaaatttcgagggtgtaggtccacggccaacacaacgggtacgtcctggacgttctggaccaaacacctgggcatattcatcatctaaacttgctgtaacattacttgtagtttgaattgacgaatgttggttcattaacgttgtaagtgcatcctgaaaagtgaagcaaaaggatataagtaaaaaaattattatttcttgtttgttatttaattgacaaaatctaatgtgaaaaagaataaagctaaccgcgcgtgttttagcctcatcagatacgtagcttccatcagattttgtgcgagtcgcaacaaataactctgctcgacttggtggttttccgttcttgattgtctacgtaaaaacacatacatatatagtttacaattttaaactgatagcatgagaacaatcacaaacttcagtttttataagagaactaagtaattaacttaccatggtgaagaaagaacttcaaatacataagtcttctcatatcgatcataactagatatgtaattatcaacatatgtaatcatacattacttattggttcgctctcgaatagttatcacttatcacatagattttttcggttaagaacagttgtgcaatggccactatgtaataatgaaaatacttatgtttaacactttctcatattggcaatatttactatattaaaaaatcttttaaatgtcattatttttctcctcaacaaaaaataataaatattttctttcattttgttttctttaaaaccactgaagaaatacctttgccccaaaatttttattaaacttttttggcttttatttttaattctgggaaaatt

SEQ ID NO: 44376 - DNA, 658 bp, Arabidopsis thaliana landsberg
tcgtggttttataattaaaaataaacagagaaataatctccaaagctttgtttattaccaaaaactatctgttttcggttctagagtttgtttgtttctctctcttgaggtggctagagcttgaagaagtcaaaagtatccatattgatgcctagcttcggtcctcggtttaggctaggaaggaaaggaagaagtttctgcaaaccgatgcagatcatgaatggaataatgaaatgttaattttatcatttactcatataggtttccgcctcattatcatttacttgatgtttctcctaaatcttgtcatttaattgactaaggaaataacgaagaaattatcatttacttatttatatatgttcattggatacaattatatatatatacgcacttaaaataattgtttagtgtatacaacaaatgagagttgcaaatgtttacaccttcaaaacacaaactcaaattgtttccatttctttatcgtttggctcatctcactcagcgatagcgactgtttaacagaaaaccggatctttgacttttgttactgtttacacaattctttttgataaaatttggaaacttacgattgctatgtagcgaaagtttgatcaattcttttttatcacacatatatggaaacctatgtatgata

SEQ ID NO: 44377 - DNA, 870 bp, Arabidopsis thaliana landsberg
tcttttgattctgtttccgctctttttgggtttacttcggattttaatcttcagattgacgaaaccctagtttgattttggtttcagaaacgacgagtcttcattgatttggtttccccaccagctcttcttcttctttttttgttccgagacctttttgacggaggtaggtacggagggaatctggagttgggtttgaaggatactcttatgcgattcttctggataacttgatgccgcaggatcacgcttcgtgggatcggaaagagctcttgaggcaaaggaaacacgataggcctgaacaatcttttgaatccccgccttttcgatggagggattcgccttcttctcaccatgttcctcgagagttttcttctcgtttgggatctggagacttccgcagaccttcttgtaagacctccttttctctctctaatttagggctttgaattctcctgctctgtttttggtagagtctatttttctgtggatttgttagatatccacttttcctttttggttctataattttttttgaattgatttagaggcaaatccttgtttcttagattgagttcttactgtgtcatgatagcttagggtatttttggagcattaacacagctcttaagattgataggaagtgaattgatgaggttactcttcaaaggagcaatttttaatactcaggtagatttagtttcattgcaagaggactttattacctcaattgtgtttgtgttttgtgttcatgaatcttaaaacggataaaaagtcctagcatcgtggagtgttgttagttttagttttacatgttgtagatttagatgaagatagctcctacttttgcaggtttcttacttgtatgat

SEQ ID NO: 44378 - DNA, 787 bp, Arabidopsis thaliana landsberg
cctaagttaattttactatagttttttttatatatatatatacatatatctccgagcgtttctagagctaatagaaaaacattcgaatttgttcatttcaatgtcagacgacgactcatccataatacgaagacggtaaatttggttgaaaacttgaaatggaaaacagtatatatatgtatatagatcaaaaaatgtatatatatagaatcaatatcatttgactgaaacaatttcattttatacccaataatagggatgtagtaagaaaaagcatattcccacgccacgcgatccacaggttcgatttgtttacatatgcatattagtaatacagagtccacaagtttaacaaacaacagatatattatagatttttttcagaagaatgctattattttttcgctttcaaattaatacacatacaaattaacaaaaatagcactagtacaagcttactattttcgtttgcagaaaatcatatctatatatagtccgtgttgacagaaaaaacaaaaatatgaatatatggtccttttttgtttgtcatcattaagatgggatgacataaaagtcacactgtcaaattaatttgaatatgaatggagataatataaaactttgcaaacatatatcagtattaattaaatgattaatatgcatttgcagccgctgctggttatgaggttagcacacaaagggtgctttggttttgaaagacacggggcgtctttcagttacacttgtattaattatatgtaaaaataattactaaattatataaagc

SEQ ID NO: 44379 - DNA, 871 bp, Arabidopsis thaliana landsberg
aaaagaacatttgttaaaagagaaggaacggtttgagacgagaaagtgagtcagaacacgttggttatttataggccttttacggttcactaatgactggtcaccggtttatttggttaaaccaccctactttggacttgtaaagaaatatatatgtatttggctttggagttggcctaccaatatttactattttttggcattattttcaaaattttctgactattggggaccgattggtccgacttgttatataacgtgaaccaatcggatttttcatttcaaagaaaataattgtgtctgtaagactgtaatttaggaaaaaaggactataaaaattcaaataaataccatatgaaattgttggaccgggttacacatcaaaaattatatcaaacaatagtcttttttagtttcgtttggtttgatacaagtgagataaggaaaacgttttcaatgcaactaagaaacaaagaatagaatagtttaattactacaaaggcattactcattactcactcgcacacatgaaaatacacactttcatgctctgcaagaggtttgtggtaggtgaaaattttagacttttaattgtggttgttggtgatgaccaaacaaaaaaaattgtgggtattggtaaaactaaatggtgaccgttggaagattatgttaaacggctgatcaatgaatgatatagagctttggggggtttggtaaagaattttgacatacatcatttgatggacagaatggtatctttattatttaaaatggattaaaatctctaaacatccttaatattctcaagtccattagttgtgtgtgtgtgtgaaattcttcataattttatatatgactagagttcccattt

SEQ ID NO: 44380 - DNA, 615 bp, Arabidopsis thaliana landsberg
ccatcacccccactaattcatatttttgattatttagattagtgattttgattgtaaagtggtaaaaaaaaaagagtcttgaccaacaacaaaaaagtcggtaagtaaaagagtaacaaattgcttaacatatttgcaaaactataaataacactgtgtttttgattaaattacgtattattggataaaataacaataaactaaaatattgtttgcttaaaagattggtcaactagttaaaacttaaaagatttagggtcatttggtttatattctcttaatgaaagtatagaagaaaaaaaaaagaaaagcccattatagtcaatagatagagcccatttatattgtaataatgcaaaagcgtaatgaaaaagcccagtatagcccattaactattgtaatttcgcctcgattaaattgtcccagaatagttagtgagaagaatcccagagtttcttccatctctcgctctttcgattttggagatatttacaggtacgcttgcttttcccttcacaacatcttcttcttcctgctcatagattcaaattccgaaaatcaggtatttctcttaatctggaaaatgttctatttgaggaaatgaaaaaatgccac

SEQ ID NO: 44381 - DNA, 647 bp, Arabidopsis thaliana landsberg
tcaggttcaccacaaatacctcaacacacacttcataatatatttatcttcttaagttttgtgcttttggaaaatagactgttagaaaacaataaaattaatattttgtgtttaatcgatgaaacttgtaaacaggatcgaagaagtttccattgagtaatgaaagctcgtccaagagcaatgtgatcatcttgtctttcgtatccatagctctggtcctcgctataatatgaatctcaatcttctttttattttacttttctttaaccaatttatgtctccatgtaatatttgtagtgcttcctcaatgtatttgaaattcataaaattcatattgtacgttgaaagtctttcatacttgtttttttttttttttttcctctgaaactgccgttttattgaaataataatacataacatcaaacccaattacataaacatcaaagacaactttcaacgaagcccaaacaagaggctcaagaaaggataaactcaagaacgtgtctcatcgatggggataagttgaggacacgtgtttatttcacatccttcaccgcatgcagagattccaaatccagtgaatcaaaatacgttgccggaaccacaaccgattacgaattcttctttttttctcaccgataatgata

SEQ ID NO: 44382 - DNA, 578 bp, Arabidopsis thaliana landsberg
  unsure (1)..(578): unsure at all n locations
agagttcagtgaaactcacattgtgctcttccgagaaagaaaaatcaaacattgaattttgaanatagtgaaatnaacctaagaaaaatagaagacaataaacttggatcgaataccattttttctatacaatttcatatcgatggatctgggaatgatttttttttttttttggaggaagcaagagcaagagatagatttaacgtgaattggatttttgtagaggaagataaaacggtttggaaaatcttgagttggttacaaatttccaaagataatggtgtggtgtgtgagaaaatctaggaatatttttttgtttttaaatatgtagaaaaaaaaaatgagcgtttttttttaaaaaaattttaaataattctttaaattataaacaaatcttatgtggcataattttattgggcaagggacttgtactttatattataaaggaaaaagaatttattttattttcttttttgctctgttattttattgtttaatatatatatattaaaaattaactcaaatgggttggggttagaccttagagaaacataaatggttaaaacctaacgaaaata

SEQ ID NO: 44383 - DNA, 675 bp, Arabidopsis thaliana landsberg
ttctgtacatataatcaagtaatcaactataaatattagttatcaagtatttcttatttgaataatttctttactaataataaaaagttgatcagatgcaaatataatgggtccattagaccagtctccttataagtacaatgctttagcaaaagaaagtttaaggattattttatatacacatgcacaaatacctctatattggaaatcccatgatttatgtcactaactacgtacagattcgatttgtatcaaaagatgaaaaaatatggagaaaagaaaaacaaatctccgaagctctttcgtactgtcaaagcgtagccactttatttcatgtggttttcaaaccacttcctaaccagtaaccaatcaactttcactaatgtcgcccatttaatcatttcatccattttgttcttattttagctacaatttgttcagtttaattatactccatttattcgtcatacacgatccttccgtcacgtttcgtacacacattaattcatatataaatatataatatggtgagagtgaaaaaactcacaagaagttgattttatttataatgtgtacacaaactaagtctttgacagcattattacacactgaagaaacaagaagatatatatcttggttttaccatgaacatgcttcctaaagagtatgtcctgc

SEQ ID NO: 44384 - DNA, 105 bp, Arabidopsis thaliana landsberg
atttctcttctgcatgtcccatagagttttgaaaaatccaaacatctcagagatagatagtgaggtaggaattcctcaaacgaaccgcactccttcgtatacgtc

SEQ ID NO: 44385 - DNA, 334 bp, Arabidopsis thaliana landsberg
  unsure (1)..(334): unsure at all n locations
gaggcaaactgacgggctaagnnnnnnnnnnnnnnnnnnnnnnnnnnnnnnnnnnnnnnnnnnnnnnnnnnnnnnnngaacgtacaggcaagttccgctctacacaactgttcgtcttgcttcatgattcatttggtctaccattgtgccacaatccatctggatagctctgcccctataccttgggatggccagcatttccttgaacaaggtattatttgacctttaggcacgtactatatatgagtgctcgtaatactttatctcaagatcctattgctttcctgcatattgtggaacagacgacagggaagccactcccactaacatgcac

SEQ ID NO: 44386 - DNA, 632 bp, Arabidopsis thaliana landsberg
acagcatccaggtgaatcctctacattttcttatatatctagtgtattagcttttgggcgggtagtgattgataataaatgaaaatcgaacttctgttttgattctttcacattgattcatttcttcactttttgtctcctgcaaaagtttaaagaacccatgttatcctctcttatcgcttttaaactaatacttggtttgcttgatacgcagaaactttgcaaaaaggcaaatgacatggttccggtgtgagcctatgtaccactggctcaatgcttccaaacctctggtatatgtttaagagggctctctctgttctattcagtctcttatatactatcaaccaagcattgtgataattcattgttctggcaggattcaatacttcaatgcatatacgatgcttatgagagcgaagcagagatggtggagataccggagtctctaagaatgagcaaagacgtaagagattctcgagaagcttctgaactaaaggggtatcgctccaaaaacaggtacaaagatcaaacataacactaaattaggctttcttttggttattaaattcttcatcgtttggtaaagggttgaatctcttaatgaaggcatttcgtaagacgagaggacaatt

SEQ ID NO: 44387 - DNA, 566 bp, Arabidopsis thaliana landsberg
  unsure (1)..(566): unsure at all n locations
tcttcaaacatagttctattatatatacatacacaagggttttacgtacaatataagaattttttgtaggatagactgcgcaactcataaaatgttaaataacttctttgattttacaaaaattcagtatatatttgttcagtattgaaaccttaatcatgctgttctcactataagagatacagagctgatatattttgaaatagatctagttacgttttaacaaattgtacataaatatgttccaaaacaaattcatgtaaagaaatcaactcatggaattgggttatgatcaaagccgctgatacactggccagttacatannnnnnnnnnnnnnnnnnnnnnnnnnnnnnnaaatgtttgaataaacttatatatgcttattttgaccaaaaagttgagaagggaaaaaaaacttatctactaagactttagacttcctagattttttttgtggtgcaatttagacttcatagatgatataacaatcaaaagattcttacacgctatgatcaggaaatttactcgtatacgaaaacccctagaatatattattggttttcca

SEQ ID NO: 44388 - DNA, 830 bp, Arabidopsis thaliana landsberg
taggaaaagtatattccgattaaaaaaaaaaaatactaatgaatctgatttttcaaaattttgattaaagattagatacattgaaaaatagattttttggtaagtacatgtattactcatgcatctaaaaaataaattaataaaaaagagaataagaatatgatgtcctcatatatatgcatctatatatatatagaaatatttgtatacatatgtatatatagttatactatcttaatctatctaatgtatacattttttattaatatataagttgtaaaaaaatcaatatgtgactacttatggagactcgaggtcaccaaaaatgtagttattgtcttatcgaccgtcaaatgattcatttagactcgacatcattttttttttttttaaactaagtgtgaaaattattgtattaacaacgatgtcgtatcataatttgagttcaaactcgtattaatgtgcacgtatgagctatcaagaaaaaacacattaaaacttgtgacattcttttatttttttcattaattaatgacgttccccatcactacaaacggtttgatttcttctagtacaaggaacatcatacatttacttggacgtttgatcatttttttttgtttttaatttatctttcagaattcagagttatacaaaatgatgtgtaggatattcatgttcatattgtttcgtttttataaccgaagaataagaaaaccggattggacaatcgtcattggggtgaggccggaatatctcacctaggtttgaaccggttcagtataatatctcacgttaccttggttcaataaaaccgcaatgagcttttt

SEQ ID NO: 44389 - DNA, 1223 bp, Arabidopsis thaliana landsberg
  unsure (1)..(1223): unsure at all n locations
ggacctccgcgcctttattacaggcaccagagcaaggaaatcatatggctgacgaagaataacatttgacttcaattagtatgatttgaacgggtagtaccagttgaagattcgtacatgatgcatttacttttgacaagaaattatagtggtgccattctgaaagagaagtattacctttagaccggattcaataacaagatcgacaaatccagaagccaggagagcgtaagcataacaatcacagccgtataagggcactttcacctgttacaatacaatttatcaagccagaatggagtcactagtcactaacattgaaatgaaaagaacagaaaagaagggattcaaaggaagccatagaaaatcaactggataagaagcttaattgagatactaattattgtgagatgcgttattcttctaattctcataaggaagtttcattttcctgtactatgctccaaccgacaaacaattccaatttagctaaatcccatgtaagaatatatatattacacaaatagataagaaccttgtctctaactcnnnnnnnnnnnnnnnnnnnnnnnnnnnnnnnnnnnnnngggctagtggtgtatctgggcaatcaaaatgtgagaagagaaaacagtgagatcttagagtatgataatgaacatgagaatgctatttgctttcttgaaacacgaaactataaaggcatcacatgtcattctaggctatttccttcaaaagtattgctattacgggtcaatggacgcaaacttacaaatatgcttgtgataatttggggcaagatcgcgttgagatatcctccccgtttagtttagttcttcttccattcattcctatccatctctcttttagaataggctgatcaatcagtcctagaatctgaaagtgaagacaaggtcagttagtaagcctaaaatgcaattcttcagaatcagaaaagtagttaaaacacgttcaataagaattcccgatctgacatcagaatgtgcttataatgcatacaaccacaaacatgggaaggtcgcaaacaacaagagagtctgatgtcttaccggtttacctttgtagagcagagcaatcagcgtaccaaacacgggtttccctgagacaaagcaattgatagcacaatcaaatcctcaaactcttgaaaaagacaagaaaaatgctaaatattagaataaagaatccacctgtaataaagctct

SEQ ID NO: 44390 - DNA, 577 bp, Arabidopsis thaliana landsberg
gtgtttgacccttatcactggagctacaagagccgaccctttgcctcatcatttgttgacttcactctcctttcacatatttaaattataactggctcatatttccattcattgtgttcggttctagattgttccatccactttcttttttctcttacgttgaaatttagaaatatatgaatacttgacaaatatttgaatattgtaactgatttgtttgttcgtaatacttgacaaacttttttgaatatacacctttacatatattttgagttgagataaaaagggaattatgttagtttatggattatattatgtaaataccacatctaactatgatcggatgaaaactaaaccagcatatctctaatcagtaatatttactaaatttatatatcatcaaagattttttgaatttagcaaaaaaagaagaagatatcattaaagatttttaaatttaaagtataacataatgaataaatcaagtgttgagcttagtttcgcgttgcaaagatgttcatttgatttttttttttttttttgccatttgatttttcttatactaaattgattgatg

SEQ ID NO: 44391 - DNA, 1454 bp, Arabidopsis thaliana landsberg
gacgtccgccggagatgacagattggttgtgcttgaccaaactcaaaacagagaattgcatattcctggtttcggtgtttttcaaaatgtctccgccgatataaactgcgacaaaggagaacgaactcgattccgttccgacattcttgacttcaacaaggttcctcagttttacagtttcttgatatccttaaacttctaaatcacatatagatatttacattacatgtgtgtttttgttgttgttgttttggatcattcagatgtcggagtattttaaccagaggtcgtcggtgaccggaaaaataccgtcgggaaatttcaacgcgacgttcgggtttcaaagcgggtcatgggcgacagacgccgcaaacgttaaatctttaggtcttgacgcttctgttgtaacgctatttaatctccacatacacaatcctaatcgtttgcggctcactgaccgcgtccgaaacgcagttccttcatcttgggacccacaattattggctaggtcagtagtacccatttttttttttagtatatactttcattgactaagtgatagatatatagttaacattatgagcacaacaaacatattatcaaaaaattctgaacttggacaatttgttttagttgaattgtgacagaacagctgtggcatttttgactaattctatgttagtatcaattaatgtagaatatctggtttttctcctatcttttgaatatttaaattcaattgtcaacgtttccaactacgatcgtaccgaagaatggggaagtttcttgattttttctcattgaactgaagctagaaaaactaataaaaaggttgaaaaacttgaacattatttgaaaagactctgaaacaataatctaacatataacttaccagccaacttgttatcaaaaacattagctaattcgtaataatttgtcaccactatagtatctatagtaataataatagaaaacctaaattggaaaaggacaggtttatagagaggtatggaacacacgtaataacaggagtgagcgtaggaggacaagacgtggtagttgtgaggcaagacaagtcatctgatctcgacaacgacctcctccgtcaccatctctatgatcttggcgaccaattgtttaccggctcttgccttctctctacacgccggctcaataaggcctatcaccactcacactctcaacccaaggtcagctacattatagctaacttcataattttaatcgaaatttcaatttagcatttaacactacgttacaatatccattttaaattttctaactatacaaccatttacactgttaatattgcagtttccggaggctttcaacgtctttgatgacaaacaaacggttgctttcaacaatttttcgataaattctcaaaatgtaagtaagtttcatatatgatatatgacatagaaaattgtatagtg

SEQ ID NO: 44392 - DNA, 680 bp, Arabidopsis thaliana landsberg
ctatataaaaaacattattaatttgtttcattccattgtagcgtcgtatataaaaaataacatttcagcttcagcacatcaaataaacatttttatttattaaataaaacatttctaatctaaataagacttggatagtttctgttaatactttttttttgtcatcgtaaattttattaaaaacaaaattgtccatagaaattaagcagacaataaatgttgaaattttggatttagatttagcggttttgattgatataaatctacttttaatatttttttttgtcatgatcttatttttattttgaaacagaaaatattattttaatttaaggagtatttaattcgttcgagtttcttctcccaaaaaaaacattttaaaaaagacggagggagcgagagagagagaggacaagtgggttgctgaattgtgcagaaatcgtcgtcactgatcacttccgattccttttttttctccttaaatcgcaattttcactctcctttaccttcgccgagaaactcaatgccagaagattcaacggcgattgactatgtcatggagaaggcattggggcctcactttttcggtctttgccttgacggtcttcttttttcttcgtcgaaatcctccggctcttcttcttttaactttcgtttgagtaaattttttttttttgggt

SEQ ID NO: 44393 - DNA, 583 bp, Arabidopsis thaliana landsberg
tgagtgaatggctccaaatttccgaacgtatgagtttggttctttggtatgatcgcagtaattgtaagactaatttttagttgtacataaataatgcatttgaagtagataaataaaggaaatgcgtttagtaatttggaagaaaaatatataaagcattaaataaaaggagtggaaacttaacaactttcccaacaaaaccaccaacctcacactcatgggatacttacttttttacttaatgaaatatcataaaatatcatttgcctaattggcttaatgattatttcgaagtccctattgctttcttgggatttataacttattatgatgccaattgcgtagtgcctactaatccggggatatcaagaatgacatttttctaaaacaaacaaaaattatcatatatgttatctatttcacactaaatgtcatattccataatcacaagactcagtttaattatgtaaggattctaatacaaaacacagggagttatgtgtctaataaaatcagtctttaaaaaaacaaaatcaatcatagttagtgtagaagtgggaaaagctgtaaccactaactaagt

SEQ ID NO: 44394 - DNA, 581 bp, Arabidopsis thaliana landsberg
  unsure (1)..(581): unsure at all n locations
gaccaaagaaagactccagcagaactnncttaacgngcatgagctactcgctaaagnagagnctttaagtggaatgcncgcaacngactcatacgagttgttgtgtttatgaacgtgtatgtcggttccaacaatcaatcacaaataagaaatgtaacatcactaattaacacatacctccaagatgcattaacctctgtggccagcattcgctcacgagtttcaggcagaatggtgtatttgtctctgacaaacctctcaaatcctgactgttcatttgcataagagcggcttttgtgaacaatcaattatcagatcttgtcttttgacatccattattgtcaatatcctaggattaagatacaaactagatagacaataataacatcaaatctagatcttcactcattgttcatatcattcttctttgaaattcctctccataaagttcctaagttagagtagacttctatctctaaaactacagaatgccaggtataatatttgtctccgagatctagtgggttacaaaatatggaaacactactggagctttcttattgacgaaaaaaaactgggaa

SEQ ID NO: 44395 - DNA, 373 bp, Arabidopsis thaliana landsberg
gaaggacgtgcataccacaaggggatttgataaacttgttcttttcttgcgcaccacaaggaccccgtgagtggtgcatgccttgaggagtgacgctcaaattgcatccagcgaagctttgtgttcggagccaccaaagatggagagcgcacgacctactatcactatgccacctactgatgctctattcaaaaacagtgacgaggatcttaacctctcatggatcgggggcgttaactcctcaggactgactgatggtgatatgaatgactactctgttccgatggattaatataaccgtctctctgatctcaaaacatatatggatgctgctactgacaacagtactgacttatacaacgcggatctggat

SEQ ID NO: 44396 - DNA, 242 bp, Arabidopsis thaliana landsberg
tgtcagaccgctacaggggtactgggttagtatataagccatccgcgggcggatgcacactactaaccagattacggcccgcattatagaaggatggcgagggacgaccatttgctactgccaggcacacatgcactagatcagagggcttggcgcgcatcttgcgttgatagactcaatggttgacggcattctgcatttcacaccatgtgtggtattgaggtacgatcttcatcgatgcc

SEQ ID NO: 44397 - DNA, 769 bp, Arabidopsis thaliana landsberg
atgctgtctgagatgacagagcggggaatcagaccgtgcattttcacttacaacacgtttgtttcgggttacacggcgatgggaatgtttgcagagatagaagatgtgattgagtgcatggcgaagaatgattgcagaccaaatgagctgacttttaaaatggtagtagatggttattgcagagcagggaagtatagtgaagctatggattttgtgtccaagattaagacctttgatccttgcttcgatgatcagtctattcaacggcttgctctccgagtacgtgagaatttagaatcctaaatcaattatatatttttctttttttcttttgtagatttgggtttcttctttttttgtattgaatttatatttcattcactttaaattaatcaaaactttgaagatgaataactaaaagataataatacatgtttctactctttaaagaagatttacaaggcttcactttttagtagtttttgagatcgaaagtagaaaaagactattatattttgtgaaaaaaactctcccgaaaccctaaaacctcaagctctcgcccgcaaggaaatcatgtagtgtttggcgataactaccgatcgtgtctctcttacattcctcgggaccagatttttactttcgttcctttttgctctctgtttccgttttggattttcaccttatatatttgctatggactaattctatattttgatttaatatcttaaaagaagaagccttgaatcttcaatttgcacacttgattttt

SEQ ID NO: 44398 - DNA, 983 bp, Arabidopsis thaliana landsberg
actcgagaacacgacatatgtgactggatgacttttgcttggtagataaatgaaacctattagccaaaaggcccaaagacgttaaacaagttcagctgaattcaattatcaaaaaaaaaaaaaggttcaagctgaattcaaatatattaggctgacttttaaagttttaatgtgtgtacggattggcttaatattttattttgttggtagataatacgatttgcttaacattgccatttaactccaatactttccaaaagttaagttgaaagatgaattgaaatgttattatacttacaactgtatgtttttgtattagccgaaaagctgtcgaacaaattattgtaactaattccaaacgttgttggtttagtcggaaccacatcacgtatgattgaccctttcgacgtcggacgacccatccaacttctatagtctactaacgaagtcaaccactctatgattactctgaacattcctttaccactaacaatatgatttaaaacctctttgcacattcttatattggtcttttgttgtcatcgaattatttcatttttataaatgtgccattttgtgtcattacctcgatccacgttttgatcgtatcagatatagataatgtatgttttaaaaaatgcatagtgtttgttttctaagttaaactccgaggaacaagtttacatttggaatcccattggcaaaaagttgtcatgactatgaatattatattcgggaattcacaattatgtttctttctaagagaggatgttttagatcaattggaaagtgtatggtgtttcataatgttttccgtaaatgtagggctaaaatgattaatttcttccactaatattgagcatgcacgtataaataagcacaagaaaatacattcttgtctattggtgatgggaagaatcaagcatggctcaagcttctcttatttggcttcttctaaagtttttccatcataatggctttct

SEQ ID NO: 44399 - DNA, 778 bp, Arabidopsis thaliana landsberg
acgatttcaatacagatcaaagcttatcacaccaaatctatatgtttgcctttattgagttctactataagaatttttgtatatgtattcttcccaagactaattagttaatgaaaatatgtactctcttattaactagaacgttctattaattatacattttttcgaacatggaatacataaaaatatcaatctaaattccacaatgactgaaacgtaagtgttcttactcttttgaaaagtttgattaaagtctctaaactaaataatccagagtttgattagagctcatagtcatcttctaattgttctgtttttctttgaactcttacttaacagtcgtgttatcgttgactatgagcaattttcttgatttcatcaatagaactgttgtcgggtaaggcattaacttcctaatgcaatcatatatgaaaatagacgaagctcctatgtatatatatataatcctacaaaactacaaacacaaagagactaagattgttgttgacttgtgcttgtttgcaactttgcatacaaggacatcaatacaaaattgtccactgagatatttaattaaaaccaaatttatacgtacttcctaagcattttaatttttgtttagttcatcgtgtctttctctaaaccactcccattgaaaaatcagaacaaggtgacaaaattgttctcatttctatttccgcttaaaatgcgggtaaccatgtgatttgatcaggggttgtagaaactaacactgattttgaaatatatttatttttga

SEQ ID NO: 44400 - DNA, 389 bp, Arabidopsis thaliana landsberg
  unsure (1)..(389): unsure at all n locations
actcatcaggctgaccattcattgcgagtcaatattaagacctattatcattaatctcatataacttgattacactcacacactggggntcccacctgcaggcagtcccagacccagcaattaaatcctctatgcaatcatgaatactcacaagctatccatgccatctgcagtcagtcctaaagccagtaacgagacagttcagtcaatgaatactcacagtctgtccatgccagcttctgtcagccccaaattgagtaatcatagtctgtatttaatgatgaatactcacttgctgcatacccaatcattaggcagtcctagacccaataatcatgtgctttcattcaatgatagatactcacagtctggtcatgccatcccgagtc

SEQ ID NO: 44401 - DNA, 1869 bp, Arabidopsis thaliana landsberg
aaacccctgtcagatatagcaaacattgtgcataaatcgataacagaagtgacaaacgatactcatttcacagatttgatagattggatcgagagtcaccgacctggactgatgttggctcgggtggttctcggacaagaaggaccagctttggtcttgtcttcaggacgacggttccctgtggctgaattggattttggatttggtgctcctttcctaggaactgtatgttcaacggttgagaaaataggagttggttacctgaaccagcgacctagcgcctgcaatgatggctcgtggtcggtttctgctattgtgtggcctgaactcgctacagctttagagtctgactcggtgtttcagccaatgtctgctaaacatcttcaactccagacctgaaaacaagcaaagctaacaacgaaaaaataaccccaaaggaagaagctttcattgttttgctttattatatgtaagattatggttacaatgtggcaaaaccatgtcggagtttttacttttcacattttctacactagatgttacttctgcacaggaaacaaaaacaaaatcagggagctttcaccggatatacgatataaacctatggtcaaagtcttaaggcttcttcaaatatttcttggcttctgcagagaagcttctagcgatttgtttgtcggagaatgttaaaggaagctcttcatcatcataatcagcctctcttctgtctatccagctatgaggtctacttgagtcttttggactatcatctccttcggtggattccgtgggcgagtttggtccgtctggtaactcgcgatacaagtgtttaattatgaaaagagcagtatcttgatctctccaatagttcctgcacagtatatagcagtcttgagtttttggctctaaacgttacatgtaatgtgtaagcaatgaaaagtttcacttacgtatgagctcctattgcttgtagatacggatgctcaaaggttttctcctgcatcacccaaatatttcagcaatcattatatgcaaactagagagctttagccaaatctagtacatactgattcttttatctaagaaccaaacgaaaaggtgaatgcaacaaaatcataaaagttataaattaggtggaaatgcatcaaaacttcacctggagcatgtgatctatccgaccgtctcgagttccagttaatctctctatcattaaggaaccataggacctatcatccttttcgtcatcagtttcttccatctctgttccatcacacatgcaagtatacttagaagtacatcagaggtaatagaaaaaaaccttgcgaagtaacaacttttttaccgtctaggttatctgcacttttggattgacaaatagtgagaactcttgtctgcatgagaatttaaaggtaagtattttgtacattgaaacacaaaagataacaacttggggtcacactacaacatagataaaagtaattagaagtctgaaaacacacacccttactgaatcaaaatgattcattattctctgtgaacgtgcagcaaaatcttctctgaaatcctatagaacattacatagagcaaacaaattagaagaggaagtaaaacgaaacaccaaaccacaaaattacaagtacctgtaatccaatatgcaaccgcttgcctcctctgtggtagggaataataacgggtcgttcgggaaggtactctttgcagacaagtggctccactctgcgtgaaacaaaagtttagttggcgttacacacttgcaaaagaaggtaacaaagacagcgatatcataaactagctacaagctgttttatttccatgaagactaacctatatgcaacaggatcataggggtgaaat

SEQ ID NO: 44402 - DNA, 382 bp, Arabidopsis thaliana landsberg
cgagcagctttcgccggagccaaaaagaactcgaggctgagatccgtcgggaccgccgattcgacgccgctactaaaatcgtccatacccatgattccgaagcagcagctgctgagcctaaaacgtcaccgtttagatcaagaggcactccttcacttccctctgctcgttcgattccgggtcgaagatccaaatacttcaaacccgattcaggacccattagacccaagaacaaacctagagtttccgattcgccgtcgcaactagacgctaagcctgtggttaagcttagcgaagatggattaacttacgtcattaatggagcttcttttgaatttatgttcagttactctgggactccatatgtcatagccttctaagc

SEQ ID NO: 44403 - DNA, 744 bp, Arabidopsis thaliana landsberg
tatttaatggataccattaaggctcagtatgatatattaaacggactacgtaaaacacgctacaccatcatcacataatacaaattatgctatttgtttggattcggtccaactccatctttctcgttgaaaaggtaaatcgatggagaaaagataaaagaataaacacttttaaaatcagatttttaaaaacatgatttattcgaaaatagtattgtttgattcgaagttgtttgaaaaatatatatagccaaactgtatcgttttttttgtaacacttaaaaatatacttgatattgatagtaccgaattccaaagagttgccctgacgactcgtttgaatttatttattttcttttttgtttgactcgtttgattataactttttatgttcccaacactcgtttgattttaactataaacgcattttagatagggaggtgtcaacgagtacgaagtttgtattttttttttgttttttcttaatcgaatttatgcttgatactaactctttaaagtgttccaataatcatgaaatatattctattccttacctaactagcttggcatttacctttttcacataatggagctgaatctgatcgttccaatcctatggtattatttatagggtcccattattttattacgttttatttcttgaaaatttttagtaactcatataaaaaaaaaaaaaagatattctcctggtaccagaatatattaaaaatgttttttaagtat

SEQ ID NO: 44404 - DNA, 768 bp, Arabidopsis thaliana landsberg
ttagcagatgaaagttttgtcttatcagaaatttctaattcccataggctttgggattgagagagttcgatacgataaagactgaaattaaaatatatgtattcatggatggggacacatattttataataatatagagaaaagagggctgaatcttgacgtaaaaaaaagaacgttgtatcttaccgtttctctgaagttagtatgaagcggtttcctgaagtggtccttagccaaataaatgtaagcaaatgcgttttcgatcgcccacccaacgcacatgcccctcaattctttactccaacaccaccttgaaggtacgtggttttgacaacaaatgtcttataaagtttttaaatacatccaactagtaaagttcatatatgaattattaaataaataaatgaagactccttttgtctctccaaataactgagttgtggtttatgagagagaccatttatatcttaatactttttgtttatctcttaagggttttgttccattccataccatacgtagcccatatgcttttccatttctatatacttacaaacacatcccttttgataatgctattgctaatcccataatttagttccaattttcccgaaacaaatccctactttgaatctagaccaatgtatatgcttcactctaacatttcagcatctatgattcacaacattgtcatataaacactaacgatgaagataataattgtcaaaagatatacaataataataaagaactggtacttcaaaaatc

SEQ ID NO: 44405 - DNA, 498 bp, Arabidopsis thaliana landsberg
tagtaactctccatcgactacttcagcttgccccatctcccaaaactccctcaatgcaccctaacaattataacacgaaaacacacaacaatgtccgtaagttttcagcctagagaataacagtaaaactctattgaatgctcgagacaaagagtaacttcaatagcaaacaggtccattaggatcaaagcaaagcaaggaacaacttaataataaaaatgcaactctcaagcgtacctactcaacacatagatatataactccaataacagaacaagtagagaacaatcattagaaacaactaagaagcaacaatactccaacagttccgatgacaaatatgcagtaatcactaatcaggtctaaccttttactgtaaattcttgactaccagtgctttagtttcgtaactcaatgaataaaatatgacgtatcattattttctctacttcaagcgcagatattgcattttgtttagtgtactatccattacgaaaa

SEQ ID NO: 44406 - DNA, 660 bp, Arabidopsis thaliana landsberg
ctagcggctcaatactgtttcttagttgagtatataactccaaccaacttgctgtctgaacctcccttctgacaagtcaaagtcatgtcttcattaaggacacatgtatttatgttttgcttctacttctttttctcagggaaacattgttcattgcggactcagaaatggagccattgtgtcagttgatctacgtgagagaccaggtagaccttttccaaggctcactagacaccagatacgatatcaatcatcgagtaaaacctgtcaaacttctacaaagaaacaatggttcgaggtactgctaagatcatgtaacgactttgttctggtcacaacttttcattttttctcttgagctttcttcacaagtcacaacattctatttttgcagctccaaggaaacataaacccgtctcatgtaatctatatgccgtcatctcttacatggttggtacacgactgaaaccaaatatgaaatcctctttacttctttgtttttgtgactctattaatttgctccttccttctccagcctgaagacactaaaaacttctgatcaatacttaatggcaagctccatggatggaacagtgagtacctactagctctagcttctgcatatacttactacgagattgtcaagagcattttattttt

SEQ ID NO: 44407 - DNA, 1311 bp, Arabidopsis thaliana landsberg
gaccacttttcaggataactatgtacgggttggttattccatctcttgtcaatggaaccaaagccattgttttccgaatacagctgagtagttgtatctcgagcaaatttggtaaccagagaaaacttctctagtagatggattgaaagatcccgagttggatcatgactcttttgctttctgaagccagactgggaaacactagatactctattaccaacatctgaacttgttctcctttgattttcactagaagaacctccgtctaatgggtatacggattgtccacttgctacaggcagtgaacttggcagctccaatgaagacaaagttctctatcggatattatgataaaatgtattagccaataagagaattaaaaaaaatcatcactgcacccaacatgagatgatctgatatgattacctgcaagggactctgaaaatcattcacaatgaacacattttgatcttctgacgacctataaaaagctagtatcatgtaagactatgaattctgaatattttctttgtgacataactatgtaacgagccacccagttccatacgataataaactcgggtgaaccaaaagttttcatgttagacctctctaatgagtaagtaacaagtgctataaaagcctgtcaatacattgacactgtgcattcctaagctactttcatacagtaacccgaaacagactataaagacaggttataaataagaatatcaatacagaacaaaaaactatctcatatcagacacaaaccttgcaagaaaaacatgctgcttcaccatggccagaaactccctgactcctccattgtagaagtacagaggtggaaatgcaagtcctgcaggtcattttaaaccattaagtctgaatcattcgacttgtcgagaaggaaaagggaaaccccctcccgtatagtaattcattatatatatctcacaaaaagcaacagccaaaagttttgcttaccagaagacaggacaacaattacatactgccatccgagagcaggagtgtgtctcctaatggacctcacttcagtaaacggaaccgcggtgatggtataaagactcctgtctagaaaagatatagaaactaagaacaaaggtaaagcattaatcttcaatactaacatatactaattcagttcaaggaatcctaaatacctttctctgatagctttgcatttgatgtttgtcccttgtacggaatccacgactagccatcatatatcaaaaaatggaaacaagtaagtgaatgaatacaaaactaatacaaacaaacaaccaatttcag

SEQ ID NO: 44408 - DNA, 491 bp, Arabidopsis thaliana landsberg
aagaagacagctacatcaacaaagtcccatgggggagttcatttattaattcaggtgaataattatattagggggaaataaatttcaggacagaggggcaaagctttggtactgtctcttctcttctccgtcttcttcaccatttcgaaaaatctcaaaactttacagagagaacgagagatcctttacatatacttcactgtcttcttgaaaaccctaatcctccgatctgtttaacctccgatcaagagagatttcttcagcttgtgtgtatcagattcctttggattccccgattcttcgtcgtatcgaatcgggggatggcatttccgtgaaatcagtgatgaaattggaggtgagaagaagttatttctatctatgggcgtagtagctgaggtttggaggtcgagcgtgaggctattaacgaactcgcctcagcttaacggtggctctacaagagtgcgtatggaagtggcgatttttctctgctc

SEQ ID NO: 44409 - DNA, 720 bp, Arabidopsis thaliana landsberg
aatctaagacagtataagcaaaatgaaggtcgacgagactcgagagaggaggggttattaagttgaattactaaaagcgtgttgtcgtttcaatctgacctggtcttagtcttccacatgagaaaattcagtcaaccattgctctcaaaatcgtttcgtttttcttataatttcattaaacaaaatcaagtatacatactctcttaaccaccatttcttcaaaattaactttagataactttatgttctatatatatatactttctttcttcttgttaaagtattatccagactaagtttggaagtacgagtttttgtcaataaatgaaacaaatatcctcctttgatttgaaagtactcgaaaagataggagacagagtaattttgaagcaaaccatattgctagctacaagtaagtgtaattattacatgaaattgtttattgctatcaaagatctcacttgtacaatcaaaaaacatgtggatatgatccaaagattatggcatgggatgagacaacaaggactctttttgcattagctataccaacttactcgggagaacattgttttagtaatatgatttttttattgagttcaaaattatgctgattttagatcgggaaagaattatttttactgtcttcttttttaccgtcaaaaataatattttagtcttattaaaacgataattgccaattgaattcagaatttactcatg

SEQ ID NO: 44410 - DNA, 1705 bp, Arabidopsis thaliana landsberg
actacaatttgtaaagtaactcacattgaccgtatcttgatttatatctatcaacgacatctcccacacagatcgatctatttatccattgtatagtatcaaaatgtattacaatctattgagataaacatcactagagataattacagatgttataatgatgcacaaactgcaataccgatatggactttttaagacaaattcaaagataagaacgttcgccaaagaaaaaaattatacaaatgggcattgtgaattatggaaggttatgacgagtttgactttgacttttgcctaactcccatttgtttgatggttacgtctatgcacaaaattggtttagccgaaactatatccaatctcctcttctctttcacccaataattacaatcgcaaagtttgatttgattcattgcttgtgttttgttttgttttgttttgtaatgtacctcaacacttcaccattattaacaccacgtagttcctgttaattgaagacattacgacacattttctttatcatatttgtttagatccttgtattatcgtttgtttgatagtttgtggtgagtcttatctttaccattgctaaaagtttgaattcaacatttttattaaaattttaggttcactaaacttgtaaaattataaaagtattcactcatataaacaatatttattactattatagtaaaataattttgttttcttaaacaatccaatcagaattcattgttttaatttttcttctcaatctaacaaaatttaagtttttgctaactgaaatagtaaattactttcaaaattattttttgatcgtccaatatgtatcaagtttaattcactccgttgtatgttggatgtacttttcggatcactatatactcactcactcactcacgttggctttctagctttcaatatgtttttagtggattagtataaatgcaagcaataactaaatataaacatctattattttaataagtctaatgaaaatgaaaaatactatagtctatatacttagttaatgaggacaaaactaaagaagacaaagatctttcgatcacgcgtgtggcgtgggcatgtgcctgcgtaagcgtaagcaatagatcatccaaatgtgacttacgtgttttgaccattttgccctagaagaataatattatcaaagaaatttgatgttcacaatttgttgttatacaacagaatttcttaattttaaaaacattggagaaatctgaagcaaagtttgaggagcacccacacactcctcctattcattggggctgcctactcctatgctcttcttcttctttttttaattgatctgatgaattgcttattaagtttttaaaatttgagaacagtgaaaaaaaacaatagtaatagcaatactgtatataacaagtcaattattttaagcaagcaagtgaaaacaataatagtaaaatagcaataagaagtcaattaattgaagcaaataatactagagaccaattattttaagagaggaagtgggtccagaggagaaaaatctatagttgaactctgaatctatgggaagtgtttgagtttgtgtggatctcaattttataacaaaagccattgattgctacttgagggagactcatgcatatgaatgagaaagattgatcaatttaaaagttttcttcatacatacataaatcattaatatacttat

SEQ ID NO: 44411 - DNA, 624 bp, Arabidopsis thaliana landsberg
  unsure (1)..(624): unsure at all n locations
ggttgttcaaacagacaacctactccagttaattaccaccacccttttcatttcttttagaattttaaaaaacgttacgaacaaacttaactaatggtcatatcgtatacgttacaaagattattgactaattatttattcaacgtatttttgccatttaattttggttcattgacttattatttttattagtttattgactaccagaccattaaatagatttagaaacagataaaacgtcaaaacaaaatagctgaaaaaggatagtaatttaggatactctccaactaaagtttttaagcacttgacgttaataaaataactagttaatcgatttgaaataaaacaatccaagataatttttcaaattttcaaaataaagcgactaacatcttgataaacataattgttttgatgaagtctaaacttaaaccgaaaaagtagagggactttcttaaaaaacaaaaactaattatcttctagtaaatcaaccaaaaaatcttgtagcacctgcaaaaaaactaaacttgaacaaagcagtatcttaagggtatgatttaaatcaagtttgggaatgaacaaacccactatctacatgctttcaaacanaatactacagaatac

SEQ ID NO: 44412 - DNA, 698 bp, Arabidopsis thaliana landsberg
aaaactcacagtagatgctggtgctacatgatttaacacaacataacatgaaaaatgtacagtacgctgtgcaatcaatataccgatttttctagctacaagtacctaagactccaactcataaacagctgcacagagagagtttgaataaaaaaactaaacaggccctcttcctacataaaaaacgtagcttctcatgtacttcagatctgctactttcaaagttacacaacctaatccatatccataatagaataaaaatagaataccaaagagggtaaaggtgaagaactttaaacgcaaagaccacacacctggatatgtatgtactaatgagcagcctactgtagtaatcctaaacaacaatgtaactaaaaactggtattaaacgcagcaaaacttgtattgttttttttaacatcaacaacttttgcacatcaaaccacaaaaaaactagtttacaaggttctaaaccactaatgtacatgttacctgagaacttttgacttcagatttaaatttcgataaatttgaatcttgaatcatttcaatctgcaaatacaaaaatcacaagtaagaaaaagggagtttcacataattcacaaattagtctcccaggaatcgagactattaccttctgcatttccgcttttgacacaaaagactcagagacatttttcaagctatcatttaaaacc

SEQ ID NO: 44413 - DNA, 1973 bp, Arabidopsis thaliana landsberg
tacgaaatttatacacagagatatcttatttaaaaagttcttttagaagatcaacttattattgaagccgacacatcttattaactgcagacatcaagcaaacactagagtaccagatcaggataaaagatatagtggaacatggcttttgatcacgtacctgaaccattataacaggacccccgttgctgtaaagcagaggaaataccttcggtaacagaacatcccaccatctttcaacctgtaatatgttttgtcatgaaaaactctactttgaacataatgcataagaaaagtctacacaaatggcgcctttttcttgctagtttgcataagaacagcctttctcttttcacaattatgcaaaagtaatcataatttctacccattctccacagaccattacattttgcttcttaattttcacaaagatacttgagaactcaggcctgtagcatcatggtgattctaaacgacaacttaaagaggcaaacatggaactatgaatgtgtatatatcttagattaataatgcacactgcaagctgattaactgcaactccaactatctatctactacttacttcatttaactgataacttaccaacttaagatatacaggatctgatgtccttagttggagacgtggtttcacagcaagtaaccaagcaggaaagcctcccaaatcccattctgtcatggagatgggaacatgtatcagaactttttccgttgtataagcaaatcttccacataatgtggtaaaaaacattggtatcaactcaataagaatcacaacaacacagacctccacagatataaggtccagcacgtagcataaccagaaaatctagtttctcacacagcttgagaaaggagacaagatcaccaataccctcaaaaaccatcttcccaggctttggttcatgcagattccaaggaacgtatacttgaatagtattcaagcctaaagcattggctcttaaaagccgatcctcccagtactgcatccataatctggcattaattcatcaaatcatatatattatagacataacataatgatggttaacagcagaaaatattgaagatttcttacttagcaatcatatggatttcttgttataaagacacatgtacctctggaagaacacgaaagtaatgcaaatcaccaccaatgatctgaaaacgattcccatctttccagaaattgtcatccttgatataaaacttgcgagatatcatctgcatctcttaaaactgaaagtttagaacgtttacattgatttcggttccaactaaaacgaagcaattagtagaaagcactgaagtatgaatcatgcttaccttctcgtcctgaggtatagcagaaggtagagactgaggagtatatgacagtgaagggagaagagcgaagacaggaacattgattccgacaactacaagaaccaggagcaacatggaagccaattgatgtcttctttgtcttcccgttgatggccagcttgtcatcgccatcgtccctcttctgcaatagtacgcttggccaaattgcgcactttttagccggttttagcaaaattcaactcctaaaccgggagacatcggttccggtgaactaatgccgggtttgcatactgtatcatagaaacctgacggatacaatcaccacatcagagacagactgcaacaagaagaagttgaagtataccaatcaatttcctaacttgatgttccttaacaagcccagatttgaaaaggacaagctaccaaaaactatcaaattggtttaagaagctatcgctatcgtaccggcaaattcaagcccccatggccggaaaagtaaacggctcggatttgacgacaacatcactacttcgttatcacgtgcacatcacgtgttgattagagtatggactaaagtcaacaaaataaaatttacatattgtgtgtagtgtattggacatgggctc

SEQ ID NO: 44414 - DNA, 784 bp, Arabidopsis thaliana landsberg
ctaggctgcccatttcaggcaaaccatggccacctagaacggttttgacttgctctgagaatctatggtgaatttcaaaggaaagtgatcctgaaacagaagaagccaatcccaaactcatagcacagaggaatccaaactgaaacatccatctcaacttccaattactccaaatcattctttgatcttcctatctttctctatgaatctaaagttaaagaagaaaaacaaagaataggtgtgttgattcttgctagttgagttttcttttactacacgaaacttgtttgttttgttttgtgtgtggaatatgagggagaaggtcaacgttttgtctggtgcttggtctttgtcaacggatttttaaagatcgttattaaaggaatatgttgccaacgaaattatcgtatttaattcaatttttgaacatcaactctcatatttaattattcatagaaaccttatcataatatttcttgttcctttatctttataaactaaaccccacaagtatatgatctaacctcgaatcattgtgtttctgtggctgtttatatataaatttggtggaaatgtgactagagacgtggagggatgtttgttatcggtttggtgcagcccggtgtacattaggcaattggtaacaatattgtttaaatctgtacggaaaacaatggggtgaatttgtcataatatagagataagagagatcgaattgcaaatatgatacaattatttgaaaatagaaacgttgactattgataagtttttgtccaccgtgtca

SEQ ID NO: 44415 - DNA, 654 bp, Arabidopsis thaliana landsberg
ataacatccagcttcattacggttataattatttcatcggaacatatactcctgaggattgtaccaccggtttaaaaatggccatcaaagcattggctccaagataaattaaatgaagcaacttattataacaatgataagtggaatgattagtgtcttcgtacgtagtgttggaattatttgtaacagtttaaaatgttagattaataaatatcttattaaaattcatttgcgttttaattagtagctttttcactttataaataatctaatgatatagtttatgtgctcatgatgtaggttatatattttctgttctaaaataaaatctaatgatgtagaatctcgttctttgtaatcaacaaaagtgaaattatatttataacaagttcttagattgaatctgtcttaaattatcaaactaaagcaagttttagtctctctttttttttctttcataatcttcgttcttaccaaaaacttgtaataaatatcatgggatcgatattttgactctacgatctcacatggaaagacaaaataaatgacgaggaaaacagaaaccggatcaagattcagagaattgggacttgatccacttggcacacatgcatagatatatagtcacagcctggatagtagtatacatacaca

SEQ ID NO: 44416 - DNA, 254 bp, Arabidopsis thaliana landsberg
cattactaggatcatacaggtcagggcgtaaattttttgcccaataattgtatgcaatatcggagagagaggcataccctgagtaattatcggcactgccactgtctggcacagctttgtagatagaagttacgccgctcgcagtgcctggaaatgccacttggtccggcaacgttgacccgggctgaatgaggctactgcgcagcgggccatcctggtcaccattccaaaggccgtcagtaatcagcatatga

SEQ ID NO: 44417 - DNA, 570 bp, Arabidopsis thaliana landsberg
ggccgtggcactgcgctgttgaagaagcgctggccgaaggcacaggtgatcgcactggatgccgcgctgccgatgctgcgcgaagcgaagcgccacagtgcttggctgaaaccgtttcagcgcatttgcggcgacgccaccgcactgccgctggccgaccacagcgtggacgtgctgcactccaacctgtgcttccagtggatcgacgatctgaccgcgttgttcggcgaatgtgtgcgcgtactcaagaccggcggcatgctgaccttctccaccttcggccccgacacgctgaaggaactgcgcgccgcctgggccgccgccgacggccaacctcacgtcaggcggttcctcgacatgcacgacatcggcgacgccatgatcaacgccggtctgcgcgatccggtgctggacgtcgatcgctttaccctgacctacagcgaaccacgcaaaacttgctggaagagttgcaaggccctgggcggccacccaacgccccgacacccaccccgcggcacggcgggacttcgcccggacaaaattcgcggcttattcggcgccccatgggct

SEQ ID NO: 44418 - DNA, 294 bp, Arabidopsis thaliana landsberg
tgaatgccaatcttagttacaaatttgtcaaaaaaacaaaatgattgaactttcgaatattgccagatattagcctcaagcttcccatgttctagttatcgctgagtactgaatactgaagattttcttatgcgtagtttatgttttaaactctagaccgtacatttactaaaatttaacaaaagttatattgtaaattaagtgaagcatcgaggcagtcatcttacacgtatctatctcctattgagttaattacatgttattacaactaaacgaaatagtatatatctcatt

SEQ ID NO: 44419 - DNA, 924 bp, Arabidopsis thaliana landsberg
aacaatcctaaagtaaaatagtaacaatcagatatttatatatgtacgtgtgaaatttaattagtttgcatataattttaaatttgtttctcctaagtaggggaccaaagctatttgttgtatattctatgaaaccaaagctaaatgctcggagggagtggaccacacatatttcttttacatctttatcttttttttgtgttaagaggtttaaaaaataaaaatatctgcactgttcagatataaatttatgcagccgatatcttagacttagaccgaaaatattaaatctcaagtatagaaagaaaaaaacaagagtatgtaacaaacaccaaatttccgtagagaaaacacaccaatagagtaaactgaaatggaaaatatcacaactagagtaaactgaaagataagcaattatgaaacattatatacaacccctaatataataattcattaatttattcacattaagttattggtttctatttgaatattagagttatttaatagctgtcaaaaaaaaatagagttatttaataaacttgaaaaagtcaatattatttttgatcgtatattacaaaaatcataacggatgataagtttaacaaacactgttcactatagaagataaaacatttaaaacttttacttctaatagaaaattaaaataaagaaggttataaaatggagaagacaaaaataaaaggtacggctaagtttggcggtttgggagagttgaaaaacaaaagaagatagagatggtgggacaatgagaacaacacacaattgcacgcctctctctatctactctctgagctctctacattgcatcaaaatttcgattatttgagagtccccatttcaaagttaaccaccttttgcttcttttattacaatataatgttaaattcagtaggtttacga

SEQ ID NO: 44420 - DNA, 923 bp, Arabidopsis thaliana landsberg
cattatccctacttcggtatcacccaaaacacagcgtgatagggctcaatataaataagccggcagtattcaattctaggaaagatatcttgctacttaaataccaaaaatgtgttctaagttcatctgccaacagccaaccaagggaatttcagaaccagcataccttggcattgagcaaattttcaaggctattaatgcttttcgataaattctctgattgaaaagaccctgaaaagtaggtaaagctgtcaagaggtggaccatctatagaacgagatgatcaaaagtaaacatgtattatcaagatcacgacaaacctcacaaccgaaagagaacgaacaaaaggaactcaatgcagaagctaaatcataataaaatctttggacagtaatggaccagcaatccatagtcaccattagaaaaatgggcctacctttgccaacaactggagatgcagtcattccaaatattcgaggccgttgtaaactttccgatttatagaaaacctgcatttgcaacaaagtggagcaactaaaagttgattatatgttaataatgtttcaagcacgatataccaataatgtgaaggaagataccttcatgatttctgcataaggatggttgctttgttgttgagcatggtgacactcatcaaatattagaagggagatacactccatcttgatgaaacagtgctgtaagttatgcagaagtatttgtggagtcataacaagaacctgcaggaaaattcagtcccaagaacaaaacaaacaattgaaagaagatcgcatataataaagtgatggttcctacataattgtaaaatggaaataacaatcaacttaaatgaagctcattggctaaaaatagaatgagaaaacaggaaatcacctcatttcgtggcaatctctttctcccac

SEQ ID NO: 44421 - DNA, 524 bp, Arabidopsis thaliana landsberg
  unsure (1)..(524): unsure at all n locations
gatatttcaatcgaaacggaataatgaagataagattaatggattagattgtgagattaagtggaacagagaatgatgacataaaataaagtcaacatgaagtggatctacaagtttggtgacacgacaccaaatggtttaggtgaatcttcatgagaaagaagaatagttagctctgataccacgacacacgctttaaattctaagtggttttagttactaacacaacatctcattgactaatcaaacccataaaagcctataaataaagagaacaacgtaagagatacgaacaaatgtctgatatggaaccaaaagaaacaaaaccacctcgaaaacaattgagacagcctccttctgttcctttcatttgggaagagcggcctggcttccccaagaagaattggcaaccttcactagccacttttgtgccttcttctcctccgcttncgccacctatcccagtcccggttaagctgnnnnnnnnnnnnnnnnnnnnnnnnnnnnnnnnnnnnnnnnnncca

SEQ ID NO: 44422 - DNA, 700 bp, Arabidopsis thaliana landsberg
gatttcttgctctttatttataacctctcgtcacgctcttcttttgcgatcatcattacttctcgtgttcaacggtcaaacttcacgttctcaagacactacttaacttttgttttcgtatgctaatgactactattaattgtttttttagtagtattagatttaaagtttgaaaaagaatatcagttacgtttgagacagatttaaattaattccccaccagttgaaagaatctacgcattacgcatatgcttggtttttaatatgtttttgttggttcttaaatgtttgatggcataatatatctttcatttaatatatattgatgaacattaatgcaccttatctaccaatttgatgataatgtagggaaaagatagcatcataatagataatgataatatcggacctttttcattggaccgtcttgtgtatcaaattaaaattattaacttgcttttacttaaaagcccataatttcaatatttttttggatccgaatattaacgaaaagcccatatataagtttttatgggccaaaacgtataaatcgaataaataaataggaaaaaaattgagtattattactttttttttcttttttttttccgacagtattattacaaaaacacatagaaaagaaagtgccacatttaaatggggtttgttcctttttctccaaccgaaaacacaatgataa

SEQ ID NO: 44423 - DNA, 802 bp, Arabidopsis thaliana landsberg
gtagttgccattaggacatctttttgagccagttctagttttcgtttatcctcgtgcgaagctgatacgactccgctaaagctcttggctatattctcgtagatattttcttgttgatgatgacaagaagaaggtgtggcggcggtgatgaacaatgacggtggagagtcgccgtcttctccggaggatttgacggcggaggagtaatctacgacgagttttttgctgagatgagtgttccagtagttcttgacttggatatctgttcttcccggtactcttttagctatcaaagaccatctgaatttggggaaaaaatattataggacatttttattaaattcataccatataacataaattataacatgccatatgtttatgattcttttaattatttcgacatctgtatgtgattcataaatgaatgcatatttatatacatagagaggattttttatttttatttttcaattgtggaaaacgtttctaactctataatgaattttgagaagtgactgtttgcacgactaatacacttatgaaaaagtgtatattattcattaaatatatccacttgaaatgttcgaacatattgaagttcaaaagatactcttaaagatttgtttttggaggaaacaccttttaaaattgaaataacccaccaacacatcggttgagtttcattgaagagaagactaactttgatcttgtgcaactcttttcttcttcagattaatatatcaacttaaaaattttgaacatattttcagttcaaaggattatttttaagatttgtttt

SEQ ID NO: 44424 - DNA, 754 bp, Arabidopsis thaliana landsberg
aatcctcgaccgctcgtcatgatatggaaccgcaattcgtagtttaaaatcttaaaatgctatgtaaaaatggtatgtaaaaatgctaattaatgacatggcacaatgttaattcgaagcaaaatgttaattcgaaacaaatagcttcgacttttctatatcatagattgtgaagtaagcagtggagaacacactcaaagaagaagaaaaaaatgtgaaaaaaagtaaactgccattgtatacacagagaagaagtcatggttgtggttttcatttcttgcgagacatcgctgctacgataccaccggctatgagacccacagctccaaaggctgtagccgggatccctatccctataacaccatctgagaataaacaaataccattcagtgactctgtaagtcaattaggatttgttacaaacattatctatccctagaaacatccatcaattcaagtgttgaatccctagaaccatccatcaatcaagtgtttaagtttgacgagtggcttaccctttgtgattttgccttcgatggtcttctctaggaccaaagcttgcctccaatcagcttgcatctatgaaaacaaaccatacatcagagagcaaaagaataagcacatatatatatatatataagcagcacacagtagtatatagcggatgacagggtctataaagaaaggatttgggaagtggatgaaacctctatacagtggtccacgaagctgcctgctccttgagtaattccca

SEQ ID NO: 44425 - DNA, 701 bp, Arabidopsis thaliana landsberg
gaatatccatgcaagagaatattgtaggtagtcagattaggacccccattttggttccccatttcgggaagtaggtcattggtcttctctattttccccatccttgagtaaccgtctatcattgcatttgttgtgacaatatcaggggtatggccaaggttatccatttgctcccgaaaataaataccagctttccactggccagccttgaacataccatccacaaaacaggtatacatcactttgttcggaagtacattacctcgagcttcagcttccttagcaaagagtatggcaataacagtcttgcccttcctacacaatccagaaataagactagtatatgtataactgtcaggcagaatgcttcgttgcaccatctcaccaaaaagtgagacagccttggccaagttccctgatttacacattgcagtgagtagtgtgttgtacattacagtatcaacagctgcaggaacagcatggaggcttttcaaaaacttctctgcctctcttaaatgcccacctttgcataatcccttgaggagactaccatatgtgaagaatgttgggtgatgaccaactttggtcatctcatcaaatacagagaacgcttttaacccttcacctgagtttccatacccattgataagacaatcaaagcttacagtgttaggaagaataccatcacttgtcatgcaacg

SEQ ID NO: 44426 - DNA, 673 bp, Arabidopsis thaliana landsberg
ttctagctcgagtttgaattttcggaaggactagaaatcatcattttgcttgctatcactgcaaaagattttttaatcatttccagtaattgttagattacttctaactttttctttttcaaatttcttttaataatgttgatttgtattttttttaattatatgttaaatatctaaaagcttaaactgaaagccaacaatttcttacaaactcttaagttataagatttgtttttatgtagtttcaaccatttatattatatatttatcttttagattttgtacttaaccagtagtaatggttttgaaataaatttatttgtatttttttctctttccatttcaatgaattattgaatttataatattgccactaatctttataacaaaagaaatatacatctaaaatttataagaaaatattagaatttagagaatattctatacattagagaatattctaataatacgaaacttatctatacattagagaattttgaaacatgtaattcacaaaatcatatcctatacatatcgaatcaaataatcgtaattatgagaatggcaggccgattatacataaatatgatattctataatatttatacactgattaacaatcacgacttaaaaaattcctttaaagggtagtaaacttttgtacgtttcacgt

SEQ ID NO: 44427 - DNA, 468 bp, Arabidopsis thaliana landsberg
aaccagctaaaccggtttaaatttacaataggcccaattataaaggtacggcgtaaaatgtaacaatttaagagggatatagatatacattggaatataggaaactttatccaaagataatattcagattcatttataagaaaccaaaagaagtctagtagatatagccgttacagactatataatacaattgagatagaatgtgtgtaaccattataaactaataacaaactcgattacacttaatacagaggaaggagaggagattaacaagtaggcgtaattaattaattacttacctccaagagctaattgagccatttacatatatacatggaagataagggacaaaaagatgagtagaaaagatagagaagaagagacttttggttcagttgctccattcttcttctctactttgtctgagctcacatacttgttcattactgctttacttcctcctcctcc

SEQ ID NO: 44428 - DNA, 426 bp, Arabidopsis thaliana landsberg
actttatgggaagacccagatccgtgttcttttctgcttgattttctatttttttttcttttttggcatatttttaaattatacaagtatgatgttatcgaaagaaataagaaattcgattaatagaaaaattagagcgctccatcttttgtctctccatgacatcattttgtcttgtaattcagttcttcacgaggttgtgtcagatctttttttgtttaatatttttcttatttctttcttcctatccttttcaaaacaataattattcacagccctaaaatctagactctgtgtaaaaatattctgtaaatccgtatcatttttcgcttaataattcgttttcaaaattttctgagtaatgattcctacttttcgtgtttcaaaaagtatgattacaactgttgtcagttcattgaattaaaa

SEQ ID NO: 44429 - DNA, 604 bp, Arabidopsis thaliana landsberg
gccgactctagaggatccccggagatctaatgaagaataacaacaatggcgacgttgtggataacgaagtgaacaaccggttaagccggtgcatcacaattcttcccggataattagggtttcacgagcttccggtggtaaagatcgacacagcaaagtcttgacttctaaaggaccacgtgaccgtcgtgtccggttatcagtctccaccgctcttcaattctatgatcttcaagatcggttaggttatgatcaacctagcaaagctgttgaatggttaatcaaagctgctgaagattcaatctctgagcttccttcactcaacaacactcattttccgaccgatgacgagaatcaccagaatcagacattaacaacagttgctgctaattccttgtctaaatctgcttgtagtagcaattcagacacgagcaagaactcttctggtttgtctttatcaagatcggagcttagagataaagctagagagagggctagagagagaacagctaaagagaccaaggaaagagatcataaccacacttcgtttacggatttgttaaattccggttcagatccggttaactcagaccggcaatggatg

SEQ ID NO: 44430 - DNA, 427 bp, Arabidopsis thaliana landsberg
ggatcaaccgttgacgatgtccttcaggcccttgcccggctttaacttgggctgacgcgaagcggagatggtggtcttctcgccggtgcgcggattgcggccttcggaggcggcgcgctcgctcacgctgaaagtaccaaatccgaccaggcggacttcatcgcccttcttgagcgcatcggtgatgccctcgagaacagcgtcgacagccttggcagcgtcggtcttcgacaggccgccagcttcggcgacgtgggcaacgagatcgttcttgttcacttaaaggcccccctttgtggtgatgcacgccttgaacagttggccctaaactttggttagcaaactattaacgcgagccgccgaaatcataagcgcagcccgcaaggcgcgtcaacgcaaggcaagcgaaattttggcggaaaactgc

SEQ ID NO: 44431 - DNA, 725 bp, Arabidopsis thaliana landsberg
cctacttttacatctcattttatagcttttttttttgggtgggttacttacgtattggtaatccttcgtttgtatttaaccatttcaaagccacgttacttagcagttaacacgagtgttctataggatttgtcgggtttccgctagctattttattcgggataaattttgagccatacaaattagtataaaattttatactaacgatgcatgctattaattaagatagtcaaaatattagttttttaaaccacacataaaaattgaataacaggtctgatgagtgatgaccaaaaataatttctaacctatcactacggactaaacggtagggtatttaaattaaccataaaaatataaattaattacttaatgagttagataaatattctggagttattatataactatgaagaacgacagtcgatatttgtttaaatgattcaaagtgaatttggttgtactgtttcgtaagcaatttcgctgttacttaatacaagtcaacgaagattctatgatattcttataatattaacatatagacaatccatcataattagaagaaaaataaaggatttcccgtggaatgtgtatatatgagtattatatacttcggaaaacacaacatgtctaagatatatcgcattatgtacattataatttataagtgaaattgttcaaaaacgctcacgatgtcaatttagtgttttttaaagaataaaaat

SEQ ID NO: 44432 - DNA, 327 bp, Arabidopsis thaliana landsberg
gcctgcgatgttgcgcgacctatgtgtgcataggctgcttagcatcaattcattaggtcaagccgctcaggccaaacaggtgtgcaccagatccttgcagggcacccccgttgagttttggacaaatggccaaacaacacgagcccaccgaggtggtggaccaagccctgatgaagtgcagacctcactctgtgatgtgctgcttgacgtggggggtggttccagcattgagcttggcaccgctaatgcccatgggaccgccctgtccattgtggccgtgccaaccacttatttgggcatagaaatgacaccaatctagggaatgac

SEQ ID NO: 44433 - DNA, 596 bp, Arabidopsis thaliana landsberg
  unsure (1)..(596): unsure at all n locations
gataagaccaaataatcttaaataagcaacatttttgtgttttgacaaaaaaaaaaccaacacttttgtgaacattttgtaaatgtcatacttttgattcaaaaaaaataagcaactatanaaagaaatagaacgaaaattttgtttctaaaatttaaaattagaaatctcgaatatcaaaaaataatttagatatatacgagaaaagattctttttatgtttcttgtgccagtacattcacttattttgggagaagaatacttccgtttatttgtcaaccaaattttgactcgcaattttttcctaattcatttttatagaaatcgaagaaaacattgactagtgtttagttttattttttttagttaaacagaaaaattttgtttgtaaattcaaattttgactagtaaattcaaaatgatacaatcataccactcaactcaagtgatacaaaaataacattttcactttcactattggaagtcattagttaagttagtcgtatagatgatacgtaccttcgctccggtcacttggaggaagggtttggatggaggagagagacatcctctcacacattctctgaagtgtgccg

SEQ ID NO: 44434 - DNA, 627 bp, Arabidopsis thaliana landsberg
caagacaaacgcactgtttttcctctgtgacttaataaaaaattcgaggtgtttatcttgaatttgagttgtaggacgtagataattgattttgtcacgagtatatatgatcaacgatgatattattcgtttttagtggcctagtttctcatctgataaacttttcaaacaacatgtcatatagttgttgcgccataatcagtaattctttctctatcggtgggtgtgggaaccacaaacggatcaaacttataagttatattaattagagtctgaacgaaaaaaatcgcgtaggttatatattatttccattctctaacggttaatttagtggcggccggtgttagacatgtttttgttttctagggttggcaagtacaataacaatacatgttctggagtgaagtgaagtagttgtcaaatagaattttagttttgaacaaattaatccttgatacttttttatgtaactattaattatatgatataaataatgaaaggtgatcaagggctgggaatgtcgtggttgcatgcatggaacttggaaggtcagctgcttctgccaaacttattccccgctcccccagtgatatgacctatctgccctcacattctttcaatcagatc

SEQ ID NO: 44435 - DNA, 455 bp, Arabidopsis thaliana landsberg
gcgcgcgcggctgtctggtgtatgatgggagcgtgaaaactgtcctgttggactatgtgaccacggccatgctgttctgcgatcgccgcgtcaacaccaagctcatcacgtggaaccggtacaccttattcctcagccttatgagtgttctgtgtgctgatgtctttgagggattgtttgccgtgtgctgtgactgtgatgtagggtggtgctgctgcacgggccgccgggtacaggcaagaccagtctgtgcaaagcgctggcccagaaactctccatccgcctctcgcatcggtactcaagggggggggggcttctgcgtgtgtgacaggttttcatctctctctctttgtatgggactttgagcgcgcgctttttatgtcgggcctgtggttttcatttcgttggtcgatcgattcgtgtggctgacactcttgctgctgctgctgtctttt

SEQ ID NO: 44436 - DNA, 987 bp, Arabidopsis thaliana landsberg
agccggggccaacgagattcccatgacggagaagaagcttgtcaaggtttctattcttactttgaggaacttgaggaggaacatggagatcagccattgaaaccgagagagtggcggcgattcacggagattgatcacggcggagagagctcaaaagacgcaaagccgatacactgccagagagctccgaaacttgtattggcttctctctttgagccgacccttatagttattgggtcaatactgggctaggcccaaaacaatattttattagggaaaaacacattttaatttagatcttgattattttccttggtttaatttggacatttattcaaagtttttcttttttttaggtttgttttagcaaatctatcttattataaatttttgtggattgttctgactatttatcaccttttttatataattttagcaaattttccattatattgttttaattattgtcccaaatttggttatattcattttcttataaattaactctgttaccagtcccttacaattgttttagcaaatcttatcttattagatttttaatgaaattttgtggattattctgactacttataacctttttgtattattttagcaaatgttccattgtcccaagtttggttatctatatttctttttaattaattaattcggttacccaatcaatctctcctagacgcgaagaagaaaagaaagacagacacatatcaagagattcaagatggaatctatctttgattctctgataagcaccgttggtgtgttagttgcttatagcagtcgtatatatattttgtgtcggctgcaattgctcttggtctgctaacggctgcagtcgtatccttatcatcatcatcatcatcattatgacggtcccaaggttttacgatgagaccaaccgagtgatggatttattttgaataaattactgctatgtaagcctttcaagtcaacttttcgatttctttt

SEQ ID NO: 44437 - DNA, 651 bp, Arabidopsis thaliana landsberg
  unsure (1)..(651): unsure at all n locations
ggttccggtactcggaaacaaattgcatggaaattttacataattaggtacatacatttcaacattttgaagaatatatttgactgttttgattttgcagtttcaattgctttatgatttctactcggttatttattgctttcctannaatttttgntnatccctttattttaatttcccttcttgtcatttcctaaattttattctgtgtatcttactttattattttttagaatttaatatttgttgcttctattctcaatgaatatactcaatggatgaaataattaataaatcattacaaacatttgaacgttaaataattaaatagtcttgaccattttaatattttttctaattgtaacattttctttagtattactaggttatgattatcattacacgtttgggttaaatatgtttttgaacttttggcgactggcgagtcacttgttttataaacttaacttatactaatcatttaacaggctacatgtactttgctataggtgagtcatgtaactgtttaattagctagtgtgaatgtgtgatcgacgaaaaaaaaaaattagctagtgtgaccatattacttatacaacaacaaactaaaaacttgtcaaactaaaaaaagaaagtaatatatctgtttgt

SEQ ID NO: 44438 - DNA, 596 bp, Arabidopsis thaliana landsberg
tctttgggtagaataaatgcaggtttaaagagcacaacttttggtgtacgaacaagttgtgtgcattggacatcaaaataagttggtaactacgaaatagccgttgcgactcttttgtttgtttctctgtatttctctcactctttattacatttggtcctttttcttacttttatgtgattttatcttaatttatctattaatacgttgattcgtttttcttataatggttactcatactaatagtaagtagtaacttacaaatactatataaaagaaaagaaacatggcttgtttttgtcttaatagatttataaaatatttcacatcatttctaacaaattttcataaatcattatttaatgaatattaaagattttaaaatatgattttgtttccatcatttttatatttttagaatattcaggaattatcagatagcggaatttgtttgctgtgaaatatgtcgagtattttggcatcttggtaagttggacaagtgatttaaccgttttggacgaacctaagtcgatccaactcggcctacaaagttttgttaaatctcttgacatgtttatacttatgcttatatcact

SEQ ID NO: 44439 - DNA, 1192 bp, Arabidopsis thaliana landsberg
tttaggttggggaagcctgccaatattcaagagtttatgacgtcttaatcatctcgaaacaatatgtcttaaatttcacattgatatatcttgatgcttgagtaaatattattttgaaacaatttttaatagtttttacttaatcaatagataaaactaatttaaataaatttcattttatatagaaacaaatttaaatttaaaattaatctactgaaaataaaaataattttttttgtgcaacaaataatcagaccggaagtagcagtttaaaccaaaaaatatatatcgaaaacacactatgatagatcaattgaaatattgtaataaatattgaaaatcttcaagatcatctatattcatctatgtggttgttggttaatcacgccaatttaattagagataagattttaaaataacttaccaaaggaaaaagaagtgaaaaaagaagtagatgtgtggcattactaaaagatgatggactcaaaaaatgtcaccatttttttactacgagctctttgatgtgagagtggctggctcatccgaggtcactctgaaagtatctactgtaaaaggtgattgttgttatctactttaagtaattctcgtaattcttccatttgttatgtatcacttcacccgcaacaaaattagatagaagacatataagttctggtgcggccctaacgaaagagcttttggtattatcaactactgccacatagtatatgatgcttaaagatgagtaaaaggctaatttcaatatggataatttcgaaagtgctatttataccttaattttgatagagtacagattttaacccgaactaaatagtttttcaactttcttacctagatccgctactgtgtacatgtggcatcagactctagaaaaactatttacatggcatgtgagtcatcatgattgaccaacactaatatggtcaatgttgattttgacacaaattttatagttcatatatatagtttatttgaaaaaaatgtttagccagtttgaaatttacactctatcaaatttgaggcataaaatagcacttcgaaattggcgcttttatccgcttaaatatacgtacgtataatattgtggccaaaatttcaatcgcctaaatttaaaattgtaaaaaatctatcctaaaactaataaactcatacttaaatcatgcaaatatta

SEQ ID NO: 44440 - DNA, 265 bp, Arabidopsis thaliana landsberg
caactcagatacacatacacacaaaagttgttttgttatgttatcttgtaaaagaatgagtcgaaaaaagaagagagggaacattgctctctccagagacttctatgagccatactacgcattaagaaactttattctttactgagctgaaagcattgattgtgaagcttgagtggagcgtgctgcgttactactgtcaaaaacattaaagaactcgttacaggttgacagtattggataactgctggcgagacgacacgtatct

SEQ ID NO: 44441 - DNA, 712 bp, Arabidopsis thaliana landsberg
ccacgtcagttttacgctaagcgtaataaaagtcgccgtcaccgttaattgacgtctccatccaacgccgctcttcttctccgctctcaccgtatatatttttttcctttggtggcgcaatttttactaaacttacataaaaaaaaggaagattaaataaaaaaagagaaagaaatataagagcttcctcaatcgatcttccatttttcttcttcttcattgtgaaatttgagtccaatgactgtcactggtcgaattttccacctgtagtcaatttgaagaaatttaaccagtttgttctactggaaaaatttctggtttcacacttgtgttgactctttcactggaaaaaaagaaacgaaaaaactccgaagagtcttctctgggcagtgtaagtaagctaatgcattaacattttttggcattgagaagtagatcgattcttcaattttgtgagtttccgttcacgatttcgctttctttcatgtgaatttcgtgaaagagagaaaaagtaattctcatctttcttgctacattctctttttgccgttttcactagaatttcgcttttgtagccttcgattcgtttgatttcgtttcagttgctatgttttagggatttcattatagaactgagatttgattgttgaatgtgaatgaaaattttgataaattttcttctgaaatttaggttaaaaagtaaggagcaatg

SEQ ID NO: 44442 - DNA, 303 bp, Arabidopsis thaliana landsberg
acctgggcagcgatttcaacccgtggttttatatccttggacccgggcgacgattgctcgtgctggtcgtcgattactcggaccacctagattcttttagacgatttccacttctggaccacataacctctgacccgggaccagaatttttggacctggacagacgattgcaacccatggtcgacaaatgcttccacccgttcgacaattgctttggctgttcggccattcctcggacctgatagattctaatcgacgatttgcactcctgctggacaaattctttgacccggtagagttttt

SEQ ID NO: 44443 - DNA, 606 bp, Arabidopsis thaliana landsberg
tattggagtcatttctcatgaaacacgcatggtccttgctgtgcattgcctgccttgcagccactggctgttttggcaacaaagacgcattcactacgggcagcagtggtggaggtactgttcaagctgcagccgcagacggtgcacttattccgcccacaccacaaggcacatgcggaccaggctcacaccctgaaaccggcatgcaggggcgagtgtcacaggccgaccatgattctggcgcggcagcactggggttcacttgcaacacccagttggtgggctctctggtcaccacgaacgccattggcacagtgggtggattcaaagtggagcgctacgtggacaccagcggacatgactgcgcctactacgacagcactttgctttaccccactaatttactcgacaagcagcagggtgtggcagtgattgacatgagcgaccccacccaccctgtcaaaaccgattcattggtgaccccggcgatgttgtcgccgcatgaaagcctggtggtcagccagcaaggtggtgtgttggccgccgtgttgagcaacccggcttttggcccaggggtggtggacgtgtacgacatctcgaaagact

SEQ ID NO: 44444 - DNA, 934 bp, Arabidopsis thaliana landsberg
  unsure (1)..(934): unsure at all n locations
tttttttgaaatcggaaatttagacacttacatttttcaaagaacaattagtttaattaccaatagtttgaaaatgatattaagctttttggttaatatctagaatataatatattctttttccagttttattatggttattgtttgacaagtgtttgtaaacttcttaattaataataatcttttatattttaaaaatttatatattaagaggagatgggtaacatagttgttgagggaagaattgggcttcctccaattcaggttttaattggaataaactcaaggaatggacaatgtccaataataattaaggtaattgggtctattttcaacttaaaattcgtttggaagaaaacctaatcgatgagttagcgtctataaaaagccgaaaccatgtcaataggtcggaaggtagatccaccaatttactttgacatatgtcctatcttggttcttataaatacaaaatagcaagtcttgtcacaagatctacactttatgttgacatagagagagtgcactattagctcgtcctcaaacccatcgagcttgtccaatattagtcagctcgttttatatgtcgtttggtccgcctcttgttcatactagtcgtttcaacaggacaacccttataattcgttcacttctcctaaattcggactcgtttgattaaagaaagattcttcttacttttttagggatttgtattttcttactaatgtgttttgtgcatcatccataatttcgcatattaatttatgtagtatgacatataaattaatgttaataggtgatagtatatgttatgaatctaattttgtgctagagagatacatagcatacaatatatatgtaactcataatatataactttcattcctttatgtaaactgaggaatagaaatcatccatacattngctattaaattat

SEQ ID NO: 44445 - DNA, 840 bp, Arabidopsis thaliana landsberg
tatactcaagctaatataagataatcaattcaataatcatatttcatggatgaaatggctaagccatataacattcctaaatatatagcctttaggtatgtaactatttagaaaactataattgtgtaaaccataattatcaaaggtttcaacatttaagcacatgtgtacatataaatgaaacaatgtttccaaaaatctagatgccctaaccaatgtttctttctttttattacactgaagcacggctctatacacgttacatatatcgctcattcaattactaaatgaatacgggctcatgtagttaaataaatatgtatcacctgatcgagatatgcatctatttttgtttttgttttttggatataaacgcatctggttaaatagatatatatcacctgattcatcgattatgttatgattgttttttcgtatctggttaaataaaagtatagatattcattggttatgcaattatcttataattgttttttattttataatgttaaatttattatgaccatgacataattggtgatagtgatgtcaccattttaccatttaaatttaaatccagtatgttatatattggacaaaaattgttacttaataaaagaatattatttacattggatgctgttgtttggcataatttaataattgttaaagccgaattttttttaaaaaatctaacgtatataagaaagataaaatatatattccaaaagaagtgataaagataatgaaggtgagaaaatgaccgaatcttcccggcctttattctgcatattcatactatataaaactttttttgaacttcaaaatttttgtagatta

SEQ ID NO: 44446 - DNA, 611 bp, Arabidopsis thaliana landsberg
ctaagcctatgtttctctttatagcttaaagtgtgtgatgcaagtaaaaacaacaaagagagattttagagaagtcttttccacaaaagaaatgaaataatggcactaatatttggatatgtaattgctgaggagacgacactaaataatctgtgagtattttcttaaaatacaccaatcgagaaaaatctgttttgttttccaagtaaacgtgatctgataggagtaacaaccaatcagagaaaaatcttaaatcaaaaattcggttccattattttataattaaattagaaggtaatagtcaaaagaacatagaaacagtccttgacacatgttgaatccaatgaagaaatacgtcttcacacaaagccttaaaaccaaaactcatagttagtcgaacaactattcaaagccccgccatagacatgaatgtgacgtagagtaagagacaggaatattaagacacgtaatttgaagtttctacgaaaactccaaatgatgtaatagtctagatttaaaagtgttgctaaattaacttattcgggtgaatgaatgtccaaacatgattttggaatcgttcataagatatgctttggggacattcacaaaca

SEQ ID NO: 44447 - DNA, 908 bp, Arabidopsis thaliana landsberg
ttagattatcgatcgaacatctaaattttgtcaacatgttaatgaatatctaaggaacgctatcggctatcgcttttttcaacataagactaatttgagagatgttaatccaccgcatgttgagtggtgtaagagagaaagagccgccactaggctacttgtctcccaacaacaatatatatcctgaattatgaattatgcaattatacttttctggtcattcaattattattacttttgttttgttcaaaatctttagtgtactactttcaaatttcaacatccttctttatttatttcaacttttttctcaacattatcgtttcttttttgctgtcgataacaacaacttgttgagtgtcttgcaaagattagccttttatgattcctcgtttgattagattttaaggctttccgttaacctttaccagttaacaaagtgtggagtgcctagcaaagacaattgtgctttgttgcgcggcaacgtcagcaacgattttagacttctacttctgatgagagatacagtgcgttgccatgttgaaaaagaaattaaaaggaaaacataacacattatacgagaaagaagtttaaaaaaaaaaaaaactggttgaaactaatcgaatatttgaagcattttttatatctactagaaagtaagttttttaatggctaaaaacgaataatcctattcattattttaaatcaaacactaataagatgttcttaaacatttcaactagttaaccccattgttttccctctatatatatacccaccaaggcacaaaccaacccactcactcacattatttaaaacacatgttttactacttgtctacatatatctatataatcatcgtagaaatcgatacttgaccagcccaaaatcacactcgagtcggatat

SEQ ID NO: 44448 - DNA, 835 bp, Arabidopsis thaliana landsberg
taacgaaaaacacgttttctccaaatgaaaaaaacgaaatttacactgaaatgttattttttgtaaaaaaaaagatgtacttattcttttagtacattaataaattagaataaaaattttaattgattaaatcgctagttgctattaatcagaagggctgagctacttctaatgcttttttacagagagatgctttcttcttctttctctcgaactttctctctctaaatattttgtttccttttctctctctctctctctctatttactttcgttctctctattttttttgtttggtttagcttatttgtgaagtgttaaatcttattcagtttctggggaaattaggtggggaggtgaaaaagggggaaatataattgaaattgggttctctctgctgtgcaataataatttctgagaggattgtgaagaagcgctcttatgtaagaagatatctcattattagttatttacatgagaatctgacattcttaacaactgtctgtggggttagttttgtccaaagaactatacagagatgtctcagaccaactgggaagctgataaaatgtgagttcttcttttttatgggttttgattcttgtaattgttctccttcctactaaaggtgttaacttttttgttgggttttagattctgagtgtttttaagtgatttctagggttcggattttataaacgcattgtttttttcgttccccggctacagtttgattttagggtttgtgttcagagttaagtttcaatattttgttgcttctacttgatctggattctgctgattttgtgggtttgcttattactaacttatcgca

SEQ ID NO: 44449 - DNA, 558 bp, Arabidopsis thaliana landsberg
  unsure (1)..(558): unsure at all n locations
ccatgacatacccctaatcagtttgttaatgatgttttattggtatcttaacatgtgtaccgagtaagccaattttttgttagtcgtgaatgtggagaatcttcaagtcagacgtaacagcacaaaaaaaatgaagcctagtgactaagtcacaaatatacttaattaacttggtagattgtcagtatcagattttatgagaaaactaatgtcgattttttttgtatttactgtaatacaatcatttggttgattaactgagtcaaggttgtttatgtatcaaatcactttaaatttgaggaatatcaaataatatgatgagcatgatatatgtatatttatgctatatagaatacttatgtatatatatatatatatatatagncatacaaaaatgatcaaatatagtgaaaagaggaggatcgttaagaaaaaaagagagcgagagagagaggaggaagttacaaagaaaatgaggagtttgaactcaaacagaggagagaaagtaggaatatgttttgagaaataaaaaggagagagttgtcaatgtccatttaa

SEQ ID NO: 44450 - DNA, 556 bp, Arabidopsis thaliana landsberg
  unsure (1)..(556): unsure at all n locations
gaactggagcccgccacgtgctgacgtcgcgcctcggaacaccgatggacatcgtttacgctaccgccttcctcgcctccgcagaagccggattcatcaccggtcaggtgctcgccgtcgatggcggcggcacggtcggcctgatcacggcgatgcctgaataggcaggggctgggtgcggctaagggatcgggatgttgtagacccgggcggcgttgccgctgaggatcttgcggcgctcttccatggtcagatccgccattccgctgcgcgcctggtcgagcggctttggaaacaggcaggtggggtgcgggaagtcgctctcgaacatcacattgtcgacgccgacacnnnnnnnnnnnnnnnnnnnnnnnnnnnnnnnnnaccagaagcaggcgaagacgttccgccggaaatattcctttggggtcagcgacatcttcgtgaccgcccgcgcgcccgactcggtcagcgcgttattgaccgcctcgagcacgaacggaatacattcgatcccgctctgcaccgagacgaacttgagcttccggaagcgctc

SEQ ID NO: 44451 - DNA, 814 bp, Arabidopsis thaliana landsberg
ataaaaaccgaaatcaaacaaagtaccgatctttgacctgcaaactatgatcttcaaagtatcatccactgatatagcagatttcccctaaaccccaataaaagaacatcataaacattcaagtacactaaaccaaagtaagacagtaattgcaaatgtaataactttctgacatgacattactctctgctgtaatgaaagtgacagtactcaaatactaacctgtccggttactctatcgagctcattgattagatgaaccctagtttgagattcttgccataaactatctcaaaaaaatgtagagacgagaccaattaacaaacaaaacaaataagtaattgttagatatggataaatgtagatttaagaactaaccggcctgctacatagaaggaagcaaaagttgcaaacataaagagcaaaagggttgatattctcgagctcgataatcttatactcgaccctttcctcgccattgaaatagatccaaaatcagatctcttagtcaaagcaatcagacgcaaatgcctcttcactgtcgaaattcgatcaaatttcactaattcaaatctccagaaatcggattttctggatccaatgattcgtcgtcactcaaaataaaaccgattaggaatgtatcattggatctgcaattctccggtgatgattcaccagcggaacacaaacggcgagatcactcacttcgctgagaaaaattggaatctggattgagaaataaggagagacaagagaagagagtgccgttgagatttatgatttttatcggattagtttttgggatgtgaatttt

SEQ ID NO: 44452 - DNA, 879 bp, Arabidopsis thaliana landsberg
agagaaaacgaaagtcttttaagatgtatacaaacaacagagcttcataaaacaaaatgacggacaatccaggagcttctctcgtcatggctctcggagacatgttcatcagagaaggaagatctgacacgggtcggggacatatcccttaaggaatcaaccaaagcctggatctttccggaaatatccgtaatcttcatgtcagtgatctgagagaggtaagagtaacacagaagctataatctattttctcagttattgttgcacaaactactctttgggctcaaatatacggttttggtagcagaatataattcaaagccaatttatagacgatggcatgcgcatagagatgattccataagtatattggtcatataatgttaaaaatatagaaaataaattcataatttggacttattgatacctaaaacatattttagtaaatgagtaaattgaaacctctcatttctttgactatatatatagagtttaccaatgcacatggagtttccaattgtgttactgttaaaatgttcatgcatgaggaaattgacccatttaagatgatattctcctcttttttggtatcaatacttttgacttttatttatatagacacatatttattagattatgtatcacaagattttttctttctggattctgcaaatgagtttgactaacatttcataattaaattcatctttcaagaaaaaaacaaatcatacttattttttctctttacaaataataaataaattatgggaatataaaaaaaaatattgatatgggccttattgatactcagagcccaagcccaatttggataaacaaaaattaaaataaagcgctaaatatgcaaatgattaaaaacga

SEQ ID NO: 44453 - DNA, 559 bp, Arabidopsis thaliana landsberg
  unsure (1)..(559): unsure at all n locations
gagtgtggttccacacatttctagtaaaacataggttttgttgcacgatagttgtcattaagtggtcttgcttttaccattggcttgaaagcgaagattaattgtctcacataaatacacggaagtctttatcattcggttaaccattgttagatttatcaataaagatttagagtttagtggatcataaatattgtttgacaaaaaaaaaaaaaataaaaaaaaaaaaaaaaaaaaaaggtggatcataaatattgtgaaaggtatgagtgaactacaactttggatttcgttaaacatacaaaggacttaaatgacatagttaataatatggatgtgaagtttagtggtgtgataaatattatgggagatgatggactaataattaatccataaaaattcgcacaacaagacagacgttgaacatcgttttgaacaacctaataacctaattaacgtccaaaaagttgtagatgtagttcctttacacagtattcaaagacctaacctttttgaatccaaggagaacaagtatttgtgtactgttgctntgattttt

SEQ ID NO: 44454 - DNA, 948 bp, Arabidopsis thaliana landsberg
ttagttaagatttttacaatgatttattatttacatttgcgataattttggcttgtaccttttaaaaaagttataaagtattataagaacattctaaccttacttcaaatttttttatttaaatgttattctatcaaatatgtgaaacttcagttaataaataactaacatacgtttaagaaataattcactaaagtttgtaaaaataatgtaaaatctctaattaattttctggaaaatttctaaattcagtattttgtgtttatttgttgcttataattatgctaactacgagttagatatgggaacccgtatttatagggaatccaacaaaactaatgcaaaaaagtatttttgtttacgattttgctcatcaactaatttttgacgtatttatcacacacaattacatatttttcccttttaactctcaactgaaactacctaactgtgtattatgaattctatctgataaattttcaaagaccggtgacctacatcttcctactttgttcgtttcttactgtctaatatttatttggtaatctaatatcaattgacaaataccaacatcgactttcaacaattgaaggtctatgataactttttctcaatatgttcaactaattttatcgacttacgttgctgtgacacaaataatttctttagatgttgtatcatggagaaaaacaaaagaacgagaccaagaagaaaagtaaggtacatattatttctttgttcagaagaaagcaaaacaaggacaatggagatattacttaacacaaatacataaaaaggtccattttagtggttggtgaaaatgcgattgaaaggtataagaagatggaaagtaatccactgtggacaaactcagagtagggaggagtcaaatcaactgatccgacggcagatagtgattccatcaccaacagggagcatacagatctc

SEQ ID NO: 44455 - DNA, 498 bp, Arabidopsis thaliana landsberg
aaattaaaagtgttcaaatatgtggatattctgtgtgatgtatgattacaatctccaaattcaaaagttcaaaggtaatttgacaaaattaaaggcctgagattaacatttaaacctaatatcttacatctataagtgcaagtgagagcattaaattactttataaaaaatagaaaaaaagctatgcatattttaaagcattagataactgtataaacatatataatttgaagaggacatatggctgctgatcccaaaactctacttcttacactgaggactatttcaatattttgaataagatatggtatatcaccccctacacaaaaatgaagtcacatcaaaggttattgagcagatgtttgtaattgttgacaaacaaaatgattaacactaaataattaagccaagttgtcaataataatacgaaataattgaattaaaaaagctactttggcgaacagtattcaagcaacaaaatccttcattacgcatttg

SEQ ID NO: 44456 - DNA, 762 bp, Arabidopsis thaliana landsberg
ctgaatataaatgaccagactaaaactggctcactcgcaagttccagatttaagtaccaaaagacatcaaaagttctagagtagatattatagagagtagtcatcatgctgcttcttcttctcaagcagctgcactgtgtttggcctttgtgtgagactgcaatcccatttccgaagtaaaggttctggtgcacgacttgcacccaaacgctcctgcagacttcggtgtctgctgctgcttcgatgtctctccagtgctgcctccaccagaattcttacccgcctgttttgagggatgaggagttgcaacatggacatgcggtttcttcgaatctgctttgtccgaatgttttttaattaaacaaatcaatcttcctttctatcgttaaaataagtattcaatggggagattggtaaaaaggatttaatcacctgttttctgaggagttacaaacttagccttcttgttggacgcagggttcttggaggagttgggttctgcagacctcttcttgggttcttcaggcttttattaaccacgaaaacttagaatcagattcgagtttgaccacagaagcagagaaattgctcccaaaggaagatcagatagaacaaatataggtttcccatcaacaagcacataaaagagactgtcatgttaccttctttggggtttcctcttctgaggagtcatcttcttcgtcgtctgatgagtcatcttcctcactgtcagattcagcagttaccttctcttcctgaaac

SEQ ID NO: 44457 - DNA, 677 bp, Arabidopsis thaliana landsberg
ctccccttctcctccctttgattctctctttatcttttctttttatcttcaattattaatgtttttaatattttttaaccatatatataaacataaaattagttatttatctgaaaagaacattctcaatacatcattactcattttattcggatattttggtctcatgccttcattctcaagtttcgcatacatccataaactctataaaatgttgccaagaaaataaacacaatgtgtataattgtactcaatctttcaaatcgaattaagataaaatacaacttcagtcaacaaaatttttttagtcaaaatgtacgtgtgtaattataatgttggctactcaatttaaaatcaaattaagttggtgaaacaaaaaaaaagtggttatgggccgaaatgattaccggccttgaatatgagtccactggacgtaattttgatattaagtatttgggtctcttatctcttaaatgagtcgcatatgggccagttgttgagcattatccatggaaatcaaaaagttgcatggaaacagagactttaacaaaaaaaagcttcttccggagattcatacacataaatctctatcttcatatctagtgtgaatccagctattggaaatctttggatgtttgatcaagtgttgaatttctctgtttggatgttgacatctt

SEQ ID NO: 44458 - DNA, 1269 bp, Arabidopsis thaliana landsberg
gccacaattttatttatagtaattgaggccacaaacatgtgtttgaccctcttatgcttatgaacaggtctgtgttttagataatagatattttctgtgtgatacagctcttttgttgactttaataacataataagtttctcgttagaagtttttatcaaattcactgttaattaattaattaattaatcggaagtctaaactatgttacgaattagtcaatagggaaatgacttagtttgcagtgataatcgaacttacatgcactaaaattagaggaatgcaattcttactttgtttggttagggtctaccgtgttactattatattgttgtactatcttgcaagggttgcaattgtaacctccatttctttttttttggggttaattttgtttctttcacgtttgtactataactacgttgcttgaattatcaggcgatgcactcttctccacaaacaaatcaccgcgtcgaacgcagccataaacatgtccaatggtggacgaagaagcaattctcacaaccgcacgtgcttacttccattatcgggcttttcacattggacgtggccgagtggcccatatatgaagattctgagctattgctgcagaatttgacatctttagcttaatttagtttgttttatttgctttgctttttgttaatgacttcatgcttattagctatgatttgtttactttttgaattagttcattaggatttgtttcttgaaaccaaacatcatcatcatagcttagatcgttttatcataccaaacgaaaaatacttctaattctaatcatataatacttagcatgctatatatcaatttcgtagtacaccatcaagatttataatcctaatgtataacacgataaagttgatattaaagacaattgtcaaagctctctaacccatgaaaatatttggacaaagaaataagagaggatttggtgtcttgcaagtttcacagctcctatcttaacttatcactagcttgcttgatcctaaataggatttaaaggcatacagctttcagttataaaactggttcaagctgaagtagttttcattaaactggcctgccccatttctatgcagagcggtcgggccttcaactgcgggtgggtccggctgccaatagccggacactgaactgagttgagccgcagaccggttagctatgggttggaggttgcttgagggatggtgatcaagggtaaaacgtcttggttggtcagaggaagaaacccatgttgttgaattt

SEQ ID NO: 44459 - DNA, 433 bp, Arabidopsis thaliana landsberg
agtatgtgtatatcaattattggttaaattttattttataattaaaaatttaataataaaactaatatttattaaaatactttctttttttaaaaaactaagaggaataatatcgtgttcattgttaatcatatagtaaatttattttgatttttcccttagaataatatcattatttgtactttgtagtaggaaaaagtaacaaaatatttcaataatgttgtcatcaaaaactgatttattttttttaaaattataatattcggctattgttttttagtttatttatttatttgaccttttgttttttttctccgattatctgaaataattgaggttgggtaacagaacaaaacgcgcaaatcaaaggactaggtcaaccgaataattgtttttgcctgccacatggcgggttaattttcacctcactact

SEQ ID NO: 44460 - DNA, 679 bp, Arabidopsis thaliana landsberg
aaaaccatcaagctagagagagacaaaagcgccgcaaaatatccaccgtcgattttgatcatcgtcaagacacagatcgttttaggcctcaccgagacaaccttaacctacgtcgtcatcaaccaccacctataggtgaattattaagatctctttctagattgtttcttacccacattttacagtatattaattaaatatatactaatgatgtgttatggttttctttgtagaaatttttgaagtttgtaacgtagaagagaaagtgttagagacgttgcaactcttcccgttatcgaaagttgagagagtgagagcaaacgttactgctgcgagccacaaccaatacacacgagagcaagcatatacgacggcgttttctacattctcaacatgtggggctgagatggaacattcgccgttggatctccgattaagctgtctatgaatggatttgatattaacgtacgactctagtggatgctaagaaataaagacatgatgatcacatttatttagatctagctagattttgacaaatttcccttgtaacaatatcaacctaataatatcgttgctacatttttttccttcgcttcttctcttcacttattggctgttctgttctgtggcctacccgtgaaaggagtacttacgatttagggttttaacattacca

SEQ ID NO: 44461 - DNA, 343 bp, Arabidopsis thaliana landsberg
cacctaaattgctcaatcggatcagcagtatgtattgccagttatatggagatggcatacaaagcaatgtgaaaaatcctgaaatccacacgtttatgaaatagtttttagaatcgaatgaattgtttgtagggtacgtaaacacacaagtattgatagttgtaaaaacaacaaaaaaccactcgagtaaatactagccttcggttcctaatttcccatgaacatatctaaggaccgaaaatatgaattcttggaattcatattccatttagcattgtatgtttacaggtattcgaattcgaatccaacgaacagaacttttcactcttctgcggattggaaa

SEQ ID NO: 44462 - DNA, 756 bp, Arabidopsis thaliana landsberg
cgggagactcgcctacacaatacaaaaatggcatgcgacaaacgaagtataatttttaagaagtaaaagatttgaagagaaataggaagaacctcagtgatccataaagatggaaaagatagtccaataacaatgccaaaagctatagcaaacaatgctgttgtaaaaagcttcatgctatcatctgatgatctcctactactaattgggctgttataacaacaatcatcaccaatctgattttagagagaacaataagagaaacgagacaaagggtcttttttacctgcgtgacaagattcccatagttaggtttttattacaacttttgattataagctccaattgtcatcaacaccatctcactcctgtttatcgataaaacaaactgtaattaatttcttgagctatacgatcaaaacaaagcacgaatgatctgattaaaagactcaatttgctttgtcacctagattaacaacaatgctacattcaacgtgtgattaaccataaattttctagacgacaaaacacgaaggtgatgaaaagaaaacttggatttgtaaaaatgacattacaagtagaacaccacataaatttgagacgagaaacgcttttcgatcaaattagtgataagttttttggaaatccttattccttcggcgatcttcagttttcaagagcagccctgtggaactgaaagctgtttcgtaagctcaatttttcaataaaaatgattttgtttgagaaattttataa

SEQ ID NO: 44463 - DNA, 848 bp, Arabidopsis thaliana landsberg
  unsure (1)..(848): unsure at all n locations
acacctactgatgaactgtgcgctctgcatgattctgtagttgagctcgcatctttgcataagaaacactccacaaaacatctccgaactttgatatacattggattttaaaatcttttctctcaatataaaccagctcaggaaaatcttccgatttgttaaaccccgatccaaatagtaacggagcttctttagacaaaacaatagccttctctttatcattttcaacaacagtattagaatacagctcgtccattctatacctcttaactaacttcccagtcttccaatccaagagaaacacagatgtgtctttcttacctaaaacaatcctatccgttgatgtatatggcaacgtaccaataaactccgaagcatccactatctaaaacagagaaaaagctacacacttcaaatggataaagaagcacttcaatatcttaaagactcatatgtgagagacagtgttacctcattaacgcgttttccttttcgtacagaggaattgtaaagacgccaatctttatcacaatccatgtaaaagtcatcaccaagcaccgaggcacgttcttcatcagtagtgtaatgataatgaggagcttggtaagacgaatatataggctcattggtgtggaatgtccaatctagcttctgagaagacatatccaccaaagatattgatccatctaccgtagaaaccaatacataaccagattctctgtagatatcacaatcattattagcttgttaaaaactctgacttgtataaaggtgccaactntgagaccaaatcaaatagatgttgacatttccgaatcaaatcaaaccccgatataaagaaagcttcc

SEQ ID NO: 44464 - DNA, 687 bp, Arabidopsis thaliana landsberg
aattctgatacgtagaaaaaaaaaacgaaataagtcttgtttaggattttttccttgtttgtggaatgttgttgtgtaccaaaatttgatttattcttttcatatttgcatatattttaaaatagaagggaatgttcttattttgtccaacagaaaactatttagatatattagtcataagagatgaggcgaaacaaattattagcttcatcacctctccaaaggctaactaatgactctctccacgtctagaaaaaccctcttcttcatttggccctccactcacatgcaaacacatataaatattaatgaagacacactaacattttaattgcaagacaagtagacaaccctaacaaagttttgttgtggacttggtctctcatcttctccgagagagaaagagagagagagacagagatcaacaaaatttcggctcatccaaggctgtgtattatcaacataagccgcacacaaacgaaatgggattaatggatacaagatgggaaaccatagttccatttattgttatggcgttgatggaggcatgtaccattgcactcaccatcttggctaagaccgcactgaccggtggcatgagccctttcgtgttcatcgtctacaccaacgctcttggctctctccttgtcctcccttactctttcggctacaatagacatgtaggta

SEQ ID NO: 44465 - DNA, 474 bp, Arabidopsis thaliana landsberg
gacaagttcttgaaaagtttaggttatttaaacattgttccgttgaaatatggatccatttattttcatgcgtcttggtaagatgtatcatattatggatatggctttgagcctttgactttattcctactttaaagttacaacttaaatcccatttaaccaaaaaaaaagaaaacaagaactcccatatcctttgaaattcaagaaaaattaatgatacagttggtatatatcattaacaataattacaacaccctaaaatgattataatttgcgttatcttttacgatctcaaatcttggagtcgagattgtggtaatggggattgggatgcacgtggtgatacgtaatgggtgtagacagaaaatcacaagaaagcgaaagtggtaactattgaaacacaaagtgacaaatcaaataatagtcgcgtgctttcttcacgggtcacctcatctattgttctccatcaagtag

SEQ ID NO: 44466 - DNA, 137 bp, Arabidopsis thaliana landsberg
aaaaaaaaaaaaaaaaaaaaaaaaaaataaaaaaaaaaaataaaaaaaaaaaaaaaaaaaaaaaaaaaaaaaaaaaaaaaaaaaaaaaaaaaaaaaaaaaaaaaaataaaagaaagaaaaaaaagaaaaaagaaaaa

SEQ ID NO: 44467 - DNA, 270 bp, Arabidopsis thaliana landsberg
agatagttattgctgattagaagattactgctagcaacgtaaacctaaactgtacaccatccagaccaaagacctgaaaagttaccgcttaaacgctgaacagcctaaaccataaaccttaaaacactgaagcctaactcttgaagcatagacactaaacccttacacttgatcgctgaacagtagaccatagagactagactctaaagaccttaattgtactttaggcttacgacctccgctggtggtcggaggtctaatgctcgatga

SEQ ID NO: 44468 - DNA, 817 bp, Arabidopsis thaliana landsberg
cctgcatccgtaacaagttgcaatttttaggcgacaaagtggaagaaaacagaagctttgaaatatgatggttttctacaaagttaagctcattctaccaaattttttttataatgggtaagagaaaacagcttgagatatcaagaaaactcggatgaaacagattatgcttaaacagagacatctcccttgaaacagatgcagagtcttgtatgctaaatcaaagactatgcaactaaaatagccacttgtgtaatccttttggggtacattttgaactagtaaaataatgttcacaaagaattcttactaggtcaaatgataagcacacatcaacctatacggactaatataaaaagacctataaaacgctgaatctttatcataatctagtattgaagaaactaatagtctaaagagagaagaagcaagaaaaaaaagggagttgaaagagtaccttggggaacacttggtcgacaacttccaaagcacgagaagagttccatccataatatcctcgcagaatgatgtcggcctatacacataacatccaaatggagaaataacattatggttcgcataatacacgcttacaatcataaaactaaagacgaatttcaatgaacaaatgtatagttaggggaaataatacaaagtaattagaataagcgatctacttgtataatcgacgctctagtaatctaaccaaggatgaatatcgaatccagaaaccacagagagagagagaatgatgaatctgaccaaaccttacgagcgtagaccttcgaaagaatggcgcccccaccacccatgccaa

SEQ ID NO: 44469 - DNA, 1107 bp, Arabidopsis thaliana landsberg
taacagctaccacacgaactacagaacaaacccgtgagttggcaaaacaaacgaagtggtaaaatcaaaatcgttcttctgtttagactgtaaattcaaatgttttagtgactttttttttttttttggtattcatagtaaaccacttcggtatttgtatgtttagtgatcatgaaatcagtttttaagaaaatcgaaagaaaaatattgaaggttccttcagtgatcgaactacttgaccaacccatgtttaatttaatgtatatatccaattcaatatataatatgtatctactctagccaaaggtttggtaattagctttcggtttcacatgatcttggttctactaaagtgttatgtatagagactagagagaaacggttgattattcagtcagatagtatattatgaactatatcgaccaacttctgttttttaactccaaaaacatttgtgtattttatgctaaacaaaataaataattaaacagtctcatttcctttttttttttttttttgggtaagaactataatctaaagttcaagcacgcttaaaaccaaaagttctctctttcttagaattttttttttttgaatttttaaagctaaattaaatatgcttattaagaaattttcacaaaatattattaatcatcaaagatcataattaaactctatcacagaaacaataacagacgaaatatctgtgaggaaaatattacaagctttcttgccagatcttaacccaaataaatttcatcttgtgggttttcttttgttagccgagtcaaattttatttgcccgtaaaaaacacccaagaagagcttaaaaacagaacaaaaaaaaacagtgaaaatataggaaagacattgaagagtcatgaaactaaaggaaagagagaggatgtttaagaaaagaaaaaaaaagagaagcttacgtctaaaaatactaattcatctttaaccatctcgatctcagatctcctttagcttacggcttcttcttcctcatcttcttagttggattattaaaactgttgagatctcatccgaccatggaagtcagatcttgaaagaagaatttatcacaaggaatggtgagaccca

SEQ ID NO: 44470 - DNA, 488 bp, Arabidopsis thaliana landsberg
tacaacatattttgaccagccaaaagcctaattgactgttaaattaaatacatgtgataccatgataatacattaaaaaacattaattatcaatcaaggcactatataattaacaaaagttttgactttaaacttaatacgtgtcccctatcatatggtttaaaatttaaatcaatactagatgattccgttaatctatatcaaatatgattccgttaatctatatcaaatatgattcaaccttttttaaggctgttatttatttgcagatttgcatgatgtttcatatgcttttcgccgccctccctatctacattatctgattgggcaaatacattacttcaatgggcctatcttaggcccaataatagaactgggcatggcataataatgggcctactgtctgatttgcgcgtagagaattaaaaaatcggtatgtgtcttgtttttttttctaatttttacttaacacaaacatctatatatct

SEQ ID NO: 44471 - DNA, 712 bp, Arabidopsis thaliana landsberg
  unsure (1)..(712): unsure at all n locations
cttgtttttatttattttaatttttttcttctttgtttttttttctcaagaatagttggaatgggtttgcatatgtaacaattaggttctatttaggcatgagtttaaaggctatggaccgatttatccaaacataaatacttgtgttgtgacttgtgtagtacagtactgatagtctgatactccaataactgcagtttttagatgagacaattttttattgtaaatcgcaaccgcaaaacaagaatgaaattcgttgttctatttggaattttatttttaatttgcactgaaaattgaattttatatgatgtctaataaacacactaaagtgttatgtttgttttctctgaaaacaaaaaataaacacaatcaaactagcaaaccctaaacgaaaaatatggctcatacgacgttttggttcttaatttaaaatgcatgatcaccctccttgactaatagtaattcgagacatagctgaagcagtgatttctgacttgacattctgatattacctaaaagaaaaatagaaaagaagaaaaaatcatttcatacatgatacatccttctctctcggtgtcacgtacggctttttgtcgctgttctttatcatatcacattatcactagaccgacaatttatcgaaataatcactagaccaaagttctatattccccaatcatcngttttcttttcccaatcgtcgttaatc

SEQ ID NO: 44472 - DNA, 941 bp, Arabidopsis thaliana landsberg
cgatcgaaacaaatcagtaagtttcttgtaagcaatctcagactcagagtcctcgaggatctcagtgacccatttccataaaggtgcaatactcggtgttgccacttcaatcacaaccttagctgctaccacaagtgagactgctccaagataaatccataaggcgagaacagataaaagtgcagccgcgaaaaaaatataccccaatctcttggatttcttgtcattcttatgcttcttctcatgctctagttgcatgtgatgggacttgtttaaaagcatctgatgctcgtcgaagatagccttgtactgagtcgtgaactcgtcaccaaaaagatctcccagagctttaaccttattcagcttctctaacgttcccgcgtacttattgtttcctccaaaatccgtgtccctcgactctctttcaaactgtcggatcgcaagtcaaatgttgaacgtggtggtttttgctttcgctacgtatttctcgacggtattgactaaattcaaagtattgttggtactctcaaaatagagatcaatcacagactttacttctttgttcttcgagaaatcataattgctttctttaatgatcttgaccacatcttggcttgagacagctaaaaagtcgatgatcttaatgattgagtcctccttggatggttttccagtcttgcttcctcgaccggtgaccgtttaatttccatcaatttgtccattcgttcgcgaagcgcagaaatataggatctgagcttttttttttttttggtctaatgttaaatggatctgagctttggatcttctttgcaagcggatttgcaagaactcaggacacgatcagagataaattcaaccaacgccgccattgatattatgctggagctagcctggaaaggaagaatagaaaagggcaagatttcagaatattttgcatacac

SEQ ID NO: 44473 - DNA, 747 bp, Arabidopsis thaliana landsberg
acatgagttttagtgtatgcctcgatcaacgaatcctaggtgttagaggaaaggttctatatgatactgatggataaaatctgtttggcacacaccctgaaactttggttctaatcaagtgtttggtcactcattatcgggatgtgttgatcacaagcacaacatgataaacttagggatgagagaaataccacggtgtttagagaatggtggaattaattctagtaaagaaagcataacttacccggagagcgtgaactggtgtggacttggtggggaaagtcctgagtgagcgcaatctgttcgagtttccattcctgatcaatcacaaatgataaatcgtttttaacaaaacaatctaccattcaaagggaacaacaatacaacttgaaagagcaaactcacttttcctcggcctttgtcaatttggtacttgaagtgacgtcccacagtttcactgtgcagtctgcggatccagaagccagaagagagccctccccgctgaaacaggaaaacaggttagtcataaattgtagtagttctatgatttatcaaagaggagtttacggttccaatattccaagcaagtggattttaccaaccaaaaccagtcattccattaacgacccaacacattaagcctatacaacattccacaacccatgacaagaaccctatgttagagctaacacaagagtgcgtggatatagaaaaatctaccagttcagtagtaagtcactgtagaat

SEQ ID NO: 44474 - DNA, 917 bp, Arabidopsis thaliana landsberg
catccgcggttccagagtctggcaacacttcaccatcggaagcattgactttttccgccactgaagtgaatggaacatcactacttctctccaactctgattctactggagggtgaccgttttcaacagaaacaggttccaaaactgttacaggttctgatccgacgtgatcattcatagaatcagatccattgatggtttcagctggatctgttaccgtaggttgtcccaaatccatgcctccatcactaggctcagttggagaaaccttagcgctcaccaactcagactcccttacttcatctgagtcaacagggtgcttttctacattctcgttaagttttagatcttgagaaacatccaaatcccgatcagatttttcttgggcttcaatcttgtccccttgatgtccctcgacatctgtttcactatcagattcgatttcaacttcaggctcctctacgttattctttgtcagatccttggatccaacttcagaatcatgaagttgctccacttcctctttagattccactttaccctcaagcccactttctagatgcccattcccaggatgctgctggtcgacacttttttcaagagaactctcaacttccgactttgggatctcaacgacttcctctggtccatcatgtgtactgtgtagctcagattttttcagggttcgactatcttgggaaactcccacaacatcatcatcggcaatactggctacatctaccttcacattctctccttccttaagatctttctccgcattggcatcatcaacaggcttcacatattctgactctacccaatcatccgcaacggaatcattctccgtaatgaaatcgtacgagccatcggtttcggtcccggtgccattattactacccccatggctgatccccttc

SEQ ID NO: 44475 - DNA, 800 bp, Arabidopsis thaliana landsberg
tatttttggggttggcgttggctcttcagctggagataaggaaaatatcaagcatcaacctcaaaagaatgataagacgcgtaatcagcgatagataaagggaatcagttggttataaatatcacctttaactggtccagtgaacaaggtttggatggctgaactagcataccctttgttggctggtactgtagactcaggaagtggtgatgggtacacagaagaaggaaagatgacctcggcatcttcatcttcaaggtcttcaaacaaacgggcgcgtttgaagtggttgtgagcggaatccatgagaccggtggaatggtaattgatctcagagtgggataaattgaaaatgtagacgctgaaggcagagtttccttcatatctaaaaatcaaaagataaccaatgcgaatggagtaacggtcaacaaactcttgccaaccatcttgaaaccaaattttgttgtcagctttccttagtcctacacgccaaacatgaccatcaggtactgtgagtgcaacagcaaccgaaagctcatccttgaatttactcacaaacttatctgggaccctctgcacaagcatgccggtatgagatataaagaagcatataatgatataaatgtccacaatatctataagaacagcacagaatattgcgagaacatcaaatcgaaacagacatttttcagcaaaaacatccaataaacacagtagctgaagaaacgacggctttacctaatttaaaaacacaaaccaaaaggccaatttcagtttagagaaggaatcaacaaggagac

SEQ ID NO: 44476 - DNA, 502 bp, Arabidopsis thaliana landsberg
  unsure (1)..(502): unsure at all n locations
ggcgcggttttacagccatattgctccggtgcgccaaaataccgttcaaacacaggcnnnnnnnnnnnnnnnnnngatgtccgtttcagctcgacccgcaagggggtcaatgtggggtcacccagacccttgcctgaattggccagcagcgccatgaacccgtcgatggattgcgtggcgggctgcgcaccttcacgcagcagtatgtccacctcaaattcgccttgggcgttgaagcccagcttcatctggcttgcatcggtgatcaggtcgatgaagcggctcatgcgttgaaaggcttgctccaggttttcgctggccaacactgaaagccccacggcgtgaaaggtggcaggcgtgatgtgtttgaccaccttcagccccagggcttcgtcgccggtcaattccacggctttgttccagaggtcggtggttttcggtacggagtatcgggcttctggctggttcagcagggcgaagtctagcccgcactgctcaaaca

SEQ ID NO: 44477 - DNA, 703 bp, Arabidopsis thaliana landsberg
  unsure (1)..(703): unsure at all n locations
gtttcatgccacttggttagaccaatgtcccaaattccaattgaactgtgaaacatagaaactttcactaatttttttactgtggtctactgtaaatgcaaacacttggatttgaaaacagttcaaaacttttcagctaaattcaatttaaaactgatactacttggctagacaagtgtgccaagcacaacgcgcatcgacgatttatttgaattgtgtaggaagattgaaacttactgaaaatttggagactttcaatttgaaaatgtttagaatctttatgtgaacttattgttgagagagtcggatttgcgagttacatacccggtttgtgaaagccgtctccagttcagtatttcatggtgattctgcaagtagctagacgttgtacttcctcctccaataccattttcttcactagggaactgctctgagtaccctggagaccactcggggactatgcctccgcttnnnnnnnnnnnnnnnnnnnnnnnnnnnnnnnnnnntgagtcttcagtgctctctgcaacaattctgatatttaaaaaaaaatttttcctttggggaaaaattttccaaattttaaagggcccccaaaagggttttgggggaacccccttttttttgggggggggtttctttttttttttggggggaaaaaaaaaagagggcccccccccggggggggtgttttttttttttt

SEQ ID NO: 44478 - DNA, 622 bp, Arabidopsis thaliana landsberg
ctacatgattatatctatgatgttgtaaaggcacccatggcattcacctttgaggtttgtgtgactgattttacctactctcgacactttcatgaaaacctgtgtcacatattcttataaccgttgctatcattgccagatctatggggacaaccaaactgcttcaagagattgctttaaaatgttcaaccctgttgatctacccaatttcaaggtactatgtttttgaattgtatcaatttctttcgaatatatacccataaaaaggaaaataaaactcacaacttggcttgctgctgttactcagagagttcttaatgactggtctgctgcattcttcacgattttccaactgggaccgctccacttagacggaaacacttccaaagctgcagataaatgggtgtctatagacgagtatttggatggctacttggtggaaaggaagaacagatatgggaaaaacatggaagtgatcgatgtcggaatgcaagagataaaaacttacttcaggctcttcttgttgtcttcagtacttctgatgttcatgttctggtccaggatagcgaagagcaagtatagtagaaactccatgcctgtcttgccatgaaactaatggagg

SEQ ID NO: 44479 - DNA, 1034 bp, Arabidopsis thaliana landsberg
actcactatcagtaagtttcgatcaaaatcagaagcccaaaattccctcttaaaaagcttcgaacttgaacaaagtgaaagactaaaaactcaccactgtttctaaataaaagacaatcaagcaaaagcttctaagaacccctaaaacccttgtaaaattcaacgaatctagaacccttttagcattaaaatcaaaaagaagaaacccttattagcttctcgaaccctctctgcttctcgaacctaaacagcttctggacttgggtatatatattttaatcagacaagagaatttcaagcagcaataatttgtctgcttctgtatctctatctataccattattgctgcggaaatatcagagagagagagagactctttgaggagagaagaccgtagaaaagtaaacgagtcgattgacccggtggggatttacgacgacgacgattcgtcaaacctttcgtcgattttttatataactgattagcgattaaaaacgcgtaaacgataacaaaaaacgaacagtttctgagggatttgtgattatacgatttagcttttgattacaaaaaggttgatgaagcaagtacgaatcagaacagaacagctgtttcatagttttacaaagattgggtttggtggaatgttttattattttattattatcaaaatcaccccatgagataatgatagagctgtttttggcataaagtttatttctttcaattatataaaaatgtgaatagtcaatgaatataagcatagagatcttgtttgtttgttaatgtagaagcatttatggccgtaagaaaattcgttgttgatctctttttggggtttataaactaaagaaaagtctttgatttttatttggaggacacgaaatcgaaaagtcttgttttgaaggatattcaattgtgtttggcatttggtaaatatcatgcctcctttagttttttcttttggggatttatttttctgtcgaacatctgaatgttttttttaaataattttgatgtgcatacgtaaacaaaga

SEQ ID NO: 44480 - DNA, 544 bp, Arabidopsis thaliana landsberg
gaccctacataagcagttagggaagctgctattttgtgcattgaggtaaattttgtaccatccttgttctcaacttctaaagtgatttagactttaaacatcaaggcagagtcttacacccaattgtatactctcgacttccataattatgactgagatagttagtagtgaactcaatcaattttgagtgcagtttgagcaaagaatttcactttatcagtagggatttgtctgtgtttttagagaattcgtagaattcagaattcagatgttctacttcgtgtttgatattaatatcataattctgtttttctcaggagatgtatatgcaaggtgggtttcaatttcgagaagagcttcaacgtcaccatcttccatcgtatatggtaattctcagaataagattaatccatatgcagtgctagaatgcataatgcatgtgtatagtttgcatctgcattataacttagtgaactttgataaagaaaaatatgattgcagccttggggcgctctttgcttgaactctttctctggtttttact

SEQ ID NO: 44481 - DNA, 646 bp, Arabidopsis thaliana landsberg
atctctttttattaaaaaagctcaaatttatatagtttttttgttcattaaatggattataaccttccaattccattagagggtctcaaagaaacgccaccaacggctttcttgacaaaaacatacaacatagtggaggattcaagcacaaacaacatagtttcatggagcagagacaacaacagcttcattgtttgggaaccagagacttttgccttaatttgtctccctagatgctttaagcacaacaacttttccagctttgttagacagctcaatacttatgtgtgtaacttcttcgaatttttgtcttggttattttgatcttcattaacaattaaatcattgtttaatgttatgtaggggtttaagaagattgatacagagagatgggaatttgcaaatgagtattttctgaagggagagagacatcttcttaagaacatcaagagaagaaagacatcatctcaaacgcaaacgcagtcgctaggaggcaatagatttcgactagaaggagagatccatgagctgagaagagacagagtggctttagaagtagaactggttagactgcgacgaaaacaaaaaagcgttaagacatatctgcatttgatggaagagaaactgaaagtcacaaaagtaaagc

SEQ ID NO: 44482 - DNA, 840 bp, Arabidopsis thaliana landsberg
  unsure (1)..(840): unsure at all n locations
ccttttgtccttgattaatttgttaatacaattatctaaagcatgcagttcagaatacttttaaggataaatcaatcttcaaccaaaacactaattatactttgtcaatttctatcgaagctctatgatacaactcgtgacaggacaacaaaaaaagtctagcgatactacattaagttattggttgctagttcttataataatatatggatgtttaggaatgatcatgcaagtagattctttgacagtaaggttcgaaacaacttaagtttggacctgctaaaaaatgacctccttattttcggattatcatgcgttctcatatgttttagattatttgtttgcttaataattctatttctctaattaattcttattaattatagttctctagttagttcggcgactactattggactcaaaatactagatctcaagatttcgtttttgtgtgtgtagatctttctacttgaagattggaacatctaatattatttattaagctaatatgaaaaaatgcaagtggagatcgttgttggtccccaatttgtgtctgtttgtctttttctgatcatgttatagatacaaaatttaatttgagatctagtggcgccataagttgcatgcaagactcgtaagcgacgacaaaaaaaaaatggacttataactaaccaacaaatgtaagaaaaaaacaagtagccaaaacttaaccggccggccaaactttattatttggtcgccccatatataattatctggntcccattctttaattatggttgctttatcccaatgactatcaaacgcttatatggtcagtaacatcacttagtttttcct

SEQ ID NO: 44483 - DNA, 583 bp, Arabidopsis thaliana landsberg
  unsure (1)..(583): unsure at all n locations
cgaatgttaagttaactacatcatcaacgaaagtgtagacagaaagaaagcacttgcacaagatccgagaccttattaatatatacaagaaaagaagaaaaaacattttgagtctttgtcaataacatcaaattcaccaaccatataaattaattaacatagatgatttggttggtnnnnnnnnnnnnnnnnnnnnnnnnntattttcatgtttttcaaaccttcaatatttggatacagtcattgcaaatactatttttttttttttcgcttttggtcaacatgcaacaatttatgtttgatcgtcttaaaacaaaaacaaaaaatcagtttctaaggtaaaaatatggttcaatttctaagagagaatgggttaatatatattcttttgtttcattttaggtgatttattttttgtaaacagattaaaagttataattttttatttaatttattgttaacataagaaattatcaactaaaactaataatgaacataattcatgctataaattatagataaaataaaatacatttaaattttggtataaaaacttatcagtatcatttgaaatgaaaaaaaa

SEQ ID NO: 44484 - DNA, 688 bp, Arabidopsis thaliana landsberg
cttttgtgaagcgattgctatatgaggagatatttcatgtctaaaatctaatttatatcattaaacaaaaatagtgcaatgtagatggtcagggaaagaaaaacattttcacctatcttttgttcttattttgtgtgtcaacatattccccttcgctttattttcttaagtgtaaataaaagggccttcctggaaagtaaactataataaacgaacctctaaaagatgtaaactaggccttgcatattatggcctcatgaggcttttgggtttgtactagtttggatttatttgtaaagtgtcatcatgtatcaattttgaattccaatggccactctaaattctcttagacattgcaagaactgaatggtcgtacgaaattaagaaaacagatatttaagtcaaaaaataaatctttggaatgaaactacacgtacatgataatgattgttaatatgctgattatatatattgaactcagaaacttaaagtctagtacaaaaacagaaactgaaataaaagagtccaaactcccatatatagcagttcaaatatcataataacataaacatttcgaatttgtggttttaatttagtaaacaaatggacatgctactataatttcttaaactgctttttcaaaactaaacacgtattatctccagagtccagatcatttgaatattta

SEQ ID NO: 44485 - DNA, 506 bp, Arabidopsis thaliana landsberg
caaaaatgtagctttcaataccgcaaaggtaatgttcaatagcatctctaaaactgttaatcttattaacaactaactaatttggatttctaatctgcatatgtagataaattctgcaactgagtctaccgcatttgctcgtcaatcattaaagcccgatggtggttcgtctgcggagttaggttcacaatggagttacattaaagaacctattggaatttccaaagctgatgcattcttgaaacctggattgctagagcagattaacacaacagctgataaaagcgattacttgtggtactcactaaggtagagtagacctgagccattttcttagtagcttctcttcatacaaaagatgctttgttttgttcttatacctacagagcttttttatgtctttcaatataaaacaggacggatataaaaggcgatgagactttccttgacgagggatctaaagccgtccttcacattgaatctcttggtcaagtggtctatgcttt

SEQ ID NO: 44486 - DNA, 639 bp, Arabidopsis thaliana landsberg
gtatctaacagaaggtctaagctcgagggtcccaaaagttgagtggtttgaggtacttacaagacaagatacattgtcttcctcgtctttgccccacgtgaatgaatgcacgcggcttagacaacttgttggcgtttgtataccctgtatcgcactggcgacacacctgatacaagcttgttgctcgtatcctcttccgcagagagcaacagcgtgaactatgttgcgacttttgccgagtgtacagttgttgaaaccaccgatggtgacgactttattaggacgagtactgaagagatcgccgcgattctgagcgctgctgctattaccgtggaagaagcttccggtacatccgacagcgtttacgatttccacgttttgaaggacaataagaagagaagaagcgataaagatcatcaaaacagagtatttccccatatctttttgatcatacgttattgttacgaggatcatcacttactatagagcttttgtatgttataaggtgactagagacaacgagttcacactacttgacttgacaaaatgtgtattggtcagattttgttactactaggaaagtactcggacatacgcgtaggttcttatgtccatatatgtatacagagatgttcatgt

SEQ ID NO: 44487 - DNA, 901 bp, Arabidopsis thaliana landsberg
ataagtcataaaataaaaagttatttatctagaaaacctaaaaaacttaaaaaattatgaaatcaggtattttctagatgatttacagaattaggtaattttacttattttaaattacgttattatctttattttattatcttaataaaattaataaaagaaaaaataatttgagaaagagcaatatcatctcgacgagggcaaagaggcagagccaccgttgagacagagccaccgtaaaaattaatttgagacagagccaccgttgcaaaggagaaaagaggaagcgacggaaatcactaacatctcgatgagggaacacagcggctctgtctcgtgcgaagctcatcttcttcttcttttttttttatcacaaaatttatttgatgaaagtctatgattagaattcttgggttccatatacattatcttatagggtttagatttcttttatgaaaactcttttaactggatccattcaattgatcaaaggaatctaagattcgaacctttgggttcaatatgcattatcttttagggtttagatttctttatgaaaactcttttaactgaattcgttcaattgatcggaagaaactcgactatttccggtggccgtgacggtggttgtaagttgttaaattcaatttcaaaccaaaattattttcttgtcctcattattacgaatcgcaaccgaagatccacaaatattttgtttggattctttagatttcaatgattaaaatcaatttacagtttctgggaaaaaaatataagaagaagaagaagaacgatgaagaagaataagcaagaaggagaagtaaagctcaagggcaaattcgtcaattcaaatagtaaaagtacctatttttataagcctaatagacaaatgcctaaattt

SEQ ID NO: 44488 - DNA, 739 bp, Arabidopsis thaliana landsberg
  unsure (1)..(739): unsure at all n locations
agccatttgctcaagaaatcgaaaagtattgagtaattttcgctgttgattttgaaagtttcaatcttttgtatggtgagaattgagttttatcgaacaagatggatttcgtgaacaatcttgataccgacacgtcgctatcaattctctcttgtctagatgatccatcagatattgtccgtgccagtgctgtctcacgctcctggcgacaatttggtaatctcatcagaatcctcttcaatgttagttattttatctatcttcaatgtttctgttgaatcttgagtatgatgggtttgcatttgcagtggttaagtatagtctctccaagaatctatgcttgaagttgttccatcagctatctaatgtggatcatataattgaaacaagtaatgatagaaatggagagtcatctgaagctgggtcaagcagtctcatggatacaaggttacttgaaaaagagcaccgggcttttgccttgttggctagagggtgcatgtcttcacctattgaaagctgtatagctgatgccattagagcttccagtactgataattacccagtagaaagcatcttaaacacactcgagaagagagatcggatttggtcgaaccccttcttattggtccgagtactgggcaacacaaaactacggtgcccgaatcacttctttacaagttgattggtgattttgggtctcattactgaagtcagcatccatcctttncaaggtaccaat

SEQ ID NO: 44489 - DNA, 662 bp, Arabidopsis thaliana landsberg
acgaaacatatgtgtatataagtacatatgcttttgtattgttctggatgtccaaatttataacaaaatataatttattcaaatacgaacttaaaaaaaaaaaattgtgtgtgtataaatgtaatgtttgtagagaacaatcaaatgttagtttgatgatgacatcactttttctcaaaaacaaggtataaattccgttttttggtagtaataactaatactatattttcgaagaaaaacaaaccttactaatttaatgctacatataaaagatcaattttcgtttttaacaaaactatgctactacaaagtttttttgggtcaaattcttatattaagaaaaatcaaattgctaaaattcataaccatttagaaaatttatgccatatttatactaaaactaggactagggataatgggtcgagtgaccactctaagttattgtatacttaactatttatgttagccttaaatttacaagtacaatcagaatcctttcctaatatgtaggaaacaaaccaatgaccgttttgcaagtggaactactgattatgagtgtacgaatattggatatttttttaaaattttgcttataacatgattttatgtgcatattggtaaaacccacaatgattcctaatctcaatttgtcttggggtaaa

SEQ ID NO: 44490 - DNA, 561 bp, Arabidopsis thaliana landsberg
taaacaacattgggtttgccaaaaattgggtctgcaacttgaacagcggcataaaagagagaacagctcgaggaataatacgatacagtactattacaggaatgcagtgtcagcataaagtgcggaaaagaatattgtcctgaccacaggccacctaacacgacgtatttttatttttttttaaatcatgtctgtgccggtggcgaccgcagcctcgctggaggcggacctggcgcagttgctgcagctgcagaaagcggcacagctcgacgtgcggcttgccacgcagccggacggtgtgccatggcccagccacgccgccgcatctgtgcctgatgagactacgtcagttccgtttggcaaaggtgttcaacagcgactcaaatactttttgctctctctcagcgcggaggaagagcctgcggcggtggccatggtccaggagctgcatgagcgcttcaccgagctcaatgcgcggctgcaagcggttgcacagcaccagcaagttggtggggacctttggaattccttcacttttcacaaccctggtttattattgcc

SEQ ID NO: 44491 - DNA, 453 bp, Arabidopsis thaliana landsberg
aaaaaaaaaaaaaaaaaaggaaaagaaaaaaagaaagaaagagacaaaaaaaaaaaaaaaaaaaaaaaaaaaaagagaaaaaaaaaaaacaaaagaaaaaaaaaaaacaaaaagaaaaaaaaaaagaaaaaaaaaaagaaaaaacaaaaaaaaaaaaaaaaaaaaagaaaaggaagaaaaaaaggaaaaaaaaaaacaaaaaacgcgaaagaaaaagaaaaaaaaaaagaaacgaaataaaaagaaatacaaaaaaaaaaaaaaaaaaaaaaagaaaaaaaaaaaaaaagaacacaaaacaaagaaaaagaaaaaaagaaaaaaaaaaaaaaagaaattaaattaaaaaaaacataaaaaaacataagacaaaaaaaaaataaaaaaataaaaaaaagaacaaaaaataaaaacaaaaaaaaagaaagaaataaaaagaaaataaacataaaa

SEQ ID NO: 44492 - DNA, 655 bp, Arabidopsis thaliana landsberg
cacgattccctttgtgttgaaagggcttctacctcagaagccttaaaccttcggtgtccgccgagcgttcggaacgacgaaagctttcccgccttagcccagcgagtcactgtctttgggtccaccttgaaacgcttcgctacctcactaggtgttagtagattatcgtcgtcgtccgccactcaacgcacctcccttcctgttgaacgggcagtgaatccatatgcgatgctctaccgggaaagtgactgtagtccctttgcggtagcaccgcttgcacggatcgtgcgcgttcctagttgcgcgataggtgatgtacccacaggaacaccagtacctaacgcacgtctcacactcggccattgaacctcgcggcgttgcgcctgggttacagggcttgcaaagcctaccaccgtttttgcgttgatagtagttggcggggtcggtcatgtcgtgaagcttggcgccacaaactctgtacgccctgcgtatgttgaccgcgtgcgataccgcctcaaggtggaacgggcatacgcaccaccggtattggcacaggtgatccggctccgttccctatggaatcggccctacgtagagcccgtaagagaatcggtgagcgtactcctgtgttccgttgtagcagatatacccgtag

SEQ ID NO: 44493 - DNA, 646 bp, Arabidopsis thaliana landsberg
atcgtgtttactaaaataataccatttctccattctataaaaccagtttcacaatatctaaaacaacatcatacactaatcttcaaaatccttttcaattaaatattctcaacaagccaaaaaaaatggagagaacatcaacgaagtttgcttttgttgccttctttgttgttacattcggtaaaattttatttcatgtgtgaataaaattaaaaatctctacatgcaaattttatgtttataacaacaagttagtttggttttgtagtgatgtgcatcgtaactacacgaaatgttgaagcaaaacgtgtattatccgaagaaatgccacaaattgctttgcatcatgaagctttgcagcaaaatgcgaatcgatggggtcttgggtgcaaaaaaggatgtcatttgatatgttatgctcctgatccaacttttcctatatgtcgttgtatatgctagtttttatacatcccctcgtttaatttagtcaaataaataagatatgttttcattaataaaaaaaaatatttatacaaccactgaattaaattggatttgataataaacacatggggatttctagccttcaagcagcaaaaatctatatagttgaaccggcatcgtttcaaatttataaatcggtgaa

SEQ ID NO: 44494 - DNA, 789 bp, Arabidopsis thaliana landsberg
gaggatttccaaaagtttgtttgattcttgaacagcttttggaggaaaactttcctgaagaatacaattcaagaagcagtaaggttcagaaaacgctcgcccataatagcaaaggaagtaagtccgacattcatgccttgaaccattttgtagttatcgacatgtatcatgtccttgtgctctcaaagcttagttcttgttgttacacaaaatatgtgagacctatacacagagactcacagtttgtaatcgttttatcttgatgtttagatattcaaagctatctcaaagaaggcccgtccttatcaaacgacaataacaatgatgatccctggttggcaaaccctggatcaaatgttcactttggagctggttgtgattcttgtggggtaagtgcattattaccttaacccgattgttagttgtgaaaccaaaatatgtgaatcgtaatttgatactggtgcggtttgctacaggtgtatccaatcataggggatcgatacagatgcaaagactgcaaggaggaaattgggtatgacctttgcaaagactgttacgagactccttcgaaagttccagggagattcaaccagcaacacactcctgaccacaggcttgagcttgcacggtctcctcaggttctgatcaatttcaattctatcggtatccttctcggacccgttatctcaaatgaaggcatggatacagatgacggaaaggaagggcctcctggttcttctaatgagtcatcaagcacagaatgaaatagcagtcaagtattaatgcata

SEQ ID NO: 44495 - DNA, 966 bp, Arabidopsis thaliana landsberg
caccaaattatcctccactttatttgttcaagtaaatgatcattctgctaactataaacaaaaaaaaattgtttttgggataatatctcttgtcgaaaaaacaataaaaaattatatgaaaactatttttttaaaaatcctattatgtaaaatattgtttattgtttaaatagaaacgctaatgtcaaacgctaaattagcattcttttaacttttttcacacaaattaaaagaaaatactgatttttgtgagttcagttttttttttttttaaacattaaagaaacggtaacagtgtttggaccaaaccaaaaattggaacgggacagtttttccaataactttttgtgctactgttcaatgtagatgggcttttaaatgtaaggcactattgagtctggcgttttcaaagcccagtaggagagatgtgtgatactttttagtttttaaagaaaggaaaaagggcttttgagctgctagatagagaaaagtaatcgatataaagacgtttgactcagaaaattgcacataaaagttttgaagctttgcttggaggaaaagcaacaattcgtctttttggagatgagaattgacttcacaacgcatttcattgacttttcgttgtaatttgtaaactaacccttacgcaatttacttgcaacactcttataattaacaaatatcctattcatatcccttcaagccttttctctctttataatttttttgattatttccagaaacttgtgcggaaagtacgttttcaagtttgatatcttcacatattttttttaaaaatatgaatgaagaaccgttcgttgtgatctatatattgtaggttaaattattgtgatccgagtaagttatatcgtcacttatcaagaatttttggtccacataatttgttcaaatggatagaaagttcatttaataatatcactgttaaacccatctagccaaaactga

SEQ ID NO: 44496 - DNA, 704 bp, Arabidopsis thaliana landsberg
cggaacaagtgtcgatcgagtattctcaagatatttatttttttgtcgtcgtattctcaagatatttaatatagttggctattaataatttggaattatggaaaactattatctaatttcaaaattcggtttcaatacgaaacggatcgaacatataaagcccataaagttctatctaactcgaacataaatagcccagtaagatatttgtgccttggaaatttagaatgccactagagatccagaatattttggggcattagtacatatatatagaccaacttaatgttccaatgatacattaattagaagtttgaattctaatgttctaaaccttgagggtggtgtattggacctagtaatttggaggatttttgatttttttttcttaaataatctgttattcaaataagaatttttaagctgtaaaacaaaacaaaaaatgtctttcaaaatcttatgttactgaattttgaatttgcttaaaatcattcaaaatattaccaaatctcttgttattcaaaaaacaacaattctttgggaaacaaatattgaaactgattttgggagactttggatacctttttagttgtaaattgagatgaaaaaatccaacgtaacttctggaggggattattttttgaaaaacaatatgtcaaacatggaaagatccaaattgctaagaaatatcacctaatccatag

SEQ ID NO: 44497 - DNA, 729 bp, Arabidopsis thaliana landsberg
taatggaagaagtgaaattatattacaattaaataggtttttttagaatccattgaatcatatcttaccagggcaaactttttttaagtatataaatctttgaaagagtataaacccatgcacatgcccactttcgtctcattgatccatgtgtataccctatagtttcctccctaattactctaattcccctaaatcatttttaatttgatacaattagtcggataagctcaaactactttactattgttgcttagcatgtacagtacatatctagcatccgaaccctactagccatccacatcttatgtacataattatgactgttttaagtacttttttactttcgtttacaatgtttgtttgaaaatttgaggcgttttttactggttgaactgtagccactaagacactaagacttcaaaattcaaataggaaaatctatacttttacaatatctttgcatgtcaaattatttttaacgtggttatacattttgcctaagatttagagtacattcataataacaacaataaaatatttctatgtatagtaggattagtgaagttactatatgagatagttgatcgcattgatcacgtgtgatgcgaatcacatatcctatgtgtagttgagcatatgtgtcgtggaagacaggaaccattttttatacccgcccttgaaaagatcacagaacacgaaaccatgaattttttgagtttgttaaaa

SEQ ID NO: 44498 - DNA, 563 bp, Arabidopsis thaliana landsberg
cacattaataaaacccaagtttggttaaaggaaagcctattgagatgattctgaaatcaaattatattttgtttcctttaaagataaattctgtattacgcagtgctttctttttttttcttttttttttttggtaaaagtttaaatcgtattatgcaattctatattgtaatgccccttcttggatacaaatagtgtggagaaggagaaaactgttgtaagttctcaagttaaactactaaaccaccatgagagcattgagccggctcacttcaaacattgtggcatacttcaacaaacatattgttagtctaaagggctatcgagtggcatcgattattttatgtgatatcattaaaaagtaacaatggtaatttgttattgcaaaaaataaggatgggatttaattaaaaaaatacaaaattacgtggtttgtgtgtgtgtgcaatgagtgtaaccatgtcattgaaaatgacaataaactgttaacaatgagacatggacgcggatcttcttttcccaaagaaagcataacaaatggctaaagcgtgtcggtaaaagtt

SEQ ID NO: 44499 - DNA, 120 bp, Arabidopsis thaliana landsberg
ttggattatgggtgttaacccttgagatcgctattttgccggaagacggagaccacgggctctttccaagcttacgaaatgaactggtaatgtcggagcgatgtgattaagagacaaatg

SEQ ID NO: 44500 - DNA, 677 bp, Arabidopsis thaliana landsberg
aacctaacttttttcttgtctgcagatatactctcttattcttcttcagtctcctatgtttttgttatgtgatcctgtttaaatcaccacttgtaaacaagaataatagaacacaaccaacattcttaaaaaagaacaaaacggttagacaataatatttgtttttggataaaagacaacaaccttaattttcacttcacttttgcctctccttcgcatatatagtgtacacagctcttatacctatacatatatacatgtgagtatgtgtatactcaactttgccaaatatagttaataaacttattatcgtgatcatcggcgaatttgagatctctctgacttggtatctcttttgatttctatttaacatttttataagttttttttctttctgaatttcattcgatcttgacctttcttctgtagactctaatattttttgggataaagaactcacattttgttaattggttttattagcattgtaaatgaatacttttttggggaaactagaatatttttcttttgaaaactaaaactattcatcaagataaatagttagtctttttcaaaaaaaaaaatagttatcaaaatttagttgatagttttttcctagtttgtacaatgtaaaaatagttttagatattgtatatctatgtaggctttgcatatat

SEQ ID NO: 44501 - DNA, 366 bp, Arabidopsis thaliana landsberg
catgtacattgccggcggcttcaattgctatcccgccgagatcgaacgcgcgatggctgcgcatccggcgatcgcacaagtggcggtgatcggcgtgccggacgcacgcatgggcgaagtcggcaaggcctacgtgctgccgcgccccggtcagacgctggatgaaaaggcgttgatcgcttggtgtcgcgaacacatggccaattacaaggtcccgcgcatcatcgaaatcaccgaatcgctgccgaccaatgcgtcgggcaaggtgatgaagtacgaactgcgcaaacgcctgaacgcttgagtctggcgtcacatcacgagaatcacgaggagaacgaagatggccggacaactggaaggtgt

SEQ ID NO: 44502 - DNA, 574 bp, Arabidopsis thaliana landsberg
aattttagtttcttccagagtataattaataattatcagtagaatatgaatttttgtttatggtaacagtttttttggctttgacattaaataataatcatctatttttttagttattctctatgtttcataatataattttttaataaaagtacggaattttgtttttctacgttaaaaacagaattcaatattaaactaaagataattttgacaataataaaatatatacggcagaatagatcgaccgtagtcataactcataaaatctatataatttgatgaacatctttctaaaacatctatagtaaaaaaaaaaaaaaaaaaactctaaaacatttgtatatgaaactggtggagtgttggtattaaattgaaggatttggctacattgtaacaaaaaagatcaattttaatattagaaacaaatatgttagttagaaaaaaagttaaaacaaatattaaaatttatattgaagacattttttgagataatttggaaacctaaggtttaattgaaaaagacaacttggagcttacacttaaatggttatttttctattaaattgaggaa

SEQ ID NO: 44503 - DNA, 586 bp, Arabidopsis thaliana landsberg
gaggttgcttcaatatttgttttctctgcacaatccaatgactaacgggatacgattcacaaaacgaatcaaatcaaatcaagttcaataccattcgagtcttcttcttcacagattacaaattcgattatgcgttgactctttaattgagtcaatggtttggaccactacatggtttgtaaatgtttatttctatttcaaatcgctagctgttacctaacattcaggacatgaacaaaaactatcttactaaaaaaaagtcaaaattaaagtttcaaatgtataaaagataatattggaggtcaactcccatttgacaacattcatatatagttataaattgattttgtttttctatttactgtgttcccatgatgtttcgtgaacacatgaagttatggtattgaatagaatggattttcttttagtttttggtttattctacagaacaagctcttgaaataattaaaaaattcactaactaaaaacttgtgatatataccatgctggttatattcgcacaacgattgcaatcataattggctactatagacgatttaattgataagaatattcaattattcta

SEQ ID NO: 44504 - DNA, 558 bp, Arabidopsis thaliana landsberg
acgcatgttctcccaaccatgagtctgcgtcagtctttgatgacactccagccaattggtaaacttatcggcactctcattcgagctcaagaagcccttgatgtagagcgttatttctccattgtgcgtctccggatcgtgctttaatggcacaaataccatccctctcacactcatcaaacccatgctcaaactcccactacccccatccaacctaactctcctccccaacctcgcagcaccacctccaatccacgccaacatcgtcgtctcacgcgtcttccaccgcaaaaaccaaactgaaaaaaaagaaaaaaatttgaagtcaacaagtgacattcatcctatcccatttacaaataattaattagttttttttcggggttttatgtcactcctcaaatatctgaaaaattcctcgaatcttttctcgcaaactccatcagccaccgtccatcttgcgtgtacaaccaatatattgcatgtacgactccaaaacttgtctcgttcaactaatccaaatctttattttactccaaatttgctcctggcagttaa

SEQ ID NO: 44505 - DNA, 550 bp, Arabidopsis thaliana landsberg
cgatcacaagtcttggactcttggtggcacctaaaatttgcatttctacaagaaatacacgatatatacaagaaaaatgggaccaagaaagaaaatgtgaggaacgttttacacttcatttgtcagtttttgcatgtgaaacagtgcgacgataatttagtgtacgatacaaaacagtcctcacgtgtatcgatccatcattataagatatataagaagaagaaaaattataaaccttacgcatgaaatagcactttcttcttttgtttactttgggtcacatgaagtacaatatttataatgttgcctcttgttactttgttcaataataaagatgccttacaacatttcaatggcaacattgcacaacatatcgattaattaatctctttttaaccaagaaatttcggatcaaagctcataatctcttcgacaagagaccagaccattttttcaagtcttcttctcgttgccgatcctcggattcaagacttcaagtactctaccctcttgtttgccaactagatactctggtttgttcatatctttc

SEQ ID NO: 44506 - DNA, 549 bp, Arabidopsis thaliana landsberg
tgagattcagtgcccttggcggttgtctttagtgagtcattattagaggttcctttgttcattaaatcaaacaaactgaagttaggaaaatcaaacaaaaaaaggagcagtcgaaaacatttaactagaaaaataaaattaaatgaagaagacttgaagctgaaactggtgcattgagtcagagagacactttaatcacgccccaaccaaacatcttttcgttgtgcttctctgttttaaaccacacccaatgtgatttgtctcctttgttttcttctttctctgttatcagttttaaataatataatgtaagattacaaacaaattatattaaaaacattaagagaaagaaaacgatagcttatagtcatagtttaaacccattttaggtcacaaaatatttgttgcctgattctaatttgttaatttttcttttaattcttttatctagttactttgtggttatccgtcctttcatgcaatatcattggttgctaagtgaaaacaagattgtaaattcacagtaaatctaaaaacaatttccgggtt

SEQ ID NO: 44507 - DNA, 1166 bp, Arabidopsis thaliana landsberg
ttgcaaggtacaatctttagttatgtcattcaagtcttcatattacggtagatttttccaaccgtattgttcaaacaattgtatccgacaatataatcatgcatgggatctcgtcaaactctaacgacatgctttttgacttatgataactttttttcttttcttcagtcaatcttatcaagtcatcgtctacgcttttttccaccatcgccttcactttgaagaagcgtgagtgtaggtagtgctatatacttgtgggaaatttgggaatatgctcatttacatttttacatgtatagacataaatctttaggttggatatgtgacatattatttatgattcttttttcaatttatataaactagtagaccacgattcagttttctcactgattagcagatgatggatttggtccgtatttaaaataaaagacatatatatatatatatatatatatatatatatatatatgttccgttttcctgaaatcaactgcaaaaagttttcaacaaacgattaagaaaaatgaaagtgacacattaacacgttagataatgcattaacaaaatattctttcttttcttttttcttcattctttttaccttcgtttataggagggaagaaaatgaaccagaattttgttgatattgaaaaaccaatccgaataaagaatctacgaaatgacactatactaaactcgttctatggtagaatgtctttgcacccgatagcaaaagttattgtagaaaactattttatacctaaacaattcacaaacctcggagaaatgatattgttgtatatttagaaatgtatatcaaaagaagaaaatagtctttagtggacactgacagacaacgactagttttatatgtaaccatcagttcatctttctagataaaaccaatgttaaacgcaactgctaatctcttcttcttttcttttgtcaaccaccaaggcaccaactgctaatctctttagactctagagatagcgaaatatcttcattatttcataatatacataacaattttattaatccttaattcaaaattgcttggaaaacactgatgaaattaagcatctactaacagaaagttttgtaaattttcaaaaactttctcctaacgttcctctcggaaattggggttatctattctttaa

SEQ ID NO: 44508 - DNA, 557 bp, Arabidopsis thaliana landsberg
ctagcatatcagaatgaaaaagaaaaggaattttttgttgggcaacaggatgagcataccatcttgagaaagcagtctggtttacttttgtccttgaataattttcctggggacattccacgggctctttgtatgatatctgcaaaaacataagaggcatattaaacaagataaattcccaaaaacatgtaatatggtacctaacctttttcatgatgcaagagaaattagtttcacgagccaattgaaacataacatttgtgagcctacttccagcagattcattcaaaatgatttttataccaacatttctagcaattaccattagcaagtaggcaattcaatgttaagtagcacaacatagtcataaattaacataaatgaagccaagtatccactcaataattttggcatacctgaatctgacaataatttaggctccaatgtctcctgcttatgaaataaaatcctatatttaggcttatcaattacttcattttgaggaatttttacatctggacctttaggaaagtattttggattgatctgaataatgt

SEQ ID NO: 44509 - DNA, 739 bp, Arabidopsis thaliana landsberg
aattccaatccattatatattatatacaaatgaaatcaagaaagaaagaaaaaatgttccaattatcgagttttgtttatgcttcacgttatttaggttttaccgttattacacggaggctgaaatctgaagactccgaacactattttgttttaatttaatacaccagtcaaaggattcaaagagctggaagtttctctcaacatttttttttctagaatgtttcagtttccaattactatttaggatttttcagttggctaatttttattttattttagtgtgaatgagagaaataaataattttacaaaaaaaattattaagaaagtaatacaaataaaaattcaaatatgaatagcctcatttttgtgtgattatgattaacattacatgtatccttgattttaagagggttgagagcgttttatctgttaacgagacatttaggagattcagatgatggaagatcagagcatctaccaaaaaactttgcttactaagaagtatttaggaagcaatgttttggaagttttacctcaacaatatttacgaaaaagctttcttttgatgtttttaagtattattactcagcatataaagaaacaactgaaatttataaatagaaagtggaaaataattaactaacccacaaattctatattcaataaaaatatgtatgaggatgtaatttcataacatataaattatggatctgattcaattgcaattcaataaaaa

SEQ ID NO: 44510 - DNA, 1049 bp, Arabidopsis thaliana landsberg
ataatcgctccatttccagataccatgaatattaatattggtataaacgaataagattcaccgaggttgatccctactaatgtaacaatcatataataatgtagtgcctattagaaagagcttatagtattagatttctcaaattattgaagtcaaatcatagaatgaacccacacatatgtggttaagtggcggttgagaattgagaaaaagttggaaggaactaatccaaattcgagccatcctaaaaacaaaaagtaaatttgtgtgggaaatatgagtttaagtctttccaagcaatttatctgatagttaataacaaacgatttttggttatctttgatattagttggaaatcatttcaaactcatgataaatagtatagtagtttttctggggaaaagtctaatctaaaacattttggtgtatttctatcagagttcatcgaatcaactgatataatttatcaaataaaaaaaatcatagatagagattggtgggcttgaaggagacaagacatcagaatgaagaaagaggctttttgctcttcgttccatggctcactttggtcttttggttagcctcaatagtcacttttaatgcaaactcattatcgtcctatcgaaatgaccaaaagccgaatattgatatatttgcgtttttgtacagttaaaatttaccaatttattattggtgttaatatgtaaggattcttgattcatttggagagacagattccttgttagcccaaaaaaaaaaatgcttcatggacagtcttacattatactccatgttatttgtcaaccaagagctgaagtctaagatgcagttttgactttgtttgatattttgtacagaaagattattaaatgtgtttctaactattattcattattcagataagacatatcaagttaaagggtcttgtcactaatttattgactcttcgttttatttatcaacttagaatttataatcatatctaacaaaaatatttcaaggacgtatcatgtacggtgtgcatgcaacccaacccaatacttatgcat

SEQ ID NO: 44511 - DNA, 455 bp, Arabidopsis thaliana landsberg
acacttgtctcgactctgaatcactagaaacacaaccaagcttccttttctccttttgtagtaagcttggaagtgtcttggaacacaagtttgatgtcaacaatgagggttttaagtcattggaggagttggaagcgtataagatggtcgtcgaggcttgctcgatggaatgtgcgtccgagaatgagatatgttcggatgaattgacgtttgttgacaaattctgtagccatgagagcacggtgtcggaatctttgaccgatgagacccttgaggagcaagttgagatccaaccgttgaagtttgaggatgtgattgttttagagaaagaagaagaaaccatgaaatgtgaaaaggaagaagtagaagaacaaaaagtcaagcataaaagtgacgttgtcctcgataacagagaagagccgacaaaagaagaatccaaagctcaaaaagttgac

SEQ ID NO: 44512 - DNA, 740 bp, Arabidopsis thaliana landsberg
ctactctttctaaagattttgatttgatgtttaatttgttatactgatagagaatttgtatattcagccatatacaattaatggagccaaagtgatattcttaaaccaaagaccacaatcacgagctaaggtttcttcaaatgtttgcttcacttgtgatagaatccttcaagaaccattccacttttgttccctctcttgcaaggtaataatattgcaacaaaaatttggaaattattttacttttaggttatccataattgaaaaaataacttaaaccttataattcgatttttttgtccttcctagtgcaataaaaacatggaaattagttataagttgttgacatagttgacccatgaatgaacaaaagtgagacccattaactcttgagattcacttgttgattgtttttattctgtaaaaattggaaaaataatagaatagaatgattgcttcaactttttaaccatatgacataaagttttttttaaaacaaatcattacacttaagatgaaaaaacaaaactttgggaaacagctgttttttctatgctttataatcatgttcaaaaaatttggattaatgtgttcatttgtttaatattcttaaacacatgtgcaagtacaaagtgggcactctcctaggttatgaactatcatgtccaatattagccgtatgcgttgttattattataaagacacaattatgttacctaacaatgattaaaaaaattgac

SEQ ID NO: 44513 - DNA, 494 bp, Arabidopsis thaliana landsberg
  unsure (1)..(494): unsure at all n locations
aaaaagaaaaaaacgaagaaaaaaaaagaaaaaagaaaaaaaaaaaaaaagaaaaaaaaaaaaaaaagaaaaaaaaaaaaaaaaaaaaaaagaaaaaaaacaaaaaagaaaaanaaaaaaataaaaaaaaaaaaaaaaaaaaaaaaaaaaaaagtaaaaaaaaaaaaaaaaaaaaaaaaaaaaaaaaaaaaaaaaaaaaaaaaaaaaaaaaaaaaaaaaaaaaaaaccactaaacaagacaaagaaaaaaaaaaaaaaaaggcaacaggtcaaaaacaagaaaaaaaaaaaaaaaaaagcgaaaacaaaaaacaaaaaaaaaaaagtaaaaaaaaaaaaaaaaaaaaaaaaaaaaaaaaaacacaaaaaaaaaaaaaagcaaaaaaaaaaagacaaagaaaaacaaaaaaaaaaaaaacgaaagaaaaaaaacaacaaaaaaaaaaaaaaaacccggaaaaaaacaacaaaaaaaaaaataaaaaaagaaaaaa

SEQ ID NO: 44514 - DNA, 171 bp, Arabidopsis thaliana landsberg
gggataaaacttatattttttaacaatataggcagtacgtcgattagaccagtaaaggctcatactatctaatgggatccatatgatacgtcgcccatcaccactgctcttaagacgaagaaattgcaggtgaatggagcaactgcggcacaacatacgttatatgggtcc

SEQ ID NO: 44515 - DNA, 664 bp, Arabidopsis thaliana landsberg
ccttcttcacaatatccaacaagacatgtgagatctttgtgatgaacttttagaagcaactcaacctaaaaagtaaacaaaacgaaaacagatccaagacgcaatcaaaataccatttttaaaaatagttaagagaaacatttggttcaatctgttatacctcggctttaaactgtttgtaaccaagtgcagtagactcagtgagcatctttaccgcaactggttcattattcaagacgccgtaataaaccacaccaaaaccacccctaccaagaaccctctcaaagttgtttgtgatcttaacaacatcaatgtaagtcaatttccggtttttcgctatgaccggaggttcaaaaccgtggtgagacctcgaatgtaacggtgttgtaccacttcctgaattaggattcaaaccaagcttggttctcttcttcctcttgaggataaggaaagtaacgattccagctccaatgaggaatactgaaacaagtgatgctgcaacaggtgcaataacagtgtttttcttcttctttttcgtggtagcgcatgatgcagatgaacaaagcccggtatttccttcgatactaaagttttcacatagattaaaataaaattttgattagaaaacttcttaaggatctaatcgttcctttgattattaccc

SEQ ID NO: 44516 - DNA, 706 bp, Arabidopsis thaliana landsberg
  unsure (1)..(706): unsure at all n locations
tgccctgccggccgtgcgtgagctgcggcccgacgtcgtgctgctggacctgatgctgcccgggatgaacgggatcgacgtgtgccgcgcgatccgcgccgagtccggcgtcccgatcgtcatgctcaccgcaaagagtgacaccgtcgacgtggtgctgggcctcgagtccggcgccgacgactacgtcatcaagccgttcaagccgaaggagctggtggcccgcatccgggcgcggctgcgcaggacggacgccgagcctgccgagacactgtcgatcggcgacgtgtccatcgacgtccccgcgcaccaggtcgtccgcgacggtcagcccatctcgttgaccccgctggaattcgatctgctcgtggcactggcccgcaagccgcgtcaggtgttcactcgagaggtgttgctcgaacaggtctggggttaccggcacgccgccgacacccggctggtcaacgtccacgtgcagcggctgaggtccaaggtcgagcaggacccggaacggccggaggtcgtcctcaccgtgcgcggcgtcggatacaaggccggccctccgtgatcgaacccgccgtgatcgacctcgccgcgatcgacagagcatcactgggatgacggtccgatcggcgacccgtcgggtcggcgcgttgacgatgcgggtacccggtgcccgccgggtggcgtncaccctcgtcacgct

SEQ ID NO: 44517 - DNA, 579 bp, Arabidopsis thaliana landsberg
ttcctgttaattttatttcgttactttatatacacactggtcttggttaagggtttgctattttattttttaattaaacatttgtatctaattgatataaaattattaagttatagagtatatagtgaaggtacactaattatccgccttcctggacaaacctcgaaaaaatgggtacaaagcaaaaggttccgtgaccgtcagccacgatacatgatttatctcgtgagtcacagttatgagttatgacctcctcatatctgttttcactagttttttctttatttgattttcaaaaaaaaaatcaacttgacgccttgacggaagaaaatggaaaaggtaagacgagattagtctccgttaatttttcttggtttgaaacaccgagttcatctcaacgtcatatatagataaaacaaaaactttagacatagaaacttgttcacttaaaaacataattacccatgcatttatttaagatttggtctaacatttagaagtagcagaagaagaagaagagttaagcaaagaagacgcagagaaactcgtgctactacttctcaaaatacttagccgttg

SEQ ID NO: 44518 - DNA, 755 bp, Arabidopsis thaliana landsberg
tggacttggtaccgaaaacagccttaatgtgacggttcagatcagccgtaatcatctgagaatcgaccgcgggtgagtgagacaaccatactcccgaatcgagtgttctctccgataatgttgtcgaagtagtccctgaacttggaagctaattcggcagttccctgatcgagttgtccttccataagttgatccagaggacgcataatagaacgccatgctgcgttcacctgctcaccagtgtagtctttacggatttgaccaatccaggagtttcttgcttttgctgcgttctgtgcgtaagagaattcagaacgagcagcgttcagcatcgagccgcggccataccaagtcgtgaatcgattagccattgcctcttcaacgttacgaaccggttgaagaactttgcctactcgaccaacaggaataccaagacccctagcaatagcgttattaagatcagcaataaacttaggatcacgcttaccgtcaaggaaagaacgaacaagacgagtaccagcagcatccacaatttcgtaagcatctaagttctccacgtcgttaagagttgtgtgcttaacaacaagattcttaagagcgttggcttccttttcagtcatacccatgggacgtgcggcttggtaagcctagtcagcagttccatttaaccaatcgcgatacttggcaggagaaatagaaccttgtactgtagcggcttgtacagcaatcttgtcgtatatgtgtttagacacagt

SEQ ID NO: 44519 - DNA, 660 bp, Arabidopsis thaliana landsberg
gtatcagcttcttttttaatactatatatatttttaaaatttgtttattttatgcgagcaaaaaaaaaaaaaagtgtgcaaaaataataaaaaagaacaaaataaatagtctacttgtacttctgtctctctctctctgtttatcaatctcacatcgagacgaaattagagctactcagacttgttctattaaactgttaccttctccagacaaagcgttacctttttttttggtccgtacgaggaaaaatctaggagaccgagctatttgttcgaaagatgcaactttttaatagctgttgtggaaaaggatttgatgggtatgtttgaatcattgactcgattattgttactcttcctgtttctctctatgggtttgtctgttttatttcctttgtttgggttgctgcaaaaatctgtttattggttaaatcggttatggttgttcttcttgattagggtttaaagattctatatcaattttggatgtttgaaatttggagcttatcttttgttcaattctctatgccttccctttatctctaatgttttaaaatgtaaagtctgttcttttttttatcatcctcactatataatatatcacctgattgatccttgaaagtttcatcattaatagcaaatttgaggtagttttcaggg

SEQ ID NO: 44520 - DNA, 750 bp, Arabidopsis thaliana landsberg
ataacatgaccgaggatcagagctgtcttaaattgtatgattagaggaggataaacttgtttaaatccgtccaaccaaccccttgatttagacattcttgtgtttgtaataattgttttggtcgacccttgatttaattattttcatcaattgtcgttgcaacgtcgaatttcatctccttatcatttatgtttattcattattttcaatttttagatttgtattcaatgttttttgttataacgagtccaacatgttagattaaatgaagattatctggatactaaatgaatatacggtttaattaacaagttggtacttttatattctggctgaaccagtccatgactttccaaattataatatgaaatcacctatatattgtatagttgtatcagaagacagtttttaatataaacaaaaagagttttatttatcagttaagtaacccaactatgatgatttagatataatgaattgttgtccaaaaaaaagatataatgaattaatgatatatggataacaaactcaaacataaataatgatatatttttgtctattaacgtttttattacatgcatgtaaattattccaggacaagtttatatcacatttcaatatcaacgtcgtcacaatttcaagttaaataatgatatatatgcgatattaacggggatagacctagtttaaaatatatttaattaccatgttatatacatatataacataaagtatttttggtttttagtt

SEQ ID NO: 44521 - DNA, 355 bp, Arabidopsis thaliana landsberg
tacattttagaatcataaaatccatgaatcataaatcgagatcacactttgtccaagaagatttaaaacccatcactcttcttcatttcccttatcttctctctatctctcaattctttcttttgtggggtcttacaagtcttagctcccatgatttcagttacagtcgagaagatgaaaataacatttcttatttgcaattgtaataatgcaatgcatgttcgtacagtttcagttttatgagggaaaataacggaaccgcacgagtgaaaaaaaaatggcaaacaattctcataatttaaagccctcgtgatcatcttaccatttatataaaaaaatcttgcccatctcatac

SEQ ID NO: 44522 - DNA, 162 bp, Arabidopsis thaliana landsberg
cactgccactggggattaggtggagacatcctgcttatttgtttcccttgatgcgccaccgcaggaagcggcggacgtagctacaactgtacgagagaaactaaggtgcatatgaggccatgaccgacccaaagcaaaagtagcacgctctggacactgtct

SEQ ID NO: 44523 - DNA, 749 bp, Arabidopsis thaliana landsberg
gtcctccatcgccaacttctcttttcttccggatcttgccggaatcttcgcctggatgatgatcggcctcacttgaagaaggagatgctgaaaccctaacttcactcttaatggttgcacaaccatcaccgacaacttcatgactcttttgactactattataattataagcattatacaaaccgttctcttgatcgagggaaggattaaaaaagtcagaagaagatggagaaagctcgaaacccaactcgaaggctccttgaggactcaagttcttcgagggtagatcaaaacctacttgtgatgatgagatcatgtttgcattataagcagatggaccagaaacgtaagggagattaatcatattttggttgttgatattgtaatgattatacgatgaagtgtagtgatagttgttaagatctttgatttcatgagacatgacgaagaacaaagagaaaaatcttaaaccaaaaagaaagaaaaagaaaatgacaaagagaggagcgtgaagaagaagaaaagaaagaaagaaacaagaacttttttacgttaatgaattttttagtcggtctaaatttggtgttaagacttttgggtcttctcgtatttatgccttttgaaaatatatattattttatgtcttgctaaataaatatagtaaatggcgttttagcatattttattttgtcttagatatatacaaatctaaggttgaatgaaagagtattgaaagtgtgaatgattcc

SEQ ID NO: 44524 - DNA, 794 bp, Arabidopsis thaliana landsberg
  unsure (1)..(794): unsure at all n locations
caatcaccattcgaaccctaagttctaattactaatttccttgcaatgttacaaagaaagagacgaaagttgttatttgaccatattatacggaaaggtgtgactaacttttttggagttaagatattcataatttcaactaatttaggggaaatctttactttattgacaaaaaaagatcttactttagtattttgttttcttttatattttccacgattataagaaaaacttgacgtacaagaaagtcttttgtgggcttgtgcataatctaataggactggttcagccccaagcggagagccacaaagcttcatcaggtcgacacaactttcttttgaccgacttatccggattgtttagactttaaagactcagttttatgccgtttactgataatccccatatttacttacctttaaaaaaatctaagaacctccttgtaatttacaaggaaagtgacgaaacttatgaatttgtaaaaaaatctacgaaacccaattaatttattaaaagcaaattaaagagcaaccacataagtgccaagttaataaagaaccatacaaggccaagtaaactaatggatggaccagtggtagttatatgctcccctgcacgcttctcgatgctcaaaggggagtattgctgcttacactcgttcaactgcttcctccagagtccagattcaagattcttcagctcaggtattttgttcatctcttgcagagcaagcttaacatccatagacatngctgatgagtcaatgtcgatatgaacaaatttagctttcgctt

SEQ ID NO: 44525 - DNA, 765 bp, Arabidopsis thaliana landsberg
aattatattgtacattttaacatatagatatttaatttatacaatatattatattcagaattacatatatcgaatgtagttaagatttatttgcaaaacttgggtagaataatatctttgttagataggtttcataaagattgaaactgtaattaaaaaatagattaaggatttttggctaaaacgctaacaaaaatgtatatatatatgccaacatgtaaaaaatgagacattcttcataaatgaccatgaagaggcgcaaagagtaattttaaaggcagtagaagatgttaagaagtggcaagatactttccgggccaatttttttttttgtaagtatgttgttaattagctcatatactctctttttctaactatgttgttaaaaggacccaaagttttatattatatacatatgtaggtatatgattttgtaaaaaaagacaattagtataaaagagtccatttttaaatatatttattgggactccggatccattgaactagcactgtgtgcagatgctcttgcaaaaaattgtctcctcttgtggtttgtactttgcttgattagaatgttggtcatcacctttgttaagaccattggtggatgcttagaaaccatgtatagggtttttaagtattcatgtatggatgctcccgtaagaatgtgagccatgccagaacagagatgcccccatggacactacagagcaaccccgtttcacccctgtccatccaaattcactcacacaaaactaatgcctg

SEQ ID NO: 44526 - DNA, 364 bp, Arabidopsis thaliana landsberg
cacatacgaagagggattcaacaaagagacgaaaagggaaaaagaaagctcggcgagataaacaacctaagcgcatgtttggctattaagttcattgtactttagtttattcgcttgagtttatttgtgtttccttacaataaattaggcagtaattcaagtgacatggataataacagcatgagcaacagttctgatgatgagagagggcgattatcaagctagaaagtcattgaaaattaaaggttacggcttcttctaaaagcatatgctaatctagataggtcatttattttaggaatgctcaatagaataacatgtacatatttgtgaagagattgctgaacgcacgcactgacggaga

SEQ ID NO: 44527 - DNA, 674 bp, Arabidopsis thaliana landsberg
aaatctaacttcgagtggcaccccacttatttccaatacacaaaatatgaatgatgatggttaagatttggagagttatcaagacaaaagctcagaagtagtaatttcgtcagcccttggaaggtgcaaaatcataacatctgtctaatagtttttttttgttgttgctaagtcttgattataacatctgtttcattttataattggcagggtcgtcaaaactggcccacaaaccaggaaagcagaagctggaccatctccattaagaattttgttggtctcatcaggcccaatacaccttgggaaataaacactagttcaaaaacaaggagatcagaataaggcccatatctattagggattttcctaggctcgtcagtcccagtaacaacaaaactaaactctggcccaaatcccataaaagaagaagttggctcatctgaattgaggttctgaccttgcttcgacaaaacatgcgtctgttaactggcgacacaacaacacaacaatatctataaatatgtgttgtttttcttcaattcagagcatttcgttctcctcatagcaagatcacgtaacaatttggtctctaaagtaagcaaatgtccaaatattcagcagctaagattcttcttggttgtacgatttttgaagatatgagaactaaaacaaca

SEQ ID NO: 44528 - DNA, 553 bp, Arabidopsis thaliana landsberg
catcaatccacagaaatcttaaaatttggattttactgtaaaggggtttatttggacaatgatttctcaaatattcaaattgacttgactatatatttgttaaacttctagagacttttatagtttatattcgtaaagtgcatactaaaaattaaaatgtacaagggattatattttgtaaagttgtaatcttgaaatagacttttacaactaataaaaaagaaagacaaataaaacatttgagttggtacgtatacattagatgattcttgatttttataattaagagaattggttagattggtacgaatatttgtcttttaattatctttccatcgattgactccaatggattgccatatatctcttgctcttttaagtgctttaagagtttacctggtctggttcaggatgccggattactgaatggccgtgcgtccccgtccgtcctgcaccctctcccctaaaacgcgtccgacacttcccctctctgtatccttcttgaccccctctctttttccctccccccccccttcctcccccccttgccccg

SEQ ID NO: 44529 - DNA, 643 bp, Arabidopsis thaliana landsberg
  unsure (1)..(643): unsure at all n locations
ccaccccgaaaaccnnnnnnnnnnnnnnnnnnnnnnnnnnnnnnnnnnnnnnnnnnnnnnnnnnnnnnnnnnnnnnnnnnnnnnnnnnnnnnnnnnnnnnnnnnnnnnnnnnnnnnnnnnnnnnnnnnnnnnnnnnnnnnnnnnnnnnnnnnnnnnnnnnnnnnnnnnnnnnnnnnnnnnnnnnnnnnnnnnnnnnnnnnnnnnnnnnnnnnnnnnnnnnnnnnnnnnnnnnnnnnnnnnnnnnnnnnnnnnnnnnnnnnnnnnnnnnnnnnnnnnnnnnnnnnnnnnnnnnnnnnnnnnnnnnnnnnnnnnnnnnnnnnnnnnnnnnnnnnnnnnnnnnnnnnnnnnnnnnnnnnnnnnnnnnnnnnnnnnnnnnnnnnnnnnnnnnnnnnnnnnnnnnnnnnnnnnnnnnnnnnnnnnnnnnnnnnnnnnnnnnnnnnnnnnnnnnnacccaatagccccaaaccgtccacatgatgctgcccaaccccgccaaccgtcgncgtgttcccatcctgcccttcctgctcttcgccggcggcctcggaatctgcctgtactacggacagcagtggtccgagctgccgcagtacagcgaaagcgacattgacgcctcgaccgagctcaacctcaagctcgatct

SEQ ID NO: 44530 - DNA, 615 bp, Arabidopsis thaliana landsberg
  unsure (1)..(615): unsure at all n locations
cggcacatggaagatcatgctgccggtgttgctgacgctgctcggannnnnnnnnnnnnnnnnnnnnnnnnnnnnnnnnnnnnnnnnnnnnnnnnnnnnnnnnnnnnnnnnnnnnnnnnnnnnnnnnnnnnnnnnnnnnnnnnngggctgatcgccatcgtgcccctgatcgggccgctggtcgtcaagatattggcgctgccgtttatctggctgctaaatgcgatcggctatctggtttcgtatatcgcgatccgccgcggttactcgcaggacgtcatcacctaccgtgcgctcacgctggcnnnnnnnnnnnnnnnnnnnnnnnnnnnnnnnnnnnnnnnnnnnnnntgaacccatcgcgtgataataggcatgcattgaatggccagatttccgntccgtaacctggcgctattacgcagtcgtttcgcgcgcgagccgcacgcgctggcgcaccaccgtcatttcttgctgcccgcgctggccttctcgggcggtgtcctgtgggatgccttcacgcggggcgttacgtcaggaccagcgatcttctcatcctggcgggctatctgctggtcgccgccggatcacgctctggctgagccgtcgcgacac

SEQ ID NO: 44531 - DNA, 757 bp, Arabidopsis thaliana landsberg
ccatcacagcaagtccagctagacctattcttgtaggttgaacagccatttttctaagtcttcttctctctgccaaacaaataaatacatcacaaatttaagaaagatatatgtaaaacaaaacagattcatgcatgattgatctcaaataaacgcaacgatacaaaccagaaataagatccccaagatcttcgaacacagaatcaataaatcaacatgacaaatctcaaaaaaaaaaaaagatcacgatcgtggcatacactaacaacaagagcgaagattcgattacttaaaacaccgatctaaacaacataatgggaattttcaacggaatcacacaaaaatgctggatcacataaaagttaaatcattttttctgaaatttcggtacacatcatttatatcgaaaagtgattggaacaatcagataccaaaccaaaattgattggggaaaaaacaaaaagagagagagtatgatcggagaaacaaacctgttcgtatcgcggagatggatttaagaattttcctagaaaaaattaagaggaaaagacgtgaaggaggagagtaaaaattgcagagattagtgatgtttgtttgtagcagatatatagcaaatgaacggtctgattcgcaccactgctaccaaagtaataatatttttttctccttttccctttttttgttgttaaagtattgtcaaaattggccactcctgcgttaggtaagaaaaggtgggtgggagtagcgttggatcttg

SEQ ID NO: 44532 - DNA, 484 bp, Arabidopsis thaliana landsberg
  unsure (1)..(484): unsure at all n locations
ggacatggcgctggcggactggaactgcaggcgcctcatgtccccgagttcaaaccgatccgctgcgactggaccgatgcggacatgacgcgacgagtcgcggccggcaagcagcagttattggcacgcgcgatcggcctgcataaatacaaggatctgaccgtactcgatgcaacggcgggtttgggccgcgacggttttgtactggccgcgctgggcgcgcaggtgacgatgatcgagcgacaagcgctgttcgccgcactgatggcctatgcgcatgcgcgggcactcgctcatccgcagtggcaggccgcggcgcaacgcgtcgtcggtgacggcgggtgacgcactgcagtcgatgggcggatcggggcagtgggacatcgtccatcttgatcncgatgtatccgcatcgcgacaaacaagcactgccacaaaaagagatgcatgatccnnnnnnnnnnnnnnnnnnnnnnnncggatg

SEQ ID NO: 44533 - DNA, 547 bp, Arabidopsis thaliana landsberg
  unsure (1)..(547): unsure at all n locations
gctcttataggtccaaaaaagtgctttaacggtcagattaggctcgattctttttctttttttccgtgctcaagaaattttccttttcctaattctgggatatttctccgaataaactatttctcttttttcctttattcagttatgaaataaaaaggaaagctaagtttgagagaatccaaagtttgttcaatctctttcatctaacttagctggaatctaaggtttatagattnnnnnnnnnnnnnnnnnnnnnnnnnnnagagttcttcgagcttgtttttttctgtgtttgcgttcatcataaggtaaaattgagttttcgatcttcttctgatttccaattctagactcaattgtctcttttgattgatttggttttaataatgctgcttggctttgattggaatcgattgatcatatactgttttattgcgattaattttgattatgatcgaagaactccgaatttgtggctctgttttagatattcaaatctgcatgttcgctttgtttccatctttgtgtaagaatctgtttcatagat

SEQ ID NO: 44534 - DNA, 118 bp, Arabidopsis thaliana landsberg
  unsure (1)..(118): unsure at all n locations
gcccccccccccccccccccccccccccctttgaatagcgtgagcgaccccccccccccctttccccccgcacccgccccccccacccccttgcgcccnccccccccccccccctttt

SEQ ID NO: 44535 - DNA, 602 bp, Arabidopsis thaliana landsberg
ccagctctgtttttgctctgtttcaggctctgtgttcttgatttcctctgtttttgcttccttgacttctgttttgactttatcagctacaacatctttcgtcttcttgttcttcttgtgaagataagatgatctgatcacaacggggacacactcaccggagcttgtgaacacaaatcgaacaagaggcgggccaccggaatcgagcttcttcgagtagatgctttgcctcttctcgtctagctcggagagaagctcagagaatttatcaagtccacgatttgaataagggttcttgcttgcttttcttgattttttgggtgaagaacatggagatctaaatgggctcaccatttttacttcgagtgatgatcttgtggtttctttaccttgcaatgttcttgtgagattcaaagagttttaagtttttttttggctttggttaatgaagatttgttttggagacaagagagacgaccttgttattaatagacgtgatttgtattaatattttaaaagatttcacgcgacaataatattttctttattggaatactatagaaaaaggatttaaagaatttgaccggatcagatgatgaaac

SEQ ID NO: 44536 - DNA, 563 bp, Arabidopsis thaliana landsberg
gccgccgagcttgtcgtgccgcggctggcccgcaccaccgatgagctcgccgcggtgctgcacgcactgtccggcggctatatcgcggccggtccgtcgggctcaccgctgcgcggcttggtcaacgtgctgccgaccgggcgcaacttctacaccgtcgacccgcgcgccatcccctcgcgcctggcctggcagaccgggcaggcgatggccgactcgctgctggagcgctacctggccgacaccggcagctatccggcgtccgtcgggctctcggtgtggggcacctccgcgatgcgcacctccggcgacgacgtggccgaggtgctcgcgctgctcggcgtacgccccgagtgggatgccgagtcgcgccgggtgcgccagctgatcgtcgtaccccttgaggagttgggtcgtccgcgcatcgacgtcaccgtgcggatctccggtttcttccgcgatgccttccccatgtcgtggcgatgctggacgacgccgtgcggatggtggccgagctcgatagcccgttgagcagactttgtgcgcgcgcaccgcagcagaga

SEQ ID NO: 44537 - DNA, 628 bp, Arabidopsis thaliana landsberg
tgggaacctttattttttcttcttacatttattgtaactcttttcttattctttttgtttttgtccgtatattttagtttggttttttatagccttgcaaaaaaacgacactgttatatctatactttttatctagatgactagaccaggtccgaataatccaagttttgtactactatagtataatattaaaactatgagattcctgcgtatctgtaatttaatttttataaattcattctaacgttataattatcaaagagagaattatttttctattttttcatggaaagtgatgaagatagtgtgctgcaatagtcggacccaccggagacgaagaagtgacaacaacgagtattgtgtatttcctattttaccctttccttttcgtttcgcgcgtcttcaccggcttaccggctacacctgtcctcctatatatcggattcatcatttcattataaaattaatagcgcaaataaaataaaacaagtcttattaaaatactaaaaattgttactgtatttaattagttgccgccgcgccagccgttaccattgcagcagcacgactgttttcagaactttttttttttattaacaatcaatcaagaattttttaatttgtttta

SEQ ID NO: 44538 - DNA, 792 bp, Arabidopsis thaliana landsberg
cttgtctctcggctgaaagaacagaaatataaagacagacatagacacgaaaaagtagggtcactttgttacccgaaaatttgcactttagatacaagatcccagaaccaactttatgagttgggcaacaattttcttcttctgtatcgtaagtagttatgatatctagtttctaacttgattcgcttcatccatattcagagaaactatacttgattgatttcgagtatggatcatacaactatagaggctttgacatcggaaatcacttcaatgaatatgcaggatacgactgtgattacagcctgtatgttcaacttccttgacttcttctgttgtctctaaaaatttcctcaacagatcaaaacataattgctgattgtggtttctttgtaggtacccaagtaaagaggaacaatatcacttcatcaagcattacttacagccagacaaaccagacgaggtagtaatatgttgcaagacattacgtctgtgttcttttgaaacaattttggcttaagaaatatatatatatatatatatatatatataaattgcttgtgtaaacaggtcagtatcgcagaagtagaatcagtctttgtagagacagatgcgtataaattagcatctcatttgtactgggcaatatgggcgatcatccaggtggtgtttgtttaaaccattcgagtatattgcttaacgataataacttgtattacgctaatggaactggtacaaatttggtggaacaggcaaggatgtctccatttgagtttgaattttggggttact

SEQ ID NO: 44539 - DNA, 310 bp, Arabidopsis thaliana landsberg
gtttttatgtcaattagcatttttgaaattatagtttacttttatataagaaatttttaataatatattacatttaaaaccaataagaaacagtactagtaaattttataacaatttttttttttgatttcatacccattttatggagtgagaattcacagtctaatttgtttaattatgttctcaatgatttttttcttttttttggtcaacaatcatccttaatatatatatatatatatatatatatatatatatatatatatgtgaagcggaaacaatatgggccgagaggtatgggcctggttct

SEQ ID NO: 44540 - DNA, 786 bp, Arabidopsis thaliana landsberg
aaattatggattaatttatacgcatcatatgctcattaaaactttggtaaagctattatcacatgcgagttcaagattttagcgatagttacgttgctagctcaataaaaagaaattcgttggatctttatatcaaataaatcacgattattgaactttatgaattgaagcaacgtctgaataaggaagaaacatgtcattgtagtctataccgttccatttaaataatttaaatgttggataagatactttctttaaatccatatgcatatcttaaaattgtccccacgaaccggtgtcgaccacaacttttgattttaatacgtgtgagtgaatgttggctagaaagtataaaacctaaaagtgggccaaagtgtcttttataaaaatggttttgttgaaaattttggtaaaatcaagctaaatataagatgacaactgagttttatgcttttaaaatttcacactactcattagcccactcaacattactcattgtgcgatgtgatattaattacaatcagtagtcaaatttaaccccccaaaaaaatatcaacgcattttctaatttcttcttatttttggtagtttaatgggcttgtaaacataagcttagtaccatgtaaacaaccacaattatgctaaagattgttgctgatcgattagccctactattctaaatctttgtatatacacaatttgttggttatcagattggatccatagtgactttgtacactccagtcattaatataagttaatgggcctttataggctttaaaaaat

SEQ ID NO: 44541 - DNA, 748 bp, Arabidopsis thaliana landsberg
  unsure (1)..(748): unsure at all n locations
ttcgcacacagccaaaaacaaagtgagtagagaaagaagtagaagaagacaaaaatgtaaataaaataagaagaaaaagacaaagagaattgttgtgtttttacaatgaacatttaaagaagacagacaaatcccacacccaagcctcagcctcatctcttttattgttatttgtttttctaacaaaacaacaaaaacaaaagagatggtttttgggttttgttttgtctttgttagggcgtgtttggacgtttccttcttctcagaatcaatattttaccaaaacagctttctttttttctctttaacaatttttttgatgtagaaatatatagtcatgattccaaatccacctcatgccatgacaaaaacccataaaagtggaggttccaatctcgaatacagacatatatgttgtattcgtgtatgtatctattataagataattccaatttgtataatgccaaatgggttcattgaacttcttcttccttcataattaagtgttgctttttcttcttagttcctctaaatcaagaaaattctaggtgaaacttctcttatcttgactttatataaaataataactataaaaataatcaataagactaattcctacaagtcttacaaatttaaaagaaaatgaaaatgcaacattagctaatacacataatagtataagattgatggatgtattcttattcagttntatttataaatggcacataagctaatacactctcattca

SEQ ID NO: 44542 - DNA, 982 bp, Arabidopsis thaliana landsberg
taattatatatttttattactactttcacaatgtggtctatacatgcatgtaagcatatatgtatacagatatatattctttttcaaccgatatgtaatatgtatatctatatatttataatgtaaagataataaacaaacactgatgctgtaagaaaaacgaatagtcatatgcaaataattttccacgtatagttcacaatcaaatccacatttctctaaaagttatttttctttcgtttttgtcatgaaaatggggacatacactataccccctcgttgtaatgttttcttagaaactaaagaattaatataaacagaagaaaattaatgttggggacaatctgtcccttgaaaattatatagaaaatagacagtgttgataagtatacatgatatacataacaaaaaaaaaaggtatacatgatctaaatatttgcatgccaactcatttacgtatgtttcattaaaaaagaattggccttaatgaagccaaagttcgagtgtgggtggtgatcttaagagtccgcaggcctaaaccgttctatataggaattcgggcccgtgaccagtttatatattttataaaaagtagatgggttaatcacattgatccgtttaagtatgtgaatttaacatgtacgttggactgaaactaaatagactaactcatttaaagtttgcttttaactcttttttaccctctaaacgatgttagtttttaattttagttttatacatgcatacacgtttctttaagtctcactgcttgtctccgagtttcgttgcctctgtctccgaacctcgtcagagattttagtgcaccactaaacaaaccccagcttttcccttcttcttgaatctctctctctcatctaggatattgcctctcgtctctgctagaagttaggtatagtttcttcctcataattcttatttggaagttttaaatcgtttagaatctttggattatgttgatttg

SEQ ID NO: 44543 - DNA, 1199 bp, Arabidopsis thaliana landsberg
tttcgattttagggtcttaaaagttgtattttgtcattatatatttactccctatcatttcataattatatacttttttgcgcaagatttcattctaatcaagattaatgttttgaattttgattctgtaaatttaaaatgtggatatatggcttgaagaccacttatatattgatttcataaatccaatataatgctactttgatggaaaaaaacagaaaataagtttgattattgatattatgttatgattacaaaattttcaagaattaataaatgactacatatctgatattttaaacttttccttgatatgcccaaaatctttcttaaaacatcctcaatgaaataaaatataaggtatacaatcaaatgaatccaaaaaagaacgaaaaatgaagaaaaagaaagttttgacaaaataaaagaaagaagaaagtaatatttcttattattaaaaatagaaaactgacacattatgttttaaatgttttactttaacaggaatagtggttgaagcacaaagaagaaaatgtgatgaaaagatagtattgcaattttgtaatggtagaaatagatgttatgaatattgcgacacgaaagaatgtgttgctgcatgtaaaaaatagaggaatggggaaggtatttgcaatggggacgtcttttctgtgagtgctcaatgcttatgcttatataaatgttgagtttagatgatggaagagagaatgaatcgaacatgctcatgatccttaatatcttcctacaaaaaaaaacaaagctatggtataaaagttgttgtgagaaatcacaaaaaggagaagtttttataagctggtggtttttcatccacgtatgttagttggattttttgaaagagatgaaatatttattttaatttcttttacttgtctttttttttctttgttgtcaacttagttatatagtatatattttctaaacttgtatttaaaaaaatctttataatggaattaatctaattttctaaaaaataaacagaattatggatatgtagtttgagacttcgagctattaaaccatttgacatattgttcattttatcatcatacaatttttactttgttggtgacttacctttagcagcttcatcttctccttctttcttcctcttcctcttctattgatatatgcatccgatattcagaagacgtactgttctc

SEQ ID NO: 44544 - DNA, 786 bp, Arabidopsis thaliana landsberg
tattttatttagtctacaatctattgaaacacactcttttatataatcaatagatacatgttgagtttactaaatattgaaagctaaatagagccgaccaaaaatagaaggctagatagaatagaacatatcaatcctagattattttgaattcgattttttatagttaaagataatatctaattcttaatcctttacggttggacccccgggatctggttgaccgtctatagctgcaaccaaccttttcgcactgctatataccgcctcgttgtatttttcgtccgttgctacatgaattgatatttaatttttgttaattacatgatatttatcatagaaattgcaatccccaaaacattaacatgaaaaaaaaataaaaaaaatcataactctcattaaaattgaaagcgcaaggacactaacgggttttcttcgttcggaaccaaactaatcatccctttaaagaaaaaaataatctcgataaatattcctcacgaagcaacctcggagcattctcgaagcaacattatttcatacatttctgagtctgatatatctccgttcaattaaaaattcatgttctaaatataacaaaatgcggttttaatagtgcaaacaattacaaatatgtgattgtaattgagaaaataattattaatccgattactaagtttggatatttttgtatgtttctattaaatgaattcttagaattgtagaattacaattacagtaaatctatttaatagctagggacgtgggattaaactaattatattgatt

SEQ ID NO: 44545 - DNA, 700 bp, Arabidopsis thaliana landsberg
ttgctattagcatcagagcactaactgaagtggatcatcgttacctgaattgctcccacaagtttttcggaagaaaattccataacgtatactttctgttagatatacggttatcacaacaaagctcttttgaagcttcatcatcgttaatgtacacaaaacgctccattggtttttattttgctttggaagcaaaaacactcttctaaactttcatcatcaaactcatctgattgaagtttaccaacacaaactgcaaaatatgaattgattaagcattactttacatcaaagaggacattgaatcaaaagcaattgcagaagaacacctagcagataatcactttacgagtaagcttaagaactcagcaaaatattgggaaagcaacgataaaccccatcgttgaagaagcaaaaccacatcaggaagatccaaattcaaaattcaaacaacagagatctcacaatatcgcaactcaaatctaattacattcgaacacatcgagatcaggaagaaactcaaaaacatcaataaatttatcatttcttcgaaaatctcgcacaattgtataagctttgaagaaagcaaaattccaaattcatctgaagatcgagcaatacgttacctaattaatcacacggagctcgaatttttctcaggagtttgagaattcttttgcttttcggcctttttgttctt

SEQ ID NO: 44546 - DNA, 770 bp, Arabidopsis thaliana landsberg
tctgaacttagccaaaacttgccagcttaattagcgtcttgtcttgatccttcatcgctataatataggtgtaggattgagcttgcaagtgtttgctgcgttgcacgaatgtaattaagaagttttgttccgttattacataattcattatctcacttttctaataattttttttagtgccaatgcaatataaaaaaatgcgtcgtgtggatagatagatggtgatgttttgattaaagagtactagatgtattttggagtcatttgcaaatgattaatcaaccacacaattgcatttagaatatctctctctctttctctctccctctccctcttggaagaaaataattacacccgtacgttattatggatttgatagagtattctatattggacttatataatgttagaatacattatgtacatagttagattcggacgcatgtagcatttatattcactcctattcgtgttcctctttacaaatttttaaaaagagttgcataggtttacctatcaacttaagaaactaaaactaaaacatacaaaataaccaaccatgcatggatcgagttcttgtgtttctctacagtcctagactctttaagtcgtaaaatatctgattatatatatacgtctattattattaattttatccaatttatacgtttattaataatgtagaataatttggtattatataaactcagataagatatttctgaaattttcttattcttctctggaacggatatcataaataaattgct

SEQ ID NO: 44547 - DNA, 651 bp, Arabidopsis thaliana landsberg
aacagcttttagtttttttaaaaacatatttttccgtaaatatgtgtgaaagaaaatagtttgtttggagattatagagataatgggatatgggaaaggagaacagtttttaattttttaaaagaacagtttttttttttgttgtaaataggtgtgaaaagaaagatataaaagaatagaatttgaaacttatgccacatgtcaaaatgatacatcaattattaaaaaaatgaccgttgatttagtatagttagattttaagttaataacctattaattaaaaggaatgagaaatattactaggaaagtttaattcggattaagtggatcgacacaaaacaaaccgaatagaaaacccttatcccaaaactaaattaaatggtggcatcattaaaatattttacttttatttaatcaaaaaaaggaaactagatccgcatcaaaaagaaaaaataataaattggttataaattattttcattaaacaatttgaaaataatatagaattttgtattgatcaatttaaaacatatcaaggaaagtatcatataaaagtaacatgtattcctaccctttgaattagtactcatgagagatatagaatctctcgtttttgtctttaaatgaaaaacatgtttattaagaaatttt

SEQ ID NO: 44548 - DNA, 403 bp, Arabidopsis thaliana landsberg
  unsure (1)..(403): unsure at all n locations
ttttgaaccaaaagaaaactgtttgggggcatagccacgcagtgnattttatatgttctataaaaaagcacagacaagcatatataacatagataggcaggatgcccgcgacatgtacgtgttggaggaaccaaatacttaccgaatatgataagaacattataaggggctcgaacatgtgcggcagaacctgctgtaaatactgagacagtatgaaaagatctcaatgataagagagcccgcggctcgccgggcgatggacccgggatgatacctacagctgaccacaattcaacgaggccaacatgagcgggactgcgagcataacataatggagagatgcaagatgtacttcaacaagtgaagggcatgcgaagggatattgaatgtgatccaaaggtta

SEQ ID NO: 44549 - DNA, 613 bp, Arabidopsis thaliana landsberg
gactgcccgcgccctatttcggatggctgaccgtcggggccgacgcagaccatcgagttgttcgacatgttctgcgccttgtagggcgccaccgcgaccccacggcgcgcgaacgcccggcacaagcccgtggtgaccacactcttgccggcgtccgaggtcgtcccggcgaccagcagcccgcccatgtcagcgcgcccggcgcagcagatagaggtccatcacccagccggcgttcgacttggcccgggcgcgcgcggcagcgatctcgccggccacctcaccgacccgccctgcgaccagctcctgcgacggcgcgccgaggttggcgccccaccagatcgaccagtcctccagcccggcggcgtcgaagccgctggtgagcatcacgaccaggttgtccgcaccggccgcgatgtcctcgcgcatgcggcgctcggtggtgatcagcaccggccggccgacctcgtgcagcaccatccggtgcgcggcggcgagcagttgtggcgcggcgacgccggcgagcacctcgaaatcatcgcttagctgctcgacgatccggatcgtcgagtcgtagagcgaggggtcgccccacacgaggaatccggttgtg

SEQ ID NO: 44550 - DNA, 1812 bp, Arabidopsis thaliana landsberg
tcaatggcagattttatcatcaatctactgtgtgccgcaaatgaaacaacctcaaaaacaatgctgtttgcggtttatttcctcactcattgtcctaaggccatgacccaactcctggtacatataaggcctcttgaatgataagtaaattagttcctctagcttctctgatgtgtttatcttctgaaacgttctgcaaatgagcaggaggaacatgataggctcgcgggtggaatgttaacatggcaagattacaagacaatggacttcactcaatgcgtaagtaaattaagaagctcaagaaactactctgcttctgatcttagatgataaaccttcactaaatgctttcttgatttctcaacaggtaatagatgaaacactcaggcttggtggaattgcgatatggcttatgagagaggccaaagaagatgtctcatatcaaggtacgttattgcgtctttgattattggtacatatattgaggcagatacatggtctaaaaatcaacttttttcggttcttatgcagattatgtcattcccaagggatgcttcgtagttccgtttctctcggcagtgcacttagacgagagctattacaaagaaagtctctccttcaatccatggcgatggcttgaccctgaaactcaggttttacttttcgtttgacattgtaacataatttcctaaaccttgtatcaatctagaggttaacattcattgatgtgaatgcagcaaaagaggaattggagaacgagccctttttattgcccatttggtggaggaactcggttttgcccaggagcagaactggctcgccttcaaattgctctctttctgcattacttcatcaccacatataagtcagtacatgttatgcttctgaagtatgtttgtctaagactctaaattaactaaaatctgattcattcttattgcctgttttaggtggacacaacttaaggaagatcgtatctccttcttcccttcggctcgtctagtgaatggcttcaaaatccagttgaacagacgagacagtgatcctccgaatcaataatgaaccaacaatcttcacccccttgtagatctctatgtattgaatatattcactacaaaacctttttttttggtgtaaaagaatcagcacaaaaccaagtgattctcttgtaactccaaatttgtatgatagtgtttttaactccaaagttgctcagttaagtactctctaactcaacactccagtaaaacccacaacagctaacaaccgtatgcttttggaaatcatcttctttagattctctgcttcaaagttcaaactccaactaacccatttggtttcaacaattacaacaagtacagggctagatggcaaaagatgtattgtatcctaaagctaaactcttgtaagctttcgacaaaataaaaagcaagaagacttataggagattgcagggttatcactccactcagtcttcttcatctgaactatcatatgctaatcccaacaagcctttcggagcattttgaccttgcccattgctttccgtagcttttccgtcatttctgtctgcgccaggtttcttcaacactggcatagcttcttctttctgcttatctctgtgaacttttgcctctgttggacctctatcacttctaacagggggagataagcttgggcttgatggtgttgagatctttggacgtttaggtttaacctctacaatgttactaaacaaagcttgatgcctagacatcggaaaacacacacaaaagttggacaccgaatgaaaatccaattcatggtgtgaat

SEQ ID NO: 44551 - DNA, 675 bp, Arabidopsis thaliana landsberg
attttgggtatcattggcataatataataaaatttcattttttagtttccaaattaagtgaaaaaatagacgttaccaaaaaaattttaataagttttttatttatttagaacatctatctattatgtgaaatttgaatccggatggtaacataatagtgaaactataaaaaaccacgaaaactaaagttttaattaaaaacattgtttttttcggttttcccaaacagtttttagtccgaatcaattcatccaggtttaacaacttaatttctgataagatctgtattttagaatattaatgttctgattgaaaaaggactactaatatgtatcaatggccaatgggaatagtttggtttgatttataagcgtcatgtatcgtgtgtcacacataataagcggcatgtggtagctaacaaatcaatgtgattaaatcattattaacagaataaatcacaatatgatcgataaatacttttcttagcaatggcttatgggctattttatgttgtcacgagattcctttttaattcaaatttgaattactaatatatattattcgttaatgaatcttttcctatattcatatttgaaagaagtgtataatagagatctgctaaatattagtcaactcgatgagttgtattaaagaagaaagagattcatgttattg

SEQ ID NO: 44552 - DNA, 763 bp, Arabidopsis thaliana landsberg
ttttttggtgcatgcaggcctggagtcatgcttctctatcctctgtaagtgatatcaaatctgaatttttatgtttggtttttacaaatgcaacttgatagttaactgaataaatgattaggtatgcatcatttcgagcaatagagagtccaacaatgttagatgatcaacaatggcttacatattggatcatttactctttaataacgatattcgagctatccgtttggagagtccttgcctggtaattacaatattattcactaaattctgttacgaattcaaaaatttatgcctataaagacaaaaaaatggtgttcttttgcatattgtaggctaccattttggccatacttgaagcttttgttctgtatgtggttggtgctaccaatgttcagtggtgcagcttacatttactccaattttgttagacaatacgtcaaaattgggatgaatgttggaggaggaacgaattatacagacgaacaaagaagagttttacagatgatgagtcttgatgctagaaaatcggttcaagactacgttgaccggtttggatgggattctgttgagaaagcaatcaaagcggtatatgatttctcttgttgatctttaatatagttatgtatatataatccaatacatatattctgggagtttaacttcattatttgtgttcaaatgtaggctgaaaaagatactagaaagcattgagatggaagatcaagagtcaagaaaaacattactctttggtttgtacatg

SEQ ID NO: 44553 - DNA, 825 bp, Arabidopsis thaliana landsberg
cgttctctacagaactagttaaaactctgtattcagataaaagcatggtaaaaaaccaaacatatccatttaaatgtattcaaagtcatgagaaaatttcctatacttgttcctttatatctgcgagaagtcatgaaccttatccatttattagttttcttctgaccgactaaacctgataatcactaatccaccgttagatcttaaaattccaaatccaaaatggacggtcaagatcacttaacgaaaaagaaaacagtttcctgtccagaaatgtctaaccttgaggcctttttctctttcctttcaacttttttttttcgattataaattttctcgtgaagctaatttttcctgagaaagaaagcgaaacttcgctggcgactaaagattgctgagaagacacgtcgtctctgtgagaactttttctttttcttctggtatattctggagacagatattgttttttcttctgattagagaataatatgacggaagtgattagcaaaacgagtttgttcttaggagcttgtgggaatcatcaccgtgttgatgatttctctttctctccggtgagttttggtgggtttggtttgaaaaagagtttctcttgtctgaagcttaagagtcagaagcctcttagaagtgtattttacggaaaacagatcgttttcggagattctcaagacgagagcttcagaagatcatcagctatcacagctcaggtagactttaatgttttgtgttttcgtttttgtttatctgaaatattataatccattacatgcgagatctaattagaaagatcctgagagctaattgttg

SEQ ID NO: 44554 - DNA, 584 bp, Arabidopsis thaliana landsberg
caaaggggggccggcccactatgtagggatcccctatctcttcttaacggcctttgaactctctaaatcctatactccgaattattaataacttttttttttgcttcttcggatctaataagaaaattggtacgtaaatacctacttttgccttaacttggaatgcttttgtagcaagcttgatagaaaaccaaatcttaatcgttcttaagactgaattgtatggcacagacatatatcgatattggtttcaaaacggtttggttagttgtgtaactcaattgaattcaatggttcatattatagagaacaagaagagttgggaaaagacacatgacaacgcagaagatgattcacagaagaaaaaaagaagagcggtagcatcactgtatatcaatataagatttttttttaatgttttgactggcaacacgagccaggctcaaaatcaatgggaccaaaaaaataacaaagaaacagcggattttgacagtgttgtttagcacttttgcatcacccaaagatcttatttcaaagttttctcctttttctcttatcagtctgagaagtcatttaaaaaggaa

SEQ ID NO: 44555 - DNA, 799 bp, Arabidopsis thaliana landsberg
attttcgttggggattctagatggtcacggtggtgaagttatgaactattagcatgtactgatgtacatatatcctattatcgtgagaccacgacatgcttttgacagatgaatctctttttaaacgtagcaccaactcaagctcggttcctaagatttaaatcctgtgtagatctcaatatggcttccaaaattactcgcactcgatttttggatcacacaatttatagtacttccttctattttgattcatagttgttttttctaggaacatatagattaagaaataacataaattatacttcttttgttttgatgtataagatgctttagataaaaatggagatcaagaaatgacataaattttagatttttgttacattaaaaactatataatatataagtaaaagtaatttaatcaataataaaatactttgcacaatacaaatgatcataacacatcaagttaaataaagttttacattattttttatttgttgatttctaaaacattttataaaatggaataatttaagctctctttctctctttttttctatgtaatctaggcatctagctatcatcaaacccaataagtggtcgcagtagaatagaatttaaattccatatggtcgagaattaagatttctgttagtgtgatcgtcgtcacttactcattcgataattcattgaagagatacaaattaggagatcagtttgaggttttgctaaaagtaatacactgatttttatatgcaagaaagaagctaaacacttccgtttcgcgtaaacaattttt

SEQ ID NO: 44556 - DNA, 343 bp, Arabidopsis thaliana landsberg
catgctttatgatctggtacgactgttgtcctatcgtcaggtctgacgacagagaatactatcaagagggctgatccacatcgagagcgaggctcacacatggtggggacaggcgatcctagagcagccccatcatcaggagcatgttgtctgggtacatgtcagagagggggctgtatcaagtggtggatacaatggggaagctcgtgagagaatatgacatgctcttgcggtcactccgtaagactacatccttggctatatttggctgttacactctactctacctaaatatggactgcaatagcacatgatgtggatatgtcaagaatttcatgacatg

SEQ ID NO: 44557 - DNA, 389 bp, Arabidopsis thaliana landsberg
  unsure (1)..(389): unsure at all n locations
annnnnnnnnnnnnnnnnnnnnnnnnnnnnnnnnnnnnnnnnnnnnnnnnnnnnnnnnnnnnnnnnnnnnnnnnnnnnnnnnnnnnnnnnnnnnnnnnnnnnnnnnnnnnnnnnnnnnnnnnnnnnnnnnnnnnnnnnnncgtcgacaaaaagtgaatggaaaagtaccattgacttgctgctataggaaggagggctctatatgggcttaacgaagaggaaatacatgcaaagtaaggccatacggtatataaattatagagacataaagtttaaaccataaccataaagaaaatttggggggatgcaccaaaaggacccctgattgggtaacccatccaggactacatatggacccaagcggacataaaatgaaaggttcgaaggga

SEQ ID NO: 44558 - DNA, 544 bp, Arabidopsis thaliana landsberg
ccgtgattgatagatagatcagtacgaaagtgtgtaatggtgatgtgtggacgtgcgaagtctcgggtctaacgtgagtcgtgatttctctgaaaagtcataaatcttcaggtgctttcttttaaaagctttaggaatgatgatcatcatcttcttactttcactttattttcatgttcttctttacaaatccaacctctaaaaaaaagatttagttcttgttttgatttaggatactatttacatttggtacacctagaaatgtggacaacttttttttttttccatgaaatttacaaaagaggaataatggtacaagctcaagaattcatttatcttagaatagcaaaaacaaaaaataatagtgggtggtctttgattaattatacaagttcaattttgaaaaggactagtgaccaacctagcattaattctcttggtaaaccaatagtccaatagactgattattaatcgcggacatattattaccaaacaaaagaaaaatggtacattgaaaaaaacgatttaattaggaacgtcaaca

SEQ ID NO: 44559 - DNA, 775 bp, Arabidopsis thaliana landsberg
agaaaacatacgcaagtctacactttaaatgtagacgatgattgggctgacatcgtagaatcatctatatgctgaagggtttactaatgaacttatcggaatcttatattcttacataaatgcttgatcgtggtacttctttacctgcttgattatctgaagtgaagcatcagtgagttgaaactatttggaagctgtctagccttggaaacaagcttttgtgatgtcactctttgctctaaatagatatttcttgtgatgctcatatcttgatctaataatattagatttttgtcttacgttcagcatccaaggtggatccattgcatcctgacttcttcgagttcacgggtcgtgtgattgccttagctttgatgcacaaagttcaagtgggtgtgctgttcgatcgtgttttcttcttacaattggccggactgaaaatatctttggaagatattaaggacaccgatcgaattatgtacaatagctgcaaacagattctggaaatggatccagagtttttcgattcaaacgcaggccttggtctaacattcgtgttggaaaccgaggagctgggaaagagggatacgatagagctatgtccagacgggaaactcaaggctgttaacagcaagaacaggaaacaatacgtcgatctcctcatcgaacgccgatttgccacaccaatcttggagcaagtaaaacaattttctcgaggtttcactgatatgctatcacattctgtaccgcccagatcatttttcaagagattata

SEQ ID NO: 44560 - DNA, 737 bp, Arabidopsis thaliana landsberg
tgccgaatctgctcaaggagctgaaaatcaaccccaccaacatatccaatgtactttacattatcaatcgctttccttacgcaaagatcaacaagcgaaggtggtttcttggtaagcctctcaaataacatagcagcttcccaaaacctacaagaaaaaacacactttaaatatgaattaacaaggatacacacaagtagactatatcactaatgtacaaagatacagaattcatcagcttatgagaatattcatatgaataaatttgaattttgcctcaaaatttaaacaaaacgttagctttgatcattaaagtaggttcctttacactaaaaaatccatcaatcatataactcataagaacgatgcagatcttcataaactctagagctttctaaatctaaattcaaaggatttgatttatgaattgagatgatccaatcaatcaaaccctcaattccaattcacaattgaaccaatctatttccaaatcgaaaacagtagatgcagaggaggaggttaccaaaaaaattaaaagagagctgaatcgaagattgaaccaggaaggaggggaattgtccaaagaatctcttcgacgatcgaagaaaccttttcctcttcccggaagaatgatgatagcggtaaacagacgccggagttcttgggtttctttaatcgtatgtatactcaccccaacgatgatgacgatgatgatgatgaatacaattggctaacgc

SEQ ID NO: 44561 - DNA, 580 bp, Arabidopsis thaliana landsberg
tgccacccagccgggccaccgcccgttccaacgggagccgcaggtcctcgtaccgattggttaactcggccgctttctcgtacttgcgccaggagaccttgcggtagctcacgttggtcactcggcccgacggttctccgaagccggttctgtcgtcctcgccccgctcccagattcggggcgaggacggcttacctttcttccagatgatcggcgcggtcttacctcgcgtccgcacttcacgactcggctcgtcaagcctgatacgaatcgtgtacacagtgtccagtcccacttctcgaaaaagcgagaaccagcccgggtcggagaaacgcaagcccgcgaccaggtcgacaccctcgtcagcgccgtcacgcacttcgaacggcgtgtcgaccccatgaacggtcacgagcgccgcccgcaaggtttccaccgaatgacccatcgatcagttttctctcgctccgtcggaccgcacggtccagaccaggtactggaagtccggaagcagggagtcgaactgctcgacagtggcggtgaagaccatacgcaggagggcgcgttccgcgacagcgtt

SEQ ID NO: 44562 - DNA, 719 bp, Arabidopsis thaliana landsberg
acctaatcgaacaaacatcacaattttcatccatgcaaggcgaagcagcccaactagccaatctacaatatctccaacgtatgtttaattcttcggcttcattaaccaacaacaacagcaacaattttagcccgagtagtattctcgatatcgatcagcaccatgccatgaaccttttaaactccatgatctcttggaacaaagatcaaaaccccgcttttgatccggttcttgaactcgaggctaacgatcaaaatcaagatttatttccactagggtttatcattgatcaacccacccaaccactccaacaacaaaaataccatttaaacaatagtcctagtgagctaccatcgcaaggtgacccacttcttgatcatgtccctttcagtctccaaacacctttgaatagtgaggatcactttatagataatttggtcaaacatccaactgatcatgagcatgaacatgatgacaatccatcttcatgggttctcccttctcttatagacaataaccctaaaattgtcacgtcttctcttccacacaacaatccggcggatgcaagtagcagctcaagctatggaggttgtgaagctgcgtcgttttattggcctgacatttgcttcgacgaaagcctcatgaacgttatatcttagttactcttggctaagtgttttttttttagatctctgttattttatacaagttttttattt

SEQ ID NO: 44563 - DNA, 646 bp, Arabidopsis thaliana landsberg
cttctgggatggttgtttggtctcaatattttggatcccatacaaattccatcccgactattatttgggttttgcggctggactctataacacactgattttagttttatatgaattttacgttgttttacgtttgatcatgaactaaaaattcagcaatccataagaaaatattttttggactagttcgaaactcggccagacaatactaaacctattcacatatttaactttttttttttttggacaaacataattaactttagtaagtgttatatttttgtcaatattaaactagatgtggtgtttttaattgtgggaaataaaattaaagaagcaaagttccatgaaatatggactttccgtaattggaaggccgccatatgttgccttcatttgtattttccttttattgacccttttgttttcttataagataaatatatatataactaattaggcagaagctgagtggcattagttagtgaaatatatttatcattatcccaaattcctctagctgacattactttgaatttagaaatttcttatccgcaaaatttgtactaatattatgaagtagtacatcgaatagaatatatattggtgcacattatgatccactttcaatgccatccattcgaat

SEQ ID NO: 44564 - DNA, 909 bp, Arabidopsis thaliana landsberg
cggatatgatttttgactatggaattattattattttattctataaaattatagtttttattattggaatcatttataaatgctattactcagtgttctttaaagtccatactaacgaattcaagtacttatttaacaaaacaaaacaaacaaatactaataaactaaaagtacaaacattactatgttattaaaaaaagcatatagctgcgtgattttaaaggtatatgtgacatataatacaacgacgccgtcgtattttattgaatttttttgtcacttttaattagtatacagtgaggaaataagcaaaaagaaagaaaaaaatattgttggctcggctagtacctataaataaaaacactagtatttggcccaggatataatcattgcaagtttagaactagttagctaatctaaaccgttagatcaaagaagcaatcttactaatcagaaaaacaaaattcaacaagttacaagaatgaaaaaaatagggataaaaaaaaggataattcatttacattcgatcaaaaggcgaatgcatagatcatagatgcaagacacttgtgagttgtgatataaccaaaaatttatttaattatatgtaatatatattcgaaaaatttatacaccgtatataaaatattcgaataatccttttctttgatttaaaaatattttctgcttgttttctcaactcatgtattaatttaaataataaaagtagctaccacctttctctgccccactttaagataaagctaaagcatggaaaaaagcatgggaaaaaagtaaatatatgatatacaatcaaataaatctaaaaaaatagaaaagaaaaattaaaggaacgaaaaaaagagggaggaaaaagacaaaattaaaaaacaaaaataaaaattccaaaaa

SEQ ID NO: 44565 - DNA, 823 bp, Arabidopsis thaliana landsberg
tcccactctaataaagatggactagtctacacaaaaattaatattatctttgattacaaatcggacatgaaatatttaaaaaattgcatagcaccaaaattagatatgaaaaacgttcattatatatttgtcttattctccaaatatgcttgataaacacattattatagaagaattacgaaaatatcttttactattgacaccaatcaggaatatatcaaatatttttagataagaatataaaaaacacagaaaatgattgtatggtggttatagcttcattcaattttattgcagcaaacaaacagaaaggccagagagacgaaagagagaggcattagggtttaggattaggttttagaaaagggtttagatctctaccaactggtttgttaagaacataatctccttaccacatttttactcttgaaaacattttgatctgtttttgttatcttcaccaaaagacttgactccaagaaacaagaagaagaatcaagaagcaagttcaagaaccagcttttaatgaaatctctacttcaaaaaggaaacttgctttaaggaggatggatcttttgttttcttgaatcttttgtgtgggtaaaacattttgtattatcaagattttgatttgaggagataaagagtttgttgttaagtttgtgttcttgggatcatcaagagttaaaacaaaaaaaaaaacatttcttttttccttcttcaatttgagatttagtgtctcctttaacacccacaaagccagcagaagctttcctggaaattctttaatctatcctttctttttctttttaaattcttaaat

SEQ ID NO: 44566 - DNA, 614 bp, Arabidopsis thaliana landsberg
gtgtgcaaaattccgttttttgataaaaatataggaatgtgatatacttcttaggaaatatgatatatatatatataatatcaattaaaataaaatctttaactttctaatgaaaatatcaatatgcggtctaccgcgggtcaatctctagtatcttttggattttgaatgtttttattttattaggatacatgtaaaatattttacagactttacaaagaatataataatttaaaataataatagagcaataaaaaaaactagacatgaagtagaaaagtattttgtcaaattagacgaaaagagaaggaaaccttgtcgaattatacaagaagtggaaaaattttgtatctaaaagaggacaacctaacctaaaacatacatgtctgaaaactcacaaagtgtcttgatcccatcttaagtcacttcgcaaaaagcactcccaaaatctcttgtcggatatataatctaacgaaaaatttgccaataaattaagacgaaagtccgacactgtcgtaccaagtagatgtggtcaatgtaaagaccatgtcgtagcatgatagctatagatgttgaaggtttaagaactaatatgttaggcttattatggttta

SEQ ID NO: 44567 - DNA, 637 bp, Arabidopsis thaliana landsberg
caaagaatcccaggtgagtttctcgacccaacctgcatgttaatgtgaggtgcatcatcagcacgatttataatgcatgaatccagaacaggaacaaagaagaaatctgcctcttctccattcattgtacgatgagcggtggccaagatgttctcgtagaatgccatcttcaaaatcaaaagagacaaagaagaggcaaagttatctttcaattcaaattcaggagaaaattgctgaattatctggtattcgactcaagtttagtagaaaacctgggaaccatatagataatctgtccatactgttgcattcctctcatcatagatcctattaacgcattcaaatttaaaatgccggccctgcaacaacaaatttaaatcagaggagactgagaactttatcataaaaggtgattttaacattttgtagaagaaaaactaaaattttggattgtgactaaaattttggattgtgacctcaataagtagactgttgaagtctgggggtagatcatagatgtatataagaggcctttttttcttcaccacagcactcagattaatgagattaccagggacatttttttcacttggaacttcaagatgtgctggtcgaagccactgtggccactctccta

SEQ ID NO: 44568 - DNA, 917 bp, Arabidopsis thaliana landsberg
  unsure (1)..(917): unsure at all n locations
attttggtcggaagtcacatcagtaatatgtttgaagacaggtaatcttttgaatccgagctcaaacttttccaaaaatatcattcatttttttggtgactgatttgcaatttgtgtctcttacaggcaaatccttctaacatctgagatcatcgtcttccttgggattctcttcagtttcaatttgtttgttccatacactgtacctcaatacgtaatctctggtctcataatgtttgttgctgctgaagtactcgaaggtatatactaaacaaacctctgcgttctgttttaaaagaacaactgacttataatgaccctttttggtttctttaggtgtgaatctatcgttgttatcgcgggtaatgtcatcaaggctatcgaaaggaacgtacaacggaggattgctctcaacagaagctggaacgttggctcgtgttgtggcagatgcaaccataacattgggaggatacttaggaagaggccatctcctgaatgccactcttctaccatcacttgtcatctgcattggctccatcgttgctacttgttgtacttataactcactctattgattttggagttttgctaccaaattttacaaaatagaataaaacagtgtgtatgatcgatcctctctttgatttgattatttttgttgttctaattcatatgggtgtatatgtgttttataatacatatagtatgtatattcgtatatatacggtgaatatcaaatcctccatttgttggaaattccagttttgtgagattctttttctgaagtattgtaataaattctcatataaatttataagtttttatttggtatctgcttttatataccagttagtccatgcacatccatttcttgttctctttgtgaatctgtaactgngtactatgcatggtttctg

SEQ ID NO: 44569 - DNA, 929 bp, Arabidopsis thaliana landsberg
  unsure (1)..(929): unsure at all n locations
tatcatcagcttgttatttcggtgtctccttgaaagagagaggtcataaaccaggatatctcctgtgcttttatcactgctcaggtggttaaccattttctttgtaaagcatatatgtttttctctatgacagtcaagaaagacagagacaattcacacgcaacacaggtgatcaaaaccatgatgtgttttactctttgtcactgatattattatcattacatgtatcgactgattcaacaataggattctcagttttccctttcgtcttcttcattgatagctctcctcctcctgatccttttggcttcctatgacgtgatgtagactttctactatgagtagaactatctgaaagagggtaagaaccttccatatcgtgggtggtaaccgagacaacacgcctcctcctaactgatggatcattcgatgaatctatcgacccgtgcctactcctgtggtgacgtcttgtgttttttggttgcatatctgatgctgaggcactgctgtttcgcctaggcggagaaccgttttgtgagaccgtctcggatttacgccttgtcttcttgtgctttggtttgtcggtaggaggcaacaactcttgtaatccaactccttctcctatttgattgttgttggcatctgctcgagaaactacttgaccattctcgttttcttgaggtttgaagtcacccatctacatgttttgttttactaatgatgagtacacttagctaatacgtatataaagtcggaaaaatacgtacagatgtacaaagcgtacccagcttggcacattggtcgcgggaaccgttcgatccgatgtgggcgacatgctttacatcgggtaggaacccgatctgcatgtncttgtctttttcttcgtctggaattagattttttgttttcatatacatacagagatgtga

SEQ ID NO: 44570 - DNA, 501 bp, Arabidopsis thaliana landsberg
gctccgtgccgatggccccggtgcgcatcgtcgagcccatcgtcttcaggatcggctccatcgtgttttacgccggcgcgtcgcctgcgaccatgatggttagctcgccggtgcgcgcgcgcggtacgccgtccgagaccggggcgtctatcatcgcgaggaccgaggcgcgtgcgcgctcggtcagccgcaccgtgtgctcgggctggcccgaactcatgtccgccaggaccgtgccgggcgccgtctgcccggcgagcccgttggggccgaacatcacgcgctcgacgatgtcgctgttcggtagcatggtgatgacgtggcgcgccgtcgaggcgacttccgcgggagacgccgtgggacgggcgccggcggtctctggcacctgacgcgtgcgtgccgcataggcgttatgcacgaccactgggaagccgtcctgcgcgatgcgcgctaccatctgcgcgcccatcgtgctcagcccgatgaaaccgaccaccggca

SEQ ID NO: 44571 - DNA, 869 bp, Arabidopsis thaliana landsberg
gaacaagaatgtctaccattagtttatataaagtcagtcaaatattatatgccctaaactgtgtggtcttaagcggtatttttgttaacaatcaaccactaaatgtcattttaggtggctgaacttcttttgtcgtggacatcgttttacagctcaagacagtgaaagacatggatgctaacaacggaaaaatatatatgtcatccacgagctctacacatattggatgcattaatagtatctatcattaagtaaaatgtatccatatataaaaggaaaaacagatgaagaggaattataatacgaataaagtttcactatatgcaaaaagaaggaaaactatagaggaatgtgtacctatacctaatgggtctttcctacaaaaaaagttgctcaatgacaagaggtaatctagctcgtacttagttaggtgcatccgtgcatgtaaccagtgtgtcaactaaatctagaggaagcaataattcaggatttaaaccatcacaagtatctaccaagttcagaacatagacgaaatcacgaaatgaaagaaattatgatttcacgatgtcattgttgacaaatttctctaaattttcaagaatagaaccacttcagaagatacactatgaagttcagaagattgttttaccaggaaagccaataggatcacatctctttctattcttgttcaagaatttgcatctccaagacccttttaaggtattcatataatatttttttgaatgatacttcctgccaagaaatagattcaaacaattaattttgagcccactgcatgtattagaagagaaggttactataggatagcatgttgtacatttaggattggttaacctaaattttggtag

SEQ ID NO: 44572 - DNA, 717 bp, Arabidopsis thaliana landsberg
ataatttgaaaataaaacccaaccaataaaaatatttataacaaaaaaaaactaaaattaagatatcattgaataattaatttagtaatcattaaatagtgtttactacaataatgcattaattattgacttattcacatggtccatgcggtctcctatacaggtcgtcgttgtctctatagattttcgtcggtctactgactctactcgacacactaatcccattacacctgtatatataatcagtaaatagactttgtgttagccaacatatgctttgtttaaaattatataaaactaaataagcaacattgcaaggaagtagcttcaacaaaaagaaacattgtaagtattgttttttcaaaacattgcaatacataattatgattacggttagccatgggctgtatccatagacccgtgatatccacatttaataggcctggcccgtacgtataatacataacccactagttatttgattgatattatattactgatgaggcataaattgagatatttaggtttgtgcaataaatgcttaatccgtgaattgtttggacaaagtctacgactcctatatatttcacgagacttcatgtttgtaggtttttagttagcgtttttttctattggtttcgtagttaattagagaaaacaaacctttttacaaattttaaaaagaaaaaggttatatactatatatatataaataat

SEQ ID NO: 44573 - DNA, 518 bp, Arabidopsis thaliana landsberg
  unsure (1)..(518): unsure at all n locations
gaaaaagaacaggaccaaaagtatactcacttatgacctgccggngtttctaancttcttgncggcnaaanaaaangngaacnggctgcgatataaaaacacggggaaacagaatgccaaccggggagngcagnacatgnnctatatacatgttattaataacgcgcttcaaactgataaaaatgtattctaaagaagtatcggatttaagaagataacatggagcagcctcgaacatggtaatatattgttgaaggcatgcgtttagaaagcagtatatttggatcatggttatacacttatacatatcaacatgcataaaagcaaccatcgattaatttcatttttagaactatgggccattaatgggttattattggtctactcaaaatttgggcctacttaaatagataaaaaataaacgatacccaactgataaaacattcatgaagatgtttattgcatgaagccatgaatagaataggttggattttcactctttacaaatcgatactttt

SEQ ID NO: 44574 - DNA, 716 bp, Arabidopsis thaliana landsberg
cgccgcaagactaggcgagccactagtggctgcattgacgacaaaatcaccaccgacactttcgataggcatggtaccctccaaatccggatgcaatcaacgcactaacgttgcttgtttaagatactccataattatttaagtaaattacattatattcttattttaaagaaacctacgcatagaaatacatatcgttcatcaaatccatgccggcgctattgtcgacaatcaacatggtacctgtggcaaaggtaaagacctggtcgtttccatccaaataggtttcggtcggtgctcctgcgcccttgaacacgatggtgtcgatgtcatcttcgaagtctatgatgtgatcgacgccaaatgctcccgtgaacaagaaggtgtcgccgcccgagcctccggccagcgtatcatttccactgccgccgttgagtgtatcgcttccgctcatccctttgatccagtcgtcgccaccgccgccctggatattgttggcgaatacattgcccttcagaaagtcaccgttggcgatgtccgatccgatgaggttttctatgttcaccaatacgtccccttgtgcgtcgcccccgtaccccgttccgctatcgagatagacaccgacgcgctggagcgaggcggaatagtccgccgtgtccctgcctcccatgccggcgatgcggtcccggcccggcgagacccgcaatgacattgtt

SEQ ID NO: 44575 - DNA, 902 bp, Arabidopsis thaliana landsberg
tccgaggttattataggtgattgagttggctatctctttctaattatgattttagtttttttttttccataatccttgtgggtttgttagagataagatatgtgtatgattaatggtgagaaatttaataaaggtaaaaagagcaaaatggttgagcgatatagacatcaaaggacagtgaattaaaggagcataaaaaaaaaatcctaatatgccttgagagaatcatcctcgaaactcgttagtgtaagataaataagtaataaagtgagggaaaacgatgatggacttaggttaatttttgtcggcaaatccgttctcgtcggactttatctcccttgtgaagcggttttagcttttgtgtagtcacgatcggaaagagatggtgtgttatagtctgaagtatgctagtgtgtttgcatatacataatacatgcatgtataatatgaaactcctaacttttttattcaagtgacctttgatatttttagttatttacagagtctatacaccacgattatttatttcaacaagacaacaacaaatttaacttctatatgtatatactaattaataccgtggacacgtgcatggtaattttcggttccatgagatcaagtttcttatttatacaaattaggaaaaacaaatgtgaaggtttcacccagtacaaaagtgataacgtacgtaaagtattagtggccttttagtagtactacgtagttgaaaatttcagtccttataatatgtcttttactatagttagtaacccttcgaattttaatcaatgacatgtttatgtgtatatattaattatggcgttgaggatgaattgtcaatttttcgggaaggcatacttggataattgatctctcgacccatacctcaaaattatcattag

SEQ ID NO: 44576 - DNA, 561 bp, Arabidopsis thaliana landsberg
gcaggatgtccgctaactggttatggggtctggatcacctggccggggggtacgcggtttttcagcaccacattgagactgggggtcacggtcccgagcggccgcagcaggcggcggtatgcgatgaccgacagggtcagcgacagcgccagcgcgccgagtaccgaactgagcgcgatcaccagccggcggagcagccgcgcgaattcggcggtcgtatcacgcaacccctggctgttgtcgcgctcgagctggccggacagctgctgcatcgcgcggttttcgagatcgcgcgcgacggcgacaatcgcctcggcgcggatcggcgtccagcggcgctgccagcagcggatcgaaatcggcatctcgtgtcgtgatgaaattgcgcagtgcagcaacgccggcgtcgttgcgcaccggcaggaaggcgagctggttgcggactgccgcgcgtgccgattgcagccgggcgaccgccgcggccgggtcgcggtcggcgtcgaccgtctgctggatcgcgaccgcggcgcgcggtatgtcgaccaggccgcgctgtatgac

SEQ ID NO: 44577 - DNA, 292 bp, Arabidopsis thaliana landsberg
caccttgaagtcctgttccgccaaatacccttttggcaatcgtagtaaaattgtctgttgcgctgcaggaattggaaatccaccaggtaacatggacatgaaagcgtttcttctccagaaattcagccccttggagcgcaaacaggtaatacccttgcattaacctaagttcaccagtctgtagtcatatgatctctgcaagtctaaaactttttggactaacgatattgtatgactattttcatcgaatttatggtggattttaaatggattcgtcgtactgaattatgtt

SEQ ID NO: 44578 - DNA, 799 bp, Arabidopsis thaliana landsberg
gggcaattgagcagaaaacactgaagttctgttatgaccggctccagtctctcatgctaacccttgaaattacagatacagatgagtttttgcctatccagacagtgtgcgactttgcaactcttgttgggacatatgcccggggattttccatcatcatcgagccttatgacgagagaatgccccatattccagatcctatattgcaggtaaatatggtgttgacctactttcttttgagtattgtcactgggattttaagggattatgactcacacgtaaatgctaccgtttgaataattgagaattgtatctgaaacatatatccttttgtatcttagttgagctgtcatgatgcgtctctggcgatcaaaccggtgtttgatcgtttccagtcagtcgtgattacatcaggcacattgagcccaattgatctttacccccgtcttcttaatttcactcctgttgttagtcgaagctttaagatgtcaatgacacgagactgcatctgccctatggttctaactcggggaaggtatgtggtatataaaaagaatcctgaacacttaacttattttttaattttatatgtcttgacattattggttgttttctttttcagtgatcagcttcctgttagcaccaaatttgacatgagaagtgatcctggtgttgtgaggaattacggaaagcttttggtagagatggtatctattgttcctgatggagttgtctgcttctttgttagttactcatatatggatggcattattgctacatggaatgaaactggaattct

SEQ ID NO: 44579 - DNA, 829 bp, Arabidopsis thaliana landsberg
  unsure (1)..(829): unsure at all n locations
tctctgccaaatggaacaaataaaattcactttttctagctgaaacatctcttgattttttttagacacacaagatccgagattgaaacttaattaagtcgctaaattacactctaagaagcaacaacgtcactaacggatagctccaatctatgcctttcatttccgaaattttactcatggtcctccatttctagttttcctatcctcatgaaatcaacagaataagtaaaacgcagagagtgagagagcaagagactcacgatggagagatccgagagctgcagaagacgccattggaagaagaagaaagcgtgagctagataggagaaaaaggttttggttgattgaattgacgccaagaagaaagagtgtgttagttgagctaagatcagttgaagaagatgacggttgaacaaatttaattattttgagcggccttcttctttggtaactccgtccgccgcatctactactacactacggtccgtcactttcctttgctaacatgcgccggtatactaacaaaaaggcgtaatttagttctgaaaatgtagtattattaacaaaggcatattcttatctctcttatatgctttcatcaattaattttatcaaaagtcttcagcttctgttaaatactattaagcaaatttaagtgtccccattttctatcaacttatgcagtagctgactctatgtgccatggaatcaaacaaacaataccaaaagcaaaaagaaaagatttcaaatgcgtnttttgattcttctttctttcctagaaatgtcttttactcttcttgcttcaagcatgcttcaggtagtctaa

SEQ ID NO: 44580 - DNA, 504 bp, Arabidopsis thaliana landsberg
tgttagttgaatctctaaaagtaactattctccaaataacatatattctgttttacgttgttaagttgtctactatttgtcagcattgtgaggttcagttgtaatattctctctttttcttaattaacatgtagatattcccatagagaaagcactaaacttttgctttgagaaagaaaagaaactctttattaacgaagaaaggaataacgaataactccataaagccatactgaatttatcatttcattcatggtgcatattctaatgttgtttaaacgccataatattttcctatatatatatagacaacaaaaaaaaatacgtgtatgattttttcggttgaagtaaaatatttcgcattagaaaggttaacaaaaacaataaaaaggcatatcttcatatcactgttatattatattttttggtttaaatatttaaatccgctgtcagaaaccagagagaggcgtattaaggtttctgtgttttgttgatgtgttcttg

SEQ ID NO: 44581 - DNA, 459 bp, Arabidopsis thaliana landsberg
  unsure (1)..(459): unsure at all n locations
tgctataaacactaggttactattcttatatgctataaatcaattatttatttattgtttacatacacttgttttataggttcgactatattttctattattttccaaataagggtctttttaatagttctgattttgattatgaagacaaaatagtcgttaactttaaaatgaaataaaatttaaatggaaaaaaaaatctcaaacgaaattaaatttaaaataggaaaattttttaatggtgcagatgcaaaactatggttgaatattttggnagatgtgagccacaacaataagctagtgcgtctaatgccccaccaaatatggtgaagcgaaaggcagccgggcctcttgtccgttcctcgcttcattttattttctttgttttgcattttcttgtttttgttttgtttagacggttcgttgtggctacttttgaacctatctatggtttaggat

SEQ ID NO: 44582 - DNA, 767 bp, Arabidopsis thaliana landsberg
attttgtaggtctctaattgatatgttttttttttacaaaacgaatccaacaacaggtatatcgctaatagtttaaggtattcgaaaccgttaaaaaaaaagttaacatggcaagtatcagtatcacctgacaaaataattagttgcctatgattggaaagaaaaagaagcgccgaaattgtagtttggttaagattgtcttgacagttgtagctccgacccaaatgatatataggggcagacttaaagcccaatgggctgatattatgatgggctctagtaactgttaagaaacctgaggaaacttgtgtgaggaacatcagatggtccaatgtgttccgcgttggacttttgtttgtttgttattcttcacctcctgacagcataattctttgctcggaagatgatttaaacagaaacatataaaggaatgaaaaaagttgggataaatttccctaaggcagaagcaatataaaaatgcttgaattagatagcttcacactcacgtcattttgtgatcttatttataaatccctaacctcgtggtgtgaaaacccacgcacaattaaatatatattcaaagaagaaacgtgcctttaatccaaatatcgttagttatcacttctatatcagcatacatggccaaggttcgaggaaaacctaaatttgtttaattatgtttttatcaaagaattcatttatcttcttcttttcttccacttttggaaattgaacaatttttttttaaaaaaaggcagaattatttt

SEQ ID NO: 44583 - DNA, 523 bp, Arabidopsis thaliana landsberg
  unsure (1)..(523): unsure at all n locations
gccgtcctcgcgcgtcgaacatctcgggacgcggcaggccgagctggccggcgatccttcttcccgagcgggttcttgttgaccaggggggagtaggtgtcgctcatgccttctgtcgctcctctttcctcgcctgcgggcctcgcaagctcgcatccagcaccccacgaagtttctcctccgcttcgctcccccgaatacttcgcggggaccccgcttcctcggctcggtcggagctcatacctgcaccgcctccacgatcgccacgattccattcccaccggcagcgcagatcgagatcagcgcccgcccggatcccaactcgtgcaacatcttggccgtcgaagccaggatgcgacccccggtcgcggcgaaggggtgaccggccgcgagcgacgagccgttgacgttcagcttggtgcggtcgactcgnccgagcgcgccgtccaggccgagcttctccttgcagaactcgtcactcgcgagcgccgcgaggtgacacaacacggtcgaggcgaacgcc

SEQ ID NO: 44584 - DNA, 681 bp, Arabidopsis thaliana landsberg
ctgcttctcattcttaagtcaaccacattttcaatttacccaaactgctttttatttctttttcttctctttgacattttgtcatacattttgtgtgcgcttaacacaaaccaaaaatttacagtaataaacctatctgtagcaaacccaaatcagttctaatgcaatctaacttgttaaattccatgcctataaaactaagctaaccatcatatccttctcaaatcttaagtgacacatgttttgtctcttaagcagagccgtgccaaggatttctaatgctataggcgaaacatatatatagttaatgtctaagtaattttataattaatatatttaaaaatatagttgaatattacaaaattttaagcaagtctacaaaataatttgtggtcacagtgacaacaaaaaaatagaaattattttgtgattaaccatagtgatttgtgctaggattaattgctagtgttgacgatgggttcaaaacatcattgacaaaaagaatttgtgaagaatttttggtgaagaaaaacaaaacaataatttattctagttaacattttgtaaatattgttagagctattaaagccattacttagtcaataattactccttgtattttggagatcttatatctggctagttctactgctttcctttattccttatatatataaatct

SEQ ID NO: 44585 - DNA, 552 bp, Arabidopsis thaliana landsberg
acaaaaataagacaaaaatgaatgttttaatttgtagataatgaaaattgtttagaaacagtttttaaaattgtttaaaaacgttactatgatttcaccttttaaagaaacgaaaaaaacgagttttattcactttttcataaaataagaattaaaaatttaaaacgtatataaagtaataactttgttaaattcttcattttaattgtacattttattgatcaaaacatttaaatctagtggttcagattggtatgttcattgtatcatcatccaaaattcaaacccgcataatgttatcttcatgggttttttttggttttagtagatagcatatatccaagagttttatgtagatttttggttatcgaattttcgacagcaaaattaaatgtatagattttagctaaatttcatagagcactggcttaaccatcatgagaaaacaatctgtaagataaccatttgaacaattttgcttttgtaatgtcgacttaaaaaccccttaggaatcaaacacatgcatgtttactggtggtgacgctatgaaac

SEQ ID NO: 44586 - DNA, 748 bp, Arabidopsis thaliana landsberg
ccataagcatcctaatgttcagataccggccacagttttttcgaaagaagcaaggatatatatatggcggaattttttgttaaagatcgctcaacaaaaagtcaacacaatgaagcaaaagttttctcttggtatttgggttcctataatctcattcctagagatgttctagctttttgcatcttgcacgttttagtgaccactgacatacatctatagtggaccaatgtggtttcttgggtttgaagaaatcagctagagaggatttgaaacgaactagtatcatcagattacaataactgatagggcagattctgatcagccaaatcagattcatgatttcacctcgatggatatatgatatatataaccaagcaacaacatgcaaaattaacagggacaataatcaagtacaatgcagatcgagacggataaaaagaagaaaaatcaatctgagattttaatcagtagcttgaaaaaatgtcaccttaagtagttttgatgtacacagaaacatcagattcaaatatcagaaaatcccagaaaattaagcaaaacagcttcaagaatggtaacaagaaagaagacttaccccaggcaatgtcttcttgttatgaaaactattgatcaccttgtcagcatcttcccttgtaggacatgtcagaaaacaacatcctaaaattcaacaagaaattagggttttcacaattcaaaaataaaataaaagcaacgaagaaatcacgcgcga

SEQ ID NO: 44587 - DNA, 694 bp, Arabidopsis thaliana landsberg
gtgttggtagaagcaggagctttttctaagtgtttcggtgaaagcagtggaattcaaaggttacaatggaggtggaagcatgagtttctcgggtcaaagctgggatcctagttccgagattgaagttccttcagaccaaagacccgtaagtaaatctcttttgtttttctttcctgattctagagtaatgatgagatttttggtttgggtttataggtgaatgagtattcgtctctaaaggaaggaatgttgtattcatggggagaattgggtccaagcgaattctttattcgtctaggtggtctttggttggtcactttcactgttcttggagttcctgttgcagctgctagctttaatccttccagagtgagatttttttaaacagagcaaacagagcctttgcaacaagatttatttagtacagctaataatatatatgttctttgcaaaatatgttgcaggagcctttgagatttgttctagctgcagggactggaactttatttctcgtttctttgattgtcctgagaatttacctggtattgaactttcccagctttctctccaaagaggtctcacttgttctgagcttcattgatttggtcttgacctttggtaaataatataagggtggaactatgttggaaataaaattccttctgcagttaaaccataccaaaaaaatggatgg

SEQ ID NO: 44588 - DNA, 637 bp, Arabidopsis thaliana landsberg
  unsure (1)..(637): unsure at all n locations
attttctttaaatagcaaatactacattgtttttagtatatcacaacaacaaaatttgattatgtatcataaacgaccaatcacaaatcatatacaactagacaaaaataatcacatatgttacaccttacaataaatctgaaaactaagtatagtatattatattatcgtttaattaatatctagatattaattgaataattcccatttaaattttgggtgaaccggtctaacgggttgtagggttgccgtggaggctgaactagaatcaaacgtttcccatcttgttgttatgatcaccggaggacttgatgaggaggccgtcggnnnnnnnnnnnnnnnnnnnnnnnnnnnnnnnnnttcccgttccttgtattgcggctttggtttcgtttgcggttgccttgagttcttgatcttcaacaagtcgagagcctcaacatacttgtgtaatctttcctccttccaacaatttgtaaatcgaatcattagattctaactatacataaaaaataataattgtcaaagcgacttcaaaaacttgaataacaagatttatgggtatgattggtaattacttatagaatagttccataattctgcaaatttaggaataaaaattaatagagttgtgtca

SEQ ID NO: 44589 - DNA, 603 bp, Arabidopsis thaliana landsberg
ctaaatgtttgggccagtaattacgtggatgggccgaagttaagtagatccattcaagccttgttttttttatagattttttttgtaaatatgtttaggtcattctttcgtacatcttttgggtaaagaatcaaagcaaacgtcacacgttgcttggactcggatatgttttgacattgtctatactctatacttctcaaaaatgaaatggcatttattttaatcgttttttcaacggtcatttttttttaaacagccaacggtcatttatcttttttattaattaccaataagtataaattgcatttatacataatttcgtctcaattcgttttcttcttgtttacggtttaatcatttatccaaagttcaaacgaattcacagcatatatgtacaatacgatttatttcagttcgatacaaagtgtatatggataaattaaaagggtaattacattttcggcaataacatgcattatcgaagttactatttccttccaacaaataaaacacgtcccatatctgccaatttatatttgaaaagttgtcatatattagacgccctctctgttatttagtgggtcacatcacatgctctctaat

SEQ ID NO: 44590 - DNA, 650 bp, Arabidopsis thaliana landsberg
gccgacacgcttctccatgtccgtcccactctctctcccatccatgtgtatttttttctgaaattattattatttattttgaaaaataatttaatttaatttgattggtccagtccaactagttaaatacagctttctcaactggtgaatatatatatgggttcggaccacgactgcgccattatcagagccccgtcttgacttctgtggttgaatgtttcacattaatttcattctctacctgattgatttgatttttgtatgttagaagaataatagctttgtttgatgatttactactctttgatttttttttccattaacatatatcttgataatcagttaatcactatatcgtatactattgaagtttaataatttacaaaaaaatgcatttttatgataaaatttatataaccatgcttataattttaatttaaaaacaatgattttctaataacctggtttgagctactgacaaaaaatatcaccatatttatgataaaattaaagcttgattttaagttctacattactgatcaatagtcatatcaggattaaaaacatggctcacacatttattaaaaattattgcataaatagttgtaaagtatagacatatatagataacccgttataaaatgttttac

SEQ ID NO: 44591 - DNA, 550 bp, Arabidopsis thaliana landsberg
gctggctgcttatttttccttgcctttttgttatcttttcctgacagttctgattatataccatttttacactgacatcttttaatctctatgcagagctgaaattgatcgtctcatagagatgataagttcgagggctattgatctacctgatgtcaagagagacgagagaaatttggagattcctttgagagagggagccaagaaaaatatgagtttatttgataaggcaaaagagcccattggtggcaaggatgctaatagtgaaatatgggctacaccaaccccacttgcaaagtcaatagtgagttgtttgctatccagccttttttgttaggacgttctgatgaaactagcattaacatgaattgcttaggctattccaagtagccggaaaatcctaaaagtttgtttgcagactataggactaatttgaggttggtctgtctgtgaaaacttatgaagaaatatgtaaacaggaagaactatgtaatttcacatatttgcttcatcaaagagttgatgtttcttacttccctggtccttgttt

SEQ ID NO: 44592 - DNA, 891 bp, Arabidopsis thaliana landsberg
tttttatgatgtgactctccatttttatgatgtgattacaaaaaatcaagtacagatactacttcttttgttatttcttggaaagttatgtgacgctgaaatcttcaaatcttttattttaacccaattttaaatgttaacatacatacatacctttgacaaaagaaaaaaaaaaaaaaaaaaaaacaacgtacatacatacattcacaattcacaactccagtcagcacatttaatgtttatgcaaaatccacatctatagaattgttttctctaacgacattgttttaaggaaacgtcacgcgttattaatgattccttgcgacttagcttgtccataaacacatcacgagttccttctatatttgtgacaatgactattgactaatattatcaatttatatccatggatctagctactacttgataggtaataccataacaagaaataatcattggttaaaagccaacccagtgaatatcaacaaactccaactccaaatgataatagtttcatgtgaattgttttctagttaaggtaatctctcaaatcaatgtaatttgcacggttttttcggaatttatattggaaaatgaagtctcaaggtataagattagtatatcctaattcgatttaattttattaaattttgggatactttgaattgacataaaactttgtttgcctaataaaacaaatcccaaatgatttttcttctcgcttcatactaagttttctttttttgaggtctcattctcatcctaactcctaagctaagtaagtcgcctaactttatgaattgttgtatatcaacttgaaaaattaactaaagttttgttggaaacacctaccaacataaatgcttgaacgtggcatcttgattatagttc

SEQ ID NO: 44593 - DNA, 689 bp, Arabidopsis thaliana landsberg
tagagttcgaattcaagagtagtgatcatataactttcgttttcctttcaatctttcataaacgaatccaagtaccaagttaaatgcatggttacgtattatatactatatataaatgtaatcatgttaatgttacaaatcaaatcagaagaaacaaagttatacataaaggagaggatgttttgattttggtcgaaaagaagttcaacgtcaatcattgaaagaatgaagtaaatagcagccaatagaaagggaaaccaaactacaaacatatcaatattacataattttttaaatataattaattatccatatccacacactaatctttcattcaaattccatattaaaaaaaaacacagaacaattattcttaaaggcaaatttgttctttagacttatgaaaagaggaaactcctccaagtgcaggtggaataaatcctctgtttgaaacgacttcactactgtattatttcttaatttattttgtggctcacaataatctgttccttcattgcttcgtcactcaatatatgctacagcacctacttgttgtactcttctgcttcacatctcgtgtttttattctggaaacattcgtttttccagagaagacaagacgcaagaacaagttttcaaccatggaaaatggagaatgatttacttttagcataaagtcctcaaacgta

SEQ ID NO: 44594 - DNA, 451 bp, Arabidopsis thaliana landsberg
  unsure (1)..(451): unsure at all n locations
ccttgcccttggaaacggcgtgccggcggtcagcgtcagcttgcgattcgggccaccataggtcgacgactgaccgtactcgactgaccctttgacgccggaatattccttgtcgaggatgaagttgacgacgccgccgacggcgtcggaaccgtactgcgacgaagcgccaccggtcacgacttcaacgcgcttgaccaggctttccgggaacgtgttggtgtcgaccaggccggtcgccgacgatgctaccgagcgctgnnnnnnnnnnnnnnnnnnnnngcggacggcaccgagcgcgcgcaggttgatggccgaaatgcccgccagaccgtagctcagcgagccagaagacgtcgaagccgtctgctgccggtgatcgacggcaacgtattaacaaagaccgatacattggtcggagcagaggctgaatgtgctccgactaagcacc

SEQ ID NO: 44595 - DNA, 301 bp, Arabidopsis thaliana landsberg
taaaacacacgatgaggtgtggtttgtgtcaagtgtcaacatgtatatatcaacaaccacactctcatttgctttgagggtttgttagagatttagtacaaagaagggaatgaagggatgttgaagggacaaacatgcactggcgggaatgcccaaaccttgcgcaagctctccactgtctactcaatccaacaaccttgccttgggtggtgctgaccctgatagattacggactgtaaagcatgtttgaagctgtggcggacccattattccatgatcctctgaggcaaaactgaaatac

SEQ ID NO: 44596 - DNA, 639 bp, Arabidopsis thaliana landsberg
acaataatattaatatctgacctaaaattaaaactaatgaaattgataaatcttcaaataaatatcgagttctagtaaaagtaaacaataaacagtgaaaattgaaacttgtcttgattcggaacgattcttttcagacaacagatagacccaagaagttgcctgatcgacttatatttctgagtgaaatttaaaagaaaagaaaagagacacgggcatattcttttatattatctctgtagagagagtaaaaacaattaattagttcttatctttcgtctgcttcatcttctctctagtctctgtctctctcttcaccgcgtacacagtaacacagaccctttttccctcttactcaaggttcttctttgacatcttgttgccgaatccacaaagaggtacgctttcttctctgaaatctccctgctttgtaatttttactctcttctcttctcatcttcttcagtgctctgcttttttggttttggtgattgatcaggagaataaagattcgacctttattagatattaacgactctggatttttgggtttttggagcaggatccacatgggtatctgatcccgatggattccctggctccatggactgcatgaattcctattaaggctgtaactgg

SEQ ID NO: 44597 - DNA, 719 bp, Arabidopsis thaliana landsberg
atggttatttcaaatttgttctgtactctaaaatataaacactataaaaataagcttttattcatattacagtgaataatgacgagattgttatgatcatgtgctttctcataaataaaactgaagattgtggtttgttttgtcagctcacagctgtgattattttatattttgtaactaggattaatgtttatccatggctgtatttatgttctacttctaacaattgtgctgattgaacttcattgaatgatttatactgtatatatatgaactccgaccattattcagttatcatgccatttgataatatattttcattaaaacctagttaatgatcctttgattctttcaaccaaacatttttgttttaggttttgaaattgaaccactctattccagtttatctatgaaagccaactctggtatacattaggttcggcatataactagatatcaaaagttgactttaaaaaaacagctcaaaagttgacttcaaagttaatttgatcattccattaattaaatagaacatatataacaatatgatcatatatatagaaaaaaacatacaaatcgatcgaggcatatgacacgttttttaatagttaaaacaagcatatcttatttcacacatacgttacacattaagatccataattgattcacacacacccacatatatatatataacaattaaattagccaacgataggggt

SEQ ID NO: 44598 - DNA, 590 bp, Arabidopsis thaliana landsberg
acaagttaattaaattatggtgtgaatgagaaaaacaaagggttacgtcaatttcgtaataccataaattcaatagatgcatataaactttgatggttcattttgagtgaatagtctagtatgaataattaaacgattgattaatcgatggtttgacgtatttaaaaaacagttgattttgaagaaaacaatctagacaatggattgaattagtcttattagcacctaattaaacttttaacatttcttctttcaacaaaaaggacgaaaatcaaaaacggtaataattagcaaaaaagtgaaaacttttattttgtgtaaacgtgtgtatattgacacaaatatagtttttatatataaaatttcatgtgaataaataagtctttattgggaaacaaaaacaaaaaagagagaagaagaggaagaagaagaagaaggagaaagggagagtgtagtgtgggttctgttctgtcttggctttgtctcccccgcttatctctccctctctttctctctctctctctctttcactaaaatgttttttttgctcttaaaaagtatattttttccaatctgcaattttagtctat

SEQ ID NO: 44599 - DNA, 699 bp, Arabidopsis thaliana landsberg
  unsure (1)..(699): unsure at all n locations
gcaaaaactaaataaaagactttcagacgaaatgtccaatcaaagctacaccaactaaatcagattagagtgtacttcaaacaaataaaagtgcacaattctaataatatgaaaaagattgctataatacctaagaaggtctttgtataagtcatcgcatttgtcaagtttgcttgctggaaccgaggcatactttcggccaagcttctgacagaccgaggaagggtgaacatctaatccagagaagttcaagttagaagcaaaagatgacaaattgttccatatatatagaaagatacaaagctagaatgcacttacaaaaaccaaatgcatatacttttagagatttaattctgataattttcattgtccgagatcccgttgcaacaagcaccttaaattatgatgaattcaaaacgtattaacttttcgaaatttaaatcaaatctcttctttggtgactctacataagttgtaatgacaaagaataacaaactgaggaagaaaaagctataagaacctcagaattcgatcgcgaagcattctccttcaacaacatcgggaactcgatccccgtcctggctccactgatgtcttgtccagtctaattttgaaactanaccatatttctcacatccactgacagtcctatgtcaggtctcgacagtctatgtcatgtcctctaagtacatatactct

SEQ ID NO: 44600 - DNA, 600 bp, Arabidopsis thaliana landsberg
  unsure (1)..(600): unsure at all n locations
tctagagtcctcnggggacagccncccgggtggcatcgtcacctgtactcgtgcgcgtatgcattgtcttttttttgtgctaagcaattcaatgaggttgtaagttataagtgatttcgtttcggaagagcgaagtagctgtagcgcctgcagagtgtgacatgtgagttctgaatatatcctgatattccttgcataacgacgatgaagtggcatgaggtagcatgacgggcattagccgacacttacatctttcgcacttacaaaggcgctggagctgagcggagatgtggtgaacaactgtacttggatggacgttctgagggtgacacatatgaaccctgcgagttgtaagtgaaccctgtgctgatgatcgcatcgtacatgcgtgagctgcggagaacaagctgcgtgacgcgcgcgctgcggtggaaagcgtaaagcgtggttgatgcaatgtttgcgagcgcggctgtgtgccctcggtgcctgcgtgtgaggggcctagctgcccggtgaagtataagggatcgcgtgtaaaggtacctgcatgctattcatgcgccagtctgcgatgcatgccgtctgcacgcacacaca

SEQ ID NO: 44601 - DNA, 771 bp, Arabidopsis thaliana landsberg
gattatattgaaaggatcaaatgtcatttggtactatactttcaaaatctgatcattttgcgttatgagacgaacgaataatcttaagtgaaacaagcactcatgagaaatgcagcatcaaagaaaactgagcgatcacttgtggtatattaatgggtcagagcaccaacaccaaaataaatgtatttgtaaagtctttatacagagaaagtgcatgtctaaatatctccatgataattatatatccaaaaatataatttgtttttattgaatgtagctggtttggaagattgagaatgcgaagttataaactaaaattatattttactttattatgttagttcaacaaacaataattttttttaacatgaatattttagagaaaactacatcggtttaccagatctaaattcgactgcacatggaagaacaaaatatttctttagttattaaaaaagatgacaagggattcaatccaaaaaatatggactgaaaactccacgggtttaagaaatttattacctaccttttcaaccttttattttcttagtattattttaatttacaaatattggtccaaaatggaaaatttcaggtaaaatgttcggctaaaatccattaaaaattagaatattgagataacaaagaagctataatatatgcaaaaggtgcaaattgctgcaaagttcaactacgtttctcatgcaatttgcaaagtcaaaccatcgcttgtccgagacatttgttattaaatggtttttaatactccaa

SEQ ID NO: 44602 - DNA, 593 bp, Arabidopsis thaliana landsberg
ctgctgtaccttcttcgcctgcaaatcagagaaagcacaaatgtataagtttctctatttaagttttttggtatttcaactccattaaatctttcaaatgttgaaaaccaataataaacaattgattacctcattcttttcttcacgccgagcatttttcttcttggtaaattctgatgtttgaaaaaaaaattacaacgaatttgttttttttttgctctttaccacaaaacagcaaaaaaactcaacattaccccagagatggaagctgagagaggtagccactaaaaaagccaataaacgacgtctatttgtcttcgcaaacatttctctctctgttaaaataagcaaatcaattacactcacgatagtttgatagatttcttgccgaatcagagaacgttaccatcatatttactacgcaaagaagagaaattgcgtcgagacacaaccgatttctctccgtgaattgcctgcgctatgacggatcttagaagattcggctgcgacatggtcggaaatagggttcgggcttcttcgtctcctcctatgaatttgtgattttctttctttttcaaccaaaggggttaaat

SEQ ID NO: 44603 - DNA, 543 bp, Arabidopsis thaliana landsberg
ggctcgattttgggacgtctatatcgatgaacacgtaagtcatgcatccacggagaaactttcttttttatttgtttatatttttcatgtttaatttgttttagcacacccgtttttaacaatgattttaagatggaatgataagagctttcattcaaaaaaaaaaatgaaaatgaaaactttaacatgtaatctattaatgtctttccaactgtttagtagaattttgtaccttccatgaatcataaattaattatttatatctttcttgatctttcatatagtgtttcacatcaatcaatggagtggcagtagcaaaaggtgaggagaacataaatgcggcgatagctaagctagagcagtgtatggctctattggaagaaacgtttcaagaatgcagcaaaggaagaggcttctttggaggagaaaacatcgggttcatcgacattggtttcggctcgatgttgggtcctcttacggttcttgagaaattaccggcgtcaagttcatacatcctgaaaacacaccaggtcttttccattg

SEQ ID NO: 44604 - DNA, 647 bp, Arabidopsis thaliana landsberg
  unsure (1)..(647): unsure at all n locations
acacagtttatgtctctggacaaattggtgcgtggaatccgctcttagcatctgatgtatggctggcttgtctcgagtcacggacctccgcaagctgttgaagcagccggctgtgtgggcagtgcacatatctgatatgatatgggatatgacttagccaatgcgagtcgtgcaagatgccgaagcggcagatccttgacaaatcgatacttatggtgctgcctttgatgccgctgtaggcctcgtgccaggcaccaaaaactttgcttcggannnnnnnnnnnnnnnnnnnnaacaagtcatgaagaacatgggcgcaattctggaggctgcaggctgctcatacaggacgtcgtgaagactactattctgctcgcagacatgaacgactttgctgcggtcaactcaatctacgggtcctactttactgagcaaccgccagccagggccactttcgcagtcaaaaccctcccgctcaatgcgagggtggagattgaggcactgccgttgtatcttaaagttgttcaaccgctgaaaaacatacacttgtgacgggaatgtgtcgacgatatattatgaccattacggcgacatataggtgggggtcttcacacgatgtgacacggtggtcgagcgagcgacaaata

SEQ ID NO: 44605 - DNA, 429 bp, Arabidopsis thaliana landsberg
agggattgcccgaatatagatgaggtacggattagcgattaaaagaaaaaagacttttatcaattgaattcaagccaaggtggtttaatgaagaccaaaacagctagcccatgaaaagtctcaagtcaagtttttgatggatacattactgaattgaatagatcatgtttttctttactatacgataataggagaattctgttgatggaactattgcaagactgatatttttcttacataggtctgttgcacttttttttgtttggatatgtttccgatccctaacattttaggcaagataaaatgatgatcttttcatatagataataattcaatattcttaacaaaattttatttaattcaaaaagttgttgtttacagttcacctcataaatttacagtcttgggcattttacctaaaccagaatt

SEQ ID NO: 44606 - DNA, 1132 bp, Arabidopsis thaliana landsberg
atcagcagccccgtcaagattcttaagaatgatttagtcacagctcatcgatgtattaaatgattataaaacaaaatcacacagctcatcgaatgcttttatgctcaagtgctttgtctactttacattacattcataaaacgaaaaaaaaaagataaagataacttcttcttatgaattctagagttttcagtttttggcatcttaaaaatattaagattctgaagttgtaagtcagaaatttttgaaaaagtgtaatcttgtcaacatttgagcatgttatctacacattcttgtatcaccaattctcgatgtagtcgaacttaagaagtagataagaatggcgtggacctcaaacatatattacaaactttaattttcaataaaactacaatattaggttggatgttttaaaatgtatactgtaaaaaaaacgaatgttagaaaattattgacgagatgtacaacaatatttttctaacaatgtattttgtaaacttctgattggcatgacacgctcgatcgcaaccctgctagcgactaatcaaaataaagacgtcccattcttttctatttggctttccaaacaacaattaaccattttggaaaatgcattactaaactcacaactccgtcgatcaacaaaatcagaaactgcatctcttctatttgggattaccctcctctttgcaacaaaatgctcatgcaaacgtatttcgcagaaaattacccacgaaaatttctctcaattttgcttatactttctaaatttcgagaaataatatttttcttcatcttttgtaaatgcgcttctttctgttagcaataaactgtaattataataatttgtttgcaaactaaaacaaatgtactaaaatggcagactaaatttaatcaccaaatagtgtttattattgtcatgtcatacaccgaatttacgccatgtagaagtaaaagatcaaattaaataacattactgctgaatttttcgttagtataattaaaaagagaacatgtataaggtagactgtatgtagtctatgtagatgttatataaatgattttttttttctttcaacaaaatatagattagctaggtcggttgtattacaaaattaaatagcaggcgtat

SEQ ID NO: 44607 - DNA, 761 bp, Arabidopsis thaliana landsberg
cgaccttttccaaagttactaaaaatttgtttttgtggtacttttcttttattttattttcttttatatcatagaggtataagagttttcaatattcaagaattttattttctcctcctttgtggacttaaaatatttccaaccacgagtttgataatattgccgtcaatagttgtcacgagtcaatgagtaatttacatgtgacaagttagtttgtaagttgagctataatataatggaatgggaacatcataagttataaaaagaaatgttgaaaaaggtgtgtcttttagtattgaaaattttatatcgttaattaccaaaattcatcgatgaaataggtcgttgtaaaccagcgggcaacgccaatacaatgaacatagttccattattatcacatcgttttggcaacaataacacgaattcgaacaacacaatgtatcgtttgtcattttcattcgtcattgatgctaacgaggtaacgacaataaaaagaagaataagatctatagtattaaatatatataatatttgtgctatgttaatgtaacgttaatttggaccgttgatataaaagaaggtctggtcacatgttggtacgtacaggcttcacccattgatgtaaccttgcaaatggaattctcaccgtaaaaaatatcacaagaggaaaattacaaaacataccatggttgttgaacacatgcaactctcattacacgacaagctctcttttcaccaacactgattcataaacacatgtg

SEQ ID NO: 44608 - DNA, 647 bp, Arabidopsis thaliana landsberg
  unsure (1)..(647): unsure at all n locations
ataaatactattcaannnnnnnnnnnnnnnnnnnnnnnnnnnnnnnnnnnnnnnnnnnnnnnnnnnnnnnnnnnnnnnnnnnnnnnnnnnnnnnnnnnnnnnnnnnnnnnnnnnnnnnnnnnnnnnnnnnnnnnnnnnnnnnnnnnnnnnnnnnnnnnnnnnnnnnnnnnnnnnnnnnnnnnnnnnnnnnnnnnnnnnnnnnnnnnnnnnnnnnnnnnnnnnnnnnnnnnnnnnnnnnnnnnnnnnnnnnnnnnnnnnnnnnnnnnnnnnnnnnnnnnnnnnnnnnnnnnnnnnnnnnnnnnnnnnnnnnnnnnnnnnnnnnnnnnnnnnnnnnnnnnnnnnnnnnnnnnnnnnnnnnnnnnnnnnnnnnnnnnnnnnnnnnnnnnnnnnnnnnnnnnnnnnnnnnnnnnnnnnnnnnnnnnnnnnnnnnnnnnnnnnnnnnnnnnnnnnnnnnnnnnnnnnnnnnnnnnnnnnnnnnnnnnnnnnnnnnnnnnnnnnnnnnnnnnnnnnnnnnnnnnnnnnnnnnnnnnnnnnnnnnnnnnnnnnnncttagaacctagaatacgcctcttctactgtataaactgaantactaagattgactattagataaataaatggagagcgtttcttattatcatcgatga

SEQ ID NO: 44609 - DNA, 477 bp, Arabidopsis thaliana landsberg
aaaacagaaatacctgaccttcctactcccaagactttcttgtggaagcgatgcctggtaatctcgatggaaaggaattgtttcagatatcaaactgcaagaaaaaacaacaaacttggggctctttcatagaacatacacaaatataaaacgacatatagagatacttttatccttaccttgaatatctaagaagcatgatatacaaatccaccacattcttctcttgccgataaatactggcctgagcaatgttcaaacatgttaccatttgattttgtaatactgttccaataaactccaaaatctaattgataaactttaaactttcaatcacaacctaaaccttacaaaatcaataccaagtttacattctccagtttctaaacttgtcaaatcctaaagatgcttaagcatgaattaagaatctacatctacagtaaaattgagatgaggaatcgaatctcgtttgcgata

SEQ ID NO: 44610 - DNA, 767 bp, Arabidopsis thaliana landsberg
tataatgaatgcaaactaaaagtagaaaacttacgaaatgggcagagatgatacgaggaaacatggaagaaacaagcatcccgtggacaaggcgattctcaaatccggctttacgagcagattctggatcgaaatggagtgggttccaatcatggctcacctcagcataggccttaatatcttcacttgagaacactcttgtttctcttaaaacatctcccattttaagtagtgtctttgaagcaactgatgagaaacttctcaaaacaaggagacctctagggaaaactgtcttcgctagcattgcttcaccctgaacaaccaaacaaaaactttcagtagtcttttcagtggcaattgctctcattaagtcattttgtcgaacaccttatgggcacgccgttgaaggtcaaaagattcaagctttgccaaaattattcaccaattgctaaaaatttgatgctaatctttcataaccacaattcttagaataatgacagaaagaacaattaacctcgtcaaaatcagaaaaaacagagacttttattttcttcttcaagtttaatcttaccttacttgtttctttggtttttgagtttcttattgagcatgaaggatgtgtatgatccagattaatgtttcttaatcataatttaacagaacaatcaagttttcacacatttgtaaagtttcacaaaaacaattaaaagattagaaacttcttcttttcattaaatatcaaagtaaagcatacataagctgaatta

SEQ ID NO: 44611 - DNA, 509 bp, Arabidopsis thaliana landsberg
aaaaacatttctctctagtaacaaaaacatcactctacttttctcttgtggtttgggtctggattttagtccggttagtggtacaatggtttatattggtttattagaaatatatagtttacgctacattaagaaaagtactctaatttgtcatctgaagatttacataaaaaagattacatgtcatcgttgtatgttaactaacactaatctcccggttaaagtgtagattgccctaaacggtttaattccggttaggaacaaaccaaccactcgctcggtcgtccaaagggcaaagcgaatccaactttacagatatgtcagagaggagccaagctttagaagatcattcattcatcacttatacgatctcttcccaaattattgattttttttacccatttctctcatcgcacggtgatattgagaatcgccgacctgaatcgatcggaaaactttctctgattaccggctgtcaacaccgcttaacacatatgtttgtttgacga

SEQ ID NO: 44612 - DNA, 543 bp, Arabidopsis thaliana landsberg
ggggtgggtgtcccggacccgttgactcacagcgggcactgttttcaacggcgggcagatgagcgtgcctgagcaggggcggtggtcaccgcgcttctgtatgctcgcccgggaccggggacgacgcgaaaggatggcgttggggcctttcggggacgtcgcgactgattgaaggcgccgatgttgtccgggtgctggtcgcggtggcggcggcgcccggttcggggatcaggccttgttgcacaacgccaaacgctcacgcaccccccgcccgcgatcgctggcggcgatcccgcgggcggcccggcgagacccgtcccgagcctcgagatggtcgacgatcgtcgtcctggcgttcgcggggacgctggcgttgctggtggccggtggcgacctccggatcttccaggccgacagttacaaggcgctctatgacggacggtggatcgtcaagcatggagtgccccgcatcaacgtgctgtcacaggtacaccacgggcgccgctgggtcgatgtggagtggttgggcgagctgatctacta

SEQ ID NO: 44613 - DNA, 807 bp, Arabidopsis thaliana landsberg
ggaaataatggtaggtttcaaaaataatttgaaaaatataacattgattagtatgtgagggaacaaggggaaaacgtattcgtacgtacgtgtggaccataacgattagaaattaatcgggagcaagtaattggatttatatttattgatatacatatcatttttgttatatgtttatttttttggcgtgtggtaccatatcatttgcgattttatcgattaatcatgtgtacataaggaaaaaacagtaactggtggaacgctttcacaaccacatttgattgaacgaataatattcgatcgtacaaatttaagagtttgcccgaccacaaaatgctttgaagcaagttgtatcaattaattgaaagcatttctcttgacgagtaaattaaatgcatgtttctttcgtcatatgacgacaagactcgttaaatctcatgcacttggactttgagacaacaatgtgaaccaaaattaatgatattttttcctaaaaatagttttcatgataattttcttaattaataattaaaattttgttttgcttaatattcgacctgcatctgcatgtagtctcgtaaattaatgttagtgatctctctacgtataaacataataatgacatcgcgcattagaccgttcgacggtagcggtgttcttattttttcttagtcgatttaagaacattcagcattataaatttataataaactatatctaatttattataacataaaaaatgaaataagacgttttttgtatttaaattctcgcatgaagaaaatcagttggaaatattgagaacgg

SEQ ID NO: 44614 - DNA, 479 bp, Arabidopsis thaliana landsberg
tgttggtgcggctgctgaaaattttttctgttcaacaaatacgtgaggctgacaggtatactatagagcatgaacctgtgacttgtattgatttaatggaacgtgccgctaatgcctgtgttagatggattgcggataggtttgataataaaaagacattcaggattttttgtggcctaggcaacaatggtggtgacgggttaacggttgcaaggctattagctggccttaattacagggttgaggtgttcatcatcaggcattctgtgaaagcgtctgacgattttcaaattaatttgaaacgactgaggggtattgacaacattacaatcactgagctcaatgaattttctggccctaatactttagaagcaggggaggaagagagccaggtaattattgatgctatactcggtgcgggacttaacagacctgttcagggtttgattgcccatatagtcaattatatcaatcacata

SEQ ID NO: 44615 - DNA, 684 bp, Arabidopsis thaliana landsberg
gttccgtatatgtttgattcgcatacagtacaacactaatcaaattgacgttgaaaattattctattttcgatctatctatacattatagagctgacatttgaactcataggacatttaagtatatgtgattctcatataacactaaacacatgtacatcgtacattgttcaaattttgaccaatctttgaatatattctagacttgttatttgaaatttgaagctaagtagcttttataaacactaaacaaacttatttacattgtccgatgttccatttcaagacataacttttgtaactatatattttatttatttatggacgcagcttggaaatccactgacatcatatgcggaagattggacaggatgggtggattatgcgtggagtcacgcagtggtatcagacgagacatacagagtcataaaacagagttgcaatttcagtagtgacactacatgggacgttaaagattgcaaagaaggcgtggacgaaatactcaaacaatacaaagagatcgatcaattcagcctgtacactcctatctgcatgcaccattcattaaaggttgattcttatgcaaattacaagacgacggtaaagtactgattatacaacacattcattaataatgtgtttttgctacaagaacttaattatccgaaactctaaaacagatacc

SEQ ID NO: 44616 - DNA, 1357 bp, Arabidopsis thaliana landsberg
ctctcagtacgggtatattatcatttgtatttctcttttaataatgtagagatagattttagaattaaaattttttctttttcttataaatatatgaacaaatttaaatttggcatgtctctcatttatgttaatgactaactttccaaaactaaaacttatataataaaattactaaatatataaatattagttaatataaaatgaatagaacaaattattatatactaaatttgtcttcacaaattataattgtattgttagagaaaaaaagaagagaaacaacaatttatttttctatttttgtgaaaccctagatttgaacatcgctcatttcttcttcctacctctccatagatttatcatccttcaacaccaattttgttattattattcatcgcttctcctcatagatttatgatgagtaaaccgagatggtttcaagtattgacagaggaagacttagatggaaactaccaaaagcatacttgtggtttccgaaaaaacatcttcaggttcgagtcctgcgacgtagtgtgccccgagggcatagatcccaaccatattcaacctcatgttcaagtatgttctaatttttttctatatgccctaattatatatattactttatcataaattttgcatctttgaatcagtgcaggtgtgcaccatgcttgatcttaacgcctttgaactgaaccaaatctctgatctctttgattgttcccaaattcaagtaacaaaatagacaaattgttctcatccaccaatttctctaaaggtaatttatttaaacacatgattgatattttttttacagaatcatggttacgttggagggaagcagtttataatgttgaggccatggagagactgtgtaagaaatacagaaggttgcactaaacatgtccaagggattaattccaagttctgcactttcacctgcaagatcgaacatgttttggagcatgaaggtgatttgtccagcattactagactttggtcgtcggaggatgattcgagagaactgtcagaacacgttggtgatttagcaatccatccttgtggtgatccagagagaatctttccattaaagaagaggtctcgaagaagaagagagttttttgacagctactacgaagacatctatgcatcatactagtttccgagatatctcttagttctattagacattgatcacatgtttgttttgtggaaatacagtttagcatattatcaggagattgttattcttggtttaaaatctacatatagagaacccttctcttcctaacgatagctaagcaggaaacatcatacaacggtacaaactagcaagtgtgcttagtgatatgtc

SEQ ID NO: 44617 - DNA, 602 bp, Arabidopsis thaliana landsberg
ataacgcccattatataaacctcttttgacccataaaaaccccaaaccaatactcaattagcttatatggatgggcttgactgaaaatttacaacttctcatttttggtttgattcaagaaaaaacaaaatattaatttaaaaaaaaaatatgtacttggaacaaaataatttgtaagaaaatctacatctatttaaggcttgaagtcattggatcctattttaatggaagacaagatcaaaatttatatcctttttttggggagtagatataaacttttaagcttaatttagcatgttttgtagtaaatccaaaaccggataaaatctaatttcaaactcaactaattctgttcattttatctttaaacaagttcaaacacttgaaacaatagcttcatacatacgcaaaagaaacaaacacacaacaaaattgatagaataaaataagtttggtattaaagaagatataatcgtaacaagattcaaaacttaagtaatgacatcgctacaaagatcagctgttgcattcccaacgtaaggttcttcgggtcgtttcggagtgatcaattcatcttagatcaaaaaaatggagcaattctt

SEQ ID NO: 44618 - DNA, 854 bp, Arabidopsis thaliana landsberg
ttaattataacaggttatagtcaactagttttgatcaattttggacttaaatggtcatttgtgcaaatctctaggttccccatttttttctttccgttattcatttttcacacacttcaaatctcgaaaataaataccaacgttaaactatttgggttgggctcagatcaaaatttgtaacctaattttttttgttgatgtagatgaatcctaatttctttttgatgtagatcaatccaaatttcttttagatatattcgtattcaagccgtaccggccaagtcgatggccacgatgctttaacttttaaggtcctatacattaaagcagtatcagatttggtaaagagatgagaaagaattattataagaattcgggaaatgtttcagctgaagcgactaccacggaaattataaaactgtttagcatcgacgtcatatcttttgatagttagttggttccttcgactgttcgttgagtttattattctctttatattaattagttcgtgttattttttaaagtgtaggatacgtacacgtacatacctatatattaatatatgttttaaattcgttgttctcatttcaatttacaataattagatcttcgtactatatttaggtctaaaacattacgttacactaacactgaacatttattaaaaggtctatcttttatataattgaataaaaagactaccaatcaaaggtttggaatttggatgatggcttactggtagcatttaggggtcacgcctttcctcttgatcctgggtgcgacttttcggcaggttttcgggtttacatacatctttctagcttgggcgtattggtgccccctgtattttccca

SEQ ID NO: 44619 - DNA, 110 bp, Arabidopsis thaliana landsberg
  unsure (1)..(110): unsure at all n locations
agaccaagaatcacagcctacatgctgtttaggcaaatgcttttgtaggggttcattggcgcgccgancccacggaacacaagaggcactgtaaaagaccaaaccggacg

SEQ ID NO: 44620 - DNA, 672 bp, Arabidopsis thaliana landsberg
atagctacatataagtaaatgcattaaagctaaaaaaaaaaaaaatgcattaaagctaactaggattattgcataatggtgtggtaaacgaaaagcgtgaacgagattgtttcatataacattcaacgttctctaggttttgtgcacttttgaaaattatttatacgatattaaatgatgtcatttttgtaaataggttttacttagatcttagtgtcgtaattttaatactaagtgcatgtgttataaatgattgaagatttgatcttaggtgggggactcactgagattccatagcatataagaagtagaagataaaaaggcaaatcaaacttagagctaagagaggcaagtgttgctaatcactacttctatagctactcctttgcttttttactcctctatgctcttttttccattgaccgattttcctcttcgccttgggtgtataaactaattcatacatttttgttttcaacatatataaattaaatcattcttttctgagtggatgagaaaggtaaatatggtaatagtgataaataaattgaaactataaagcaacagtatttgatactatcgtccaaaggtgtgattaatcaaataaaccccaaatccaaccaaatttgattagactagtccaaaacatatcaatccttaattcaatgttgt

SEQ ID NO: 44621 - DNA, 600 bp, Arabidopsis thaliana landsberg
aacaccacacatatatatacattacaaaaaatatttaaaaccgaaaaaccgacattgttatatatacattacaaaaaaaaatcggagacccaaagtctgaaccgaactaaaccggagaacagaaataaaccaattatacgacaggggtaatatagtaacttgcttacgaagtggataggataacactggggatttattttcgagcttcaaagtctcgagcttagagctctctctcaggcaaaacaatggcgtcttcttcagcgacgctctctctttgctctactttctctgctcattgcaatgtcaattctcgccgttcgagcactatcctctgttctctctctaaaccttcgcttaatttggctaaacctctgactggatttctttctccttccactgcgtcaacatctcgaaccgcattcaccgtcactccgaaattcgcggaatcagtcgttgaagctgaaccggagactaccgatatcgaagctgtggtggttttcgatgtttcggaggttactgaggagaaagctaaacgggaagagatttcgctgttattatggtgagcttgttgaatcaaacgaaataacaaattctcaattt

SEQ ID NO: 44622 - DNA, 900 bp, Arabidopsis thaliana landsberg
atcgaactagcaaacatatgggtctaacccctgcatttaaaccactagtctgtccaactcaacgttgatagtaactaaatgcaagtttgatgagagagcagcttaagtactcttgtagaactgaagttttatattaagaaaaaaagatttttttttaaaaaaagagaaaaaatatggttatatatatagaaagcgagaacgagatcaagattttgggtgtgttttacaatatattttcagcatcgagagtgagggagttggtggaagataaactaaacacagtgcgttagaatattgaacatcatcacctatatgagtcgtattgagatgactgattttggatggtttccacaatgcgtctagatgtgaatatgtgatgaaggaaaattataactatttgatggtttctccataaatctgattgatttaattagtgacagacatgagagaaaattataattataagtggaagatacttttttttttgatcaaaagtggaagatacttaagaaaattgattcgtatcccaaaaataagttaccatagatttgttgtgagatacttcttgtctagttgtcttgattacaacataaaatacgaattatgaaataatttgtaagaggatatgatacccaaatctaacttctgtcagcagtttttattataaaagttttttttttaaaacttgttaacaattgatatcggctactattatgcaaaacacagatatttttcttgacaattaatacaaatgagttagaacgatacttaatatcatttacataaacataccttaatttcctttcttttttaatatcttatacacataagtttgtgcgtttttatcacatttagatatgtagagaattccatgggaatttttttcagtgtttgagcgcc

SEQ ID NO: 44623 - DNA, 601 bp, Arabidopsis thaliana landsberg
tgtattattcttgtgatgagatattttcatattcaagattggaacaaagtgtttgtatttgagaaattgggatggtgttgactgttgttgagtggactagttagaacttgtagccggcgtgtcgttttagttatacgaagctactaaaaacgacaggtagtctgttattctaaactttttgatgtaattaatgatgacatcaggaaaagacacgtgtacggtatcatgttcggtcgattggattttcacgtgagtgggattacaaatgtcaaagtcgccgacagagcagtcatgttgtgtggttggttccattggcccattctgtgaccaccgaacattaacttccctattcagttttttaatacaaatatctttatttattgccacacttgaaaaattacatgaatcacttagaatgacacgtaaaacaaaataaatgcaccaacagttcggtgatatggaattcgttaggtatataagaaattaagaatagttgtaaaacacgattgtgttcaatattatggaatgaaaattgcgatagaatggtcagaacgatcgatttgacatatgccataccatcaaggtagagaaggaaatgatc

SEQ ID NO: 44624 - DNA, 775 bp, Arabidopsis thaliana landsberg
acttttcgaaaatataaacgcaaatatagattcttctgtttgtgtttacaatttacgtttacaataataacaaattaattttgtttagtagaatgtgattcttttgaagttttttttttttttgagaaaaccactatcattgaaacgcaaaaaacaatcgaagacgtttaggtcatacaggatccaatgacaaagaaacaaaacgtaggtatcatcagtagaagaagccgtttatctcttcagaaagaaggagaagaagaaaacaaaaagttgggcctgcttcatttattggctttgtgatttaagacatcgatctttgacaaaatcacaacctgtccgtagctttcttgcaccactgtacgtgactacacattgaggaggcagtacaaacacttacacataacgtaccaatttctacattcaattatagtgttgacctcacatagaatttatttattatagtacatttggtaggcgtaagtcaatttaaagtccactgaaaataatatatttctccaaaacaatcatgggtttgaaccatcccagatttagaaatcaatatacacctcttatactaattccctataagttttgacaaaaacaaatcactacaaatatatatattctttacgggcctatttacattttagtacataaagagaaggcttatagcaatcatataattaggtttagttttttcttttcccttctttggcatgggttctgatattgttagatccaacggttgattctattgatcgcatacatacaaatt

SEQ ID NO: 44625 - DNA, 703 bp, Arabidopsis thaliana landsberg
ttctctagcaacataaacaatggccactcagaagttttcattttttctcttagttttgttgatggtgttagctctcatccttccatcaataatttcaggtaacacatattttgccggagtcaaaataaataatcaaaattccctggaatcagaaacataaacatgcatgcactataatacaaattcataaaacaaggaattgatcattttggtacttacaatatcttgctaatgtgtttgtttatgcagtcgaagtcataccctgtatagcgggatcaaaatgtacaaacgatatgacatgcaacgaactttgtagatttaaaggattcagcaaaggagggttttgtcaaaaatatgttcaccaaacgatcggtcggtgttgctgccatcctacaggtttggaatctcaagagtcttccatatccggtgataccaatgtagtcattactaattaattcctcattttatgtattctctattatcagaataaaatgatacatgaatatgaaatccaaatgcacttcatacaacaaaattccgacaagcacttcattttatagttgtgattagattaagtatattgctattataaattcaattaattatttacaaaaataatatttctctagaataaattcaaaatatgtttttgtaatcggatttaatatatttataagtaatcacattatacttttattttatc

SEQ ID NO: 44626 - DNA, 559 bp, Arabidopsis thaliana landsberg
  unsure (1)..(559): unsure at all n locations
ccttttcaaagtccccctaaaacaagaccatcatcagacatcagaaaggaaggttacacaaaggaaacaaaaaaagatgcattcttctataacagcccatagaatgaaaaaaacgcctcaaatatatcactacccaaataaattatttattactcgtattttttcctccactggcaagctcagagggtagataagaatggaatatacaagggaggacaaaaatgtcaaaccttgctatgatatgaccgtgctaaattgtaaaaagaatgtgactttgttggcccatgagttgtgacggctaatgctgtttcagtcagctgctcaacaagaaagtgctggccggtgaaaaaaaagtgattggccaaataatttaaggnnnnnnnnnnnnnnnnnnnnnnnnnnnatgcctgctgcattctgtccattcctttccttattcctatagctatacatatgtaatatcatcagtgaaggccaaagagaagtaaagttaatagaatctttccagcccacacgcattatcataagatttagaactgaggtatacttacaatcattt

SEQ ID NO: 44627 - DNA, 873 bp, Arabidopsis thaliana landsberg
aatcataaattccacgtggcattttcacccctaaaacttaccaattaaaatgtttggattgatatttatatgtgctacataactgataggtctatagcatagacacagagtaaattgagttagaaaattggagtagtctaattttcagtgcttatgagttgtcacagacgaaaattctttgagataaaaaaagtttctaattaatagctttcttttgtccggaaattacgcataatgtgagaatataaagctgatataaaatgacattaactattgtttttcctgagtcttttacctttatgatccatcgaacatgaatatcccatggacgcacagtgaaatggaaaatagttgttgtatatgtgatgaaatcgtgaacacacacgcaattgatgtgtgcatcaaggaaattacaaaaacactttttgtttgtttgtgaaataaacgttacgtttatgaaaaagataaaattgcagtatcactcgtcaaattcttgcttggagtatagtaatgaaagaatcataaacatagcaacggaatttgctaagtggatgacactttttggaaatgtcactaagttagtgagtgaactaaatcacattttagtgcaatatgttatcatagagttacgtgagaatccctatcaaagctaacacttagcccatgatctagttaggctgttatctccaaaatgtgaacaaacacgaagatagctacaattttgtttgtttggtccaattttctcattaaaacctagacttagatctacaatcatcattggaaactacgtacagccaaatgaaaaccatattaatgtaagttgggtgtggcttatatttatgagtgatcgatgaaatcataaatgctttacat

SEQ ID NO: 44628 - DNA, 560 bp, Arabidopsis thaliana landsberg
tcatatagtatctgggaattagaaggtacttaatcattgttgttaatccacattagtttagcagtaatgataatgtgaagactaattaacattgttgttatataggagctgagagatcacgagatcaaatccctgtggcttgcaaggactctgttgccattctctttatgtttgatttaaccagtcgttgcacgcttaatagtgtcattagctggtatcaacaagctaggaagtctaatcaggtaatattaatttcactatcatttgtcaaatttgggctctttgttaaaagtcttttaaaatttagacctgggtggtcgggtattcggatcgggtttagggtattttacccaggtctaatcttgttgtgtgaaatttacggttgattggttgtaactgggcgttcgggtattcgaatcgggttcgagtcttcgggtttcggtattttgccgaagcctagtcttgttgcatataattttggggatgattggttgcgactgtaacgtatattttggctaagcatacacaaagaacaaaaatatggttctaaaagtgtgatt

SEQ ID NO: 44629 - DNA, 593 bp, Arabidopsis thaliana landsberg
ctgttccgtacaagcaaagaaggaaatgcctacaaagcactaaagaaccatttaacataaaaccaaataaaatgatgaggacacaacacggtaatggaatcttccaagtaaatgccaagagttttaaaatgaaagcttaccacaagaggaaagccatgaaatatttggtgttcctttctcctatacagttattctgaaaccggtagagaaatattcacgtcaaacaatatgttgttatgaaatgttgagaagataagaaaaacgagacagagatcaggggcaaagtacataccatccacccacaatgatgatcaaaccgagccacacagcggttgcagatgctgcaatgcttggatctagcaggcctgaatgaggaagatacatgtatagttttaacataaagcacataggttcttaaaataagttcaccacaggattttcaatgcactcactttgggattttacacgtagaacattctttcttggagtaaatgatatcatcataggggtaagcagaaatgtaccgtgaaacattctcagtgttcacagtacctggatcagaaaagcatgttaataagaaaagtatgacacca

SEQ ID NO: 44630 - DNA, 608 bp, Arabidopsis thaliana landsberg
aaaaaaggaaaggcaaaagtaatatatgaaatctacagagaaaaaaattagaaaggatatttcgacttcttcatatccatttccctgccctcccttggcgaagacattttttttctctgtcggttcgcttatgtttctctgattttctgggttttttttttggtttttgttcttcttccggattcgagtggagatgaagaaaaatgtgtgagagaaaaaggaaagattttcgtttattgattttttatttatatattttcacgtacatcgatgatgggagtgaaccaccgaaggagatcgtatctctaaatatatatcctttgttagaaataagaatctcactcccttcactagtaataaattttgtgattttgttttgctttttcaattactttctccctaaatttttttaattattttctcccaaagttagatcatatttttgttatttcttttaaatctataaagttttatagtaattattattatattttagaaatggtttttaattacatagttaaattatatttatagtctaataataaatgacattgaaataatgaatcaattaaacgtaaaataaatatttttcgaacacgtagatattt

SEQ ID NO: 44631 - DNA, 885 bp, Arabidopsis thaliana landsberg
aacattgttttatgtgtttatgaaacattcacttaggccagtataaatattaaatgtcattttgagaatgaaaattaaatggtgtcattttgaggatataaatattttctcaacaagatgttttagactttcaacataacgatcatttaaaactacataatttatctcttcgttaaaaacttaacattaacaaaaagttaaattcgacaagaagagtttattcaataagtatactgtatgtgtttattttattcacatgaaaagtgtcaaacaacacttgggatacatatttcatgcctaaaaatcgtataacaacatttaaggtaatcagtaaatttgatgcctaaaatatgtgaccattttgaccaatgagcattttttggaaataaaactactgcatacgacctggtcaaacacatgaactgccactgcttttaaaactaccttttaaaacttttgacgtccatttttatttactaattattatgttaatcaaaccactaacattatgattcgaaatttcgagtgatgattgttagaagtgatgtgaatgatgcggtataaaacaaattgtgatatatattcactcatatatatcaaaatcaaaatagcttatcgttccaaaacatgattgataaaatgtaattacaattcaaaacttaaaagccagtagttaaaataaaacaaaataaatagtatatgtttcatattaatgccaaaccaatattttgttttgatgaggaaaaagctttttttttttcttttttttctcatagctaaaagacataaaaaaaaaaaaattataaaccagaccaaaaaaaaagaataaattaaaccaacgtcattactggcaaatcaattatcagagggaaaagttattaaaaa

SEQ ID NO: 44632 - DNA, 624 bp, Arabidopsis thaliana landsberg
gctcccgatcctcactaaaatttgttgtttgttcaaaaactgcaaagttacatgacccactgccttcaccttctagtaagctcactatctctgcactctcagaatctaaatctttaacctctcccaattccacctctatattctcagcctccgaatcgattactttgatatcagtttctcgagtgcttctattttctttcttctcatcaacatagatttccacacaaccatcatcacattcaccacttgcatgggacttcaaggagcgtctcctttcggatataaagcttaaaagaggtgggaattggcagtgaaaatgcgcgttgagtgaacaatacgtataaggacagactttcaagatatgaggagaagtgaacatcagatcctctgtgaactttgtgtttttgagacacgaagaacaagttgctctatgcacattcgcatcccaacaacgaccaatcctaccacttttcttgaagctctgaccccttttcaaagacctactactactctgtttcttttctctagagcaagaatgaagtttcttaccggtttggctctccttggctaaacccagcttgaacccctttggctctgccttctatgcctttgaaactcctccct

SEQ ID NO: 44633 - DNA, 556 bp, Arabidopsis thaliana landsberg
gtccaatggcacttaaagccctgagccttaccctcggccataacgccgtcgaggatcgaaacgacatggcgcggcacgtcggaatagccgccgatcggtgtatccttggcgtgcgtacccagcaccagcagcttgcccagctttttcggctggaagggcagtatgccattgtttttcaacagcacgacggtcttggtcgccgcctcgcgcgccagcgccaccgcgtccggcgtcgcggtcaacttgtcggccagcttggcgtcgacatacgggttctcgaacaggcccgactggaacttaagctccagaatgcggcgcaccggcgcattgatctcgtcttccgagacgcgaccggccttgatcaggtcgatcaggtgcggataggcggcgccgtccggggtttcgatatcgacgcccgccttgatggcgcggaaggcggcttccgtgagatccggcacgagatgatggcgcgtgatcaattcattgatggcgaaatagtcggagacggtcacgcccttgaagccccattcaccacgcaggatggtggtcagcagcc

SEQ ID NO: 44634 - DNA, 612 bp, Arabidopsis thaliana landsberg
gaatgtgctctaaagctacttatcaaagaggattgggtcttgtagaaaatacatgacccgatttagtataccacaaaatgtcagctcaacgtacgagtctcgaatacgtgtatacttcttgtgtacatattacaatttgtgggaagtggtcgaaaagtggttatctatatggcagtatggtgcatagtgcatagtgcatggtgcatagtggtcaccttctttatgtttttcattgtttcatggcagtatatggcacatctcctcatctttcttggttagctgtatgggtagcataaccacattatctagcatttcgcggccaaaatagtaagtgcccttatatatgtatatcgagttgtttggattttttttttaagatcggtggattaaagacctctagagctaaccagagaaagcaataaaattaaattaaaacttgcatttaaaaaaaaaaaaaaaatcagctaaacacgatgttctatatatatagtttggctaatctagatcacgtacaatgccaaatgatatggctattaacagttgtaggccaataaatttctatacaaaatccaacaccgggatgtttaaattataaaattgggtttttttttt

SEQ ID NO: 44635 - DNA, 653 bp, Arabidopsis thaliana landsberg
ggaagccactatcaacgaccaaaatcatactgactcaattagattgcagatattttcaacacaaagaaattgtttagaacataagagacatctaaactctcaattctcaaaaataagaaaagctttgagagaaaacgtaattcaaaatccaaactttcagttgaaacagatcatctaagaacatgtgtgtttacctggcagcacttataaacccaggatatctactaccccgagaagaggtggtattggtctgtcgaccatctgcttcggatgtcctggatatcgagaaggcgaatggtcctgctgcaacattaagattaggacggtgctgaccagaatcctgttcagaagcctgattcgaatgataatatctccagtacaaaagcgggagtgtagcaacgcatccacacgcataaccaacaatccaagtgaacaaaggagcacgaggatgctcatgttttgacaaagacaaaacgacaatagctgcaatgatctgaccaacagtgaggaatagttcaatagaaatccataagccagaattcaaaggacttcttctacgacggacacttctaggatttgctcgcatagaagaagaagaaggagctgtagctgtagctgacccaagaccagccatgggagaaacagtagaaggt

SEQ ID NO: 44636 - DNA, 508 bp, Arabidopsis thaliana landsberg
tgagtttattgctgagatccgacattttaaaatctttttccccaggtgaaaggatactcactctctacgtgaagtgaatttatgtgatcattctctttctaactttgttgtttccttaccttcaatgcaagattttgtttttgatgtaattcatatgtttctttccagccttaattagtatagaaaagcgaggttttagaagcttgataaggatcgtacgtcaagaatttttgtttttaaatgaaatcctacaacacaaaagtggggattaaaccctattaacattttgaacaataatcaacaccataaattaagtaccaactaaattattgattatttatgaattactgaattatgacagaattattttttattttcctttagataaaccatggatgtgtcggctattggttttattgagaaattcacatttttaaaaaattgcaaatatttttaaaagttagctaaaaagtaaaaatcaagcaaatagtatatcactagaagtaca

SEQ ID NO: 44637 - DNA, 549 bp, Arabidopsis thaliana landsberg
actgtttttcaatatccaccggcatcagtcctgtttagatggctttgcggcaatactgcgtggcagggggcagtatggaataaaaagtttcttcttccagtatgcgaaagctgtcggcaaagatgggctggatggctttccactggtcgtaccgcaggttatctatcaggataaaaaacaccggcgttcctttttccacatgcggcaataccttgaaccggaaaagctggtggctcatgatgggtgcatcagcagctttcggatctatccaggaagcatagttctttgtgatgtacttacaaaattcagtattggcctcctgcttctgcgcctggaacacttcccgcatttcggggctatcgcttttttccatttccagttcccagtatacaagcttcttgtacaactccatccattcgttgtgatcgggattgctgttgagcgccatgaacaattcgcggaactgctgctggtaggccgtggtggtcttttctgccccagtcttttattatcgatgatctttttcaggctcagcaataccttgttagg

SEQ ID NO: 44638 - DNA, 503 bp, Arabidopsis thaliana landsberg
tcgtattaggttgatgatagttgtgaacttttattgttgttattatggataatatttgactacatatgtgaacacgtttttgcatggttcggattggttcttctaatttgtcagtgttatatagtttaaagatttattataaatttttttgttaaatagtttttactataactttatcatcattattggttggataaatttaaaaggttttaaggagatgtatcaatacacgtgagctaacctcttagccccacaccctttatctctctcccttaaaatcattcacacccatcaaatgatttttcagtttttttcttttcttttcttttggataataaaaaataaaaataaaattattatatctggagccaaaacaaataaatgtatatatgtcatatgactgatgagtcagaaaaaaaaaactaataaaatgtgaattttgaataaatatattttgatgtatcgatatagattggcttggcttaccggctcatcttgttttt

SEQ ID NO: 44639 - DNA, 1507 bp, Arabidopsis thaliana landsberg
ccgagcagcagattcgcggtttttaatcatccgccgttgtctccgttccatcaagatttcaggtggaccatcaattatccgtttcttgatccgaaaagcatctaaaccggtcagatactgattactcctcccattcccggtcatacagcttgaagattctcccaaaaccgagtaaaacggtcggttttcactataaaccgaccgattatcaccataattgttttggttctgacaatgtaaaccaactccaaactcggggttataaccaaaatcagaactcgacatcctcatcgttgtcttcaacggttcttgtacaacaccagccttaacaagaaaatcctcgagagtgatctcaccaagggtttgttgccggcgaatattttcgtcggagttttgaccggaattcgacgacggtggatgttgttgtacaccgttttgtatctcgagccaaacctcgtcgaccgttttcttgcataaaggcacagggagggacaacgacccttgacgtggcagcaccgccggcttctctccgtcgttgtgagccccacctccttcgttgtcgttttcttcaacggttgtccacaagttcgctaggaactcgtccatgttcatcgctccaaagctcttaccgcttttcatctgaatttcgtcaagagttagtgacaaaatcgagttctgtctccctaccggttcctcctccgacagaaacgtttgcatttgcggttgcgtttggatttcgtggttgttgtagacgtggaagtttgaagtctccgattcgaaaaccgacatcgtttggtagacctataaatcttgaaatattaacatgcattcatatatcaatctaagatttaaagagtataaaagtgacttaaaaagattatttgttaccttgaagaaaatgtgtaataaagatgaagaagaacaaaggaaaatagttaaggattgtgtcagtgtaaactgatacttttaaaatgaagaagaggcggagtttactatggtgtatatatatgcatgcatgcgagtgatatttttattggagtaatgaaaaagagtgtaactgccagagcaaaaataaaataacataaaatgttttgatatttattaatgtggtacgtcgaatctggattctataattctccttttcgtttgttgattgacacgttcatgacacttgtcttagatttcctgctaaaattcttcttgcgaaattttatcttacttttactcgtatacggatttttacctcgcagctaattggccaatcatatcatggataaaatgacatcgtaaacatttgtttgaatgtcaaaagataacacaatagtttatcttgtacacgtttttgaaatgttttttcacaaatattcattgtatacgcatgaaatatcttctagaagttattttatattataagcgttttcttaaagctacaaaaccttaatacatacaacaaataaaattaaaagtattgcctaataaatgctgcttgcttttcacatatgctgca

SEQ ID NO: 44640 - DNA, 688 bp, Arabidopsis thaliana landsberg
aaagattcgcataaatgaacaattactgaagtttagtttacaaaaatagagcatttcttcatttttattactgtgaaaccttccttctttctaaaattaatatgcgtgtaaactctaaatcataaatatattagtgttgacaagtaacactatatatgatatagtggaatggatatgttactatatgtatagtgtattagggagaatttagtatatacatttcatcaactagtgttttacaagaacacttcttgcgcaactaaaaaacttatgaactaataaaacatgatcaacttttggtttctgattattattattatttgttttttcgcaaataatgattattcgtttaagtttattctcaaacacacatccaataaaatcatattgaacgtacataattattatggagcacgcaatatgaatacgttatacgtttacacacaatggaaaaacaaaaaaagggaaattccacacgaaatgaatcaaaatcaacacaccaaaataaaaagaaaaacaaagataacaagaaatgagttaaagtcgcatcatttctcatttaaaacataagaggcttgtttgtcaaagaatatgatcaagtgcttagcggcgacaatgacaatggaattcagtgctttctggttcgcatttttcacaaatttgtttcccaaacgttgccttgcaacac

SEQ ID NO: 44641 - DNA, 970 bp, Arabidopsis thaliana landsberg
acatctaattagattacgcgccgccccgtaaaacaggggtaaagtcaaaaagcaatatcttctcatttttactttttacttttttcttgttgagggaaaatataaagaggaaggagccaaagaaagcatcactatctgaatttttctttgtacatttatttatatataatactagtttttgtgtgattgctgtttggctccgaattttatatccataattttttttttttaatctccccttggttgatcggtgaacacaaaataaaaaatctaaaataatcgcaaaatacatttgaagaagctacacgatcaacaacagcaaaggatttcgattgttgaaaaagttgactcttcttaatttgattcgttgtcttggtttctgggttttcttcttcttcttctgcggcgctctccaattttacaccttgcgaccagcgagaaaagaaacaaatttcacccccattgaagaaggtttgtttcccctaattgcttgattttattctgagattaatcccaggcgccaattatatgcttctgttcttctgataaatctttgcccttttacgatttttctttgattttaccctagttttatggtataatctgggtgagtttctttcctttaattcatgtatgattaagcttggattggtcgattctgatgagtcaaaatcttgaaacctatataaattgatgatttttcgtggttgttttaggtcatttgagggtttaagctttctttgtggatttgcaggacctttggttaagctccatggtgtggtatgcgcagagtggacaatacctagatgggtgtttctcttctgaaacaacaacatcgtattacaaatcaagctgatactttttctagattcatggaaagatcaccagagaataatctaagccgaaatgagcacatcatcattgactttgcagaaatgccgcattgcatcatcatcatcttctcatgata

SEQ ID NO: 44642 - DNA, 634 bp, Arabidopsis thaliana landsberg
ctggtggaaaaggcgcgccagcagttgcccgcagcgatcaccgcgcgcctgcccgacagcgtggacgagttgcgcctgatggcgatggaactgacccacaagcatgccggccggctgcaactggccggcaaggaaaccgcccgggcgctggtgcacatcatcatcgggttggtgctgggggcgatcgtggcgctgagtcatgcgcgcccggcgcatcattccggtccgctggccaacgcgctggcggaacgttgccggcgactggccgaggcgttccacgacattgtattcccgcagatcaagatcgccctgatcaacgccgtgttcaccgcggagttcctgctcggcgtgctgccgctgctgggcatccacgtgccggtgtccaagaccctggaggcgatgaccttcgaggacggcctgctgccggagatcggcaacctgagcttcaataccggggtgaccatcgacgcgctgtcagtgtctctgtgggtgggcagggcagccctggtcttactggaggtgatccacaagctcgagtactttctcaacgcccgcaaagatcggcaggcgcattcacgcccgcccctgggaactgctggaggcgacgcaggtaatggaagccgccttcgacctg

SEQ ID NO: 44643 - DNA, 463 bp, Arabidopsis thaliana landsberg
cgagggtcgttttcggaaatcgccacggcggcacccgccggctcgataccgtcccgtgcagagtgtcatcagagcggggggcgggatggacgggttccacaccacaccggaacagctcacggcggcgggcaactcgatcgactcgacgatcaacggcggcgacgtcgccttggcgcccacgcttgcttccggctaggcctacggccacgccggcatggccgccgcggtgtcggcgttcgcgtcggcgctgcgcatcgccgtgccggtgctgacctcggaggccaagaactgtgccgaggggctccgggcgagcgcccgggactacgcgcggaccgagcagcggaacgcgggcgagctggccgccggtgggccgcgatgaccgagctcggcgcgacgtcggatcctcgggccctgatcccgggatcacccgagacgatcgagcagaacgcgctcgccctgaacg

SEQ ID NO: 44644 - DNA, 803 bp, Arabidopsis thaliana landsberg
tgagtccagacgttaacaactcattaatgatatataatattttgataatttaccaatttgcatctttttatttatagaaaacttagtgggactcacagccagtcaccggtcagtaatgtgtgaggtattccattaatctcgttgacttagctcaaccattgtctattgtctgttgaaatcaaatttttacggagaacaaaagtttatgcaaaactaatattagtaagtgtcttgaaatattaaatattttaaaagattagctcaactcaaaaccttagtctttcaatttatatgatgaatctttcaaaaccaccacaaaatctttatttaagcttgtagatacattagacacatcatcacaaaattttcgtacatgtttgagtctatgtgatttatttaataggcattaaatagaaataaagcttttaataatttcaatcacgtgtgaagcggcgattgaattgcgaacggtgatgagatgcatttctattttctgatctattttttctatgaacaagtcaaaagtctttctaatagaaaaagggaaaaagaaaaataattttaagtaatttagtccaaaaaaaagaaaaatctattatgagaattatgctaaaaatagttttttcttatctaaagctcctatatttgactatcaaccaaggattcaaagttttactaattaggacaaagtctttgaaaacatttcgtaagattagagtgctttttcttagaaaaaaaaattctttcggtgagattttttcagttacaataagattgggtcaaatattaaatttaatataaat

SEQ ID NO: 44645 - DNA, 575 bp, Arabidopsis thaliana landsberg
ttgcataccggcttgctgttgacgttgtcttgtgtaacctcgctcagaaattcctgcagcagccgcttcattcgtagcagcgtggaagcatccacagcagaccatgcagcgtcagtgtagggttgacgtcaggcaccaccgccagaatccctaaggcataagcgctgtcggtgcacagcctgacaatactcaggacagcaccacgcatgcaatcaggacgcacgtgctgctactgcttggttggctggcaacgatcacaaacatatccgaatacggtacctgcagcttcgtcgcagcggtgcacagcggttttatggaaggttgtctgcgccgaggcgcagcacatcaaccccagtcgcgtcactaaaagagcatcagcacggagaactgacgccattaggcctgcttgcgtccttctgcagacgggcagcagtgtgttaaggcactagcttccgagctacctatcaactgatcattgtacgtgtcgcgacgtgccgtctgagcaggctttcattcatgcagaggagatgatgcacatactggttgtgaacagaggagccggcgcctaaaataga

SEQ ID NO: 44646 - DNA, 836 bp, Arabidopsis thaliana landsberg
ctctcttctcctccctaaaggaatttagcatccatggttaaataacaattcacaatatactatcctcaacaacaacaaaggacggaacaatcactttttcacattgacatacttctcataattaatagatgatttagtcttggtgaaacgttgaggagaactgccatgttcctgtttcagaaacccaaatctatcaaccggtacaagcagagggactggtcctggttcactgtcctttgttctttttctctccatttaactaacctgaaaaagaccaacatactcaaaaaatcttaaaatcccctaaatttcaactaatgaatcagacctaaaagctacattcaaacttagatcatcatctaagatcccggagctttgatctcaatatgactctaagagaagggtttttgcagaaaaaacgcaatcagcaaataaaattctagaacttcgtagatagaattagaccaatggtgatatatatagagcaacacccaaaacgcaaacagtagcaaaatgctgaagaaagaggtaaactttatatactcatggtgaccagttctttaacacaacgacgatccagaaaaaaagaaacagagaaagattgtcggagaaaaagcgaaactcaccaacattccggtgtcagatcaagagggtcgtatccaaaatctcaactttcgaaatgaaataaggcgatcaaaggagtcgcctactctaaaatttcccagcaaaattgaaatctgaagaacaatggagcgatgaattgaagaatgacttcaaaggaaggaacacggtaaatagaaaggagacgttgggactggagatcacatcgatcattc

SEQ ID NO: 44647 - DNA, 519 bp, Arabidopsis thaliana landsberg
  unsure (1)..(519): unsure at all n locations
gcagcattgtacttcccggtcacaaaacgcaatcgctacgtaaaaaaaaaaggtccatctgaattcaagtcttattcaatttacgaaataacccctatgaaactgtgtttaatggacacgtgtcctggatacgataggggtataatagagactttaggaaagtagaggttggcgtttgggtgattggtcaaagcgaatccttaagaatctagtaatactgacacaggtcactcaaacagctatttatttggctaattttcagccttaatatcagaattagagagataagtttttcttcttcttgctctgtcgccactaactaggtcaccgccaagtaacatcggatcgagagagagagagagcgatggcgagagatatgaatgtagtagagattctggatgacgaggaggaggctgtcttggagagcgttgggcctttttcgctcgtattgaatatgaggggaagcgttctcaccnacggaccgggccctaagctccctggaaagncgcgcccgagagg

SEQ ID NO: 44648 - DNA, 712 bp, Arabidopsis thaliana landsberg
tttttcaagatcacacagatgagaacaaagaaaggaatgacgaaagttttctacaccattgcatcttgaaactcttatgggttccagtttctatacggtagatatagaataagtcaaggtaatcctcatcactcactttgtgttgataccgttatttcataacgatatatataagtagtcccattagttcttagtcttaaaccgccgtagtttttactgtcagtccctgaacaattcttggttataattagtccctcgtctatacatagtactgtctcgataagatgtccgcaaagaaaataatcccaggttatgtgatttaagagacttaggagctttcattagatacacataacacaacagcttgcagaaattgtgtaatgattattgaaaaatcgcggtgataaagacaaaccgagatctatcctattcattgtaaactgccaaaaaccggtacgtaagctaaatggaaattatagaattgtcatcaaatgtcattttcaggaagggaatgatagtgaggacgactgttttcatcagttggcttcaacagcaagcagcttctcctgtgcctcaacagccacaaatcagtatttgtgggtatttatcaatctctaaaacgactctctctattattgataagtcgcatatgagtatatgatattgaatggatattttcttccactcaccctctgaattagtattaatatat

SEQ ID NO: 44649 - DNA, 562 bp, Arabidopsis thaliana landsberg
cttgatttcgcaagcttcaggcacaatatcgtattttcttcctcttaacttttgaagaacttcttcacattctttatcacgaccttttttcgcctgtaaatattatgttcatatattattatatatttacttacaaattacaacaatcatgttcatggatataagtttttcacgattgatttatatgactaaccagccatcttggagactcaggtatgaagaacaaaccaataacttgtatccaacatggaatactacctggttaattagatatctatattttagtttagggcaaataaaataataatcaggagaaatgaatctttaaaatcgggatagttgatgggaatgaatcacctattatggctaaagttctccatgacaagaaatttccaaagtaatatacgactgcaactccacagttttgcaaaagctgtgaagtattgatgttagaataaataagtcaaatttatgtataaaatgataatatacgtataaactacgattttaaataggtaagttacctgattgctaaatgtaaaagcccctcttacgtgctcgg

SEQ ID NO: 44650 - DNA, 733 bp, Arabidopsis thaliana landsberg
caaaccgagctttggaaagacgctagattgacttattaaatacaacgcgagtcggtcgaaccgaataatcaatcctggttaacaaaccgagcgtcggagagacgctacactgacttgaatacaacgcagaaactcactgtttatatataaactcagcctcctcctccacttttcattctacgtacaaaaatactcttttaggctttttgattccggcgaggtctctgcttctttctcctccttctccgtcgtctccatatcgtgatacttcaggttacattcctcaaatcctcttttttgattctacgacgaacgacatcgctttccttaacagtttcggcgggtttatcacgcctgaatcctaatttttccaacatctgacgaacgagtacagaaatttctggttatttatcttgtgtgacattcgtgagacgtagtttagtttagttagattgatttccatcggattcatcatagttactatttgttgaagtttatgtcatcgatttggttttgattttttgtactctgttttctaatttgatgattcctggttatgaaatacacaacttgtgatgttgccttgttcaatgtcgatcctatatacgactaattgtgttgttaataataattggtgtaaattggttcgtttttgggttcttggtgtatatgattcatgatttggaacttgaaaacttccattataatgtttgctaatgtacatgtttttttg

SEQ ID NO: 44651 - DNA, 581 bp, Arabidopsis thaliana landsberg
  unsure (1)..(581): unsure at all n locations
gagtatcatgtcgaatcctgttttgttttccgattttacatatttatggtactaacgtctcttcatttatttttccatttttggtagtcggcgaacttcagcttttgataacgcctaattgtatcagcaactttagttagttttctcgttttttgttttctcttttattatattgatgcaaatggcaaattataatttcagtattttgcaaaaacactgaaatgtataatagaacctattcatgtatttttgtaaaattttaaagattgttttaatactaaaataagtaaatcattaaaaaaattcctagacattggtctctaatataagataaatagatctaaatttatgtttgggttttaattctaataaaaaggtagccaaaagttatatatacagtatttaaacaattttatttgtttaagatttgaattttatagtatgcgagaatcgcgtaaacttttctcgaatgtaacaaaaaaattcaaatcttctcgacacatgtagtcttttgcgaattagaagatttgattccttattttctgttcgtattctaaagntagtcacgtttatattatttt

SEQ ID NO: 44652 - DNA, 526 bp, Arabidopsis thaliana landsberg
gcactgccctaactcatatttatgacaacagtgaaaagcccattccgctgaattgtgttttttctaactgttttctcaatttcaaaggctgcaatgagcagttccaatttattatcctgctatcaacagtatcagtaattttgacctaaccccacctgtccgctgtcaatataaaacttacttgataaaaatattcaaaatttctagacatactactattaattattgtaaagttggaatattataaggaaaaagtaagagaaattgacaaaagataataaatgggattgcttggagtcgtggcaatgtttttggttgcacactgcacatagcacaaagtttcataacagaggtaattgttgcatgtggccccttcttcctaaagctgctttcttaactcttttgtctcttaaattttacacttttttttctttcttttttcaaattggatattctgatacatgactataaatgttatctacttcacacaacaacaaaaaaaacttatttaattccccaacacaga

SEQ ID NO: 44653 - DNA, 425 bp, Arabidopsis thaliana landsberg
tgttgtaatcagaccgccaattatatggttggtgcttatgaagataagttctatgtgtgaacagtacgttttattttattttaattgggccaatcacatcacttctctttttgttgttattaactttacaagtaaaagcgcgtgatgggctgaggaaatagtgggtgggctgcttctgtgattgtcgccttacgtgtcaacggacgggtaaatccgtaatttttgtctatcaaaaacttgttgggaaagcaaaaacgaaactgacatgtggtgtgacgtggatgcgtttcttgagatccacgtgtcttatcggtaattaaggatttttgtgaagatcacggttttgttccgtctgacgttgaccacacattggtgttagttagttcacgcgcgaagggtgacgttgactgattcaagccgtcgtc

SEQ ID NO: 44654 - DNA, 1624 bp, Arabidopsis thaliana landsberg
agagacctgattctattgtacaaatcaacagagacgacgaggaacggccataatcttggtctaagtcttggtgaatcatcatctgaagagtttagactcaagtctgatgtaagtgttcatgtttgtgtatgtatattgtttttgtcggaaaataattaaattggtgatataattcatatgcatgataattctaaagattgcaagcataagaagtaggattagagatgaggagagattattagggagcgatctatcgctagcaatgatgacgacgactgtcagatcggaaaagcagcaatcggacggtggaggaaatcgagtggtgggaatggcagcatcatcaggattctctcctcaaccttccccttaccgcattcctcacaccttccacttctctcgtccctgattcatcatcatcatcatcactatcatcacaatcatcatctgagctagtgttaaccaagttatgctttaatgaatttgagttattctcgagctatttttgggctctgtaatacatatatgttcttgagtacggtataacaagtttttttctttctgttaatttaatcagacaacaaaaaaggtatactcgcgagtgatcctaactccaagttcatactaaatttatgtcttcgcctgaaatagagagataaccaaacggatttagtaaccaattactgttcttgctaaacagataaaagagtttggtgtgaataaatggagtgaaaacgtgatcaccttgagtgagtgagacttaattatatacaaagagcaccaacatctggtgcatttgcttcaacttcattcgatgttcctcttctcaaattctttctccccttcttcgactccattgtttggctcctgcaaattaatcaagaaacactcatctttagttaagttctgctttgagtgttttgcagaaccgttttaagaaacttacactaacagttttacagaggatctcccagttgctgttccacagcaggacttgtatttcttctttgaaccacatggacatgttttattccttgggatcttctgcagttttcacagaaatccttttatattcggatcatattttaatgcaatcataaggaaataagctatctcatggttttagcgagccaacaaaccttatcatcggtctgtgtagtgcacttggcttggactgtttcactgttattgccgctagctgattcctcctctatcaattcttctctggcttgctcggtgttttccattggactatcacttgcatgctttgggttgatggtatctgatgcagaggcggtttctgtatcattttcagtcaaagactccattccttggtctgctatcaggaattctatagcagcatccacatcaccattaacttgtaatagaacctaaagataagagaggactaatgatcatgatattctctcaaacattaaccaagcatcgcattatcacctgttcagctttctcagtattgtcacaacaactaccagacatgacaactttgatagctccagcattcacatgacacttatcagctttatttttggacttgctctctgtagctttcgcttggttagatgctgctgaaactttaacatcagcctttcacacaactggaatt

SEQ ID NO: 44655 - DNA, 732 bp, Arabidopsis thaliana landsberg
gtactcttgtttattatataagatccagattcatcggtgttagttgtagtagtggttccttgtggattaagcccaccgccacctattccaaacggtgatgtcgtggtgccagacggtggcctcaatgtcgtcattgggctgtttccgacggttgttgacggcgttcctcccactgtggtagttgaagctgaccctccagcgttactgccatgaccaaaccaaaactttaactaatatagtttataaatagaatgttcttgttcagtaattaaatatataaatgcactattcacgtccaaattttaatatgatgagaaatgtattgattatatttagtgtttatagcttacctcttaaaacgaaggtaataatcttttcttacaatagacaatgacaatatttgaaataaaatttataatgtagatattgtttaaaaaaggattaaagtcagaattggaaatggagaaaagaaacaatttatcttcctaagtaaatgcaactcatcaacttgtatacgcttgttcgtcacgaaacctctaaagtagaacactactgcaacatgctttgttccttttctttttgccttttaatttattttcttttagttattacaaacttgtaccattctgaccagaaaaaggctagaccaacggacagaaacagaataatagaactaaagaggacatggatctctaccgttgaatgattactcgtaaagatcatccaacggtc

SEQ ID NO: 44656 - DNA, 523 bp, Arabidopsis thaliana landsberg
attgccctcagattcgagtttatcaatccattgacattctagttcttattacccactgacactctagtgatttgggttgaactttatcaatcaaactgacaatcttggaactttgtgaatcaaagttggtaaagaaagtataaaatctggaagggaatccatcgatcttgttgctatttaaaaagtttatgatggccgatcatgattgataatttctgatatctcaaagtatgcaattcatcctcttactcatcaagattcaagcatctcaagtaacaagcctaacactattgaaaattaagtggtacggtgagaatcttaagtaaagattcttcaacgatgggaataatcatatgtttatatagaatgaataattgtaacaaagtgttcgcatgatgatcatcttttcggtgggaataatttggagttgccatcttggtaaattggtaatcatatcaagcaatcgagtactacactactttgttagttacttttccgttttcgtcggatattacatctttta

SEQ ID NO: 44657 - DNA, 517 bp, Arabidopsis thaliana landsberg
caagcatatcaagagtttcaggaactccctctatcaatttatctcctttccaaatcacaccttcaaacacacaagaataaagaagaaagcaaagagaaaattcagcacattttggctattttgacaacctaaactaatccatgagacctatagaaaacagagtatttttgctatttaaggcgtctacaatggccaaaaagagaccacagcaatcttcttattccaaaacttgtaacatatactgttgtaacctctcatttgtagtcaatgcaaatcaacaccacaacgcataatagtgaagaaaaaaaccaaagatctaatcaagaaactccatcattatatcaactgccactatctacacataatctaaactaagtgattatcagatttcattttgtggttttgttgatactgaccatcacaatcgaagataaaagtttcgacagaatcaatgagctgatcagcgttctcagctggtgtgtggccatagctcttggtgtaatatggaactcgtcat

SEQ ID NO: 44658 - DNA, 660 bp, Arabidopsis thaliana landsberg
actccgaacactcatttctattttatgtagactagggtatagggctaacaaaaattggtctcataatagatatcgaacaaaagacacagaacctaaagcaataacaaaggagactaataaccacaaatttttctcatatagaaaaagtttacatattctccatagctattttttcgaacaaattaagagtcaaatgcaaaagattttaaaaattttgtgtgctttcaaagatgaagtttttagcggttaaccatgacatataaattcgtaatattttgtagttgtttttaaaaatatgattggattatataataagttttaccttgttttccacaactcattgaataaagaatttgtcacataaacaatacatatttgcaactgtcatagtaaaaatatattatcaaatctaacaaaaattatgtatattatgaataaaatactctaaatttaaagaaaagtatgaatccaacactatctctatcttagtacatatatatgtggactaatggtagttagttagagttactcttaagttttaagcgataaaggaattttgttttgtttttgacagaaaaatatgttctctagtcacatattttaacgaaaagttttaaaatagcttatctaacaaacagcaggaggtcaacataaaatcca

SEQ ID NO: 44659 - DNA, 111 bp, Arabidopsis thaliana landsberg
  unsure (1)..(111): unsure at all n locations
aaccaaagngaacagaaacgacaaaggaaacanaggaagaagacacgncgccagnagaagacaaacaagcaaaggcggcagacaaaggggcaacccaagaagagaaaccac

SEQ ID NO: 44660 - DNA, 428 bp, Arabidopsis thaliana landsberg
  unsure (1)..(428): unsure at all n locations
gtnnnnnnnnnnnnnnnnnnnnnnnnnnnnnnnnnnnnnnnnnnnnnnnnnnnnnnnnnnnnnnnnnnnnnnnnnnnnnnnnnnnnnnnnnnnnnnnnnnnnnnnnnnnnnnnnnnnnnnnnnnnnnnnnnnnnnnnnnnnnnnnnnnnnnnnnnnnnnnnnnnnnnnnnnnnnnnnnnnnnnnnnnnnnnnnnnnnnnnnnnnnnnnnnnnnnnnnnnnnnnnnnnnnnnnnnnnnnnnnnnnnnnnnnnnnnnnnnnatcattctgagcggactgacggcggaagcacgaacacctttatctaccaaactcgtatactcttacgcctacacaacgccgactgtggcgtgaccgctatcatnnnnnnnnnnnnnnnnnnnnnnnnnnnnnnnnnggcttgcccttgccctctatagctcccgcctat

SEQ ID NO: 44661 - DNA, 1134 bp, Arabidopsis thaliana landsberg
agaacataccaaagagaaaattatagctaaaacataataaagcagagtaaaattttacttcataaaaatttaagtaaacttttacgccagagtaaaaaaaaattctgctcacatttgctctatcttttcttctctaacttcagctatttattggcatcagatccattttcggctaaaaagaagttatagtcacacattaaaatgacaaatagaacacatttttttcttaaacagattattacttctaggtggaagatatatgttttatttgcacaatacttcttacatgcaaaaaatgttaaaaaagttgacgagatagtttagataatattatttcgagaataatacaaaacttattataataaatacataagtatttttcagtaatcacgattaatttttgtctttggtcaaatttctaaataattcaaagaattttgggcccaaaactcattatttcgaattaaaaataaaataaaatttgtgtttttttttgttttggtcacatttcattagttatttgggcctggcccaataaaattcaataaaactttccatttttcttttttcttcagtaatgtctgatccttaaattttctcaggattggttcaaatggtttcactctccacctccactagccacgcgccaccacttccgactaaccgccggacggcggagagaacttttaccgtccgctgtatctccatctccccacgcgagcctaattacgcaattacttccgataaaagcaacaatacctccttgtcgcttagagagacgagacaaagcaaatggctaatcaatgcagaggacgtgaatgaaagagattcgaaggagattaaagaggataagaacacgaagatcgcttcgaggaaggcgatatcgataatactccgaagagaagctacaaaatcgatcattgagaagaagaaaggctcgaagaagcttcttccaaggactgtgcttgagtctcttcacgaaagaatcactgctctccgatgggaatctgctattcaggtagatttcttcttctccgcaattatctcaaatgggtaagtttagttttggcaataatagtgaatttgatacactaacttgattatgttaggttatagatttggatatacatgaat

SEQ ID NO: 44662 - DNA, 596 bp, Arabidopsis thaliana landsberg
tataatggccatattgcaaaacacttgaagtcatcttcttgagcctgcctttttgttatacttgcaactctgttacctcaattatatcgtgtgttatttatgaatgtgctgaaatatcatttgttcccatttaaactgaattgagatttgtttatattatttgttgtttttgacaagtatggtttaaattattgaatgtttcggattttcagtttttttttttttttttttggaatttactcaggtatataatttctaatttctaacattttttaagtgttaaaagaatcagcttaatatatataatttggtaaggaacaactttaatgctttaggcatttaaaattcaattctcatatagatatcatttttttacccaaccatatatacatttctagattttttttttctagtaattttgagttttcattaatcaaatttatgatggattaagaaaaagaaagatcgatatttgtatatgttcctggtatgttttaggctttttaaatgcactagaatttaacccacgatagcgcggttatattttcttttaaaaggaatatttatttttaatgaaatattatgtttttaagata

SEQ ID NO: 44663 - DNA, 1132 bp, Arabidopsis thaliana landsberg
tgcgctgcccactagctgtacatctcaacactgtaaacaagcttgaagatgttgatcaagtaaactaagcctctcaaaagactggcttttttctaagattacaataccattgcacaggacgacgagatgattaagatatgccgcaagatccattgatgcaagcgacaggtcaaaggtttgtaacttttggctacggattcagggcacttcaactcgtcaatccttcaaataaataaaaaataacgtacgaatctttaatcaatagttagtaaccaatagactaattaaccagtgatgaaaatactaacccattagaattagtccttttctctagtagctcggtgacaccttcaacagcctttcctttcaaaaaattgtaagcagactcgtctaagttactcaagaaactgttactacgtagttctgtccaaacatcattttctggaacctaaaacatcgatgaaaatagctcagcacaatgctcactattaccacagtatgaacacacaagtaaaccaaaacacaatagttaaagatatcagaaacatacccaaatggttgccgtaccataacattcattatgagcatatgattcacaaacttttctctcaaaatacccaacctgaatgaacaacagtgggcaaaatttaaaccaaattatcaacaagacaaaaaaatctaaaagttccgatttttcgcataattcaataccaatttcttagttgattcattgatttctccatcttctacacataaattcctttgatttttgtatccaagatgacattgcaacttcccttggtaacattctccattaattggacaaggttcacaaatatctgaaacaatgaaattgattaatccaaggaattacataattcaactatgatataaaggaattgagtatgagtttcgagcttacccaagtctgaatcgatgggattaaagttactatcgcagaaagatttagaagggtttgagctcagagacttagagaggaaattgcaggtaaaagctacagcacaagcgacaagcaaaaccttcaatagtgtgaagaactctcccttggaaggaaataagctttgtggtggctcgagcattgatctgatcggagaagaagaagaagaagatt

SEQ ID NO: 44664 - DNA, 592 bp, Arabidopsis thaliana landsberg
tacaacatataagacttgaataaataaatgtaacggtgattaactgcaacttgatcattcatgacatatatgatagatcccaaagaattcttcaatagaaaaatatacacttatagtcgtatatattgtttttggttcttgtcatcattttaaaagagaacagtaccctactttatgaagaacaacacaaacaaaactgttcccaaatacattttggttagtagccaaaataagaaaaatgggtctacaagtgaaggcatacatgtatagaagtgaaacaatgacaattgtatttcgctaattaacaacatgaatcaatatgcatgaaatctctttcatggactgaagtacgactcatggaaatacgagaaaacaaaatttgcttgagaaatttatcaaaaagaattttcttaaaaagaaaaatttattagtttacataaaaaaagaaagaaaattgagcgcaaaatgaacaaattaaaaatcttccataacataacactatatgtcagcatcctaatgaaaatgttttattggggagtcttggtcttttcgtacgtcaacgtgttctcaacaagacataatatataaatac

SEQ ID NO: 44665 - DNA, 747 bp, Arabidopsis thaliana landsberg
aaaaattttcgcctccattggctttttctattggtttaacaagtcatcagagccattataatacaaatgtgatatttccttgatgcatattaattgattgtcaaattgatatatatgggtctcaaaaatattgttgaccatcttaaaagttggaataaaaaagaacattttaccagataattaatcaacaagtagatgaagacaggaaatggatccactaagtccaaacttaatcattgttatttttggattagtctagttttctcgtcacaagatgactatctaatcttcttgttgttcaaaaagtagatgactaaattctttggttaatattgattttggcacacagatgactgcagactgcatttatagaaaaaatagaagtaactaaaactctgttaggcaggaaaaaaaaaactcacattgattaagtaaattagtaattgtaaatgattcaaaatattgtattaagaaaaacacgaatgattaaggagaataaaagtggtcttcgaacctagaggcatgggattctctatctcgatctaatctcgtcgtcactctcaatatcatcacatcatcatgtttcagtttaattagtaattaaagagactaataatcttttggttaacaataatttaataataaaacgtgttcatagttttttaatagagtaagtagtagatacatatactcatgagggttctcccaacatgtttgactaatctctcgaaattgggcatacaattt

SEQ ID NO: 44666 - DNA, 365 bp, Arabidopsis thaliana landsberg
gcacgatttgattctgtcagattgatcaaatttcttctgaggagaaaaagttgagatctgtttatggtttctctattataaatgtctgttttgtttactctattttgactgttttctctgtttgacttacgaatgtctgagatcttagactccttattgagtattgtgtggcttgtgagtgaatccctaaaactgagtagttgacttgttttgaaggtctctatgtattgtgcttatgttttaaagttgtctactttatttgatacagtgattagtcatcacttgtacagattcccccaagagcattgttttgaacacatccaaatttgcttagctctccatttggcatttaagtgactagattt

SEQ ID NO: 44667 - DNA, 616 bp, Arabidopsis thaliana landsberg
acacccgaatcaataaatcgaaatatcagacaacaatctcgacaaacaattttaatttaacgattaagattttactaaggaatagaattgtcagcatattattttttccctacaatgtttatagatcaatgggtaattaaggatttaattaccacgaggaatacgagtcgttaaaggctcctagggatttactgttggtcaacatatatatacatttacaccgaaaccatccttaaaaaaggagtcaaggaaaggttctattaatccggaattgccgataaattaatccaattgttaataggtttgttaaagcaattaattttttgatttatcctttaatgaataaccgttttaacaatattgtatcttgtttttaagcaagttcgatttatcagttatttgtttaatttcggttgaatcttatgtgatttttttttgtcgttcattgatgtacgaatgagtcatgtatgaacgaaatgattccaaaatgaaatatttcaggatatttttataaaacaaaaactaatatttcgatttctaatagccatgtggaaaaggaagttgagaatcaactaaagaatctgcggtcgattttcatttaaacaatatcactgaa

SEQ ID NO: 44668 - DNA, 799 bp, Arabidopsis thaliana landsberg
ctttagacatcatattcatttaataattcttattacaatgtacgtattttaaatctatatgtcgatatatatgtacatgtgtaccaaacttgatttcacatatgaaattttagtatggcacaaatacgttttagtatccactatagtacttcattaggttgccaaaaaaaactagattatgtttcagaatgtgatcatagaatactcattccggaaatttcccaaaaagataaaagtatactcatcatacaggcatttgtaataacatatcaatatacccaaaaggtccagatcttcgtcaacttcattgtactctactatacgtgatacttactttcaaaaataatttagcaaaaaattcgaataagtgaaactgaaacattttttaaaagagatgatttagttaaaaaaaaaacatgtttgagtgataatatgttgttacttctgtttatatttaaacatattacatatactcacacaaatatatttttaatgttaacacatgtcagatgatatagtatgatactaaaacaacaaatggatttatcaattcaaatacacattaaaaaataaatactacaatatcaagcaggtgtaggtctgctaaaggaaagttctcattccacttttcagattttattatatccttctcacttttatcatttaatacaatataactaaaaatttatctgcagtatttctacaagtgagaaaagaaaaaatagaaagttcagaagaaagcttccttttatggctttcttccagactgtaccactcagagtttcagtctgctacgtat

SEQ ID NO: 44669 - DNA, 644 bp, Arabidopsis thaliana landsberg
tcaggattttttgggggggatacgcataaacgaaacaaatggctttggctacttcatgtgttcacaatatataatactacttcgtagcaatgtgagatcaatgatcaagcaaaactatttcggtctgtaaattactgaaatggcaaattgcgacttgcatagatatatactacaatgccttgacaaacaagctttctatatccgcctcacaatcgtttgatcatgcagtttttgactaactatagagcagtcatgcaattccacacaatgaaaatggctaataatatagattatattatagagggaactgtggcagtagacatacataagaatacattcagattcacaccggctcttacagctacaaattttgaaatgaggggaagatatagtgttggatcttatgtgtctaaacattgatagcctctaagtactatagcttccattcttgatttaagattttaatgttacccttaggacttattaactttaatggaatttattcataattttacaatttttatatataatggtattgagttctgtaacaataaattctattattaattaatgttttcatcaagttagattatttttttttaatgtatttatataatttttttttatttttatttttattgggg

SEQ ID NO: 44670 - DNA, 116 bp, Arabidopsis thaliana landsberg
ttcatacacgcctaaataagtaagttttcatggcatatataacccacggccctcggtcccagcggcacaacagtatatcagggggagattttacagactctaccccgtaccccccc

SEQ ID NO: 44671 - DNA, 835 bp, Arabidopsis thaliana landsberg
tggtgtgggggatcgaagaaaattaaggaaaaagaaatgtttaacatgaggcccattgaattgtcgggcgtgctatgttgatattttataatttcataaacagtgaaaagtagaacacttaaatacaatttttttgatcaaagtcatcgtttcttttagtgtagtagggacatgtgcttctttcaatcatattcacggtgggtcaaatttggttctgatgttctctaaacttaacgacattatatgaaatgacatgtcttagttagtcatagagcttgctttgtgatacttcaaacgtgacatttttgtggtcaattaaagctaacttttatgatattgctatagggcatgggattaattggtcacatatgatgagtttataatcagtgcaatattaaatttaagaccaacgtaataatacagaaaccttgataacaaattactccaatttgcaaacctaaggatatttagtatttcgtgtcagtgaattttattttttctgacataataattaagaagtgtcattgatagtaagaaggagctaaatttggattttcattagtttatttttgtctttgtttctggaatactttacactaaaaactatttgggcggccggaaagatacaaaagcccaaagttatgagaaattaatatattatacgattttctggatatatttggtaggctgatttttcaacacataaaaaatcttaaagataaagcataggaaaccaagtcggatgaaacttgtatactaaattcattatttttttggttaactagtaagttcatatttatatcaatacttttttagataagtaaatttttttttg

SEQ ID NO: 44672 - DNA, 601 bp, Arabidopsis thaliana landsberg
ttgataacctctcggtgcatctattaaaattttaaattctcaatagtttgttttatcgtacaccgtaatcacattacaataagatacatataacatcatatcgtacaaaaaacaaaaaaaacaatgattcacattgaagtggtgggtgatataaaccaaaagaagtcgtactagaggtttgtttcgatttgcaaaaaaaaaaaaaaaggagtttgtttcgaaaattttaaagttgtgcgtccaatatgaggtcgagagatcgcttggaggagaagcgtttttaattttgaaattaacgattttgccctcataagggcatttacgtcaaaataacagggcaagattcatccacgtgtccaacaacaacacaacacaaacacatcattagttttaaagaaataagattcctatataaatgtataaacgtttctcctattcccaaatcttctttcctcaatatcacccagaagaaagagaaagtgaaacagatcaagaaagagattgagaaaaatgtgtagaggcttgaataatgaagagagcagaagaagtgacggaggaggttgccggagtctctgcacgagaccgagtgttccggtaaggt

SEQ ID NO: 44673 - DNA, 1187 bp, Arabidopsis thaliana landsberg
tttaggaatcaacaaggaaggaggtggatgtaaatatttggggcttcctgaacagtttatgaaaaagaaaatcagaactttttcaatacatcgtggaaaaggtgaaagaaaagactcaggaatggagcaaaatgtttttatcccatggaggaaaggaagttcttcttaacgcagttgctcttgcgattcccgtcgactcaatgaatgtttttaagttaacaaaggagatttgtgaaaagataaatggcatattagagaagttttaatggagctcaggcaatgacaaaaaaggtatgcattggttctcctggaatcgtctaagcttgccgaagagagaaggaggtttgggattcaaggatctaaagaattttaacttggccttgttaggaaaacaagcatggaggatcttagaacagcctcattgcctgatgtcaagaatgctaaaaggaagatacttcccagacactttcatttggaaatcaattttgcagggcatggacctactaaagaagggacttcgctattgtgttggtaatgggactctagttaatgcgtggttggatccatgttgcccattcacccgccgagaccgccacaaaaaaactagggatgccctagatcagcatatggttagtgagctcttaaactcaacacgcacatattgggatttcatcaaactcgctacttagataatacctaatgatgtggagaatgtcaaaaatattaaagtttgtgcattatacaaagactgacattatacaaagactggcatttagactatgaaatctgcatatgttatacaaacatatgttttgaaggagataatcatgagttagaatcaattatcaacagaagaagtccacacttttgagtttcaattttggatacgagagattcgagcttagaaacaaatatttctaggaagcaaatttttatgaataggaagaaaacacaacaaaccagcggatattctcgtaaagcagcaatgacctcaaggaacaaaatttatctttcataatcatattctttatgtaattcataatgctatgtgtttggatcatacgttatttcaatattaataagaagctacaattcaaaaataatttaaaaccaaaatctacaccaaacttttttttttttttttttttgtcgtccttcaccaaacttttttaaaacccgaaaatacg

SEQ ID NO: 44674 - DNA, 525 bp, Arabidopsis thaliana landsberg
tttttaagttcattgcttgttgttgaagcacttatttagtgaccagtttcttgtttcttaaattcggattactgctttttctgttttggaaggctgaatatgcactatcgagaggcggaagtacaagaacaaagttaagcatggaggccaagtatgatctaattatcatatgattagtgctttagatgatatttgttagtagctaagtgtttcctgttttgggggaactgagaagatgaggctcttcctacagaaaatgcataaagttgtgatgttaaaatttctgttcttaatcagatcaaattgttttaaatagtagaagtccacttttactccacaattgctgaatcacactctattttcttttgaagcatcgatctggaaggacatcggcctagagtacggcggtatgcttatggattaaaaaagcttatccgaattgggcaaggtatacactatctctcaaaattatgggcttgctaagcttcagaatcttacactgtgtgtgcagattgcaaaaagttc

SEQ ID NO: 44675 - DNA, 806 bp, Arabidopsis thaliana landsberg
caagtcatccattcgagtttataaaaactttttgactaattttatcattttaaaatatgagtcgtagatggttacataagatttatgggtatataactgcaatgttgattctatttcacacagtttgtaattagtgtacaaaatattttatatgcttttctattattctatataatgcaacccttcggcaaattctctaaaaccgaatgctcacaaaggttacattgcatatattaacttcttcctaatgggagattatgttgagaatcgaggctcgtgttcttatcaaccttcgaaacaacccttctagatttctctcgaacccaccaatgcacatctaatcctcttcaagctcattttgaagatcatgatgagataaaaaatctccgaaaatacgcggaatttaatgactccaacacgttcttggctgtcgcatggttatccttcttcatctttagtaccgacgccaacttgctctttatgttactttttcgtctggacaatagttccaagaacgacttcaatactactacactgaccgataccactcggctcaccgtatctataaccgacacaagatgcccatcttcatgatcattatcacctgaacgagtccctccatcgactttcttcaaggatcctagaagcttcttggcttcttttctcatgtactttcctaaaaccgacatagtcggagacagcgacatgcgttttatctcctcctcctccaccagatactttctttcttttaacatatgactggaccgccaccaacctgcttcgggaggctccaccattagaatccc

SEQ ID NO: 44676 - DNA, 760 bp, Arabidopsis thaliana landsberg
agtgcactagacaatgactaatgtaaccaggttccacagagattaaagatagatctttatttttcattacagaagcataaaacatgttaaagctacacaacatgtcaagaaaaagaaaagttaaataactacttaccgcacaatttgtcacattctgtttgactcccagcaaaactcgattaatatcatgtgtcatgctatccaccttggcgagttttgaattcaataaaaatatctggggagcagaaatacgaggttagaaaagaaaataccaaatggatgccaaacgtttcaatatagcatatagataacattttcgattagttacctctttctgccgggttgaaactacagtttcaagctcctcaattcgtagccttgcagcagcaagctcctcgtccttctcagatctcatttgttgtgtaattcccaaccctatgcatctgaaaggagagccagaaccccgaggtttccctgaacctttactcaacgaagaatctatagcttgagaaacatggatttctggctttacttgctcagccattgcttccaactccttgaactgtttgcaatggatcactcttagtaagtcttttgataaacttttaagggtagtcaatcaattaaaaactatctttaccttatgcatgtattcactagcctgagcctctgcatgcaaatttaattccgatatatgctcactgagttgagtaatctgttgcagagtaaacatacatataccatcaagttttttgaaact

SEQ ID NO: 44677 - DNA, 666 bp, Arabidopsis thaliana landsberg
gccacaagtccagttggaggcaatcttatggggtattgggactgctcttggggagcttcctccatatttcatctcaagggcaggtttgtatactgattctctctatatatttctctttgatttgtgatcgtccatgcatgtgcataggtctcggttgtttattgtgttgtttgctttttctatttttccagctagtatatctgggagcacagtggatggaatggaagaattagatggttcctccactgaagatagcggatttatggcaactcacctgaaccgtgttaagcgttggttattaacccattcacagcacttgaacttcttcactgtcttggttcttgcttcggttagtatgcatcctccaatttactttaccttctgcagtagcaaatggattatgaccgtatttactgtgtcatataatatcttttgctttctaggattcaatgatcaggaccttaccattactcactgcttcgatttgattgtaggttccaaatcctttgtttgacctcgctggaataatgtgtggacaatttgggcatttccgtttgggaattcttcctggcgaccctaatcggaaaggcgatcatcaaaactcatatacaggttcagaacctcgtgtcttataaatactagtttaacaccccaaagggtttttta

SEQ ID NO: 44678 - DNA, 301 bp, Arabidopsis thaliana landsberg
  unsure (1)..(301): unsure at all n locations
gaagagaccacaccaangggncaggtatagaggatgagaagaagccatcgagacagagccacagccaatagacagaaaggaggggccggaaggcgcgcatacagnaggaacagaaccgacgaangcgccaaggatgaggggggcgccaaaccaccagcaggagcgagggggacccgacagggaaaaccaaatccaaggaaagaaaactcaggaaaagcaggcaactaggaggaaacaatgaaaggacaacaagacaaatcctggaagttcgaaaggagagaaatcgggagagagagcaaga

SEQ ID NO: 44679 - DNA, 118 bp, Arabidopsis thaliana landsberg
atggaccaaacaaagcatcgacctcgttaaccacaaaactgactaccttcatgctgataccacacacacagagacacaaagagagtgctttatgaaattgaaacaaaagccccatata

SEQ ID NO: 44680 - DNA, 761 bp, Arabidopsis thaliana landsberg
atgtatgtttataaggaggataaatcatatagttatctgtaattaagtggataagttgatatcttaagtgttgttgaggttcaattttacccttagtacgaacttgttgggagatattttctcaagatatcaagtaggaaaacgaattcagaagacaacaggataaatcatgaagtgtaaggagatattttttgaggagtgaggagagtaggtgaaagatccaaacctaacataattgtccttttaatgttcttctttggaatttttttttttcttagacaatcaatcataacttatttaccctgatttgaggcaatcttgtttacttttctttttactgaggtaatcatgttatagaggggtcattttctttaattatttaaatggtacaaagaaaaatcctttacaatgtacagagtagagcactatatgaaactcttaccaataaataaacttttaccagagtcagacaagttgtctgaaacaatgaccattcttagtctaaactcaaagaaataaacttttaccagagtcagacaagttgtctgaaacaactaccattctcagtctgaactcaaagaaaattttaagaggtaatgtatgaaaatggagaaaagaagggaataagtttttttagaaactgaaagataaatacagaatgtaaaagaaaatcgtaatacagttatttcaaaatgatccaaagaattgtattaatttatttgtataatacgtgtgttgttgtaaacttgtagtagtgtgtt

SEQ ID NO: 44681 - DNA, 128 bp, Arabidopsis thaliana landsberg
  unsure (1)..(128): unsure at all n locations
aaacccagngaaacactccaaaaacccccaagaaaaccaccaccctagcaaaaagaacaaaaacgagccaacgnncaaaaagcgaacagaacaacgaagcacattaacacacacccaaaaaaaggaaa

SEQ ID NO: 44682 - DNA, 738 bp, Arabidopsis thaliana landsberg
tatatgttgtgagctaatagcccttaatggtgtttttcagacaacatcatttctaccgacaaagatttgatatcgaatccaacaagtgaaagatgggtctatcaagtcttcctggtccatcagaaggaatgttatgtgtgatattagttaatacagcattatcgatctccattgtcaaaggcattgtaagatcattccttggcatagtaggaatcagtctctcgccgtcttcatcctcgccttcttcggtgacggtatcttcagagaattcatcaacttcagagccatttgatttccgggtctgccaaccagagagttaccttgaggagttcaggaaccggactccgatactgaggtttgagagcttgtgcaggtgcaagaaacaggcagacaatgagtgttctgtgtgtttgtcgaaattccaaggggattcagagatcaacaagctcaagtgcggccatttgtttcacaaaacatgcttggagaaatggatagactattggaacatcacttgcccattgtgtaggactcctcttgttgttgtgccagaagaccatcagctttcttctaatgtttggtgactgcttttcactgtatagggtttttgattgagtgtgtttgttgtgtacagctacttttactatgaattaggttgcatcgcggttgattctcgagcagatttaaaccggggatgggataatctgatgtacatatatatatatatacccatgtgtatgg

SEQ ID NO: 44683 - DNA, 654 bp, Arabidopsis thaliana landsberg
caagtcctcatagacatggaagtatggaaccaactttatggttcactcaagcaaaaatgaatagctcacaattatagagttagcctataaacaccataaatatcgaattcttcagaacttccaaagataagtctagattttaatatctctctggttatttttctttataagaaaaaaaattctcaaccttatcctaaacaatccaatttgtcgctgtggaaacctacaccagatagagatggccatggttgagtgtaatgattgtcatacattttaggaaaggaaaaaagataaattgtgtgatgggcaaaatttctttgtaaagaagtcgaataaaactttagaaagctaaaatgtactaataaccagaaatgaaaaagatcatcattatcactcttaatcaaactacacattaagcaagcatttcttgagttttgaaacaaaacactgttttacgtgttcacagcaacatcaagaacaacaacaacaacaacaacatgaccgttttacaatacagccaaaaggcaaaagcttattctgaaaatacacaatacaatataatctcacacaaaggaccaatttgatgaaacacaaagccagaatgccaatggagcaatttttctttctttcatttaaggaaccttttcccaaggc

SEQ ID NO: 44684 - DNA, 996 bp, Arabidopsis thaliana landsberg
ccatctataataccctgttgtaagaaaaaaaactatatttttgcatgggtctactccagactcgatccgatgatccatatcgttttttccgcaaaaaaaaataaaaacaaatgtcataaaggtctttttgatgatggacaggtttgattgacacatccgtcggactactttggtgtgaaatttaactgacataaagctttgttttagtatcaaaccttataaaaacgacagaactttgcttctctctcatttcacttcgttggatcgtatcgtattgaatccccaccggtggccttcacagcacatatttatattgtttctaaacttttctgtatttttttggggggtcacaagtttctataatctatatgatcactatcgtcgagaaatgattgcaaaaaaaaaatgtgtgtcttgcagaaaaaataataataacaaaaagtgacgactaaattattagatcaagtgcatataattatgttgctaagatattattgtaccactcgaatgtttcatcatggattgttcatactgttcccgtgatttagtgttgttaggtttcaattctttgtattgaggtttttgttaatatattattgtaccactcggttgcttcaactttgtaggagtttattgtcattcttttttgtatctcatatcatcaatatgtggttttgaacaaatttgtttctgttgttagaaatgttactgaaattggagattacttagcttcttatggattttatttatttattttgggaatcccaggtcttaatactctcctttggttgtttctctttctttctaagtagttttatgctatacaattacatgttatcaaaataatcttaatatggttgataaaacatgtatatgcttgtcttaatatgttatgttataacaaatattgtttttagtcatccccacataacgcttgtaacgaactgaaatttgagaaaaatataaaaaacactgagagactcatttttaattaac

SEQ ID NO: 44685 - DNA, 678 bp, Arabidopsis thaliana landsberg
gtttttaaaccgcgggttaaccggagtttcacatgacttcaaattgaccacagacgaacaaaaaaaaaagattttgaagaactcagaaatcgaaatatttttcctttgatatgttttgaatattgtaacactttattgtatacaattcaatttatgaaaaatccaattttctcaccaaatcaaagtttatttgacaatcaaaggaacacgaaacgattgaaaaatccaatcaaacacacgtcgcaagaactgcatcccggcggataaatgaaaccatacacgacggaagaattgagaaccagcagaatcatccgacgaagtaagcaccgttggttgaagataagacaaagcagcttgcttaacgagacgattacgaatcgagatatctccggcggcggtggatataacaggagagcagctaccgttgatcgacggtaaattgagtgaagagttaatcggagaagagatgatatctctgagagaagtgtaagctacgaaagaggatggttttacggagatgagctcgtaatcgaacgaagacggcggcgttgaagctatgtcgaaaggaacttcgggaggagttagagtcgtcatgttggatatgaattttgtacggcggagttgagtcgccggagattgtgacggcggaatctccatagtctttcttcttcttttttt

SEQ ID NO: 44686 - DNA, 571 bp, Arabidopsis thaliana landsberg
tatccctaggattctttttttcacatcgaatatcatttactacggcagagatttgtcattttgaaacgtatcaaaatatgaaatattaaaccattgaaatttttcagataattataatttatgtagggtgttacatgtgaacaattcaaattggattctctggaagtccataccatgagaggcgttattgatatatatatatatatatatatatataaaatttaaaatattccaccgattaaatcaataccacgaacgacgaacacagatgttgctatgtacatcatgagaactatttatttttatatagaaaaatcaaactctgtctccctaattttaaaatcactcaacgaccatcaacacactgtatttcctattttatatttattataatgtaataataaaatgaatatacaagatgtgaacggagataataataatgaataatgaataatgaataatggtttcacgtcaaattcaaagtcaggcaggacacggattccacagtgtgggaattatgacagtcgaagaagaaggagagagatggtcaactaaccctaggggtattctt

SEQ ID NO: 44687 - DNA, 646 bp, Arabidopsis thaliana landsberg
ctaaccgaaaactttatttgtcagttactactacacaacaattataatactataataaacatttgcttctaattttattgttggacgataaacttaactaacaaatatttttggaattatagctattcaaatttaaataaatattatatatttggttttgtgtttgacaatctcaagaaaaaaacagagtttggacacctatgtacggatcgaatttctatcaatagcaacggtgagttatgtgtatacatagaaaaagtttgttttcttgtagaagttttttaattttcggtggcttatacacaattaactcttacaataatagagaaagagctataaatctaatctaaatactataagaaaatacacaaaatgacgctagaataaaagaaaatttttagtctaaaagaacatttaaacagatgactagtatttttaaaagtcaattttatattactaaaatatactaacacaaagaactaatcgtaaaacaaacaaaaatcatgctctcaatttttgatgaaatatttgttattttctaacaaacatggaattttaaccacatcatatatatatatctcatatgcaatcggctctttcatggattcatggattctgcaaatatagtaatgatttatatctgata

SEQ ID NO: 44688 - DNA, 295 bp, Arabidopsis thaliana landsberg
ctgaatgctgcaatcttcatctctgcatgtattgcttagtttaacgtcagcagatcacaacagtttttagcaaatacagaaacatatggtacacatgacatctatcacattttaaatcacttgatcatactatgccacttaatataaatttatcattataggccacaaataattgaggacaaagagaccgctcagatagttcaggcaagcaaactttatcacaacaacaaacacaaggaaaaaaatagtaccctgataccaaatcctcatcgaccttgctgctttcacctgaata

SEQ ID NO: 44689 - DNA, 127 bp, Arabidopsis thaliana landsberg
gaagcagagtctcggaagagatccaaccttgaaattgaacctcctttgtcggtaattaatgatagtgacgctgattcttgtactcctcaagccaagaaacagaagtctcaggaagcaaatgatggag

SEQ ID NO: 44690 - DNA, 508 bp, Arabidopsis thaliana landsberg
aaaccatcaccatctttattttcatctatacgtcactcttcacctgtgttggcggttatttcaatctcctcctcttttattttcatctttatcttatactaacgtagatatattgcaaaagagaatttcgaaagtttctcttttacaatattctttttcggtcttaaaatctctgtttttatttttcagttatgttcgatttatgtatacaatatgaatatattaccattcctatgaagaaaaaaagagatgagctagattttatgtaaagggtttggtacgattttttttaatcttttcgaaaaagagagggagacaaagaatattaaagaaagagacacataagtatacattcacaaaatgagaggactttgctgaaagtttgttacaaaagagacataagcttaacaattaataaaacaaaacaccaattagcaacttaacaaatgaagatcttatacttataaaatcaagactttaatcataccattaaagaaaaagaagtaaa

SEQ ID NO: 44691 - DNA, 621 bp, Arabidopsis thaliana landsberg
agttgccgtcctggcgagtattaactgttttccctttgctgttgaatacttatatcaaactaatcaaatgattcagactgaagatgcatataaactaatcaaatgattcacaacacagaagatacataaaaaagctcctaagttacagatgtctcaaatactatggaagaaaaaccaaactttagttaaacaagtgatgtagattctaattatctgagaccatcacaaatgttggtggtcaagaacaacacttgtttccgcccaagcacacataaaatccgcttaaccaatgagtcaacaacactaaaaacatgacaagtctccggaccaaagaatcagaaccgtgcaaaggtggacaaattgcagaacaaactgcaataactactaatcatgaatgttcaaagctagagacatgatattagtactgctgtctcaacgttaacagctaatgaagggacccatagacaacagatagagaggactaatgatataaataaatctatttcttcttccctgaacataaaccaatgatataaacgaactttcaagtcaaagcatagaaaacaatgaacaataaatgcatgaaccacactcacatcatataaatatacacatagagca

SEQ ID NO: 44692 - DNA, 1044 bp, Arabidopsis thaliana landsberg
gacgagctcgcgtaaagttgctaatacgttcaggagctgttgctttgatagtgtaaatatacttgtgtaaacttggggatatgatgatttttgctatgtacgtactttatatttattagtaaaaagctcactcgtactccttaattgttatgcacatggtctctttaataatgtatcgcccactaaaatcgaagtcaaatacatgttgtccatcaattttgcagagcgtaatcagttataaaggaactatatcaataagattatagaaaagatcataagataaagttatacgaaccaatatagcatcattaaaattgatgaaactaacgaatacttctcacaactatagctaacgtcatagactcacaggttatatatggtgcggatattcctaagaaaaaagatgatttatttcattaaaacaacaagaaaatagacatgtcacgttgcaacatctttgagcagactgttgagtgttgagacttgagagaaaggcaaatggaggatatattccaaattgatggtgccctttaattttaattttatagtgatttttttctaatgtatatgcaaaaaaaagagttaaataaattcaagggaacctcatcattagaaactagaaagtcgaatgacgcagttttgtggcgaaccttatgcgttgggattcttgaattcaattcaatgtactaattgtttcaagatagctaattaatttttttttttttttttttggtcaaacaatagctaattaatttaatggtgaatatctaaatcatatagaaaataaatcaaatataggccttttttctcaccactaaactagttggacgagaggaatcgaaccacggagtctgcgaacgttattagcacacatccactatgccactacacatggagtatattaaatgattgtataatacatcagttgtgtaatcattttggtcaaaactaaaacggattttaaactgatttatacacctttttttttggggtaaacaaactgatttatacacttgaccgttatatagttcacataataatggc

SEQ ID NO: 44693 - DNA, 892 bp, Arabidopsis thaliana landsberg
ctctttctttcaaattcgtattcgtggctgtcattatgacggcaaatcaaacaattgttatagaatttaaaaacttattaatttttgcgtcgcttttggttgttaaattgcttttccgacaatgatacttccttgatgataaataagtgacttatggattataagatatgatattaatatatgtacgcgttaatttgggaaattataaggataaatggttcaattatgagttttcaagcaagagagaagctattttgattccatgtggctttctcattatccctcaacttttcaaagaaattttaaggaatgaactataaaataaagatataatattgaccgactataataatgtttataaccgtttttagtattcttttctaacagtcatcaactgtaaactttaaccgaccattttcgaataaactaccataaaataatgatgatcctcatttcacgcagagaaaatggaaaaaagatgctaaggttccctactaattcagtgataaagtaactaaccaaaaaagaaggttaaaaatgatcgtttctagtttctgaaaatctgaaattaaatatttataacttgcatgcttacctaaacatatttcgatttgcttgtgcatattaattatttttatacatggatattaattttcttaatttcatcataaattcataattgttttaaactatgaaacagaatttattgggaactatgggaaacgcacgagagccaagagatgtacaggaatcagtcaaacctttattactctctttgttgtcacaacttttggcttttgctttctcataatttggttattatgtttatgagcccataaattgatatttaataatatcttatccttttgcttctgacaaacgacgacatttc

SEQ ID NO: 44694 - DNA, 1494 bp, Arabidopsis thaliana landsberg
agccacaaactcgacaatcaatgaatataaagtggctccaacatgaccattaaaaacaaatagctttggaggatattgtaatgacaaacatacatctactgaagcttgacttccatgatgttcttggtcttgggaggatatgccaagtaaaccttgagcactctctcagcaacaaaaagctgttttttagcttcagcataagcctcagtcaccttcgatgggtcagtgagattcttgttcatgcggaagccatccaaggtccttcgcttactgtactccctaatgttgtaatcagggaattgacgtcccgctcgaagcaaggcacgacataggctaagaacttcactactagacaccattgcaagattggaaactaacccttaattatacaaagcctggttaactgcaatcagtataagaacacaaagaagctgagattagcaatgccgaaaaggaagagaagtagtcaagatgatcaagggataaagctatacacttcgacatgtaacaagaagttatatagataagtgaaaagtattaaggaccagtacatcatttatagagcaaaagaacctagattcagtaacattagtatatagataagtattgatttgagtagtgtatataaggtatgagaaccagttgctgcaacattagaaactaggcactagagttcatgaaaatacgcaaaagaaccaatattaactaatcgcaaacgcttaaaacaatcaagaagaaaccttaaaaggccataaacgcacttagtaatcctaaacttcagtaaaatggatgaattgcagtcacagccaaaagagacaatacatctgaatcatgagaggatccgaccaaattcaacaaaagttataccgataagcatagaatttgacgataacgagctccagatacatatacataccgaatcaaatcgtcggagagtattaatttcccgagctcgccgttgaagttctccgttcgaaggttttgatagcagcaagctgggtcgttcgggggaataaataaacttttaggtttacccaaaactaaaccgggaaaactgatttgggaaccggatcaattttagattgagtaagaaaagaaccggttttagaatgggctagacacaaaggcctgttaaattgggccaatatgtgataagccagccttttttaatgaaggtgtatgagctggcatattcgacaagaaatagtaaacaaaaccgatatttataattctctgtcacgccttcttccttctctacacgaattcgattctctcttatctcgacgagaaaaccctactgcgaaaaaactccgatctctctggcgagaagtaaatttttatctctgagcttggtttcaccatttctctatctctatctcctggctgggttacggtacgagcctctcaaacttttcgattccttgtgttcataagtatgtgtgaaaatccttgcgtgtcgagattgatttttctctctttcgcctcggattcatc

SEQ ID NO: 44695 - DNA, 1002 bp, Arabidopsis thaliana landsberg
cttttttccgtaaagatatattgatgtacacatttgtaagtgatgtgactaaactcattggtttggataaccctaagcgattaggacatgagagagcaacaaatcttgagaacacttatattggaatgatgactcggagattaaaattttatagtctctcttatcaaccacttaaaaggaatgttgatctatacactaacatatcatcaaatattatttaccaaattgatcactatacatgttgaaattgaccatttaagtttaagagtgatttattccgtataagttattgatttcccatttaatagaagaataatgtaagaattacttttacattttagaatataggtcgaaatgattgtactggtacagaaaggtttttaagtaatgctacagtatttttacacaaaggttttcaaaacttcatatataaattgttaactaaatgaaacatattctcgtggtcttgccacattgaacataattcgatatagcaataaaacactgaatgactaaatatagttgtcaaagtcaaaagtatgattacgtgaattccctacttcaaccttgtcatgtacatctagttttaaaggaattgaagataaatttggaccaaatgaatttcaaaataaatgaaacagtatagttgcatgcccatgcatgtagtttcttctcgattgccttaagatacgattggctaagttatgttttggtccacatttggtcctccaccaaataaatggggaacatttatattctatcatctctcttactacagtttgtatggagtctatatcaagtacaaattcttttacttttggctgtaaatgataaatacattgtttgatcaagattgttcttgataatattattataatgagtaaaaggtttgttttaagggcatctcattactttaaataaaaaaaaactatcaatttatatcgtacacacatgttgttttcttttctaaattagaatatttgatgtaacaacactggatta

SEQ ID NO: 44696 - DNA, 170 bp, Arabidopsis thaliana landsberg
atttggcatagggaaaaaaaagagataaaagttttgaatttctttaagaaaaaaaataaagttgaaaatttcacacacaaaaagtgatatattcaaaagtaacaattacttcttaacataattaaatctgagatgtaacatcaatgtaaaaattccaaaaacaattcctc

SEQ ID NO: 44697 - DNA, 966 bp, Arabidopsis thaliana landsberg
ctgatcaaaacgttataaaaactggtccaatatcaaagaaatgtatgggactcggcttataacctcctgataaaaacatatatatactttatatcaaaatattagcttatttatttccaaatataatcttacataatacattttttttgcaacggatacaacaaccattttgttaaaaaaaatcgtatagttggtacggttgcccatatttagattttagacgtataagcagtgcagttacacatattactagtttaaaagttattttcaaaaaaagttaattttgctcctaaggtgcgttaatgaaaaaacacataatgaagatggaggagcatatttcttatatctagagagactcaacgtacagatattctctcatatattctaaaattgggccctatatttttctcacgacatcaaagatagtatagtattgaaggttggtatcttattcttacaaaatggattttatcaggttttgttaaagtttcccaaatgatttagagttttctgatttgattaacctactgttctacataagtgtgcatcatagattcactaagttacatgtcaccggtacatatacctcatattcactaaattacatgtcaccactacatatacctcataactgtttaaggacaaaaaatgtggaactgatgtctcctaggtggtggaatatgtgaagctagaaaacaaataaatgcggtccgactcagaccatcattttcctcttgtctcattggttttaaaattaaatattatattataaaatctgatgcagtattttttttaatctcaattagagtgtatttatttaggtctcaacccatggtggggaaaaaaacagctattttaggtaaatttagattacaaaattgtatagtcaatatcaataataggttaaagttttaataaactgggtgaatcagtttttgtttggtctttttggatctttgtttggtc

SEQ ID NO: 44698 - DNA, 724 bp, Arabidopsis thaliana landsberg
ttagttatatctgacttctgcaagagataaccaataacatttcatataaacataacgcattaattacttggaagttgcaagcaaataattaaattcaccgtgtctctaggtcgagggtacctccttatgtgtaatcaaagaactacgaacctaaacatgttcacatatatataagagaatatatattactaaatccaactgaaagaataaattctttgactcaaaataagtccgttggctctgtcatgtgggatattgctatatagttattctcccatttttttttttgccaaagggttgagaattgatattagaagttgctcatccttgaaactttttggctcattaaacaaatgagaaacgttaactggggatctataacgcggtgtattatgatccgaatggttgataatacttgttggttacagatgaataaatgcttatgcatgtgtactatatagtacaatttaatgtttgttgcctccaatttacttaactccttatagataaaaattaaagctatctactacttgtaagttgtaacgttattatatttttggtcacaaccaaagtaactaaataataaataacaatgagtttatgttataaagagaagaaaatgcatgcactgtcaccgtttcctttgatcattcataatatgcttttggtcttgttatacttataatattgaaaagttgaaatcattatcaaaatccattacatg

SEQ ID NO: 44699 - DNA, 628 bp, Arabidopsis thaliana landsberg
cctatattaatcgaacttgtaatgaagttgcacatatttagctagaaaatgacaatatttctataattatattcaagttgtatttaccctcaaccacggtgaaagtgaaacaatctgtttttattatttcagctactattctactaactaagcatagactcagccacaaaacgtaaaaataagaacgcataatcactagtgattattgaacatatgaaactaatgtacacgctacacatcaattatttagtctctcatctaattataaactatttcatgatcgttgactccaatttgcctatgttaagtagttttaccagatttttaatcttctttttctcgttgaaggaaaaactaaacaccacaaggtttatgaatggagaagaagaaaaagaaagaacacaccaacaattgtctgcgcaatttattgaaacgacaagcattttaggaaccaatagtgaaaataaccgaacaactgtcaataactgcatacaagtttttttatggaaaacatgaaacacgtgagtaggctaccaaaccaatcacgttccatttccacgtcaaacccttttcattgtaccctaaaagctcgactctgtctgcaaaaattataacattttttttatat

SEQ ID NO: 44700 - DNA, 842 bp, Arabidopsis thaliana landsberg
aatatattcaaaaatgattcaactaaagcaaaaaatatcaaaagttgataccgaatttagtaatactaggtaagttaccttccatgatactgaattctagtgttttatataattgtgatatcactttttgtatgcaaatatgcaatatacgttcctgtttagtaaaataatcatcttttcactaaacactatttaaatcactgaagttcagtccttctcattctctttttctctaatctctttactcttcaacaattatgtcattaaaaattaatacatgcaagaagctagagacgaaatggccaaatgggtatgctttgaaatttaaaatgctattaaaacttttaagaatattatttattgacttgtttgattttaattggatgttgatgtgagttagtccacatgtcaatttcacaatttggttgagttctaaaacaaaacatcttttgatttgaaaattttgtggatacaaatgtgttctctttaaaaccattatagtacaaaacctcttaatcgcgaaccaaattacttgcataaaataaaacatttttgatttgaaaattttgtggatacaaatgtgttctctttaaaacccttctacatatttttattgtggttgaaaaagacagtcgctatcatattctttaagtccggtttaaatttgatagagtggtttaaaccaaataaataagtgattgagactcatcatgatgacctaattgctaaatattgttttgtcaaatcctattgtactatttgaagattcgtatcacattatttcactagttaggtgagcctattcaagttcgaactcatatagaaaaagaaacgatattttg

SEQ ID NO: 44701 - DNA, 503 bp, Arabidopsis thaliana landsberg
gctctaaagccttgggtagcgcggtcggcggcagccttgatggttgctggcgcgggcgtagcgctttatctgctcattcttttgcttcagttcctgattgagggcacgccgtatggtccgtagagcgtcaggctctaacaatgggctgcagcgggacgtacccgccttcggcgggtccgcccctgagcgtgggcgttgggcttaaaaatgcccgcgctactttcattccttgccagcgtgatcgttctcgctgcctggtcccacaattctatttatggcgttcgagttagcggcgttttcactgcgctagccggtgggcactgaatgtatagcgggcgcatcccatttgttttcaatcaacgtcacgcaggagacatttctggaggtccagcaaatctgttgactctcatcggatcctgcgtgggagtcgtgctgccggttatgccagcgtctgaggtctccatcttggaccctggtgcagagatcgcaccatggcgacgcta

SEQ ID NO: 44702 - DNA, 742 bp, Arabidopsis thaliana landsberg
ccttacggtagtgtcacaggtaagcgaaaacgtaaagagattgtttacagcgacacactaagcgagttacagtggctgaaagccgtggagagcggtgaagacctgtcaaaactctcaatgagatataataggagagaggagaacgcaagcaacacaaagacatcaacgagcaaaaaagtgatagaatctatccaaactgtgagtgatgggacgagcgaggaggatgaagaagagcaagaagaagaaagagcgaaggagatgagtggaaaacagagagtggacaagtctgaagaggaagaagaagaaggtgaagaagagaatgatggaaaggcaatattcaagtggaatactcataagaagaaaaggtctagatactcttttacgtgttcttcgtctgactctagagctcaaagttccaatggaagtagacgaaaatgaacaaggtgaggtgagatctgagtttgactttggtctcttcttctacgtgtgtgtgtgtcttcttgccaatgtaacttatcccaatctaacatgtaatagtaatacatgtatcttaattggtctctggttaagtttagctttttgttgttgtttaaaggcactactaccaatgtatatgtttcttatgtagaatgatacattcgggattgaaaaacccttttcacctaaaagaaaacatacagcatgtaataatttgttcagaagatctaagagaccaattcattttttgagctactctaaatgt

SEQ ID NO: 44703 - DNA, 219 bp, Arabidopsis thaliana landsberg
caaatatgttcgagggactactatctccatgaaactgtgtgacaaatgcatggggggtttcttttctttttttcctgaaataatgttaaattatattcaaaaaggataaaataacgtttggataacttgtgcgacatttatcgaagagaaaagttgacaaaaagagatgatagttaaggggtcttagagatgggttgaaggggtttttttttggggggg

SEQ ID NO: 44704 - DNA, 756 bp, Arabidopsis thaliana landsberg
aaacacatgtcggtacatgacgattttggcaactcgggaaattttttccacgagttatctccttttttgaaagaaaccatagtgcctcgattaatcgttcctataactaggtagtctttggttttgtcatctatccataatatcggacggctaagtccaaaaatatctgattcgaaagccggtagattgatcctctcgcaggttagaagatctttaatatatagatgaaactcttgatctaaagtttgatcttctaactcttcgtaacgaggttgcatcaaaagccaacttctataagtcgccaaaacaatactctttgcaaaatcgtcaccgagatgttgagttttgtagagtttttctttatcttcagggttgaacaagagacaataattcttataaggaatatttttattatatgcaaaactcatatcaaatttaatcacataaccataaaatacaagtcatggtctacatgtatcccataaccaaatacgattattacgcatccgatctgtaacaaaatatccaacgtcgcaagctgatatataattttgatgtgaggattgcaatcatataaccatgacttgtgtttcattgtttatccatagccaatttgggagtatctttgcttaaggttttaattaagagtttggtataagtctctaggtcaactagaggtttttggattaaaggattgctattattattttttctaagaaaaattaggaaatttttggatttttggtaatttaaaat

SEQ ID NO: 44705 - DNA, 664 bp, Arabidopsis thaliana landsberg
tccaccattgtctaaatttttgatttcaaagaggtatctacactacacacaccacctcagctctctctctgaaaatggtcaaaagtaaaccacttgctccctactctaccctagattcaatttccaacttccatcaaggcaacaataagattgttgtcaggatcatccatatatgggaagttcgagactttagaagaaataataccttactaactcttgaatgtcttctactcgacgaaaatgtaagttattcttaaccgatgttaatcttcatcctacttttacatagatttccccacattaatttctagtatgtttcaggattgtgctatagaagcttccatccaccccactcggctgcctaagtttaaagatcaattggttctcggcaatttgtacaacatcaacaattttgatgtcgttatatcctccaaacgctatcgtcgaaccaaccacgagtggaaaattgttttcactgacaaaacgtttttggagagtgttaaagaacgacactactgtattagttatgaattttttagattgtcttcttttacaaagttgcttgatttggcagacaagggcgacgagcttccaggttacatattttgctcagctttcagtttcacgtacttagctatccctttctattaaacctacatatata

SEQ ID NO: 44706 - DNA, 1062 bp, Arabidopsis thaliana landsberg
cagctccgagaagaaatgtctgtggaaaatagaaagcacaatcatgggaagttggaaagcaagtaaacatcttattcaaaaaatacgaaagcaaaatgctagagtctgaacctccaaagcggtaacgttgttgctacccttcaaggcacgctttttcttcagcttggttagcattgtctcgtacaacataaattgcattgacggattacttacctgtgggttaaaaacacacacacacatctaattattaataaaatgcacctagacaaacaatacaagagaagcttcaaaatcataagctcacgtaccatgatcaatgttggaattacacctttccagaagccagttattccagcttcatcgtaaacctctcgaatctgagacattgttcaacaaatatcacagaaactgtcttaattgagaggtttatagagtttgatttgactcataataattgatatgagtatatgaccctagccagcttcttctagtttttaaatacgggaagctgcctcataccgtattaaaggtcccatatggacgcggctcaacagcaaccagagcttctgcattagaagaaggtgactcgggggccgctgtttgatcttttgtcatttttctgcgggtctgcatacaagtattcaaaaaatcaagaggagaaataaaagtgaggagagaaaattcatagattcatgctcaaacgcaaaactaaaactaccacggaccaaagaaaatgtaattgaaattgactggacagcgtaagaagcactttacggtactagtgtatatgaagccatttatacctgcatacgcgtaacaatcacccaaatcggattcgtcataagaacattaaccgatctgcacagtgagagtgttatcaaaattcacatgagccaacggaaacaatggaaaaaaaacaaatttacaataatgaactatacatgcgaccaaagtttacaattaaagaccaaaacagcgttgacagtaagaccttgcaggaaacgttaagaccatccacctagaagcttcactagacacgtaacaagataatagcatagatga

SEQ ID NO: 44707 - DNA, 1142 bp, Arabidopsis thaliana landsberg
  unsure (1)..(1142): unsure at all n locations
tttctaaatgccctttaattagccatcactaaatgtactttgaagtaatgaactcgtaagtttgatatgagaaatcataggttcatggtctgtaacctcgatcaccacggtacggtctaacatctatcgattaatttccaactaacaagttcatctttctcttgcccacacttcacttacacgattttcactagtactaagaatacatattcaataggatatttgatgtttaggtaacgtctaacaatttttgaacttaatttgtttaaggcattcagatttttgaacgtttccatttatatgtatgagaggagtagggacgaatagtacaaaacgacgagcggtgattgtccgtgcagaaagaaaacgtaccctctactgctaaaaggtgcgaagtggaagctgacgaaacgtgggacacaatcacacaacaaaactatacaaatattattttctcatgttaatagtgattagtggaatgattgccaatggacaatgcggccttcttatcccttggtggtttttattggtttctttttcttggaaaaaactttgatactgttttagaattaaaaaagaggtaaaaactttttttcttctaaacgatgcacgagttctttaatgatgaagattgtgaaacttgctatactcatatgagatgggacctgtattttttttatttatatataaactattattctctcactgacaagaaattcccaattttgattttgatttatgtttttaaataacaatatctttttaaaaatatctctctatcttgcttttttaaaaacacaatttttctgattgcctaaaaataattaccataaaaatcaaacatgtcccggtcttgtggatccagtcccatgatactcattttcttgctttgttttatgattctattttgttttcgaccgaagtttatgaattaaaacatgacaaaaatttatttgacaagtaaacgttacatatttttcaaaactattacgccaatgttccaaagcttccacgccgaaattcttgagcaaatagacaaaacatcaacgatttttctatagtatatgttatctgaacaaattgaattttttaaaatgctagattcctaattttctctacanacaaagcatcaaagatgaaag

SEQ ID NO: 44708 - DNA, 631 bp, Arabidopsis thaliana landsberg
atgaggggccaagcatattggctgcttcgtctcccgttccggctccggctctgaatcagactccatagaactaacgagagagactatttgagtaaagagtgacttgagctccaaatctgaatccataaagtcgagatgagagaatatttgagtaatgagtgacatgaggtctggatccggctccggttccgaatctatagagttgacgagagagatcatatgattcacaagtgatatgagctccaactccggcttggagtctgatatagagctgcttagcgagatcatttgagatatgagcgatatgaccccgggctctggctgcacattcaagtcaagagagctaactatagaaattattcgagtaatgaataataagaactttgactctgcctcagcctcctcctcctcctcaacgtgagatctagtgagagctaagatttgagaaatgatcgatatgagctccgactccgattccatttttttttttactagagattttgaataatgatggtatgagagattttgaatatcgagtatcaaaaacttggtactcttctatacaccaataataaaataatgtatgtgccaataatttaaacaaagacaagcatacaccggctgtccgaaa

SEQ ID NO: 44709 - DNA, 948 bp, Arabidopsis thaliana landsberg
gttgataataacgaataattattagagattcattagcaaattatatacgaagttaatttattaaggcagttgaattagcagataatgtcataatgatatggtcatacattttcagacaaacaaaaaaatagctgatatggtgaatggacgttaaaccctttttcatttttttttattttttttttatttatttatttatggtgaggttacatatacggtccacatgaaagtcactcaatgtattcacaccttgtttttacgagtactacttgatcgttatttggtgaatatttagcgtgatctgtccacaaggatccaggttaacgagggatagagtcaacgacaaaggtttaagtttccggagaaagacgatccaaaatgtaggtacagtctgttttctctgacagttactaaatttccataacgtaattactattttggattaaccatattttttttttgttgccaattttgattctcaattagttgtctaccaaacaatcctcaaatccacaaggaggtacattttgcctacaaacagtgagattctttaacgttctgccccggatctcaggtcattcaacttataggttgccagagactgagtataagttgccgacctttcttgatcacgtagagccaaagtgccaacgagagaacagaagaaggtaagcttctttaaatcggattccttttagttttgaaatagcttcctttaatttctttaatggaaaaaagtaatgggcccaaataaatatactattggattggttaaactttatatctggaattatatttattttttatgaaaagagaacagaagaaggtaagcttctttaaatctgaatcccttttagatttgaaatagtttccctttatatatttaattgatagaaaaagtaatacacccaaataaatatgctattatattgggtaattaatatatga

SEQ ID NO: 44710 - DNA, 999 bp, Arabidopsis thaliana landsberg
  unsure (1)..(999): unsure at all n locations
ttttttaaaaaaaaaaaacccatttttggacggttctaattaagggtcatggttttcctaatttttttacgggttggttattttttttttaatacggttttctaaagcaccattcttcttttgtaacacctatatgagacctttagaggttaaataatatattttgttcttaagatttgaggtcataacatatgcgtttacatgaatagtgtgatgattcattcataaacattagatcaaacacaaatgaaattagaaatataataattaaaataattaatatgatctacaattggatatcaaattattctttatcaatttgggtggttgtacatattttcaaatatatacagtcaaagattattcaagtaatatttcatcttttatagttattttattattcaatgattctcaaatatatatcacctttgaagcattttctttagtgtattcaaagatttatatagtatactcattcaatttgttgccaaaatacaatcacattctaatatattttccaacaaatttggtagatttgaatatgaatttttgtaaatatacatgacttttatattttagtatttgcttatataaggagtttaaatctcttgaactactccaaaaacattcaaactaaaaagattcacaagatattagtaataccactcaaataatatttttgaaacaagaaatggatgttcaaagatcttcatacattttcattgcactttctatcattgcaatgttcttgatcacaggtgagtcaatgatacaaaatattattaaatgcatatagttatcaggatatgatatacaattattcaaagttaaaagtttggaagaacataatgaatgttctttgattctttttcttcccacaaaaaaaaaattattctttcttgctcactnttacggataactatttatacacatgttaatcacttcacactcatgataactatatatgtttggttttgggttatgataaacataaatatt

SEQ ID NO: 44711 - DNA, 768 bp, Arabidopsis thaliana landsberg
ttcgcttgttgaacataattggtaataaaattggaaagaaatcatagtgatgaagttaacgcggttttggaaagtgtaacaaaaatatatcatatcatatcatcggtagaaatgagagtcatatgtacgtcgttttttttttttttttttttaatataaaaacatatttcctagcttatagaccctattaaacatatctcgactttatcgatgtcagcatgttttctatgtttctaacgtttcttcaacgaagcctgtcaaactggagtttgtaagtagatggtttgatttcataagtcttttaagcactaactaaatgaggacaagtagttccaaattttccggttgtggtatttaccatcatcatcaacaaaattcagtttttgaaaaaaaagtatttgtgttgtgatttgcttctcagtggaaaataattaaggattcattttaaagtttcggttgttgagtttattttaattatggctttatgccttaaattgtttttttgcttcaatagttttggtttatgttttggttccggaaaaattgtttttccgctgactaagaatcaggaaaagtttatagacccaattccaagtagggttagtccaatgatataaccaataatcagaagtaaagtcatcggcccaaatagttattgctccaagataaaaactttgtagcccatggaattttttttttgtttttaagatatttgagataagcgactagactgtttaattgactagattttttttcttaaatatatat

SEQ ID NO: 44712 - DNA, 814 bp, Arabidopsis thaliana landsberg
  unsure (1)..(814): unsure at all n locations
aatttgctgatgttgcctatgttctaatcatttcaggttcactctggaggacaaatcagagaagacggttgttcaatattttgctgaaaaatataattatagagtgaaataccaggctctacctgctattcaaacagggagtgacacaagacccgtctacctaccaatggaggtatatttttaataacatctacttttttacctccatcgttttcttggattcattttgtatccttaaagatctggttattcctggttcttgcagctctgccaaattgacgaagggcaaagatacaccaaaaggctcaatgagaagcaagtgactgcattgctaaaagctacctgccaacgaccccctgatagagagaactcgatcaaaaacgtaggtttagtcctctttacattacatatacagtagttcctccatcggaaaaatagtctttaattttgcacctctgttttgactaacatcacgtttgttgtttatattattagttggttgtgaaaaataattacaatgatgatctgagcaaggagtttgggatgtcagtgactacccaactagcctcgattgaagctcgtgtacttcccccaccgatggtgattatctttctccatttttgttattaatttgctttattatcatgcattttcttgtcaatgttgctcatcacgatgttctttctgttaacagttgaagtaccatgacagtgggtaagagaaaatggtaatcccaagctaggacagtggaacatgattgacanggtaaactgtattgactatcataattttttgctctctgagcacttgaact

SEQ ID NO: 44713 - DNA, 285 bp, Arabidopsis thaliana landsberg
  unsure (1)..(285): unsure at all n locations
aatcgtctccttgagttctaacgcccaaactcagccgacgcggagcctaagcgaagcggaggcgtagcggtcggctggagagtttggttaggtggccacagnnnnnnnnnnnnnnnnnnnnnnnacaaagggttttactctttccattgagaatataggcaatgtgctgcggctccagatcgggtttggcctagttgtacccctgtccggttcctgcggttacatctcgcaggctatttagctggtatttcccatcatggtaatggtttggaattattgttacgc

SEQ ID NO: 44714 - DNA, 655 bp, Arabidopsis thaliana landsberg
gatgattagctgactcccacctacgtgtacggtgtggatctactgcatacgtgcaaaatgttttccatgatttttcataatggtgtttctttatgagtttatatatcagtaactagaattcacaacccaaaataaaattcatatggaaagtccatgttaaaatttttgttagtgaaatggtgaaaaaggtactactagtaaacttcatattttatttcccttttttaaaaagtagaataagttaactaaaacaacttttaaaagtggtaattacattaggccaattttttaaaaaatgtattgagacatatagctaaaacaaaatttgttacaaaaaaaaacactcacacatcgaaaaagctggattttttcaatcacatgattgaaggagctctgggttccacattcagtaaaatttttaaaaagataaaaagtaatttctgattcagtgttttcttaattgggcttaatttatgacccatgggcttaataattcggtacgatcataatatagaaccgtttagaaccgggaattgatttcatcggttcaacaaaacataaaaggtcaaaaaccaaaagaacgtaccttcttcttcgacactagttcctccgatcagcgaatctcgaagaaagagattgaaactaaactgttgaa

SEQ ID NO: 44715 - DNA, 683 bp, Arabidopsis thaliana landsberg
gaagttgctgagatcgatggtgcaccgagaatggtgagtattcttgacctatatatgtttgatttggtatccatagttttcgttagatcatgtcctgagttagtttgtggtgatgtagggaccaacttttggtgctatgatgatatcgggacaaaaggcgggacaacttgctcttaaggctttggggctaccgaatgctattgacggaactctcgttggaaacctaagcccggagctggtcttagccgcagcagattcagctgaaaccgtagatgcttaaaatcaaaaggttttaacgttaagaaaagtttcccttgatccttcggatgttgaaggagtgcaataaaaggagtttaggtgtttaatatgtcttgaacttttctggtgtctttgtttctctcttctgaacttctgtgtaaaatatcgtatccgttcattcgtaatgcgtatgttctcgttcttctccttctttatggctctagtacaagcagctttctcgttgtcgttggcaatacaaaatctgtctaaatttgagggatgagattagtgttggatgtcggattcttgtcttcaattctgattcttatccttgaagaaattatgtatagatagagctattcaatgtctatagtttctctgctgatgaaagaacgaagagttatatgattttagattcagagaac

SEQ ID NO: 44716 - DNA, 632 bp, Arabidopsis thaliana landsberg
tccttctctggtgagtttgcttcatctccattctgacattttcgaccgacgatctatcatatatatatataatatttccttttagtcgtcttttattaatatttatttatgtaactttttgtgaaggttaatagttagtagattatcttaattcctttggtttttcaagaaatctaattcgaacgtgaatatgtgaaagacactcatttaccaaatgactattaatggagatgtggcttaatcaactggtgaagtctattttcactggagtctgattccactgtcgcattatcccatatcggaaaaattgggtatcaattgcaattcggcgagttttgttatcatcctttaacgaagaggacgaaagtgactaccaattgacatattccttgaatctagcttcagaatgtgcatattaccacaatatgctcatgttcttacacatttttagccaatgataattaaatggttttcttgaagtatatatctcgaataagtaaaaatgcgagaatctgctctatacgctcatgatatgttattctatatgttggcataactctgaacaatatagcctcgtggcgggggctaaccacagaccggtgctagggatggctacattttaattaatgttt

SEQ ID NO: 44717 - DNA, 601 bp, Arabidopsis thaliana landsberg
cagccgggccaggtgttcctgatcaacacgccggtggtgaacctgggcaacctgagtaccaccggcatcgactacacgctgcgctacaagatcccgcacttcaacctgggcgacatggatccgggcaacttcaaggccagcctcagcagcagttacacctccacctacaagaacagtgcgacaccgggcgagcccggcggcaagacgatcgactatgccggcacctacagccagcaattcggcaacatttcgcgctggcgcggcacggtcacgctgaactggagcaagggcaactggaacgcccaatggcaatcgcgctacatcaacaagctgaccgcactcaacgccgatgcggccatttccggggtgaacatcccgatggcatcggtaacctaccactcgctgcaactgggctacgccgtgccatcgatccacacgcggttcgacgtcggcgtggataacctgagcaacaaactgccgccgctgatctaccaaaacggcgcgaactacaacgtggataccgccacctacgacgtactcgggcgctattactgggcccgcgcgacggtcaagttctgaggtattgaccggagcctgcaag

SEQ ID NO: 44718 - DNA, 627 bp, Arabidopsis thaliana landsberg
cgactccagagaagaatctcgcgtcctgttctttcagaagcttctcgaagcttttttccattttcagcgacggagtttcttacacgttcaggaaacgaagacgcatcaccggttttcgaatctggaaacagaatcgaaccgatcgtgagacaaatcaaggaatagagactcttcaaatcctcatcatcttccttctccacagagtccggtttacgatagccattctttgttcctccgttgacaatttcgccgacatcatcgccaccgacaacgtcggcaaaggttttattctccgtctcgtcgtgatcttgcgccattcttggaaattagaaactaacccaacagttgtttcgatcggatttaggaagtaataagagtaaggaacaaaagttgagattttttattagtaatagataatgattgcggacaaaacagctgtttagttttatgttaaaggagaaatcagggacatgtgtagcaccgacgtggctttaaacccccgttaaccggaggagtagatagatacaacgagcgtgtgtattcaacgcgttacacatgcgagtggtaattcttttttcttcttcttttcattatggatttataactgggcctgttagacgttttttt

SEQ ID NO: 44719 - DNA, 930 bp, Arabidopsis thaliana landsberg
tttgtataaagaaattcctcgccaactatttgtgttttttgtaaattaatataatcttgttaggtttagctttatacatatctcaaagaatctaaattttcaaaccgtcagataaaataacatctttcaatttaacaaagaatcatatattagatattgttagcaagatataattgagatttctgtttaaataggttcagtgtgcaactttgttcattgagtagaagaaaatggcaaatttcgtaatgttcttaaattttcttctttctttaactgtcttccacacttttcagtcagttcagtctcatttttctctctataatgataacaacattttcaatgttgttaattatggagcaattggagatggattttctgacgattcaaaggtttgttttcattttggttatatattctagttacatgtattgataattcaaagtatttatagaaattattaattcatatttcaggctttcaaagatgcatgggaagacacatgcaattacattggatctgaatcaattatggaaattcctgaaggaaacacatttcttctgcaacctattgagtttcatggcccttgtaaatccaagaaaatcattttatcggtatgcataatcatatatatatatataaatattcaatatttattttatttactaacaagattaaggtcttgataatatttacaagtttttataggggattttggtttttattattttgaaaatctattttttttactatacaagatttttgaaaatatatgcaatactaatacatttcatatttttgtttgtagatcagtggaaacttaattgctcccgaatctccatatgaatgtgaaatgcacacagatgattgtcatcagtggatcgaattcgcacatataaatggactttatatcgatggtcatggtactcttga

SEQ ID NO: 44720 - DNA, 555 bp, Arabidopsis thaliana landsberg
gacaacgaaacccttttgctgttgggagatagagtagttattggagaatggattagattctcagacatattatcaatatcctctgtgattgtctcgattcttgaatgagacaacaaactcatgtctggttttctgatgttgtatatccctgaggaagatgatccaatagctccatgatgaaaatgagactgtggaggtagcagtctgttgttggatgagattggaagttgcgccagtggttgtctgaaaacaaaggttaataaagttaatcaggagaagtgtaaatggacacatatttgattgtatttgagattatttctttacctaaatggaattggtgttgaaggtggagctgcaggtttgaacaactcgacattctgttgtgttttctttgttccgggtgtgccagatgtttcattctcctcatcttgttcgaacaaagaccctgcaagaaattgtgtactcttgtcaaataaaagatcaagagacttgtgtgtttattataaagtggagaagtaaaagctaaccattttttctgccaaatgcttttttaca

SEQ ID NO: 44721 - DNA, 694 bp, Arabidopsis thaliana landsberg
tccatcttgcttgatgtcaccgtcttgtccaatgttctttccttttacattctttgccttttgttgatcaacatcactatctgattttgtaaccgcctcttcattgtcgtgatgtgcaacatccgcgatgagttcttgatcagtttcgctaatgctttcagtttgaaccgatgatcttggaggcgtagaaataatgacaggtcgtctgtttgtctgatgccaagcaaggtgggtcataaaatcactgcggttatggatctgcacaaataccatatccaattaaatttaaaagagttaactacaacatattaggaaaatcacaaaagaatatggaccataattaccaaccatttgtgtggggtaataataacatgggttgttgttatacatgtaaatatattgtccccaaacgtgattcctatatattatgaaaataaatatataagcaaagaaattagatgaaaacaatattcaaactttagtttaaaaacaaaattgaataaatattaccaggtgtgccggaggacaatatggaattacgtgttgaggagcttgctgatattgatgcggcggtataacataattgaatgatcctacaaatttaaagttatgaagaagaaaaagttgtttgagaaagttttgttacacaaaataaaattctaaaacccagatttagaaagagaaataaggatat

SEQ ID NO: 44722 - DNA, 702 bp, Arabidopsis thaliana landsberg
attgaggtattctgttttcattcttgcatctttgtttcttttctcatagacaatatgtattgttaaattgttactctcagctaaatcgcaccgtgttacatttcaatttgaatgatcctcagtgggttgatatgttgtcaactagaacctgtgaagcattgcggatgaaaaccaaaatatagcctttggttgtgtcaatagaatatattcctcgatatcaatataagcaacggatgtggcagttttattgaaaggcaatgggtgacatctttatcttctcctctcctgaatagtcgaatgtgcattgaatatcctgactgaaactaagctgaaatggctagaaatatttctgtaattactagatttattgtggtggcatctacttaagtcgatataattatgagaatatcgtaagagtagattctgtagttaattccgaaacacgccaatgacataaatattttcgtctacttatgtgattcaagcatgggaaatattgagttcaacttgtacgattactgctttgaagattctttgtctatgttccttgtaaaagactgatttagaggactgactgtacccgtgttccttttatttttttttgtgtaggatcaatatcatgctccaccagacttcaaacggttgttgtctaccaagctaaagtacttgacatcttgcgggaaacttgtgaaggtaagaatt

SEQ ID NO: 44723 - DNA, 851 bp, Arabidopsis thaliana landsberg
atattgtttacagtgcccgagctagtcattattttattgggatcaatttttaactaatgactaaaatctatttcaaaataatttttatggaggtcaataagcatattttaaactatttttttataaattttgcttttgaagtacaaataaataaatagtttttataaattcataagggtcaattaacccccttgctatgcatgtatctctgcccctgattgtttaccctttataagaaaaccagcaaaaaatcataactgaaactaaatatgtaattaacaggtgggaaacataacttgtagggtgtgaataaagggtacagtatatgatttttttctttttggggcaaatatgatttttttttatccattgaaaaatctatttatacaagttatgatttttctttatccatcgatattttctttgaaaaaaaatctgtctatttaaacataaataaaacgttgacaaaaatttaattggtgataatttttttcgaaaagagaaacaaatctgtcaattaaatcaagcggatgtgtcaccactttctttctattttctcatttaaatcaccaaccattactagagaaattatatttgtcttagagtgtttttttttttttttttgacaatcgatcttaagagtgtttcaaaaccagtatacatatgtgtttttctagttttttctaacaaaagcatactctctaactatttgtataattattatcccatgctttaaaatagtataaatattatagctctgaaaaaaatatcatatgtgttttttatgagccaatgaactaggagggagggagagatgcgatcttaaagcaaccttgaccttatttaaatgg

SEQ ID NO: 44724 - DNA, 810 bp, Arabidopsis thaliana landsberg
aatcttaaatattgtaattgtttcttattggctttcaatacaatttattttaatctataaacattaaaataaatcgggggagcatattataaatataaccagatgtgtagaatatataattaacgaccaccaacaaatttttgaagacaaaaaaaaagttggctttagagaaaaagtctatatagaaatttatgacttatggaggtatatagtagatgggttcacatcagaagcatattattgaaatcgtgaagaaaacaagtcaagagagcagcaacatcataaaatatggtccaacttattagtatatgtatgatctgttatctaatccattttataacaataaagatcattatccaaatcaattttcaatgaagaaaatacaactcaacactcctgaaaataacattaacaagtattgaaaagatcggttctttcggggattggcatattgatactcataatcaatatccacctgctgagtataatattcaaaaaaaaaaaatagtataataccaattaattaatgtctattatctacgcttattgttagtattattatttcgctgatcatattattggtttgttgttgcagctaatatttgatgggaaacaaagttattagtttataattttacttctgtggttttttttgtagataatcataattattgttcccaaatacttgatttgtctgtatgtataaacaaataagaaaatatgatgatggagcgtgactgcgtaagtgggttcaaatcgaaaaaagggatacattataccgaaattctgcctgagaataaaaatgagaga

SEQ ID NO: 44725 - DNA, 551 bp, Arabidopsis thaliana landsberg
  unsure (1)..(551): unsure at all n locations
atgtacgacctagtaccctaacaacaggttacaaatccttgcacatatccttcaagcatcttttaattgctatttcataatccggtgattcaaaacgcgataacgaattttactccgccgggagaagaaggaaagagacggtggtcggagaagtgtaaacgagtcgaggaatatcgtagggtttttctttcccgtcgacgaaacaaagacttgtcttctttcttcttcacaatcagaagacgaatatttctttcggtttcgtacctttcaaaccgaaccgggtcgatgaaccgggtcttctttcccgttttgcaaatttgattacgctaaccggctaatacgctaattggctcttatttaagggatttgaaactcgcaaatttttgggactcatggcttcgatgtttgaggctcttgtagaagtttcgggttgattgtgggttgatgggattgcactcatggcttcgccatgacacacgttaaatgtaangggttatggggatgatggttaagcgagagattcagnntntctcttcttagtatttattttg

SEQ ID NO: 44726 - DNA, 777 bp, Arabidopsis thaliana landsberg
tgccaaacaaaaaaaaataactattctatttattccaataactatgttttttattccatatatttgctgtttgtttcaaacttctgatatattctatggcttccatgagaactaaacttaatacagaattcttctttgatatttcttgatttgaaaaacaatacttgattttctatcatttcttaaatgatgatagatttgttcaaaactctgatgttgatatctatgccaagttgccaacctattgtttcacccaaagaaaagtaacagttgaatggaattaactgtagttatgtattcacatgcaaaatttcttagaaaaaaatcaaaaaatctgtttgaccatccattaagaatagttcataaccatatatttgttcttcgttgaaaaaaaaagactatagttctatagttcctatcttttttcttcttttttttgatcaatagttgctatctttaaaaggaaagaatatagaatgaaaggtcgaagaagcatatggctctcatgcggggcatctcaggttggctccactttcggctcacctttcatcataaccggtgatggaggccagcttacccgagctggaatattcctttcataatatgccacgtggaaattttggaattctatttcgattatgattttcccgaaaatagtatattatttcacacaaatgtgcaataatgcgctaaaacatttgtgttaattccttactaaactaaacagtataaatagccaaattttatatcaacaaattagcaaatgtttcaaagttg

SEQ ID NO: 44727 - DNA, 529 bp, Arabidopsis thaliana landsberg
tttcctttttttggtggttaaatcaatcatacactgaatcctttatattttgtttttaaaacgctataaaaaagtattgttaatctttttaggacataaaactattttttttaattaaataatgcggtcaataatcaatagttattggctcataatcgtcactatgaaatatttatgaatcttatggatacatacatataagggtaaatccggaaaagaatatacaaaaaaataataatcaaagagtctctctctctctctcattcgatctcgacgatttcaccgactaatcggagtttggatcggagattagatccgggaaatcactgacgaatcctttctggattttggatcggtctatgcttctctactctacttgatcttgatcttctagaaatttaacttcgttttgcaattgatcgtctcgctttaaaaaacttgcagatccgctgatctctttctgtgatactgcggggcctagggttaaggttttaatctccatctcgggtgtcaattttgatggcctttc

SEQ ID NO: 44728 - DNA, 454 bp, Arabidopsis thaliana landsberg
tgcgctttttcattcaccacttccaccatttccaattccgacagtttccgcacctcttcactgaccatcacgcctcctgtctccaaagtgctattataattcaatccccaatctttgcggttgatcttaccctggatgctgaaagccgatcttacatttccccagggatcacgtaccgtacccccaaattccacgccgagctttaccggtttcgttacatctttaatcgtcaagttaccttccagctcataatcgccttcctcatttactttactaaaacgggtagcgacaaacttcatttcaggatattgcgctgcatcgaaaaaatctgctgaccgtaaatgcttgtcgcggtctgccggcccggtagctacagaattcgtctttactactgccgttattttcgcatccacaaaatcttctccctgattctcagcttctacctgaaaatcag

SEQ ID NO: 44729 - DNA, 539 bp, Arabidopsis thaliana landsberg
  unsure (1)..(539): unsure at all n locations
atacatatctatattcatgctctttgcctnnnnnnnnnnnnnnnnnnnngcaccacgtttataaacttgtttatgtcctatttccgtcgattttaataacagctgtaggaattggtgcagcttgtcccacgtttgagaaatctaactcgtccttgtcgggattatcgatgtaataccattgatatgtttgttgatcgattgggattgttcgtgtaaccaattgagatgcacgaccttgttttttatacccgatccgaattccatcttccacaattgtattaaacaacggcttagtgttgtcattttcgtataatgcacgaacttgttcaacgccaatatcttcaaatcccattgcacgacatacgtcttttaatgtgattccgttatcatcgagatagcgtttataaaggagtgaagaatcaccctttgttagtgtatctgcagcaagttgagtccttttattcttttgagcaatggcccgcatttcagcttttaatggctgaccctctctaagttcaattgtttcaccgcgtttgttt

SEQ ID NO: 44730 - DNA, 577 bp, Arabidopsis thaliana landsberg
atttatttagggcttttgttcctcgtgctgaaagttaatcgattgtttgaatttggactcttgatttcatgtttttagccgtggattgaaaaatctagggttaggttttcgaatttgggtttttttttttttttctttttaatatctgtataaagtttgactttttgactaaaaattaaaaaattacactaataccctagattgttaaatcaattcaggttgttaaaataaatgggattaaagcgaccttatgatgctgaagagatgcaaaagtgcaatgctaagcatgcaagacagcttagttacaaaaaccataaccaatttgacgaagctattccatatcatcatgcttctatggagaagaagacaaatgttttaggtaacaacccgaaacccttttaaatgtttaaattcatatactttgttctgctaagttttaactttggacgtgactttgttgcagtacaggatctgattggtctctatgagaatcctacgtggactaatgatgcaaatcacgttgacaagggttttgaaacaaccgatttgtgtcaggaagattctcagtctggagtga

SEQ ID NO: 44731 - DNA, 429 bp, Arabidopsis thaliana landsberg
tttatgagaaatttacgataaaaagacaacgaaaaaaataaccttcaatttgggggcgattggctgagattttaaggactatagaattttttaaaagtcttaaaagctaaatatttaccaatcataattttaggactttagatttttttaaagtctaagagcccacttttttttttttacgttcattttactgaagtctcaaatatgaggctttcaaataaataataatactttaaaataaataataactaaaaacttttatttttcttctcctaataataattagaatctttctacatgtttacaaatattgtttcacaaatagtattcaataaactaattattatcatttttcaatctttcttttaggatccattttaataataaccattttatttccataagaaccattaatattggtataaatgt

SEQ ID NO: 44732 - DNA, 582 bp, Arabidopsis thaliana landsberg
tgttgcctgtttggtcccataatctttatgggtaaagagaagttggtacagtggtgaacgttgagtgctattgtttaactgattttgttgagagcttgacttttgtgagacggttttcaacaagttttgtgatacagagagatgtaacatcgggaaagaaaaaacaaagaaagagaaatttgttgtttgcccttcaccattttgtctctatgactctatgtttcactcagttaaaaagtttacaaatgaatcgaaagttaaatttatctttgtaatactgtagtttctagttttagtttacttttgaagggcccattttattttttattttattttgtgagaagggcccatttcatatatatatatatatattatttattttatttttggacagaatacgagttgttttaaaaaaaaaatatttttgaaacaccgtccgataaaattattgaaattttttgatatttttaaattcccgccagactcccatctaaatttcgcttctcctttagccatttgctttcattgtcacggacctgagaaagaagggatgagagattgaagcaacaaagagatattcgc

SEQ ID NO: 44733 - DNA, 811 bp, Arabidopsis thaliana landsberg
ggacaacatcaacatcaacaacacaacaaactcaacatgcaagaagcagcaatctcctataacgagcaataccagtatcgtagagcacaatagtgccaagtcatcgcttagatggcgcaagcgtattggtcatctattccacgtcatcaaactcaaatcaggatcgtccacgtcttcttgccatgtggcaccatctaaggtcgaaggaaccaaagtgaggaaacagggttggatggtgaggaccttaaccagaaaaaaatccaggaaaagtaaaagttgaatttttcattactttgattacccttttaaaaatatttttctacatatttttttttttagtttaatatttggtttggtcgttttttcaatgattgatgcttctgtttgaagaagaattatgtggaaggtttttttttgtaagtaatgacgagacatggatttaaaagcgattgaactatccatagattaagttattgaattaattaggtttttgtatgtagatgtattaagcgtatgtaaagggacaagagtcttgccctacaccatacctctttgtaggcatgtggtctgaatgtgataaagccattaaaagatgagagaagggtcaaaataggactcgtcaaaatagccttttatcattattttaatatgacaaaagagaaagttttgagcaaaggaaaaaaaaagaaaaaggtgttattttaagatagaaagaaaactacaaaagtgaagttgctttaatattattttgcattgggattctttaaaatttttttttatgacttttaaggcccacccttaaattcttttt

SEQ ID NO: 44734 - DNA, 261 bp, Arabidopsis thaliana landsberg
tttgggtaccccgaaacggctccatttgttcccaagagtttattcaaaatatttggagagagttggttcatattataggccactgctaacccgctttgtgaatgaaaatcaatccttcagcgggcgttttatgttcgataaaaggtggatttctaagcctgaaactattgaagttgttaaacacaggtggcatagtggaggtaatactggagatataagcctttttgatcgtattgcggcatgtcgtatatccttatctaa

SEQ ID NO: 44735 - DNA, 424 bp, Arabidopsis thaliana landsberg
tcttaaatagatctcatgcgattatgttcttttggttaagtctcgaaaaaaaagatagcatgaacattttacatctcttgaaggcacctttgattccttaagaaatctagattcttcttttctcatttaattatggtcattgtaacaagtaaacacacattacatctcttggtcaagcctctctatcaattggtcatcaaatttaaagatctgcgcaccgttttgtcaggcttgttcttatggctacgtgatggtctagatcctttctcccatttaagtataagtttcctatattcaatcatcaaaaaatgagaacacaattttggatatttctactttttttgcttatactaaacttcttctctcaaggtaaatcatcgtattcttcttatctaactattgaaaaatataaataatcattctc

SEQ ID NO: 44736 - DNA, 371 bp, Arabidopsis thaliana landsberg
agttgtttttcttcttttttttccttcactcaacatctctttttcattcacttaaaatatcattaaaagtgatgacgttgcttatcaaagtaaaagaactaaagaaatgtgggattctgtcggaaaagtagtatatgttcttgacttaaaaagtagtatatgtttacttgtcaaaatgagtagtccaattttatatataaccaaagacaagccgagggattttagataggcaaattccaaatatggattatacattaagaagcaaacaaagacaacattacttgtagtcgattttccatcgatttattatttatatacttagtaattatatatagtaggaatcatcccatgaaaaacaattgatgtttaga

SEQ ID NO: 44737 - DNA, 963 bp, Arabidopsis thaliana landsberg
  unsure (1)..(963): unsure at all n locations
aggatgacatcaatacaggatacagtattttcaaagatttccaggtaaaggatttattgcttactcttttgttttttaatttgaaaccagaaattacaaaaggagaatataaatttgacactgtaaagtttattttattaataacggaaacaggtaaagaaagtgaatggagtgcaagtgcataatctcaaacatctatataagtttgtagaggaatgctgcacagaaactgtgaggatggacttggagaaagataaggttattaccctcgattataagtctgcgaagaaagtcacttctaagatcttgaaaagtctcaaaataccatcggccgtgtctgaggatcttcagcctaaacaacagaataagcgcagcatagttcctccaaagagtaaagaacattgagtcatcagcttcatgctacagcttgatgttcccatggaatataggatttaaatttaaagcaattactaattgaatttaatcatagttaccaattgtaataacttattttacgtactcgtattcgagataaatgcttcgggaagtccaaattctgatctagtttactgcttttcctcatctagtctaaggataaataaccaaacccaaaaattgaaccggaccaaattgaaaagagattttttgttttcggattggtttcggttctatcgtttaaactgatcgacatgatttttaatgtttcttaggttaaaatgtggactttggttcgatttgtccgaaccgaacgattaacctaaaatatctgataatcaaaccaatcccaaccgttcaaaatttggtaatacttaaaagaacaaattaccaaacagaactggcctaatataccatactctcaggcctactttttactctcaagtctcaactaaattattctaaattacactagtcttgaaaaaacgatgatnaatcactttaaaatttaaaaatatatatatatat

SEQ ID NO: 44738 - DNA, 779 bp, Arabidopsis thaliana landsberg
  unsure (1)..(779): unsure at all n locations
gatatttggattggaattcctttccgcttcatggccttagcatcccttgtgtcctctctctgtattttcgcaatggcgaagaaatctgattacaataaattcgatgtcgacctaacatacgtcttgctcataggtggaataggacttgatttggttgctattttcatcttctgtgtctctgattggacatttgccagatttaagaagccaaaggaggatgacaatggnnnnnnnnnnnnnnnnnnnnnnnnnnnnnnnnnnnnnctcagttttagggagttgaagtgggagtcctacgattgttcccacagagtaaaaggcagcaaaagcaaatgtgaggttcttgatagaaaatttgtctttcgcagatggtctgaatacatatattcatacaatctgattggctactctatgggactaaagtcttcgagaatccacaataccgacggatacattcacagattctttgacgctttcattcagtctttgtgtattgatagtgccatcagttgtaccatgagaggtatcgggttctgtttcaggagcatgaaacatgagactgatcgtgctcgcagctggttgaacgaactcatctttcaatcatccacggacaacaggaaactgtattatgctctttaccctctgaagctgttactgagattctggtttggcatcccagttatttactatgtattggacttgttcagtatctcagatcagctcaaccgggtgatctatacatcaagtgatcgcatcacgaaacaaatgtgggaattcat

SEQ ID NO: 44739 - DNA, 602 bp, Arabidopsis thaliana landsberg
ggcccgataattcctcctaaagtcactttcaatatgattccacccaaaactaagttagtacctgacaatgcagtccggtgagatagtctcgagaaatgcagccgccttagcaccaaaatcactgagtccatagtgatccgttatttttaagcctcttactaagagtcaatcgtatttactggctagtttctattagttttgctaattgctaaatatgatatccaaaagtatgtaatagcatagacgaacgtttaattattggctcttattgtgatggagcaatttggagagaaggatccaacaagtgtgaggcactttgtggccaaaatgtgtagacaatgcagaaacaatatctaaagcataactatgaacctcagacttccttgacatccgaagaagcattgatatccacattcccggtgcaagcttccccgcctcactcagacctttgaatccattgctcactcttttcattgtcccttcttcctgcagttatgaattgacaggattattttcagaagattccgttgcgaaagatagaagaagggaaggatgattctactgaccgtcttaagatggatggttttgatgagctcaagagc

SEQ ID NO: 44740 - DNA, 819 bp, Arabidopsis thaliana landsberg
attcaaaatcaagtgagaacaaattcaaaataaagtgaagaaaattcaaaattttcagtaacaatggcatatttgattttcccttttcatcaaaaaataaagttacgaataaaatattattatattaaggagaaaaaaatagatatgatcatagtctcatatttcttgtgaagaccagttttttttaaaaactatattgttaaccaagtttgaatactcactctttattaaaagcgtgttcacatgggtcacgtaacacgtttaagaaaaacctggctctaaaaatattatcaaaatcccagatttgacgaagacaagaaaataaaaaaagacttttaaaatcgttttcaaaatgggctttacagattcgtgaacagacaaaaattgggccatgggttaatttgctttttaggccacgtcaccgttttagtgacgttaatgaatattcgagatgtgaccccacttaaacaagatcccttggacgacgtcgtttcgaccacttcacgaaaccctacggtcgatttatttacacaaagtaccccttcattgtatagcgccgtcctttgctgtaactcttaccgtcaaaggttatatccgtctttccaaaatgtctcccaaagacacgtttttaaaaaataaaaataaaacgaagaaaatcagaaaatgggtcgccaagaatagaggaagaagcaaagaagaagaaaaaaaaaaaacagagcgtttcaaatatttgcggagatacaaagctgagaagagataaaaaaagcctttgagaagaggttttcttcttcttcttcttccctcctcttctcttatacg

SEQ ID NO: 44741 - DNA, 851 bp, Arabidopsis thaliana landsberg
gaaagtatatccaggttatagtggttgacatagtgtttccagatatcattgacagttgatagagtgcgctgaaaaactgcaagcttataataatattaatcagatagcaaagaaagagaagataattatgcagatcaatgacaatgaaacctccatgtcaaggaacaaacgaaagtccttaagggccagcaaagctaagtcagaaatagagacaatatcaaaaagataagtcctctccagatcttctacactccaaattttaaagttggcatacgaccagctcttgaaaaaaacaaaaagattaaggcactgaaaaatgatatgttcttaactaaccttgagaagtgctacataagttattccattcttccccactctccgttgatccatcaattccaaacatttactagcgtgatatacgcttctcgttcgtgcacaggctccaagaaaaaagttatagataggcagaagaggagatatacgatcatcttctctgacagcgtgaataaactctgatgcctgaacaagtatgcccaaaactatttactcatctcttttagtcgcattatgtaaggaaatactggctttcgagtggaataattataccttatctaagtgtcccccattacaaagggattttactatgaacaacaaagatctgctgtccagactaatttccttcttgcacattacactgtaagtctccatgacaaactacaggaacacattactgccttgaggtgagagacaacaagagcactgtcttatgagaaacaaattacagatttacatctcagccctaccaaaatttcattgaaatgtaacttgtgaaagagtaacgaagattaaac

SEQ ID NO: 44742 - DNA, 577 bp, Arabidopsis thaliana landsberg
ggctttcacaacgtctgcacccatcgcggccgcaagctgatcgacacgccgcccggcgccaggcaggcgaccggcaagcgtgccgccttcgtctgtccgttccacggctgggccttcaatctcgacggcgactgcacgcgcattcgcgagaaggaagactggggcgcggcgctgaccgaagccaacacgcgtctcaccgcggtcagggtcgatacctggggcggctggctgtggatcaacatggatccggcctgcgagccgctgcgcgactatctcgaaccggcggccggcatgctcgatccgttccagctcgagaacatgcgcgtgcgctggcgccgctgggtcgtgttcgactgcaactggaaagtcgccgccgaagcgttcaacgagatctatcacgtcgacgtcacgcaccccgagttcacccagttcggcgaattccgcggctgggccaaggcgcagggcaagcacagcaacatcggctatgacgcgccgaagaacgtcgacgccaatcagcaggccaagctgcgcgtcggcagcggcgacgcccgcttgtcgacggcactgatgcagaact

SEQ ID NO: 44743 - DNA, 512 bp, Arabidopsis thaliana landsberg
tggacttgaatttctcgtttttcaaatgcttccccatttcgaatcttatgatctacaaattaaattacgtttttgatcaatttgaaagacagaggatgataacagcgacgtattataaaaaaaaacacaaatttagtcagacgagagacttagtagctagtctgaaatcttcaaaatccaatcaaatataatcaagtcaaagaaacaaataatctttcttgttccataattttgataaacctaagcaaaagaagaatatataaaagccgttaaaaagttatacggtagaaactgacctgatcaatattcaagaacaagaagaaggaagtgactgagacaaccaaattgtttggtattatacaaaccgaagaacataaggaacaagaacaacaaaaacctcaataggggttgatgcaacggaaggtgtctggaagaaaaacgaggaagacaatgaacaaggacgatgaaactgagacttttcgttctcctatgtggttctcgtttagaattta

SEQ ID NO: 44744 - DNA, 857 bp, Arabidopsis thaliana landsberg
ggtaatggcaattcacactctctgtctctctccaatgtcttgctcttatataagacttttgtttttagatctttctgaaaatgggtatataacaaaactgtattttcttctttgaaaattacagaaaaaaaaaaaaaaaggatatcgtgtcttgagagttggaccggaccacagttcaacagtcatgagctgtgttcttattggaacccagaaaaaggcgctaacggttatcattgtcggtacctttcattcattgtaataattcacctaaaaagcatcaatttttctacgagtagataattcataaaaaaaattaaccgaattttacaaaataaaacatggtccgtttttcacaaaattttatttctttctattttttctgatgtgctccagtcagttacattacatggtttcccttgagacggaacaaacaagaaatatttttgattgagctgagtgttctgatatcttatctttattgggctgatttatgatcataaaggcccatatattgtcagaactttgacaagccagaaaacttaaacgacgtgcagtttgatctcaattacactaaaacggcaagtcacaatcgtgtaactacttgcagacctccttcagtgaaacaacccaaattgctaagaaatagaacctcaatggcggcgacagaggaagaggtgacgacgacgaaggaaggcgccgacctattggggaagccaaagtataagaaactcgagaacgggagatttaaatgcgtgcagacgggtcacgagctactcgagaaagacaagaaggtctattcacagagtaaacgatgccgtttagggcttattgattatgccttatctcatagcaagcct

SEQ ID NO: 44745 - DNA, 1010 bp, Arabidopsis thaliana landsberg
tcccctgtccatgatgaatttaggttcttagttatcaatgttaagaatctctttatttgtccgtgtgttgcaatggttaaggcggataaattcgtttgtggactggactgttttttttatttatcatttataaatataatttatagtggtctggactcaaaaaataaataaaagataaccgttgcgaccaatcacatattacttttacatataaatagagttggtccgcatcggtttgttgtccatccttaaggtttagcccgttttattttaaaggcggacaacaaactggtgcagaacaactttatttgtatgtaaaagtggttcatggttggtccgcattgttttttttttttagtctacaataatacggatacaatttgtgaatgataaataaaaaacggtttataaaatcattcattcatatcttaaaaatagagcagactaaattactaacggatttgtacaatagaaaacatggctttacaaactaaaatttcacgtttttttcttctgagatgcaaaaaaagtttgagtttcgttatttataaactaaaagacttaataatcgtataaaagtttgagtttcgttatttataaacatttcatataaaatgtggtttctaattaataatttgaattttttgttggagtacccaatcgtgatgggactagttagtaactttatcgcaagatttgctaatgcaagttcatacctattgattcaactaatcaaaacaattcaactaaacccactactataccttttttgcacgtataagtagctcctaagtaagcgtgccactatgatttttaggtggtgataatatggaaacttgatagaagatctccaatttgaagaattggaaataacagccacagcgtataagaatgtatgaatacttaatattttaagcaagaatcaatagggtataaacccttgatagttgctactaactttcaaatgaaattatgatgggagcagacacgaaagcattaagagtatatca

SEQ ID NO: 44746 - DNA, 784 bp, Arabidopsis thaliana landsberg
cgacaaaacacaaaaagatagttgtttgattgatcgatcgttgtccttcgaagttcgttttagtgtgctattttatggtgttcttataaaaatattattagatggattttctattttgttaaagagtagatatatatactaaagatattattcaatgtaccttttttttttgtaatagagatggatcaatatttgatcattttgttactcgaatttagtattaacattgactttgctggggttttttctgcgttgttcgctttcgttctggatgtagtggttctcgccatattaaatagactgaatactagtgctcttttaggtattttagtcgtatgagcattttcattcgtggcatctcatttaagtatctacccataaaaaaaattagctgaatttgtaaatagtggagaaatcctaatcatatatatactaagcatcaaactagtttagttttaagttgtttttcgatcctaaacttgaattaggcacatgatgttgggagcctatatgaattattagaacgtgatattcatgcatggtgtactctaagaattaaacatatataagagagactcgggatatgtttgattacgtttagataatactaaatactgaaggtatgttagtcgtcttaaaaaaaaatcatgatttgatatttaattagggatatgtaccgggaagatcatatttgttaggtggatccaaatccactatggtcgaagcggtgggtaactgacgccaaatattatatactgtgcagttgtacaaaatggatgaacgc

SEQ ID NO: 44747 - DNA, 554 bp, Arabidopsis thaliana landsberg
ggaactaatctataaatataaatactaaatgttgaaagctaaatagtctaaagaaagaaaagaaaaacagttattttttagccaatttccacactgattacaacaagctagatcactcctctaagcagccttctgattatatacgtattattctatcaatcgataaggatatttcaacgaaattggtaaagataaaaagagacgcccttcattagttaaagctgactttaatttcgatattatacctttcttcctacaattaatttacacctaaaagtaagtccatattataaagtacgacgacgttaaaccaaattaacaaaacagtagtattgaagttttgattacctattgatcctataaatatatatacaaaattgaacaactcagcttcaagctgaaatcaaatactgcatcatcaattcttgttttttcttcatgctttacattcttcagaaaatagagcatttgataacacttgaaaccaggtttcggtcccttcaactttacacggtctgttacacttatatatacctgtataaatatgcatgcat

SEQ ID NO: 44748 - DNA, 842 bp, Arabidopsis thaliana landsberg
cgaacttggagataagctctccagaggcaaagaaaaggtaactctatatcctttttttttttttaagagccaacttagcgtttgtaattaaacttatttttctcgccttaatcaggctgaagcttcatgttgagcttatcctcaaatgcatccggtcgttaccatccgacagtgccaatcaatcaggcatcccaaactggggacaactagatgaattctttgcacaacactttaaagaagaagaagcagcaggcgaagctgagtgatgaaggcgtcaatgtacagcaatttgtttcttctcacatcctttataaagtcaaaattcagagtttgggtatgaggatggactactcgccctgtagattaacttacaggtaacaaattccttctctctgacaccattaaggcatttagtgatcaagtacaaatatatgaattgtaattggtctcatcgggttacatctcatttgcaaaacgcggatcatgtagcatctcgaaaagcaataacaacattttgttcatctactgcataaagaaattagagcgaattctgatggttggacctacaaaatgcaggcatattacagttattggctcgaatgaacattatatcaaactatggttgtaccaaaagttccgaagcaaatcatatatcaaactctctcttatcttttggttttggattttctcatttacatcacttgttgcttctctcttttattttttctttatttttttatttttcctttttcttatttgggaaatgtaagaggtactagtgactgactggtgagggaagttttttgataagtagtataccttatatttaaaatatatttttt

SEQ ID NO: 44749 - DNA, 1231 bp, Arabidopsis thaliana landsberg
acaattctatggctagaatcgcttattatataacattctgaatacagtgatgcttgcctatctagattagtatttgtaagaatggaatctatattatataagactgaaaaatactgttaaactaacactatcgtttacaattcgatatcattattaacttgaacttaaattttggtgaagctaatttggttagataacaaatttcagaaaatacacaaaagttaaataaaatacagcttgtctgtaaactgttaagacttcaaaagtggcaataatatgcaaaattagaaatgaatttaaatatttctgccgaaagttaaatgctacaacagatacgaaagagcccaaaatcattttgtttttgctgtaaagaagccgacaacaacaacgtacacattagcccactctgcttcttcttcttcttcttcttcttcttcttcgctcaccatctttttttttgattagtcaaccattttcttctctctccaatttcaacctctgtaaggtacgtctccgactttccatggcttccccacgtctcgtcgtcccctctcttaattttgcgtttcatttcgtttaggttgatcttttttttgaatttgattttatatctccgtgatctgattgctcctacctggttagtgacttcaccaaacatagatttttgtttattgttttggtttcattcgatttctggatttgatccttgatctcatttgaaattattcactttctgggctcgttgagccttagatccaattctttctattatatcggagacaacatttaatccttgatatcttcatattgtattgcgatcttaagttttttttttttttttgaattgaattagattcatcttcttgtttttctcaaatcttaaacacgataaaaactttcaagctatgaaacttgatcatttgattctgattgtttttttcgtaattcttaatacagagaaaacctggaaaaatataaaaagagatgatcagtgatcggtcggagttcagagttcagattcggagattattcatgattatgatcagaacgtcgtacaaatggatttgcaatcatccctttcttctcggcttcgttgcgtttttgtattatctgcatacatattgtcctcttttgtttgctcccttagtgactgcatctcctgttgtggtgtgtacctacggttttcttggtacgatatggagaaaatgctgagccaaaacatttctgtaat

SEQ ID NO: 44750 - DNA, 787 bp, Arabidopsis thaliana landsberg
agttcattcatatataggtacatcaaacccatttcttttaaaagtacgacaaaatccaactacactaacctgaccagtattgttttcttaattcaaaaccaaagagatcaaacaagatggaagctaacaatcaggcagagtagatgcttttaaattagatcatgaatgaaatatatcttattactagagaaaatctcacgcaactttgaattaatataataaatcatgcaacattttgtggctaagcatacatatcaaattaattaaatttattttcttacttaaatttttgctttagtatttatgaattaaaatatgataaattaaaccatacaaaatctctaagaaaatgttgtttttgtctccataaaaataaaattaagatcacatattgtaaaatatattaatttcgattcttttacacaagtttttaaccttgtgttaataggcatcttcgatatctttattatatttttaaattaatacatgcttttcatataatttgttatatccttagacattgtatcttctatatttaagcatataactaatgcattattggtagttggacattcatgtcattaaaagaaaaatcattcataataatcaaacaatttcaaaatgtcatcgataacttagacaaactcaacaaagaatgaacaaagagaaaacataaagaacaattcataatagagtaagagtactcacccttagatccaaaaacagacttttcacattatcattcacttgtaatctataacatgtttctattttcttcctacatgaa

SEQ ID NO: 44751 - DNA, 658 bp, Arabidopsis thaliana landsberg
caatgcatgatattttcttaaaggcttaaactactaaaccactataaattaattattgttttggataaatatatttacctatatatatggggcaatggcaacttttactgacagcaccaaatgcatgaaacactcaagtctttgtatgtaattaacacacttatcagaagtccattgggaactggactattaacatgaaatctagctaagaccctgagagttttaatagatgtgtaagagccgacacgtgtgggaggcaagagataggttggacgtgcgcagccgcctgacaaaataaataagtgtggttctgttaaaagttggacattacaaatcaggtgttggggatagatcaaattaattttttacaagttgggatacggaagaaaaaaaaattcattttacaagatgttggttttcaaaacaaaatttattatttttattagtcacgaggggaatctttttttcgtcagacaattctaaaatacgaattcgtcaaatttattacatgtctaaaactaaaacacagttgaatgtgaatgattgagaccatcactatgtagaattaaattgattctcctaagtaagtattttaataactaggcttgaatgtgaatgattgagaattagaacttcaaatttcgttttgttttaaaat

SEQ ID NO: 44752 - DNA, 736 bp, Arabidopsis thaliana landsberg
taactttgcttttttctatggttaatccttttatataaataaaattttagatgataggagcattatctaattaagggtacatatatgactaaaatttggcctaaccacatcgacttaaatcaccctgacttattccggagtgagccagtccgacaaagaaaacttggtccatcaaagtttcaattgatctccgacaccaaactagggagatcttgatcaacttgctttgctaaatcatactagtagaccacaacatgtttagcctgtaatctggtcgtttgctaaatcgattgccacttttgtttaattcgtttgttatttacaaggtaatgattattctcatatttctacatgtccaagcatttaaacatggttgatgaagaagcctcgttaatatggaaagctcatccactaaacacaaagtacttatgagaaaaaaacaaatctgtatcaataatagatatcataatttattattttcgaataataatttgtttaagcatgatcggaaacacaagataatggagagaaagctggagccacataaacatagctgcgtcgatgattattaagttcagaaaaaaaaacgaaatcaaacatacggacattttagttaacagaagtaaaacacataaaaatgttctgtgttgcgcatatgggaatgacgcctacacaatgtcggatgtccaaatccagggaccaaagactatgtaacataagtgtatatgtaattatg

SEQ ID NO: 44753 - DNA, 1484 bp, Arabidopsis thaliana landsberg
tgattcacaacaaagacgttcttaggagaaaacaggacttgtttgatggtcatcttgcgttcttgtgacattgatgaaagtaaatgtttagtacaatgaacattagctgatgtatatatatagttacataatctagagaacaccgaaagcttctttaatagcgtgtacaacacgggaggaaacttcttcaccaaacattctcggaaactgcaaatccaaatcttcctctatgctcttccttctaaagcttttatctcttctctccaactccattctctcttcttccccaaccacaatcttctcttcttcttccttcacacaccgctccaaccaaacctcgagaacctccttagcagctggactaacatgatctctcaatatctcctccaacttatcctcttcctccgcatcaatcttaagcatcgaagcagtaggagagaaagcagaacggacaaagagagaaggagacacataagggttaacttcaggtagcttaaggagagattgtcgatgagaatcaagagcagtgtcttggtaatactccttgagataatccgggttaagaacaagatctttacgatgtgggaggtcaaggattagcacaagcgacttggaactgctctgtattagttcgaccacaaagtttggagcttttgttgatgagtttaagaatccagagatgcttgttatattcaaagatactcctgttgggatcttgcaatgtatccaacttcctataacaaaatcaatctgcaaaacaaaacaaactttaagattctctaaaaagtttttttttagggttatgatttacatcgaaattgaagtctgtttctacttaaaatcaagcaattgagctctaaaacaagcatgcaaaacagtcaatttcgatctcataactgaaaaacagagttaatcgtcgaaagtaccggagaagatttgtcgccggatctgatatgaagagatgcttcggcggaaccgttagggttattgaagtttcgtacatctggagggaggttacagggaaggagttgtgattggaggcgattctccaccgtcgacatgagatcaaccatgagctgcttccgcgtgggtgacacgtacgggaactccataaattttcggcggaggtgatcgtcgtggtcttccatggactggaattgagctcgaggtctgagattctttgagaatcgcgacggttttgaagttaacggcgagagatatgatggagaagaagaagagtagagagtgttgcaaaatatcatcgccattttttatgtggctatgactaaattatgtctcttcttttttatttacacttttgaagaaattaattactattttaccgggattatagttttgtggtttgtaatatatttcttgtggtgaattattacatacacatatttaaataaaataaactatgctttttaatttttaaatggtttgagagttggtaagtgatcttcttctactcaatcaagtga

SEQ ID NO: 44754 - DNA, 804 bp, Arabidopsis thaliana landsberg
aaaatatttataaattttttttgaaagtatttttctatatattaattttatggaccatgaactaacatttctaaaatatattgtatcatgagattataagattacatttttgattttcatattttactaaattttatcaacataaaaaaaaatattgattagcagcagattttaatcacatgaataatagcttcaaaagctaaataaaaatcatactagatcatttttgacataatttgtatccttttacaaataatactaaattagagttataaaagattaagtacttcagcaaaccaaatattccacttaattaattccgggttgacccaaatctatcagatctgatttttcttgcttttaaaccttagttttttacatggaccttatatttttctaagttcttcatctatagtttcggagattgtaagctttacaagggagatatttcataccttatacacaatttggcggagatgaatgaacttgttttaataatttcaggttacacgtaatcgattacgttgtttctaactatgtattaaaatccgttgtttctttttagcatattgctacatgtgagaagaattttgagttaaggataatagataaattcattttcatctttataaaactttttaatgatagaaatgatttgattaccctatttctatggcaaaaaaaaaaaaaaaaacctaaatattcaatgtttcacttgaaacagtgaaacagatgatcaaattaaaagagtttttgaaatctaacccatcaaaggctggagataaacccctaaatcacaaacgt

SEQ ID NO: 44755 - DNA, 467 bp, Arabidopsis thaliana landsberg
gaaggctgctgaaccaggcccgtgctttggatccagcccatgtagtgggcgaacaaaacaaacaggaatagggcaatcgacagccctacccgccaggtgagcgcattgaccgtccggttgcttttgccctggtcgcgcatcaggtacacaagggccgacgccaggctgcccagtatgcccagaaacgccaggataacgatgatacgcattaacactctccggtaaaacccgaattattgcagacatggccaaatcgcactcgacgcttcgaaccctggtttcgcttatattgctcgccatcgtggcggcggtatgcaccgcgctgggaaactggcaattgcgccggggcgcccaacgcgacgccatcatgcaggccatcgaagccggacgcaaggccgcgccgctgcagctcgacacccgcaccgcagacggcgacctggtttaatggcgcccagccgccgctcgtg

SEQ ID NO: 44756 - DNA, 572 bp, Arabidopsis thaliana landsberg
aatttagatatgtgggtcaaaacagaattaagtattataatttgtgtataccaaattagttgacgctatcattgcatatcatactcacatactacaatatttagtacatatgaactaagtgattgtattccagtggctattctcatttaactataacaaaaaaatcgaatgcgataaaagtacttcgaaaataatcgatggctctgggaatttttataaaatctagttcttgaaataaataaaaatttctatgcaatatttttcggtaaatttttgttctctattacaataaaattttattttaaagaaatgaaattgtgattagcgtatatttgtaaccaaaattagcaggcgtaaatacaaatcctttaaataactctgttgttgtgtggatatgcggtaatgtccacccgtgaataaatgtttacgtgttatatgacccaacaaagcgaaccaattatattactcctctctaacgcacttgtttattgcatttttatctatttgatggtcgaaacaaaacagtaggagtagctgctgcataggaaactgcatctgcttgcttttgaagc

SEQ ID NO: 44757 - DNA, 675 bp, Arabidopsis thaliana landsberg
cctttattccttgacctgcataaaaaccaccaccaactttgcccacaataaaccaaaaattttgacttacattatacaacaaaagttaacaaacatataaaagtgcaacaaaatcgaacacaggtacaccaaaagtccccaaccaaaaatacctctccaccagcttcttgattgaccagagcccaaaacctaataaacacatatatgtagtttcattgtttgcattcatgtgaggtggaaactaggcttgggaaagataaacaacgtaccatggtactgagtccttaagttcgctgcgacactcttctttggcctcgagccacaacggtcttagacaaaacctcctcaagatattcacaacgacttctatggtgatcgatccaaacacataattgccttatcgcttctcttttctcttctccaagtcccatcaaagtctctttcatcatctccttctctttttcatcttctcttacttttcctccaagcttttttattacttcatctttcttctctatctctttattcatcttctccttctggtgatttctctctatcacccaatttgtcgcagtccacagtatttttgatgcctccattacagttttctcgtatctcccctgtttttccgtgagttttctgacatggattgaacccattactgttatgtcactt

SEQ ID NO: 44758 - DNA, 522 bp, Arabidopsis thaliana landsberg
tacgccttccacagttctggctcagcgtcgaggacgagaaggtcggcgagctgctgcgcgtcttcacctttttctgccgcgaggagatcgaggcgatcgaggcccggcacgcggagaagcccttcctgcgtgaggcgcagaaggtcctcgccgacgaggtgactacgctggtccatggagcccaggagacggagaacgccaaggcggccgcccaggcgctgttcggcaccggcgacatcactgctctctccggcccgacccttgaggccgcgctcggggaggccggcgctgtggacgtcgaccgctcggccggcatccccgacatcgtcgagctgctgaccctcaccggcctggcgtcctcgaggagcgaggcccggcgcaccgtgtccgagggcggcgcctacgtcaacaacgtgcgcatggacgaccccgagcacgtacctgccgcgggcgacctcatcgcctccgcgtggctggccctgcgccgcggcaagaagcggttcgcaggcgtgcgcgtgcgct

SEQ ID NO: 44759 - DNA, 1150 bp, Arabidopsis thaliana landsberg
agggcagttgttgacatggtccatgagtttgaatagtttgagttgctcgagctatattcacaataagcccaaagaattgtacacacaattgaaagagattgacgagagagtaaagagttttgggtttcctcttttgatagctaaaataagccccaaacaatacgtggaagaagcatgcaaagtggacggtatacgtaacgtaactatgtaataactttaacattctcaaagaatataatttataaatgcaatgaaataaccaatatagaaactcaaccaaaaaaaaagggaactcattttcagattaaaatttctattgaaaaaaaaacgaatttttgtggcacagaaatttgtagccacaaattggaaataaaataggtgtacaagtaccaagtatatgatagagtaggaccaaattgattatgccatggaaattacctggtgaagaggaaacaatactaaccatgaagcgtgcagcttgtgattaatgctctcgatctctacttgaactcgactgttgatgagactaatgtctttcatatcacttcttcttcttctcttttgtcttattcctatatttaatcttaccctttttttcggtctaccacattttaaatcgagaaatgaaaggtcgattacgtggagaaattataacattttaaactctcgagaaacttgtagaaaatactgttttatcaattagtatttgaaaccattatgttttagttttagagtatgaaaccagctggttttgactcgtttccaacctatacgtgcctcaattttagagatgtcccatttggtttaatctgaccaagctgtatccaaaaagtgattcaagttttatttcggtttatcaccagttacatttttttcgatatatacgaaaagtatcggaaaataagaagacacaatcaaacttgaaattggtaccaaaactagaacagtgtaagtcaaaccgaaaccggatatatgggcatggcctaaaccaaaataaaccgtaatccattcggttaaaattagtttcccttccaactatttgtatatggcatggcctaatttaacccaaactatttgaaatatcagtgtctcttccctcctttgatgtatgaggcactgcctaaaccgaaactaaccagatgcagaacag

SEQ ID NO: 44760 - DNA, 655 bp, Arabidopsis thaliana landsberg
  unsure (1)..(655): unsure at all n locations
gctctaaagcgctgaatgaactgattgaaacttccagggacggtgaagaaggtttccgcagctcggcagaaaacgtataagatccgcgcctgaannnnnnnnnnnnnnnnnnnnnnnnnnnnnnnnnnnnnnnnnnnnnnnnnnnnnnnnnnnnnnnnnnnnnnnnngggggcgagccggccgactccacttctattggcggtaccctgcataggcgctggatcgatattaaaaccgccttcacccgcaacgataccgtggccgtgctgaacgaaacagagcgcggcgaagatgttgccttgaatgcctaccgcaaggcagcagaaaaggacttgcccacccatgtcaaatttgtggtggtgcgtcagctggaaggcgccaagcgtaaccatgaccaggtgaaacagttgcgggacgctttccgcgctgaagcggcaattcattaacatcttgccgcaaaaaaagccctctcaatagactgagagggctttttactgccgttcgcttttactgctgcctggctgcatcagtgaccgggcacgcttcctgctctgttccccagtcctcttttacctgcgagagcgtacggttgaccttgacactacctccttcggtggagatcacccagctcacccgaataaagtgatgcgttcca

SEQ ID NO: 44761 - DNA, 730 bp, Arabidopsis thaliana landsberg
aagtttccttttccttcgtcttgtaagttgtaactcacatctctaccccaacatttttttactctttttacctttttttgtatcaaatatatttaaaatgagtgcataatactaatattaatgtcattttatttgatactcgagtgagaaaataaagggctactgtaaactatgacatgtccgaaactactcacaacaattgatttgatttttttttatgtcacatgtatcgaaactttaaaagagtgtgtacttcgacaaaagtaaatgttgtggaaaaggccgaaaataaactggtaggtcttacgcttgaaagaatactcatgagcctattgggcttgaaaatgacaagtaaaccggcaatggtgtaaagcggtgtcattttattgatgtggtcgcatatggttttgatgtgagcctttgatatatttgtgagtatgacctctcgagtctctgaagggacaattagaagctaattaagggcaattaaaagccaattaggtacaattaagagccaattatgggtagatacatatacaatgcgccaactcatttcaaattttcaatctaatcaaagacaaattgactcaataatcacaaaaatagatcattaaaggtacacaactagatcattcttatttttttagcgatttgttttggaatttttctaatcttctggttaacgtgcaatttaaaatatgaacgaacaacggaatcacataatattttt

SEQ ID NO: 44762 - DNA, 679 bp, Arabidopsis thaliana landsberg
aaattgttcataaaaacatggcataaatcttgattcttatggcattgtattgtcaaacatctacgaatcgaatattgcatttacatctttatcaacggtagccaaagccgtaatataaactctaatccctttacttaatcttacacgtttcaatgtttctatacgttccctgaagaaccaaagcaacaagttaaaagtaacatatgtaaagctttttaatctctgtttgttcttgtgggattatgaatcctaaccattagacgcgaaagctgatctctttagcagcttcttgacagtttcgaaccgtggtaaaattctcaagacaaatacactacgaagggtactgcatcggtttaaacaggggaaaaagcaatgctcgttagcaatattaacaagctcaagaccaaaatctatatatttagcaaagtattgattcattaagaaaaaaaactgaagtgactcacatagtagaaacaccattagcaataaggaaacaataacctggaccggtggattaacacggaagcgtttcggattttgaaagcaaccggtcttgtcaaagagctgaaaaaaacactgaacaagtaagttacttcctcctaccatgactaaagcttatatatcaacacactcacctgattatgatcaggaagtctctgcatccacaatacagacttag

SEQ ID NO: 44763 - DNA, 615 bp, Arabidopsis thaliana landsberg
  unsure (1)..(615): unsure at all n locations
aaaattagaaatgaaaagaggtggcaaaagaaaaagaagtgggagaaaatagatgtcaaggaatattgatattcttcttttctccgatacattacttttccttccattatcttctagtaataatttaggcttttgctgccaaataactcacaaccaaaaaagcccaccgaggaagatggttgttagggtttttctctgttttatactttccttgggctatcttacgtacgtaaaatatttctttatatatttgtctagtttcatcttcaatctgaaaatattattcaagtttcaggtacgattcatcaatctttgtattgtaaattgactcttctacaaaaaaaaaaatgaaaatagaaattngaaccaattacttaacctaaaggatttaatatgcttaattcaattcccaatgtgccaacaatgaacgcaattatttgatcttagactaaaataatcactcgaggaactcgtttcaaaagaaagaaaccaatcaaatcattggcttacaactacggatactgagtttttttaactcattataacacgggagatcgtcactatctcacgcatttttatttttggggggggaattcactatctaacggattacat

SEQ ID NO: 44764 - DNA, 618 bp, Arabidopsis thaliana landsberg
cttcgtagcgtccatgacttccgacaaagagaaagccagagagagagaaagagagatgtgtgtgggttttgagtaatggccaaagagaagaatgtttttggaggactttttttttttttttgccttttctttgtttgtgagtgatggctcttctatgcgttgcctttcactttatggatgatgagagccagcgaagaagacggagaagagaagaacccaatttttaacttattatctaagagaatatagcttatacataatacatgaattggttcgagtaaacaaaaaaatcggttctaagaaaactatatatagttcaattatgatttgttgaactaaataaaaaatatctgaatatatagttttttttatataaaaatgataagaaggcgaaatgagtggttatttgttttgccctttagattatcaacatgaaaagatatttgatttagagattatattatgttttgtaatttcataattgccatccgtctaattcgggagaaaactatggactaaacttttaagaaatttcggttgtaaaaagaatcaaggtcggggaaaaagagaaaggtggggttgttgattttgactagtgatgatgtctcgggaccgctc

SEQ ID NO: 44765 - DNA, 608 bp, Arabidopsis thaliana landsberg
tcaagtatgaattataagtttcgattttacgagtcattaatttgtattcaggtactgctaaaaaatggctttctcctattcccgtcggcgttactaaggaacaggttcggtttatttgctcgtcctttattgttaatacatcgtaaagctccgatctttgatctaattagacaatggaagctgaagtttttctagctgtctctgtgatgacatataggtttcaatgtttttgcaatgcttagggtttaaattgtatcgtgattcagatctttaagccatttattagatttggattggtgttgtcaagtttctcattttgctttttttttttggtgtcttggatttgaatcaggcgtttagtatggcacaaacggagatggagtatcgcgtggaactctttaacaagtactgaatcaaacacccatttggtttatctttcgttatgaaattcgattttcacttgtgattgcttatctggtttaattttgttttgatcacattgtttagggcttcacttattttcaaatagtgatatatataagctagaggagtataagtttgagactgctgatatgtcgaaaatccttaggctgcctgaattgctgaac

SEQ ID NO: 44766 - DNA, 680 bp, Arabidopsis thaliana landsberg
  unsure (1)..(680): unsure at all n locations
ttaaagtttgtgttagttcactaacatttaaatattttgtgaagcaagcaacacaaaaatttatgtttttttgagtgaataagaaagatcttttattacgcaccgtaggccgtggcatgtgccacgtggcgtacagaagaaaaaagacggagtcctagaggtattcttctacgcaaaatcttggaccgtgtaataaaaacatttattaaatcatataaattaatttcaaattttttgttataacgattaaaaaatatgacggaactatgaccacatcttctgcagttaaaccatgaaaaagacaacatcttcttcctctgcaattatgaagaactaatgatatatacaaacaattcttaatacataaaaatcttttacaaatattgatttaagaagctctaaaatcatacaagtcatggatgaagaagcagcgattgatcgtttaccattagaccttcttgcatatatattttcgttggctacttctttcaccgntttggcccagtaagtgttttcattgatgatccttacaagtttcatcctctctttttttgattaaataaatcattgctgcgagattgaagtttttggtgaattttggggtttttagggcaagtggtgtttgcaagaaatggagaaaagctgtaaatcaatcgatggcgagaagagaaactctgagc

SEQ ID NO: 44767 - DNA, 690 bp, Arabidopsis thaliana landsberg
tatttttgaatattatgtgacaataacaaaacataataattaaggctccaaaaacaaatctttattactacttattaacgaacgaacgtaattagattaccgatagtgtgctaatggggtttcagaaaagtgatgggtggtttcttttggactaatccaatcaaaagggatttgatttttttgggttatatcatttaggaaaagatacttttttgttcccttgataatcaaaactgtcttctccatcactcatattctcttctaattgttctcacaatcatatctcactataaaattgaaatgctttatttctgtagcaataatttcaaagacaactttctatttattatgaaattaatataaatattcttttacccatcacttgaaaaagaagaagcaaatgtacatcttttttagataagacttttagttaacatatactcttgttctccaaattaaatcgtaattcggtgggtttctatttttgatagtatagaaaatttcgaaataaatgtctaattcattcattcattacttatatagatatattttaaaaaacctagaaatgtacatgaactataatcggtaaaataaaaaagaatatggatattagttgaccgccaataatacaatttaccccttttgagggtcatatttatcaaaacaaaatcaacatggatttttgaaatg

SEQ ID NO: 44768 - DNA, 824 bp, Arabidopsis thaliana landsberg
tacactatatcatcccatgtggattcaactttaggtacttctaccattcaatgtctactagatctacgagagatttaacagttttgtcttaacaatgccaatggagttacttacaaataccagagatttactctgaaatcaatcaattttctttttacatccctgaaaagtttaagtaactttacatatggaaaactagaaccacgccgcatggtagcttctaaagccagaagtgaatcattgcctgttcaagaaacaaaaaacatgtttatagttccaaatatcattcaggtatcccttactaagtagcaagaacattcattacctcttgaattgagttaaggactagatcctcttcgggattggacacaggtttagattgatgatgcagttctgatcttaagcttctcatctctgactgcattacattgagctgttctcgaatctcctttagcaaactcaaatgttctcccttgatgctcgtatctcttggcggcttactcacttttctatcgtaattactagtcaccatcttgcctctaacctgtgagattttttccatctattagtaacctgatcaaatgtcttaaacaaaagatttagttcactaaaaataatgacttacatttctttcttcggcttcctcttcttccgagatgattgtaagactttctttcgtcctaggaacctcgaagatgtcttgaacattcttcggagacagaatcggagtctctaaagaagcatcttttacagagaatctttcagggttcttcatcatctccataatcgaactaacatacctattctgtgtctaaagactcatc

SEQ ID NO: 44769 - DNA, 1146 bp, Arabidopsis thaliana landsberg
acatatattgtttggatagataatccctttctataagcttctacgtatgttatgtggttcatatttttcgccaacatgtttttgccgctttatagccaaacgggataacaaaataaatgaagaagcagatattcttttgagataaaggtctctctctgactttgtgaaaatcagtgtgaatggttctatctaacaaaagaaaaaagagattgaaaagatatgtggtgtacaaaaaagccagaccggtgatcctattcatggaccaaccgtattaattatgtctcattcatgattatcttcatattttcttatctttttggattttgagttgtacaagtggtcaaaccatttgggacaattggcgcaatatggtacaagtactattgaatgaaacaagtggttggaacacaaaaacatatgatattgatcactagtacatattgatcatcattgatatctatataacattccaaccaagtacatctttagatatttatctatattaaatttttgtggctactacttggagtaaaaaataaaggaaaagccacagagaaattgtgatcacaagcaacagataacatcaacacaacccatcttttcatctatgatgtgatgagcttaagaccaatagctaattttaaaataataatattcaataaaattctacatgcggacgaaaagagttcatttcaccattatccaaaaaggcatgaaaaacttctcatcaattcaaaaaaaaaaaaaaatcaatgtagagaaaaaaaggaaatagtaaatttgaaaacgtactttggagggattaaattaaactgccaaaaacatattcaactctcgttattcttgtgtcttttcacatgaaagaggtttcatatcaaaagtgctctcatttacaagagaagtgaaaaacagaagaagacgcatcaaagtaagtcttttaagttttttcacagatcctctggaccgttgatgtcctgtaagaacaaaaagcaaaagctgagtctagcgcatttctacaatatctctcctggaataaatttgtgcctaaaacacgttagttaccttattctcgagcacggcattgtcagggatttcaagtttagtcccggcgtttgcctttactgtcactttgcccttgagaacaac

SEQ ID NO: 44770 - DNA, 671 bp, Arabidopsis thaliana landsberg
acaaaagaagcttatttccttaaaaacaaaaatttgcaaaaacaaatgtgaaacttggaacattttttgttccatgataaatcttatcataactttttttttcttcaaatcttatcattactttaccaaaaacaaaccttactattgtaaaacaatcatcatgtaaataatcatcatcgtaacaaagaagagtgtccatagctctatggcttgctactttccattgtgattcagttataaagcaacattcattgtaaaaaacatttttaggtttgaataaattttacattcaattcaagaaaaaatatttaaataaatcgttagtacacgttcgcactaattctcatgattggagatttttaactcttcacttaaccgatatgtatagttctaaacagccaagattaaaataagtaaaacgaacgatttcacaaacaaacaattgaatcggcaaaatcccaaaaaaaaataaaacttacgcatctaaattattaacataacccaaactgccaaacacaaaatacattgtgatttgtgaacgtattcatattttagacagctatattagagtgagaaaaatcatttttcttccggaaaaagctggtttactctttcttaaagtcaataagaacatttgtcctcaaagaaatatcattatttttcaaccatga

SEQ ID NO: 44771 - DNA, 963 bp, Arabidopsis thaliana landsberg
gaaggaggagccaaaaattcaaattggcgctcaagtatcttgggaaattccccctctctctttttatggaaatccctccaaaatacaatatcaaattctcaatcgcagacagcgtttgcgtcaaccatgtcagatctatcgccagaaagattcaaacttgccgttacttctccttcttccataccggaatcttcttcggctttacaattacaccattcctatagtcgcaaacagaaatctctcggacttctttgtaccaagttagtgcctttttactaaacccattttatttatttgttgttgaatttagttctgattagtgttcttcgtaaactcagtttcttagctttgtataatcgagaagggattgaaatggttgggcttgatgatgctgcctcgaaattaggtattgcccactttgtgtttgtgatttttattttcatttctgattttacatcttaatttcttgattggggtttttggggtttatttcaggagtggagagacgaagaatctatgatattgttaatgttctggagagtgttggggtgagacttgtttctccactactttgttttttttcagaatccagaagtgttatgtttgcttaattcgagttttgtctaatttaggttttaacaagaagagcaaagaatcagtatacgtggaaagggttttccgcaattccaggagcattgaaggagctacaagtgagtcttttcatttgttttgtattcggattcaatcccattcaatcccaattgtgaagaaatgtagcgatttgatttgcatattctcataagaagtgttcttgatgtaagaagagggggttaaagacacttttcatcgtttctatgtcaatgaaaatgttaaagtaagtcatttgggatttggttttctttttgatataccttgtgtcctttaagtttgttggtcttcaaggccttctaaatggcctttaaa

SEQ ID NO: 44772 - DNA, 486 bp, Arabidopsis thaliana landsberg
tcgcttttgctcacaccggcctgcacatcacaccgcaaagtctgccagccctgttttcgcataccggcagctttggtatcatggctggcctgctgctgggcaagccggtgggcattaccctggctgtctggctggccgtgctggccggggtatgcaaattgcctccaccgctacgctgggcacatattgcaggtgcagggatgctgggaggcataggctttaccatgtctatttttattaccaatcttgcgtttgatggctgggatgaagttatccagctgtccaaaatggccatcctggccggatcgttaatttcagcgatggcaggctggttgaggctgaaaaaggcattgcctgactacgtaaaaccatgagtatattgtacgggagctacgcaggtcttttgcccgctacttgcgtactatgaattctaacgcgatgcatgcaagtgatttcgctcctcactaactagatgatggttatgag

SEQ ID NO: 44773 - DNA, 547 bp, Arabidopsis thaliana landsberg
atcttaccatcttctcctttgttcgttttacgtatctgactatctgttcactctttacttccttctttttttcttgcatgcaaatatggaatgtcttcatatttgtatttgtcacagtctcacagataaatcatatgtgtatgccatgtgcctacctacctataatcatttttattggtaaaaaaagcttcctattctaatatccttgttaatgctaatgagatggtttagtgatctgttttcataccgaaatattttagttatttaacccaaaacaccaaaggatggtttagtgattcgttttcacaccgaaatagttttatgatcaaaatattttctagggatcagttttaactagaaaactagactagagtctataacgaattagttattttataataaatgatgtgcctatgaaagatttttaattggagatgtataatattggagatgttgtgtggagtgtaaaatatggtaggtgaagcgtaagataagaaaaaatgaggagtgttagaaagaaaagagcaaaagtggggatgcttacacg

SEQ ID NO: 44774 - DNA, 450 bp, Arabidopsis thaliana landsberg
  unsure (1)..(450): unsure at all n locations
tctacgattccttcacctttgcccgcggggtgcttctccggtcgcgtgctgtcggcacaccaaatgattgatttcaactcgcgcttcgagatctcggggccggggctggtcatgccgaggggctgtgaaatcgtccgggagattgtctactacacggtgccggtctccatcgaactgatgcgtcacatggcgtggcgcattctcggctggagccacccgatggagggccaccgtatcgagagccgcggcatctgcacgcgtgggcgcagcgcctatgccaaggaaggcgtgaagtcattcgtggaaaagcggctgcccaatttctaatgcaccggattcaaggacatgccggattacttcccgtggtgggaagagccgaactacnnnnnnnnnnnnnnnnnnnnnnnnnnnnnnnnnnnnnnccctgtgaaaacgtcgatcacggaactg

SEQ ID NO: 44775 - DNA, 1026 bp, Arabidopsis thaliana landsberg
taatgattgggaaatttcagaggcccagattagtccctgctctctagttagaaatcttgttcgtttattaattaatgggcttacatagaaatacatgacgaatatcgtcgcttcactttgataagaagaaatgaagaatctctcaaccctacttaaattccaaaccggatcaaaccaatatttttagtttaaccaaaccgagctagaagtgactgcgcaaaaataaataccatgagccgttttctttttgtggtctatctacaacttaaatgagctaaaatgtacaaatttcatttatgatgaccacaaataaaaacaattaaccaaatatttttcagttatttctcatacactgcaagcttgaaataatgtcccactgtttaaattccttgttatcttgaaatgatgagttgttaaatgttataaattgtgtggtggttgtgaaaatctgtatgtttgagccaaaagcataaagtgcatgatataagaacctagaaaacccacccagaaaatgaaaaaaatggtttgggataggtatttaagcaaaacattcaacgaaattggcatgctcttaactacctcaccaattatatttttttccgcaacatctgcatgcacgtttctcctccattagattcttaatttgttcaaatttattttattacttcaagaccaataaaataataaataaataattggaaaaaattatagtcaacatgcattttctcgttagtcacctacccgaccagtctcactaatattgttgcgtactgattgaggaggaaactctgttttctcgtttttgtattgggcggcaaaaaattcaaaagtcgttgatttgaaaggaggctttatgtttttatggtttttaacataggctttgaatgactagttaattagtcaaacgttcgaaaactatccgtatatgaatggtgttgttttaataaatggtattaagtcccatgtattgggtgatgtcacaagtcatgttccatggcctggctactgatgaccaatctttaattg

SEQ ID NO: 44776 - DNA, 596 bp, Arabidopsis thaliana landsberg
taataatatttcatgtaaatgggcctgtactaagatttcttgtgcaagatccaacaccaacaattcttgatgagaattaatcaaacaatcagagaaaacatacattgacctaattaataccaacattagagaccacttcgtatatctatcatcaaatacgaggagagatcaaaccaaattgagaggcatattgtttcctgtgttattctgattttaattttggctttgattggtggaaaaaaataactcaacgtaatcacttttttatgcttagacatgcagttttagtgtatactttaggattcactaattactgtactaattaaaaataatgatcgaatcacgcctgtctttaataggtaacaaagtgttgatcgtggctcaaagattctgcatatattttcttaattactttagtaaacaaaaaattcactattctcctctctttgtaagtttttcgagaaaagctgagcaataaaggacaacatgtgtgtccccgaaaagttacaatttttttcctttcttttttaaattctctttaaatccaaaaactttcactttttacatattaaccccacttgcttgctctctttctt

SEQ ID NO: 44777 - DNA, 534 bp, Arabidopsis thaliana landsberg
aagccattcatgtccctctaccaaatccattgtctaagaaatgagaagtatgagcctgtaaatgtgaacgatcaagatcttgtgagtgagattttaggagatgtcttggctggaatttagtctgtacaagagaaaatttaaacatgatctaatacaaagaaacccgaaccagatgatgcaataaaactttacgattgatttataaacctctttttgtgataactttatttcttatgcagataatatgagtctatacttacaaaatttataattaatcattcaacactgatgattttaagtctcagtaagaatttataatttttttgaaatttaacttgatttttttttctatttcacagttttcatatggacaagcaattaaattacatcaaacatttaggggactattttttgcccttcaaatgctgtttcacttaaactaatgaaattttcattttaaagtcagtttctttcaaagtcaaaacttataaatgatagttatgaagtgaggaattgtcatcttgcggctcgacg

SEQ ID NO: 44778 - DNA, 620 bp, Arabidopsis thaliana landsberg
ctaaaggaaacttttgtactgccacacttcttgagtcatgccctatttcatatgtttttttaagactagtttttatatatagagttaataattttgtaatatacaatgtataaaatggactagacaaccacttatactattctacatacgcatgacaaaggtggcagaagtttggcgaattcatctatatagatttaaattctgaatacccaactagtatttgttaaacatacattattcgatgcaccaaccgtaattaagctaatgaataacatgaatataaatcttcttatatttattcgtcggctatgtatcaaatgtttaaaacactaataattggtccagtcgtgtaaacaagacaagagttcttcatttcgtccaaaaaagaacaaaaaagacagagttcttcaaagttagaagtctcttaacactaatcattacgaaaaatttctagaaattaaaccacgtggagaagtttgtttctcttgtcagtttcttgtccatgagaacataatttattacgtttgaaaaggttggaaagcccattaaagaaaatatactccatctatcatgcttgtcttgaatgagcttagtatatatagttcgtggggtaaactaaa

SEQ ID NO: 44779 - DNA, 1022 bp, Arabidopsis thaliana landsberg
tccgataggtctcaatggtgaacagcctttgggcgatggatcagcgtttgcaatggtgagacgaagaaagctatcgggcttttcatctttatggttgctgattatgttacaatgttgttaattgatgagtgtttatttgaagcatgcatttgcgggccgattttgttgactgtaactctggctcagtgatgttggcgaatttattactgacctgtctctgtatcacgaccttgttcttttgactgagttttggttactatcattggttgaaatgatgaggaaaacactcttgtgcttctttgctctactattgttggcgtctaagagtactcaagattcatgcatttccctttttctgccattgctttatatattttcacacatgatgtttctcaatttcacacaggatattccagtggcttaaacggtgtctctgtggagacacaaacataactattgatcaggcaatagctttggttgatgaagagatcgccaacttgcgaaaattggagcgagggtatcaaactaatatccgcaacgcagaaaatgccagagatcaaactaatgtccagataggtactatttctactcgtctagtcacttcaatattgtttcttaatattgttggttaattctcttctgttgttttatcgcagaaagggacagcttcaacgatactattcgacttttacaagcagagtgtaatctcatcaacctagagatcccaaccctcaatgaagaggtaaatctttatatgtattttggttttgacggctctcaaaccatatcatttttatttatttatatgattcttctaaatgttattattatattggattttgttacagaaatttgcgattacaaggttgaaatcagcaaaacatttctttggtgctgttagttcggggaacaagaccagagaaagatcccaccagtggtaagagtttttctttaaatatgtacctagattatttcttttttaatttcagaaaaaatgtttttaatactgatttttttttttt

SEQ ID NO: 44780 - DNA, 519 bp, Arabidopsis thaliana landsberg
gctaatgattctgtatgctttgatagttttctggatcttctagttttgttgttgatccccctatatatgatactgaatcgaatcccaaggaatctatattcgacaccgaagataaggcccgcaacaaggagacaaagcttgttgctacattattcattacctaacagatgagcgttactgttttttaaagttttatttataggatacggccagtccatcggatggagaaaaagaaatgctcgagcctctagtccttagtgactcatcccctgcaaggccgagagacctaaccttattggatcaagaagaggctggattggtgtctacctttattaataggccttctattgacattttcaaaattttgccctctaaagatgatcctgactggccgtccttccaacagattctttccaaatttccagacacgtaagtttcacttccccctttcattttctttataaatatcttaatagtaggatctaaatcctttatatagggagcatctttgtcctgatg

SEQ ID NO: 44781 - DNA, 694 bp, Arabidopsis thaliana landsberg
atggtgctacatgtgttcccatcctcttcgtcacttacttctgatagacccggattgggtttgttcaaacaatgatagtttaattcattgatctttcgatcgattgtttacagagaaaccaaagacaaagagaatgaatacaagcaagctattaaagaaataggccttaaacgagatactaattatgaggcccattaggccttatacttagttgaagaaatttgaggaagaagataaatgttttttttttttgatgatctttcgataaatgctttcaaagaacaagagataaatacaaagaggatgcactattttgggcttaaaagataaactaacgacgaggcccacccgggcccgataatctcattagtatagactatactgtatagtattagttagatcattattccgccacacttttaaacaatgtcgttttctgtttttgatagtattaggcctctaacgtgatgactaaatatcttattgggccaactttaatattgagcccaaaatatctatgaagctttgatatctaaatgggaaaaaatgtgcgaaccgactaaaccaaacaactagaaggacatgtggcaattgacaagtctttaaagcaaaacggcagccaagataaagctgaaacagtaaaacgacacgataagatggggaaagagatttttattgggtgggagaaggtgtg

SEQ ID NO: 44782 - DNA, 658 bp, Arabidopsis thaliana landsberg
tcttgtcttcctctttgtctttaatgtttaccttattatatctacatacaggttggaacagttgcagctctgaatttctgtttggctctgaggcccccccttctaaaagtgactccagagttggttaattttctgcaagaagcattacaaattgctgaggctgatgaaactgtatgggctgtgaagttgatgaatcctaaagtgcttacatcattgaacagacttcgaacagcttgtattgagcttctctgcactactatggcgtggactgatttccgaacgcaaactcacaatgaactacgtgccaaaataatttccatgttcttcaagtctctaacatgtagagcaccagaaattgtggcagttgctaaggagggtttaagacaggtttgtagttgtcttttatcttaatctggattcttgcatgcacatataatttgaagatttttgagatttttggtgaagaaaatagatattcctattcgtactagtctggctagttttctttctggggagtaattgatatgtgcaaccatggtatagctacatgcaatacttgcttgtgaaatatgaggaacttgctcaacggagtgatcataggaatctattcttggaatctatgacgttaattttttatccctataattttttttggttt

SEQ ID NO: 44783 - DNA, 541 bp, Arabidopsis thaliana landsberg
  unsure (1)..(541): unsure at all n locations
gatgtgactgtttgtgattaagggcatattactatatcttatttatagacttatttgaaataagaagaattggagtaattcatacttcggcaaaaatatttaacaaacaagaaacaaatttaatcatgaaaatgtaactaatgtggaacaatgtccaaggaaattggaaattgcaagtggaaatggatcatcattcataaacaaaatgaatcatcatttaaatggttcacttgaggtgccatcagagctaagatggtagagtaagagctaatttgagatctttgtggagagaagcgagagaaattgatgtgtgagtgagagagagagagtacgattaatgggcttagtttggatcaatattggataatgttttagtttgagaatgggaagactaagctatatcattaactacaagactacaattccattttattattatctcaagtggccttgtctacatatgagtttcataaagcccgtaatgtatctatgtaaattttcaagcccataagctgcattctctattttngatttgncgaat

SEQ ID NO: 44784 - DNA, 760 bp, Arabidopsis thaliana landsberg
atcaagaaacaaaaatctctctctgtctttctcaaatataaaactcaccaatcaattcttcatcttctggttctttttaccattctttgcaatctccggtgatgatgattataaaaatctgatctttaaaggttgtgcaaatcagaaatctccagacccaactggtgttttctctcagaatctcaaaaacttattcacttctttagtttctcaatcatcacaaagctctttcgcttccgtaacctccggaactgataacaccaccgccgtgatcggtgtttttcagtgccgtggcgatctccaaaacgctcagtgttacgattgcgtctccaaaatccctaaactcgtttctaaactctgcggtggtggcggagatgacggtaatgtggtggcggctcgtgtgcacctcgctggatgttatatccggtatgaaagttcaggattccggcaaacttccggtacggagatgttgttccgtgtctgtgggaaaaaagattctaacgatcctgggtttgtcgggaaaagggagacggcgtttggtatggcggagaacggcgtgaaaactggatcatccggtggcggaggagggttttacgcggggcagtatgagtcggtgtatgtgttgggacagtgtgagggtagtttgggaaattcagattgtggggaatgtgtgaaagatggatttgagaaagcaaagagtgagtgtggagagtcgaactcgggacaagtttaccttcagaagtgcttcgttagctatagt

SEQ ID NO: 44785 - DNA, 457 bp, Arabidopsis thaliana landsberg
acacttgatatcctaggctgatcgagtgatgtgaactgtgctgatgctgcattgttgactcatgatccaagattaaatcgcgtatgggcttcatgaaccttccttccgtggtaagttctttcgttcttcagggcctttttgtgtggccatgatgtttaattcgacctacccagaataatccaatttttgacggaggtgtcaaaaaatctgcatcatatagacgatttcaggacctcagtaggttaaaacttttacgtgttgttgtgcgctggtattttaatcaaaagctgcagccagagcggctgaggctcggttataacaagctgaaatccttggtctaatatactcttttgaaggctgatcaggctcagatcgttagagttttgtttgaggtcatgtggacctaaattggaggaaaaactgacataactattatcggagtgctggaagattttga

SEQ ID NO: 44786 - DNA, 249 bp, Arabidopsis thaliana landsberg
cgaatcatcgaacagtacggaggcaacatcaccggcgatgtctcctgctcaccggaaatagctcggttgtatcggaggtttgtccaccgataaacggactcagaacgtagctgccaaagcctcggcacagtgattagctaaggtcatggcctcacagaacaaagacaacggagacgaagatgatgaagatgaagattatgatctaagtttcattattttatctgcttttttaaaacctgctcgttatgc

SEQ ID NO: 44787 - DNA, 499 bp, Arabidopsis thaliana landsberg
attcataattagagttgaagtaagatagtttttgttatctttaattaactgattttcataaaatgctttttagttataaacatgaatttgattaactcgatcgtatacttaaaattcgtttcaatcaatttcaaagcaacgactacaagtaaaaggcaatatttagaatttaaactttggtatacgatctgagtttctatctactgactactgtatttgtatataagggtgaattagataaatatgaacatgacaatatgtttatgtacataagtgacgaaacagctgttatcaagcattcatatatttacgtttccaaatgacagtcacatatttgcatgttagatatatatgccacaaaacaaggtccaaccacatgtatttttttactgatcgatcgagtattacgatagtacatacctaattttcttcaagtcaattctagctttgctatttaattgttcaacatgccgttacgagcttctttcgaggtttttta

SEQ ID NO: 44788 - DNA, 729 bp, Arabidopsis thaliana landsberg
gtacgcctatatccttatttgataatgtcggtccgatactgctaatatttttaggtatagtttcacactatcaacaaaaaaaaaaagtaggtctagcacatgctgtcaaaatttatatcgcgctgtagattatgtaacgatcgataagtgcttttcttaatacagagtcggcgtatcaatctctaatagaggttaatttttgtacagtatgaatgtatgatcagatcttcgtatgataacagcaattgggcccaaatatggacagtttggttaagcccacggaaaaatgacttgaataagaaaaaaacttgaaatatggaattattaccggctctcaaagcctaattgtaattgggaaagaaatcatgtaaacatatttgtaaggatgtagaaaacccatacgttcctttaccagtcacacccaacaaaaataatattagaagttctagaagactttctttttactgatgttcttagtttcttatataaaatgatttttttttataaaaaatatgactataaattttgtttaatgtacttttcataattagaaaaacttcaatctaatccaaattatgtaaaattaaatgtaagataaattagtttaatcaaattcaataactgtgtataacgatcaaaccactcttatcatatcaaatttaattttcacttcttttttatttatttaaagaaaataaacataatttcgtgcgggtattatgtataact

SEQ ID NO: 44789 - DNA, 723 bp, Arabidopsis thaliana landsberg
gcaagcatcactccatccggtttactatccgctccaaggtttggttttctcacacaatgctaaaaggacgattcattaaaatgttgcagatgaaggggaatgtatgtttgggaatcttgaatggcacagaaataggtctccagaacctaaacctcatcggcggtacagtctttatattacatacattggcaatttccttatcttggtttcgagattaaatcaatgtttctcctttctattgaacagatatatcgatgcaagatcagatgataatctacgataacgagaaacaatcaatcgggtggatgccagtggattgcgatgaacttgcttcactaaaagcagctcaagtatatgaatactgagaatgttatatatagttgggacaagcaagagctcatagttgtaattagatatttgtatgtactgattggatcaaatcctatgacaattgagttacatgatgatacttatattacaaagtgactttaaactttttaagtagaaatttagttttgactgttgtgaagtttcttcttactcgaaaaaatcacaactttaccacaaatatctccgttgccggcgaaatcactttgctcactctctcaactttgaaaggagactcaagtttctcactttctctcttccatggctttctcatactctttaacttctccgtcaccaaattcgactctctcctattccagtacccatcaatttctc

SEQ ID NO: 44790 - DNA, 553 bp, Arabidopsis thaliana landsberg
tagtttcctatatcacaattatcacttatgatcccaaggattgttatttggaatctcggatggtcatttttttttgacattttcttcataccatacttagcatattagaggatacgatgggatccgattccgatttgtaaagtggaccatatttgtttatcgagttattagcatagtcatgagatcacacatcaatgtaaaaacaataaagaatgttaattatgtcgtatgtcattgaagttgtactattgacttagatctgtttacctgaatttatagtctaaatagttttgcagtattttcaatcttttgataaaaaacaaaaataaattgaaactatttttttcatacaaactatatagttgagcaactttgttacgtcaaggcagagacacatcttattatcagtttttttcaacatctgaaaatttaccactaaacttcaatctctatactagtagtttctgtactaatgacaaagatttaaacgacgattattttgaccagtgtttgaagcatatgattattattctcttttgtctccaaaaacata

SEQ ID NO: 44791 - DNA, 563 bp, Arabidopsis thaliana landsberg
atttaaaaaaaaaactaatcttagctaaagaatattattatttaagcacgtacaaaaaaatcaatatataatctataagttttatattaatcctatattaatctagagtagtctagtgatctaactcttctgtatcatcccatttcattagcttaattagattaagatttgaattcttctaacatactaaagcactctttaagtaaaacaaaaacagtgcactgtgcacagaaaccaaatgtgtgtctgtagcaatgctattagaccaatacatcttaccgagttaaagtaaaaactttcaaaagattcatatgaacaaaataaatgaaagtatgtatgaaaaggagatttagtaatgagagcaagctgtgtggatctttaaaagaagtatggtgatttgtctaaaatagaaagggaatagaaacttcaacaatcgttttcttgagattgtttttgatattagacttttcgaattttttggcagaaatgattctttcaagcattttttatattttcttggttttgtcttgggttcatacggtaccggggcttaaaacgatttt

SEQ ID NO: 44792 - DNA, 612 bp, Arabidopsis thaliana landsberg
  unsure (1)..(612): unsure at all n locations
gcctcacttatctcccacaaagcttcgttatctccgttgggatggataccctttaaagactatgccttcaagattttgtcctgagtttcttgttgaactttgtatgagtaatagcaatcttgaaaaactttgggatgggatccaggtaatttctctataaaaactccagataagttttctttctgctatttgcgattggacgagaagactaaatacatctgatgtgaaaaatttcagcctctgaggaacttgaagaagatggatctttctcgctgtaaataccttgtcgaagttccagacctctcaaaagccacaaatctggaggaactaaacctttcctattgccaaagcttggttgaggttactccatctatcaagaacctaaagggactttcttgcttctacttgactaattgcatccaactcaaggacattccgattggaataactttgaagtcgcttgaaacagtgggaatgagtggatgctcaagcctaaagcattttccagaaatttcttggaatactagaagactctatctgagcagtacaaagatagaggaatttccatcatcaatcagccgtctctcttgtctggttaaatnggatatgtca

SEQ ID NO: 44793 - DNA, 765 bp, Arabidopsis thaliana landsberg
  unsure (1)..(765): unsure at all n locations
gtacagaggatgttcctccttcttcgttgcagcttttgagagtatccaaagggattcagaaattgaatgttgcaattgagtcattgtctaaaggttttagctttgaggcggtgtcaaggcctgaggatatagcgaaagatctgttgagaggagctcttgatttggaagagtctttagctatgttaagtagtattcaagaagatgatagtaagcggaaaccgatgattcggaacgatggaagaagcgatttgcggtttcaaagatcgatgtctgatagattcggagagcggattgagaaacggatgatggttcaagagaatgtagcgtctaaggattgttatgaagagttaaggaaagtgattagagagagttttcttaggcagaatcttgtttcacaaacaactactatagagactaagaaacgagttgttagaagtgattttgcttcctcttctggagctgtgtcgtcgtcaactagctcgagccaatcttcaatggtttctggctctactaagtcctctgcttcgtctgatgttccacagagagctccaagtttgattgctaggcttatgggtttggatgtatcaactcaagaaccgaggaaaagctcggtgaatcatatcgataagccggatattttaaagctgtcatcagaaagacangagaaggtgaagaagaatagtaaggagagtcctgaaattgtgagatgcaactctacaagagaagctgctttacagtctttgcctgaagagactncgagcgaga

SEQ ID NO: 44794 - DNA, 673 bp, Arabidopsis thaliana landsberg
gaaaataatatcgttttataacataagtaaacaatcaacaagcaattgttggccgtaaaagatttatcgatggggttgttgaaaccttttttaattcataaacttgtaaaggtttaatatggcaaagttggtgaaacccaagtgggactatctaacattgcacctaagcatgctgaattgatcctttctacatttcttttcatctgtcttgactcttgattaacgtttgaaaatctttttttaactttgttgtcaaatatgattagcgactttatttttaccttttttttttatcatgacctatatctcgttctaaattacacctttaattagcaaaatggtaggaatatgcgaaaaaatacataactaaaaaatggcaaatttctttctaccagtttcatgccatatcgaaaagagaatggcatgtttgtctaaattcacctatcagatcaattgtttctcaaacctttacgtacaatttgttttcctaacgttaacatagctagcatgcgcagtgcgcacgatgatctgagaaaacaaaaaagatttggtgggattttaactttgattaatggataagatatatcgttcaattttataaaataaaattataagaaattcaaccatttgtagcatatgattaacgtatatggaaatctctaaaatggaagaa

SEQ ID NO: 44795 - DNA, 644 bp, Arabidopsis thaliana landsberg
  unsure (1)..(644): unsure at all n locations
aattgttttttttctattcctttctctcttctgagtaatttaagttctacactttttctctatttccaaaaaaatagtttacttaagttatatttttatgtagcaaaataattcagaaatatgagatcaacaaaaaaaaaacgaatgattattatctcacacaacatagttttcggttttatgctatatttggagtgaaaaatgtgttattttcattttgcgtcactcagttttttttttggatatggtgggcgagatttagataaatttagtgatcgtcattccaagagtttacaataaatgtatttgttattgagaacagattaaaaaaaaaaaactaatgtaaggcttacaaaataatatgatcgttgtgtgttacaaaaataatgtatgaacactgatcgaagatcaaaaacatatatatttctcatcagatcctatacacctaatagatctatactacataaagttattaaatactcctatagtaaatatatattacatatatgggcaaagtgatagatgaaaactataggagatctaggtagtaaattgacaaatgagtcatagacgtgaagtccagctaagagtgttgacatttggtcacaaatntcagtatttttttgaatcaaaacaaatttcag

SEQ ID NO: 44796 - DNA, 745 bp, Arabidopsis thaliana landsberg
cattcgaaatatcgatgttcttcagtataaattaatatatgagtgatactcgtggaaaattattatgtttttttcctcagccgtaaaatgtgaaccactttagatttggtcaacttgctatacgcttaacgacgactaccagaaccaccatccaaagtccaaattaacaaattgtgaaatatatagatgtaagtaaattaggggattaagtatggattaaaaggtttagcaaaggataatgaaagattggcgactaggcatgtggtgcgatgactacgcacatgggtgctcatcatgtcctccatctttcacgttttgttatttactttttttagcttaataaattatacttatgattgggtcaaaaattaggagaaaaaatatctctcaagtacaaaatttatattttcataaatgtatatagtacaattaaaagtcgcgagagaaagttgcaaacatgatcaaataacatgtttatgcattagccaatttaatgaaaaagataacaagatcgtacaatcgaaattctcaacctcttacaaagcatatacaataacaagttaaaataagactttttgagctttatcagcttatattctaaaaataaatatatcttggtataatttccaaagttttgtagtatcattaagaaatttttgatcaggtttccaattaattgattccagtgattacaaaattatattaatacagattttttttttttttgtttttcagttacaaaata

SEQ ID NO: 44797 - DNA, 734 bp, Arabidopsis thaliana landsberg
gcatgaatgatgaaacgacaattaccaaagcaaatcattttagcattacaattaagaatctatccaaaactttacttaaaatagataattctctataacacgttttatgaaactaaaatgggcgtgaatttaatagtagcatataagggtaatactgtcttactccgaaatgtaacaaaatttcagattttgcttttacaaaaatgtcccccaaaacaaaatcatgtaaaggaaacggcacgagtcgcgacgaaacgccaccagaacaaaaacgctactgaacggaataatataaagctcaggagaggactaacgtaacggccttgtttcgcgattcttgtcatcatcttctttctttttttctctccctctctctctttctttctttcgtcgtttagtgcgtttgtgtttcctttgaggtatcagagcaaaaatggcgactgttcatgctgcattacatgcggcggatgcttcttcttcgggatcgagttctccagtgacggcgtcgttatatgtcggagacttacacccttccgtcaccgaaggtatactctacgacgcgttcgccgagttcaagagcttaacttctgttcgcctttggaaagacccttcgtctggtcgctctctttgttatggctacgctaactttttttcgcgtcaagacggtatactctttttccataccttcgatttcgtttggattttaagttattgggaggaaattcgttgattat

SEQ ID NO: 44798 - DNA, 695 bp, Arabidopsis thaliana landsberg
tgatagttgttgatcgggttttcttttggcagatgacatggatcttcctaaaccagattacgaaatttcaaaagaagattggtatgtgaggaacgaagacagcagcaaaaaaataagatgagaagaacgaaaacacaattggaattgtgttcatttgctttttaatcatatacataacctgccttaaaagcatattattgtagctgtttgaactttaattttttgtttcggtcggtgattggtccggtgaattttaaattttcttctttggtggaagttaaagacacataaccagagatttcaaaattttcatacgaactaaaaaaattctctgaatgaggaaacaataaatatatgaaacattgatgatggggaaatatttgaagtgcttgaagaaaagcttgtttcaactctaagaaaatgtcaagtgcagggttcccaaataattgtgtgacaagaacgtttccccaaaactctgccgataacaattcagcaaccacctctaggctccaggtaagaaacatgtctactttgcaacaacttctttgtgagctttgaatgataaaatcacattccaagccaaagccactacgtttgaagcaagtacctgcaataattcatatataagacatcgattcatcctcaaagccaaagaaaatcttgctaagcatactagctagaagctaatgtcattc

SEQ ID NO: 44799 - DNA, 633 bp, Arabidopsis thaliana landsberg
tctcaggtagttataataaagtctcccaaaccaacgtcgccacgacgatgcggtaaatctttaatcgctctcgcaagatctccagctcctttcgtatcgaaaccgtgatcaacaatgtattcagcagcagctacacgttgagttgtgtttaaaagacgaatctcgtagagaagctcggctccatttgtgtcaaacgcagctataagctccggtttggcaccggattgaactaaagagtctcgaacttgcgcgccgacgatgagactgttctgttcgacaccggagattccggtgagttcttcgattgatggaggagtgaatccttcagtgtataaggaggaaatgagtggagcgtattcgaaccagagaccgagacgatcagcgaggacttcgatttttccggcggtgtcgagtgatcggaactttggagggattggtgatggtggtggacggaatggttgatagagttgttgttttggtggagcttgacggtttgaagcggggattaaagcggaggtgatggtggtgaagggttttcgtaaacgggtcgggtttgaagaatccatgggttctgattgtgtgaaatggaggaatgagagttgtgcattagagaagcatggtgtgttagagagt

SEQ ID NO: 44800 - DNA, 595 bp, Arabidopsis thaliana landsberg
tctcttcagtcatctacccatcaaaccaccctgattactccccccaaatcatttcttttatattccattcatctaacaattagtttgctaccaaatctcctcacgaaactggtgacaatcggtacattttaatttgctctctgcctatttgcaaaggatacaaaaaacagtatgaaaattcaataacattggttttcccccaagataaaagatcagccaaaaagatgctcccagagatttggaatcttaccagtatatgcgttcgcttgggtcaagtttgcacctcttgatattagcttctgtcacagggtgtcctagaataaaaaaggttcgtgagtggagaatagaaagaggaagaaataagaggatagcacaagtgaagacaaagagccttacctctaattgttgattcaatctctagttcacggttctgctccgtataaatatccttaagaactgggagaactttgtctaacagatactgcagctgcttaggcttgacatctacatctttttcacataagaattgagattcgcaaaaaaaaaaaaaaaaaaatcatattgaaggagacatttcatctcagtagattcacaa

SEQ ID NO: 44801 - DNA, 732 bp, Arabidopsis thaliana landsberg
acagtgatccattattactttattagtgaagacccatcattagtgcacaagatccattatactatcaagtatcaacaaaaaatatttctattttagaggctaatattttgtttaggccatttgcgaaatattttttctattctaaaaaaaaaaacgtaaaatgtttattaaattcagttgccgctttatacttgttacaaagatttttgtttttcaaaaaggaaaatcttacaaagtcaaaaagaacctatggtatattttgaaaacaaagtttattttgggtgttatgttatgatattcctcttcttttttatttggttcacaagatttacagcaaatgaagtgtacataacattgaactgtacttaaggaattgattttttcttatatttttcttagtgcaaatataaatgccgccgaaactggtgggaatgaatgaaaagaaaactcaagaaactctctcaatagtcatcatagtctttggttgtggctcactcctacatgaaatatcgttatcgtccttctcatatttattactttatttcctcaaaactacaaaataatgctatcgttttttgttttggcaccaccaaataaagatactttgaaaatcataaatgtcttttgtattattcagccaagtgaagatatcaaataaatgtttctaacttcattttaacaaatgtttccaagtttacttggccttttctggtaataatatgattccctcct

SEQ ID NO: 44802 - DNA, 1321 bp, Arabidopsis thaliana landsberg
gaaaaacggaaaatagaactaaattagaaagtgaaacgacaataggtttgaaagaaatgggtcaccattggatcttctttctcctaaacctgaaccctctttagttgattacaaagacaaatcaaaaccaaaccttaaactgacttcattcagacccaccaatcccggtctccataaccggttaaaatggtcggtggtgaccggtggcctgaacgtttttaatgagccacggaattgcccgagactcatcacaactctacagactcttctctcttatctatctgaaactactctaacccacaaatgtctctgttcaaactaacacacacacacacatattttaaacacagcttacaatttcttttcttcaactctctctgtattgtttggttatacattttgtagacaaagggctcaatggttgtctttaaggtctccaagtgcttacagatgtctctggggcacaaactgcttcaacagtcaaccgtttcagcacatttggacacgggtctttcccgaaattgctgttggatatcgtcactgcgcatctcgctttccctacacacttctgcatatatcaaaacacaccgtggttagaaaaaaaaagaagaagagtctgattccagttttagctgtgtaaagattatatcttttaccctctctaagatagcgtatgaggtagctgcgtgacactctccttgttggtaactcccgcaggttcctaaaggagttccaaagcttgcaaatttgatggatgcaattgcttgacctggactacatttcaaatgaaccttgggtctatgaaatgtctgtccctttccggagctttcgatttgccagttcttgatattcgggtggtattcagaaacttcagcacaaactcctgatactgatcttttgaccaaagagacagttgatgggtttccaccaagctcctcgaatatgaccaacagattttggctcggctttaaccaagctctcggcacatggtaccacctttgtgtaggttgaccacagccggtttggcatttgttcggtttatatgttccagtgtagctacaatgactgcagtcaccagtcgcaaatgctgtccagtatcttccgatgctctcaccgttcacccaaatctgaccttttcccattccttccatgtccaaagcaagcggctcatttccttcgggcgcatcaaaataagtctgaaataaaacaaaatatactcgttagttcagattcttaattagaaaaaaagctttgttgagttgtgttggattcaatcaaaccttgtgccatgtcaaaggctgaggcttttgtcagtaagacg

SEQ ID NO: 44803 - DNA, 422 bp, Arabidopsis thaliana landsberg
ctcgatggagattgtgtaagagtttacttcagcctctgcaatttttctaaagaacaagaataataagaaaacagacaaacatcataacggtataaagtgataaagagtttgtaactttatgaataccttccgagggcattatctgcaacagacaggaactttaaaggtttctccagcatcgacagggtatcaagaaactcaataactccacaacatgatagctcacagttctccaaattcagatcggctaaacgagaatccggattctttgtgaagtaagatattaagcttctgtaccatccaagaaaagcatgtaagagaaatgcaactttcatgattttctcgaagactacaaaagcaggaacttagacgacacacctgatcccactgtcttaatggggttcccgctcaggtcaagagat

SEQ ID NO: 44804 - DNA, 395 bp, Arabidopsis thaliana landsberg
ctttgttttggcgtattacatttttggaacttctgtaaccggcaaagcatgtaaaactactaattaactttcatttaactcaagtatcattagtttgaataggaacttgtaagaacatcaccaagctttaacgcaaatcttagattctagaattacatgaaaacgtggaagcaaagatttcaagttgttaacctgattcttgcaatagacaccacaggggcagtaaccaggagtacattcagtggatggtaatgacattgaggcatctctcaccacaagcactgtcagggtctgcgaaatcaaacttgcattcgcagatagatatatcttcttccttttgtttcttgtgcctatagaagcgttaaacaaatgtgtacttaacaacaacgcatact

SEQ ID NO: 44805 - DNA, 590 bp, Arabidopsis thaliana landsberg
tcaacccttttctccggttacagctacaccgccgttttctctctccgccgtcttttctcttcttctccgactggtaaaaattctctctccagagctttggtctcccgttatatatatatgctcgtctacattcttcaattgcttcttgagttcttagctcatatcactcacatgttgttctctgtaaattcaattccctaatttcaattggaattttctctgttggtgaaaaggctctgctatttgattaggttgatgcaaagtagttcgatttcgaaactctccttttaacttccatagactatttaatggaaaagatgatgataacaagttactttactgattatagaatcacattatgcttatgctaatgttttttttttggtatgttcatgtagaatctggggaggtgaatttcggagttgagaaagagagattagtgtgtaatggcgattgataatggcaagcttcaagaagaagaagcctcatctgttagtcgtttctataacattattttgggttgggactattaacagcttactaaagaagatgaggtacttcatcatcatacaactatgcgttttcatcgg

SEQ ID NO: 44806 - DNA, 743 bp, Arabidopsis thaliana landsberg
gagagatgaggattgtggtttctttggcttactaaatatggaagatgatcaaattcatatgggactgcttcattatccctatcgggtttcttggaatcagtttttgccaaagtttcgaacacccgtgtgaatgttgagatgtctccttcaacagcatctagctgttcttgaagcttgattgctcttgttcttgttgtctttgcttcccattgagtcttctcaagggctgcttgcttgtcagcaagtttgatctagtgaagacagtgaaaggaagcaattaaaatgtgaggtacgtgtagaagcaaactgaatattctccattttgtttaaaaccagattcaaagtaaacacaaaggagaaatctggagacacataagaggaaaaaggtttacctttgtgtccgataattgtaactgcatagacttgatcaacatatccttctcagcaaccaatcgatttgttgcttcaagcttttcttgtatctcgtttacctgattctttgacatcttcattgactttaaaacctcttctttctccgataattttgtctgcaagtcattcacttgctctcttagtctactcatttcttccttttctgcaccagccaaagcctttgcgttttcatcatcttccctagaattgttcataacatcgtcatttccctcttggtctctcttctttctttctgggactggttgagaagcatttctttcctttggatcaaatacatgcaaatacaagtg

SEQ ID NO: 44807 - DNA, 760 bp, Arabidopsis thaliana landsberg
  unsure (1)..(760): unsure at all n locations
aacccttgttataattactcaactcgaccgcccatctattcagctgcatatatttatagttgacaccctccatcgtgactgttctattcacgaatcaggggaatgaaaacaatcactaaataggtcagaattgtactagctagttctaaattaaaacattacaaattgtaataactgaactgttcgtacgtaatctatttgatctcaagagccttggactagtctcaaagctgattaccttcatttaatgaaccattaatagttttggactcacgatcaccaatagatttttcaccattaagtttgctatatcaaatatctttcttgaagacttaatctaggtgaaaaaaaaccctaatagatctctactttattccacattgagaaaaatctcgtatagctagatataaatttcgaaagaactaattatcgatctaaaaaatagcaaaattatactgtttataattttctatttagtgatcatttaaaatatactagcatgtatgaacttgatatatacgaataataatgctttcaatttgtttgtttataaagaaaaacatggtccatctttttggttgggaatattcaagtaaaagaacattatcatattattatatatacagaaatatattttaccttattataaagatcacactaatcgaaaagatgagataattacaaattcgtgtaatttacaaatatagcanttggttcatagaagaggcatctaaatctaataagatatctatctaaactc

SEQ ID NO: 44808 - DNA, 697 bp, Arabidopsis thaliana landsberg
agagggatgctatcgaaaacgaagctcttgagagaaaccaccttcaacgcaatttctcttcttcttcttcagtgccaattcccagcgaggtttatccgtgatccctctttctctctctgggcgattatgtggcgggagttccggcgatttcggatggcttagagtgtttgtgaatggacaattttgcttctaataagcccttatatgtgtgtgttcttattctcaggttcatacttcgtctcaaggagccagaatcttaccttcaactctcgcccctaaaccgaacactggtctgttgatttttccagtaccattcatctatgtattttttgcttactctttgtttttttgggttgttcacgtttactgtattaattgtgagtgctagtctctgttccaatagatgctggctctaagccacaagagcaaaaggtctctgtcaaaattttgcttcattctagtggagttcttgctgcaaagttcccatataaccaggtaagataacagaagtcacaagtctttgtggggaaatacttggtagttaagtctttggcacttctttttccaggtggtggtggatgctgtgcgtaaaatccctaaggccatttggaatgctaaacaaaggtttgcctttccatactcttcatataaatgactcatttgtgtgaagagttctttcttatttctaacatggttt

SEQ ID NO: 44809 - DNA, 760 bp, Arabidopsis thaliana landsberg
agaaaaaaatgatagtgaaaagcaaacataataataaaaaatacattggttttactaatcatgtgtgatatcaaccttgggttcatggggtcaagaattcactcaaaacgttactaaatgtaaaccaaacatattaattattattatatataaacgtcagggctagaaaataattaaataaaaagacaaaaaaagaaaatagtctttttgtgttaaaagggtcagaaaagtacaagaagtcacattttatgtaggtgaaatggattgttctgatagattttcatagatcttagagttttataatgtcggagttaactaaaagtaaaatgttgggaagaaaaaagaaagatagattattactcagtaaaccaaagtgattagaattccaatcacacacacacaatcattctgaaggacaagactctaaaattgatcatccatataaaaatgcaaaaaattgaacatcatgctaaaatgttgatttggttaatagaacaattacacaaaatggcctttaaaattcatattattaaggaaaactaaccttttgtaaaacccaaatagacccaacttttccatttgttgggcctcttcttttttggttcttagagggaaggggttagaggggatttgcttttttttttggttctaaagggtataggggggcccgcggaaagggggatgtggtttttttttggtcttaaagagaaaaaaggtttcttgggggggggttctctgcgtatttgttttcttcattctt

SEQ ID NO: 44810 - DNA, 521 bp, Arabidopsis thaliana landsberg
tcaaaatggtgtcgtctgaaccgtcagattaaagattgcaacacacgacaatcacacatcatcttttacacaatcaaatcccttcgatcgaagctcattggattatattttttttccttcacattaaagacaaaaaaaaaagcgaaagaaaagaagcaatcgtagagagtgattctgggcatatgcttggagtatctctccttatccctccttggggttctcttcaaaaccccttcttccttctccttctgtaaccatcttcttcaccatggctaatcctcaagcttctccaattctccatcacccccaaaatcacctctctctcttccactttcgcactacaacatctcctcgctccttcagctctctgcatttcagaaaaccactcctctttctctcttcttcttcgacattttcctcgaaattacagcagagcgagcagcaatgtaataatcaccaggtgagacacgtgtccaccgtacctgtcgagtattctacaccgactcctccggaatccgacg

SEQ ID NO: 44811 - DNA, 566 bp, Arabidopsis thaliana landsberg
  unsure (1)..(566): unsure at all n locations
taagacaaagaaatacagatataagatggtcgtagaaaccagtagaggaatttcatttttcgtggataagtggagatattaataagagaatggtctttactctttacagtgggaaatgggaatagtagcccattataatttcatcagattctatatatgcatgtttgtataagctaaaataaatacgtttaagcattcttcaaaaaaatttacaagttctagagactctcttaacgtcggcaatttatattctactttacatgacactttcaggaaaagaaaactatactcactagcagatcattaaattttctttttctttttttgaatgaaccttagttgtggtttttatttttgttagctagaaacttcagtgttttttttccgccaatggtagtgctttgatgatggtccggcccaattcatagaaggccttgaaaatgggccagtccaattcagagacccaacangctcgactgtatacacaaaattcacaaaaacagcttttgagaagttttcttcttcttcaccttattttcggtatcaaagccacaaaaccctgagaa

SEQ ID NO: 44812 - DNA, 456 bp, Arabidopsis thaliana landsberg
cctttttaaaggttagggaaaaaatgttaccaaaaaaaagttaggaaaaaaatgtaaaaataaagaaaagaatttttttcccctaatagaatccaaacaaatgtatcgcttaccatcaagttgcacaaacactcaaaacgctttttgatgatttttcttctataaaatctttctcctcaaccatttcaaagccccctcttctctccttctctcccttttctctctctctcgaagatatcgcctttaattccttcttcttcttctgatttcttcaaagattcatttcttagagatctcagcttctgtaagagtaggctagctaccaaaaaaaaagaaatagaaaaaaacattgatgcttaatcagcagttcttggtgtttgagacacatgtctccaataatactcagtgagatctttctctctgggtttatgttaaattccacaatcaggcgcagga

SEQ ID NO: 44813 - DNA, 632 bp, Arabidopsis thaliana landsberg
tggttgtctaatttaactcgcaatgtcaccaccactgctcctcttctatctagcaaacaaatacttgtttgcatttcgaaaaatcaactagtctgtctccattatcatatacataaatacaaattaacatcagaaaaaatatacatacaatctttgcacagagtcacattttcttaaaatgtataagttatttcatccggttcttatagtgaataccatatgtatatccatgtatataaattgatatttcaattaacattaaggaatcacaagcatgcatattctctcgctcccacgcaaacaaaaagtgcatgcagcctaacgtgatctctatcgttaggtagctcacaaatgacgaacctaaaccctcttcaccataaatcaaatcctcctccgctctatataaacaacaaaaaaacactaaacacttaaataaatcaaacaaacactccacattctcaaaatcatattttcatataacttataaaagataaaagaaagaagaagatggcagcttcgtccaagtactcttccatgtcattcatgaaggtggcaatgatggtggcgctgatctggtggtggcagccactgtggtggatggacaaagctgcaatgcgcagctgagtacactg

SEQ ID NO: 44814 - DNA, 722 bp, Arabidopsis thaliana landsberg
ccgatttgggatctggttccgtttaaaagattttccaggttcaattttgctttttgttttgtttatttcttcgctggtagtgtttttaagtttgtcgattttggattctgtgcggacgatgaattggctttagaatggatccgatttggtttaggatttggagaagctctaattagatttcgcttgatttgatctcgttcctgattctgataacttctggggttgggaagcattcgtgttatttgttgactgaggcaatgcccgtggttgtgtgtattagaagctgtggtgatgatttgacttttcttggtttggatagagttagaggatttggtttttgtactagtttgaaatggtctcattgaaattgtcaaattaattttcctgtagatgtttgattttttctcttgggatcatcatatcaagtttcttcagctacaattggtgaaattgtgttgttctcttcaggaaaaagaagcaaaactttgaaaattaccatcttcaagaatctaagttgtctatttatgcttcacacttttggtgtgacattctttttttttaaatctttatctggtgtagttttcagatttgtatcctatgctcctctatggtttacttatgttctgctctgtattgatatctgatattcaagtatgggtttttgtatgtaaattttaggtttcgactggttctagctgctaagtggaatcgactcattttag

SEQ ID NO: 44815 - DNA, 300 bp, Arabidopsis thaliana landsberg
  unsure (1)..(300): unsure at all n locations
ccnnnnnnnnnnnnnnnnnnnnnnnnnnnnnnnnngggggggaaagccacattaaatcacacactatatcatttaggccctcaacaatacaacagctgggaggggtttattattaaatctcatttcctaacccaaacccataaatcaaaaaaagctatttctcctcatcaataaacatctaatccatcttaacaatatctaaatatannnnnnnnnnnnnnnnnnnnnnnnnnnnnnnnnnnnnnnnnnnnnnnnnnnnnnnnnnnnnnnnnnnnnnnnnnnnnnnnnnnnnnnnnnnnn

SEQ ID NO: 44816 - DNA, 653 bp, Arabidopsis thaliana landsberg
  unsure (1)..(653): unsure at all n locations
agagttcaggtgaaaatttatccacttataatttttatttatttttaattattgttttagttgaatgcattttaaaattttctttttatgaaaccgttggtgttgtaatattaattttttttacagatattcgagatggacgaagattatctgactaaaatattaaggctttgagattattgggtaaactaaatttattgcttacaaccaataagatgaattagttacacgttattaacttgaatttttctaatcacaaattggaagtttgctacttacttagcttagtagtttaatcaattcaaaggtaataatagagtctaatggtaacaatagattttatatttgaacatgaagattctaaaaactgacaaaatattttcattttcttaaatttcttaaattatacatatatatatatatatataatttttttatataatgtgagaagatatgataaccaataaaattttgctctcatatttttattgacaaaaactccgaatatgacgaaaccgcacggtacaattttaatagaaacaaatatatctatataataatattcgtagttgaatcgtacgtcttcatttcgaacctaataacaacccaactaataacataattattntaatactttagttacatattaacat

SEQ ID NO: 44817 - DNA, 693 bp, Arabidopsis thaliana landsberg
gcggctaatccggcaattgatgagtctactatgctttttcctttctgtttttgcaccaatacatgtcaaagggtggaggaagttatatttataatcaaatattcttctattagtgcttgacttacctggagagacaccaatatgtttgcaagagcttgcccataggtatcatggaagtgaacagccagcttgtccgctggcacaactgccatcacggcttcaagcattggaaccacagaacctgatttgttcaattcaccaaacagagggacttgattaatgagagactcaactctcaacgaaaatgcgcataaatccagccctccctatctactctctaaccaactaacaaccgctttattcgtctacattcagtctaatagataataacagagctgctaaatgtcttcagattttatcactcccacatacagtgcacatgcgtaattgaataaactacacaagattttcagtaacgaaattaccaggagtgccgattccaattgtatcacccagagaaatctcaaagcagcccatgtcatagagttctttcacaacataagccacttttgagggtggaacaggtcccttaactggacaccccacaacgcaagatacatacattcaataaaagaaataatcatagactgttattagaaccaactgtttcttctattagtgttttgttagggt

SEQ ID NO: 44818 - DNA, 518 bp, Arabidopsis thaliana landsberg
cctgtcaaattattcatgacaaagttagataaatgagaatcccaaaactgctaaaacagagagatattgttatatgctcctttttgtttttcaactacagtttgatgtaaattttaaacagttcatgatcactggaaatttgaagcaaatatcaaaatgaggaagaaaaggaggggccagaaagaaagggatcctctgtcaggaacatttaggatctaacaaccttcccagctatgaatatctttgggaaccagaagatgatcttgcaaagacatgtaaaagttattcaaccaataaaaggttatttacctcagcaacgtttttcggcaattctgtcgtgtcaaaaaatagtggaattttattgaatgacacagaaggaagaactccaagagaagtagcctcctgcataatcatgaaacatataaactctgtacatctaatgagacccagaagaatctatatatctaaatgaagctaccaacatacctaaagcagtgaaaatgcacgagggatcatac

SEQ ID NO: 44819 - DNA, 249 bp, Arabidopsis thaliana landsberg
tcagctcatgttagtcttcttaattctttacactagcaagtttgtgatcatattgtttgtatattaaattctctatgtgcgtttctgtgtgtaatcagggattgctcaaagcttttagctttcattcactcgaaagcgggggagagcaagctacgtggtgtgttgaagaagtattcgaaacttggaagaggtgctgttgctctgatttcaccagccaagtctcttatgtcatctgctccatgaacaagg

SEQ ID NO: 44820 - DNA, 600 bp, Arabidopsis thaliana landsberg
attcttactcagcatataaaacagactccaaaatagtctgaacttttttataaaaaatataaaaaattttaataaaaacaagtagtctctagaaaaatacaaaagtatatagtctaatgtctacattcctctgcgtatatatgtgaaaatataatctaatctaaagtcatctcaatcaagatcggtcttgaagactcaatggcaaaataaggcaccggcgaatcttcaaaacatccgaaaactaaaactaatgtagcgatctcaagaactatatcactatatgaatataacagttggacccgccacaaatgacaaatatcatcaaagtttaaattcagtttatatttgagaaagcctatttatactagttaaatgatgttgtgacatgttttagttctcggacctaaaaagtatctgaatttagtactccactaacaaaaagctccaggaatatgatatcattgccttgttggttacttgattcatacaattaaaaacgcaacgaagaatgtcgacatgtcgttattgtttggtgccatttttctgggttaaatgggtgatcattcatgttattagtttctcaattgctcaaattttata

SEQ ID NO: 44821 - DNA, 620 bp, Arabidopsis thaliana landsberg
atgtaatgctatataatcaggattgtctacaatctacgatacaccttccattattgtatgctattcacgcagatttgtaaactgaattagtatatcgattgcgatacatataggtaaaatatggccaaggaaaataagaaatcatttaaccaaaaataatacaattatacgaataataaattaaataaatcataacaatgataacaaagagacaaagaacaaaaactaaatagtgatagcaaaggacaactacctttaatgtttatgacttatcttcaacaattagcttcaatattggttttattagccctacaagctgtccgtttcatatcaaacatataatcttcttgtcttccaaaatctgcttttaaacagcactgcctctctaattaattaatctagcttcaccacaaatttcttttagttctggtaaagttttcatcaatataattattctatgtatatcacataattgatatttgattaattaaaagcatgtatttgcgtttaaattggggatattgtaatggactacaagcatgtgctaattttgaacattaaaacctaggagcaaagaggatatactaattgttatgtatgagatcatataataatatatg

SEQ ID NO: 44822 - DNA, 695 bp, Arabidopsis thaliana landsberg
attaatcagttattgaaacaaaagcaaaagagagtaaaatgcatatacaaaggaatgaaggggagttgaataaatttgcataattttagtgggtgtatttggttgacatgtaacatataattcatataaaatattgcgtttcaattagtaacatatgaaatgttttcttattgtaatggcccatatgaggagttgtaacgatgaggtgtgttgtgtaggcctacatgaatcaggctgcttattaaattaaactgtaatcctaatagttcttgtgacagctccaatctcatgaaatttcactgttaatatcaaatttaaaatatttaatttatattttatataataaagtaacaattgatttttattttcattttgtttagattacaacgcatcaatacgggtccaaatatgtatacattattaataggaaatcataagatgctttctttacgtgcgaagcagtctgttatatgtgtgtcatcctctcatttcatatggtattttactttttaaatgcttaatgtgtgaatcttctagttttttttgttttgcagcgaaatgaaaaagaattagtaacgaaaagactaatttataatatgtgtatgcaataatatgctctctctctctctctatatacatatattgttacatgtcatattgtcatctcattaagaggatctcttaattattcgttt

SEQ ID NO: 44823 - DNA, 306 bp, Arabidopsis thaliana landsberg
gtttgatcttccagctttagtctgtgaatacacagaacacggaccgcttaatagagacggaggactctcaagtggagtggttttaccatggaaagtgagattgaagattgctaaagagatagctagttctgtgacttatcttcacacggcgtttccagagactatagtccatcggaatataaatccgacgaacattttcattgatgagaattggacggcgaagctttctgatttctggttctgtgttgcaataccagagggggaattgtatgtagaagatgatgtgaaaggtgtgattggttttgt

SEQ ID NO: 44824 - DNA, 560 bp, Arabidopsis thaliana landsberg
  unsure (1)..(560): unsure at all n locations
tgtatcgattccctatggaagtcccaaaaactgagctgtccttgtttccttgttctgcttggactctatcagtcatgagctcatgaacaagatcgttaatcgttggcggttcacttcgagcaatcatgtgatgatacacaataaaaaatatgaatactgtgtgctagctagctgtgtgcaataccgggttgatttgggttttaagtcttacaaacaaacgtttagtttgattatcatataaatgtccatctactttgcttgaaggaggtggttggagttttttttctttcttttttaataaattcaatgaagagcataattgtaattttatagtcatctttaacctgagtatcttcttttgtaaccttaatttttttgtcatcgttcaaagttatctcataactttttgttttctttacgttttgaatgttggtacacataaaatcttgtgaatctaacatatactaatttgaaaacttaatatttttgagttttttaattgttcggtngttaagtcgataacatcaaaaaaaaaaaaatggaagatcgatgaactctaa

SEQ ID NO: 44825 - DNA, 799 bp, Arabidopsis thaliana landsberg
ccggatgcagtgcaataaagtatgatgagtataggagagttataagcaaagcggctcggaatgtgcataaaatcagctccatcagctccagcgcctaatcggtgtacatgcatatatcattgataattatttttgtacttacaataaatctcaaatcattcatatgatatataagaaccatgcaataaagtaatgtaatacttcaatggagtttctagcctaaaccatgcaataaagatgcttatcattgagttctttgctacttaaacaactattttaaataatgttttcacatatacattgaaatttgtgatcctcaatgaaatatcctcaaactatactaatttaggtcttttttacatttttagtctagtttcttatagcctttccaactaaagctaaatcttattacaatttaaaaagaggctcttctatatagatagatactcctagatactttggtagggaggggatcaaacttacctcatcaccattgtactttgccttagaataggtaaataaattggcccttaaaaatatatataaagatataaggtggtcgccatgcacaaaagcttgtgatcttgtttagtgaactctcgaataaaaccatcatttcaataacttagatgatgcgattgatttcttcgatgacatgtttcctccctctcggctcttgctactaattcttcgatgacaacgttgcttaagaaacgttgacggatctaaacttttgaaaatgtcaggctaacgggcctaaatgggcctaatgcattgggtcagaacatcagaagcattg

SEQ ID NO: 44826 - DNA, 603 bp, Arabidopsis thaliana landsberg
  unsure (1)..(603): unsure at all n locations
acacattagttctctcttttcatttgttgatttctttcttcaatacttatggttaagggcaaaccctgaaagtgaatattttggagaagagagaaccatgagctttcactatcagctgaacaaggcacaaaacacattctttgatacaaatacattgaatatcaaacatgttgttttaagaaaagtagtatagatcctagagtttcatggagcaataacaacaactgtgaaaccttcattcaacatgaatacaaagaaagcttagtaactaaaagagaaaaccaaactatacacaagatatataatcgaacagcgacacacaatattaaactagcgagatagtaatctacaggaataatcccccttatctaggatttgaagatcttatgtgcagtccactgaaatgggagattctcgttgagtgagtgacacangtgaaggatcaaagattgtagacaaggctgagaaggtctgatccaacttgtgaaccaccagaatgaactgcaattcaagtgccataacctgagatatgtagacctccgataaagggaccaaagttttcccgcaactctgatacaatgctccaattgggacttgcaaagt

SEQ ID NO: 44827 - DNA, 513 bp, Arabidopsis thaliana landsberg
ataatgtgaggccaatcgagcaaaatgctattgtcgaagctgagagattagctcaagctaccaaaaatgctctcaaaagaaagattgagaaagctgcgagttctgattatcagacaaaaactctaccagcaaagctcaaaatcgatcctaatgatcccgaggatgtagtaagtcaagattctttttcacccattttggtcccatgaggtcgtgttatgaggtctttactttttttttgttttggtacagaaaatagctaagcgtaagaagatacatgctttcaaatccaaggcaaggtttgagcaactcgaggttgtgcagaacaagaaacagaatgattggcaacagtttcagacgactaaagccaaaactaaaaaggtttgttagatacggaattcatatggctctttgttctcttggtggggattctgagacgggttttggttgtgcaggtagggttcttcacagggaggaagaaagagagtatatttaaatcacctgaggatccatttg

SEQ ID NO: 44828 - DNA, 647 bp, Arabidopsis thaliana landsberg
atgtcaaattgaaatcatgtgcttagtgttgataaaacgtaagtcatacttctagtttggttggtgttaaccaaaagtaagtgctcactcaattgaacaaatgagtttgttgatagatatctcttaaaaaaaattatgtcttcacaaatcttgtagatctttaatacgttttttccccggatgtttattattgtccattttgttaatttaatattccaaaaaataatttaattaatttattattactactcacatttcaaagtattttctctaggatatgtatatgaaaactaaatatggtggatggatggtagatgatgagcttggagacaatggtggatgatacatggtaggagggttgatggtgaatgattgattgttaaacaaagtgattgagaagttgttgacttgtttactattatgtaaatcgtagtatcgatcgttatatagcaattattaatagatactaaaataatagatgtaaaatacacggaagagtatactataattttcaaaaactttttaaaaaaacaaacaaaattcgattacagatttacagataaaaaaagtataaagataaatatgtctagcttaatccacgtcattaagctgtaaatggaaaataaaaagctgtatgtgaaaaaaaa

SEQ ID NO: 44829 - DNA, 645 bp, Arabidopsis thaliana landsberg
gccctccaaatttcggggatactctccaaaattgggttaaatctttaaaaggtcaaaattttcttcggatcttgttttctcattatacaaaactaaccgacatagaccaaccgctcatcgtcgttaatcttaatttgcataatcatttttttcttaattaaattgcattatcattgataatgatgtaacgccaatgtcaaccaacgtctctccgcaatcctcaaaaagaatctgagaaagtacatgtgtgtccatttattacacgttcacggatcattcgattacaattttgcttgatttgatgtttcaattggatattttaatcccaaagtacaattattatttcttacagtggctacagacctcagtagaacattttttgaccttcgaaggaaacaaatggtctcaagacttcatgtgattctctgggaatattttggttttaactgggtatatatattctttaaagaaaccctttgtgtatttcgctatatctaacaatcaaaatcttcaataattcacgtatataaaaagcttgtcgagagattgatttggttgatatatctacacgtacgtgtttccttttttctccttttaatgttgttattactagaaaccaaattcgtttggcaacaggtctagctt

SEQ ID NO: 44830 - DNA, 1230 bp, Arabidopsis thaliana landsberg
  unsure (1)..(1230): unsure at all n locations
agacctacacactttcacaattcattttttacccacattcttataacctacttatatagcaaggaaagggggggcttttttaaccacattcagtatgtatgcatattcaccttagatttactaaatccttgtcttaatgttagactaaatattaggaaaacatctctaactagtagttgtaagagaaactttattttatattagtccattaactcgactaaattggttatgaacaaattagaggagtgctcttatggtgctaccagatcgagtttgagtctgtggtgagataaattacgtttgtagacccgttacaagtattatcaaacctagggtaactatatatagggaaaagtccagaatattctgatcacaaagaaagaagaaaaaactagtaacagcagtcaataagacatcttacttattactattgcatgcatgtcaatcgtaaatgtgaattctaccacaaatgacacacactcaaatgctaaatgcatatacacaaatgtaaacgtattgttgattcgaaatcagtgaagtatttagctacataaaacaaaaaaacgattttttttttccaattttcctaaactccatctccaaactggtcattaattaaaaattaaaacgtgcggaagcgtagtcaacaaactcctataagacttgatccaaccgatccagatccaaacttgatataaaatatcgaccatttaccctttcgtctagagataattagccaaacaaaattgagaacaaaaagaaaaaaagacaccgcataaaacgagatttagtataaagaacattttcacaagaaacactatgaatgtggggaaagtgcatcatcatttatcaaaaatccatataaatctcttaaaatccaattattttcattttttttctctcccaaccaccacaccataattaaactacataaaacaagaatgaacctagttgggtaagcaaactcaaataaacccaattgcaagagaatctacctataatatattcatcaatatagttttatttaggtttaagagtcagaatctctttatggctcttgcctgttcccataagccctattacgaagcacttaaaagaagagggtgacgtcagtccccaaagacatgttgcctagactctaagcaaacttgagatgtgatgancacacanaccttaattacttaattaagaccccaatgtctnatttgatcaccagtcggatacaaaacg

SEQ ID NO: 44831 - DNA, 402 bp, Arabidopsis thaliana landsberg
atccctgcgctacaaatatactgcctcatggataaaaatgctataaagttttaattttctttttgagaatcaagaaactcatttaccttgtttcccctagaaatcctaaggttacctgaaggcgacaaataagtagtatctagccaaccttttgcttcatcaccaagaagtctaaaaggaactggatatggaactttgaaaggaaggaacttcaaatcaaaagcggctctatcaaaacggaataaaactcgtttcccatctttgatcgacgcaactgcctgtaaaatgaaacaattcaaagtataaacatctcagtcttttgatgcaaagactttagtgaagaaactcacctcaactttcagctctccaatgaaatcagagaatttaacaatgtttgaaaca

SEQ ID NO: 44832 - DNA, 588 bp, Arabidopsis thaliana landsberg
  unsure (1)..(588): unsure at all n locations
cggcggcatgtgcagacgctggggcacagcgcaagcgttccgagatcgctgcgccggctgagatcactcctgcagcgtgctagtagtgctacatatagcctgcatgtcgaggcgctgtggcacagggtgtgtgcattgcgggatgctgggccgtctgacataatttgtgcgaatgctgttatgctacagcctgcatgtgcgaggggctgtggccaacgcccctccgggcaagtgcacaacatgctgtcgcaagtgcgaaacatgctacagcctgcatgtcgagaccttgcggccacaaaacaaactgtccttaccgaaacgctgcacacctgctgacaccgctggtctgctgctgccgcctgtgctacagcctgcatgtccgagaaggcggaggcgaccctgctgcggttcctgttccgtaccgttggcaccctgctggggggcagcatcgcataccttgccatgttccacccgcagtccgccgacaacctctacggtacgtcaagagccggcgcgcccttggngtcagggtttagggtttacggtgtaccctaaacctaaaacctatngngttgtgatcgggcggac

SEQ ID NO: 44833 - DNA, 580 bp, Arabidopsis thaliana landsberg
agattgatcgaagaagataaaaacctcgtctttcttcaatctcagtgattctcaaattacccatcgtttccttcttttgatctctttgatttcacttcaaaaagcaaagaaatctcgattaggttattccttgtttcaccccataaatttgcctccttttttttggtctcgggaactactctgatttgtttcaatcgattctggatttcgggatttggatatagagctctctgtttttgacattgcctttggaactaaaattctcagtctttgcatttttttgattcaaaagctcactaagtttgggtttcagaagctattacatttgatcttcgtaagcgtcctttgaatgccctgtagctgaagatgcagcctgatcaccgcaaaaaggtccaatttttcaatctcttatgtatcagatttgcttattagaactgattaggatctgtagcaatcctttttactgttactgccttttagtttagtcctaatctttctctctattgaagcttttgatattgacaatagatttttctgtatattcagtcatcagttgagggagatttcttcacggaatatg

SEQ ID NO: 44834 - DNA, 2061 bp, Arabidopsis thaliana landsberg
tttttgatttttttaggctgagtgcaatatccaatgtaaaacgaagaaaacaaacaaaaccacttaatctctctactgaatattgtggtaagaaaggcaaatattgttgaagagtgtctctctctctacataatgctggatttggtttccttttcgataaaatattattgttgatattggaaaagattacaaattacatcaccaaactagactccatctaatatttggatacagctacatgaccttacaatttcacaaacagttctacagcaccaaagcagagaacatacttacagagatcatctaaacgccagcttctggtagctaagttcttcatctgtttcctatgcgaggctttgcaaaatgcggagccagtctcttctcgagctcaaccaagctgaaaatgatgtaaagaaacatgattaatgagaattataaaagtctctgctatatcataagtgaggtttggaaattctgacttacatctcaaatctgcgcttagcttctttctgttttgtgcggtagaggtcactgtctttcggtatgttgctcatgggatcagctacacattttgtacccaaaattaagaacaacagtacatcactaacatacctcattaagagtagacaatcataaaggaaatacacatgaatgttatctaactttatagatccacttaaaataattttaaagattgtcaccaaatatattacactttcgaatgttatctaacttcaccgatcgacttgcatccaaagagtagtgtcactaaatgtctattacactatagaatgaactctaactaaacatatcttcaacatgaagagcaaaaaacttttgcatttggggatctagctacactatgttactaatgaactcggatatagaggaaatagcgttacccgaaagcgtagcatggtgtttctcgccaaactctttgtgaacttccattgcagtagctctgctcagccggattaatccctaatcaaaatgccaaaacaagttattgacattgcaaattaaactaaataaagacaaaagcagtagactttggaagctaaccttcttctccttccttttaagaatcttgagatgacatttcttgacataatgagtcaaatgataacgagaatgcctagaagaaagttcttgtttaacctcaggattcgcatcaagccattcagaaatatccttagatttcaccaactctccattatccaatgactctaaccacgaatacactggtaaccattgatcagtcctctgaaatcgagctggatgttgttgatctgcttccacattttgctgtatatatcattcacaacacatacacaaaatcaatccaaatcctgagaaacaaaaatggtatcaatcaatgagtgacgttacctcgttttgatcagatgatggtgttggtctcatgtaatgttggattgagaggagacgatctacaatctcggagcgaggcatgtgacggagatccgccggtaaggaatctaagttggtgccgatccaagtctcgacttcgccggcgcttacaacggctttggcgtcggggaaagcggagacccaagctcgagccattgtctcccattcctgagatggctctgttcgttggttcgtgtttgagattttgtcatccgattccaattgctgctgctgcaccttttcatcttctaggtttttgtcactcgaattcgacattttcttctttttggtgtttttacacagtcgccaaaatgttgtctttaaataaagtactttagttcgcacaaccaaatctaaatactgtaataaataaaatactgtaacaaattctcaagtgttttactgtcttaactcttcttaactcttaacagtcatttatttgtccaaattttaaacgtcatttattagttgatactatttacttaagctttgttatacatcacatgtataatgtatttaagcttttgggtttagatactttttactacaattgaatgatggaaatttttaccctacattaaaacgaattcggttaatcttcattgcataaactgccatttacaatgagtaatg

SEQ ID NO: 44835 - DNA, 384 bp, Arabidopsis thaliana landsberg
  unsure (1)..(384): unsure at all n locations
tgggacacggcggaggcactttactttataaatagagaacctccctaggtctctgggttactttatctcgagtacgatgaaagcgaagggaagtacatggnnnnnnnnnnnnnnnnnnnnnnnnnnnnnnnnnnnnnnnnnnnnnnnnnnnnnnnnnnggccacaccggaaaaggagtgtgacatgaggatacaccgtctgagatggaccataacctagggtgcagtatatcttgggacaatacgacataaaacttgacacgtgtgagctcgctcaagacaagaacatacactatttaacggagcgctattgaagagcgtgacataaacgtagcttacatgaactgggcaagcatgggacaacaggactgtctgatttaactga

SEQ ID NO: 44836 - DNA, 463 bp, Arabidopsis thaliana landsberg
acctcgatcggtgggggcacgttggagaccaaccgcaacgtgctggcggccgaagttttggggcggcggttcgaccagcgacgaccccaggccgtggacaacggcgatggcgcaccggcggacgctccggcagaccacgcccactcgggtccatcgacagtaaagttcccaccgttggcgccgcccctggatggcgagctgttcgagctgcgcgagcgcgccaacgcgctggccgagagcctggccccggacgcgaagcgctgggacgaggaggaggccttcccggaggcgtcgttggagaagatccgagaggccgggctgtgcgggctaaccctgcccacgcaatacggcgggcagggactcggcgtgctggaggcctgcatcgtcggcgaggagatcgcggcgaaatgcatgaactcggcgatgctggtgcatatgatcctaaacggggccacgcgagcca

SEQ ID NO: 44837 - DNA, 345 bp, Arabidopsis thaliana landsberg
  unsure (1)..(345): unsure at all n locations
nnnnnnnnnnnnnnnnnnnnnnnnnnnnnnnnnnnnnnnnnnnnnnnnnnnnnnnnnnnnnnnnnnnnnnnnnnnnnnnnnnnnnnnnnnnnnnnnnnnnnnnnnnnnnnnnnnnnnnnnnnnnnnnnnnnnnnnnnnnnnnnnnnnnnnnnnnnnnnnnnnnnnnnnnnnnnnnnnnnnnnnnnnnnnnnnnnnnnnnnnnnnnnnnnnnnnnnnnnnnnnnnnnnnnnnnnntcctttatcttcatagtgaggcactaggatcatgaacctttgttgggtattttctccttgggaatctgaacttctttggtggcttcattggttgagttgatggccttacca

SEQ ID NO: 44838 - DNA, 622 bp, Arabidopsis thaliana landsberg
tacatttgtcactaattaaggtttggatacatagtgtctaaactaagctaataatatcacttaacgtttacttgtaacgctaggtgatgatgtcgtcaagtcaattggtacaaggaataaacgagtggtcatatgacattatgaccatatgaattcaaactccagtaatccaatggtaattggattcaatgatcaagacttgaaccacgtaatccacccttatccttagaagctcataaatatcactaaagggacaggcaacacttaaccagtagttgtccaataatttagttttccaaaatgaaaaattattgttgtcatctattttaggtgttttagttcaatgtggattcctcgtcctaacaaatacttgacgaatatatctagactataaaattggttatgagttctacttttttttgtttgtgaaattatcaaaatttgttatatttatttattctcattaatttgagtactaatttttaaattatttatactaaaaacaattactaagatacaaaaatggataagagcatggtgtatagatatttaatgggatagaatatttcccataattgtatgtgtgtgagaggttttgttttcgtaaggaaagaaacaaaaa

SEQ ID NO: 44839 - DNA, 586 bp, Arabidopsis thaliana landsberg
caaagaataataataatatgaatgtgtcaatgtgctaaagcaataatgaaatatatggtatgttactgacatgttctaagttttactttctgttttatgtgtatatctcagcaaacatcactacttagtacttactattcgctacaacttgtcttaatgatcccccgcgtactgaattacggacacggttctcgtttgttcataaaacgtaaattattagaaactaatcatttttcatataaacaaaattatactatttagaaaaagaaaaaagaaaaacaattatactatttacctaaaaatgatggtcaacaatttgtgtattgatttcttctcctccacactcatttttatattaacaaaatacgagcttgtattttcataatgatctaccaaataaatcaatgactttaaagcaaaattccatgcaaaagttaaagaagtaaagagtcttttttcctccacatggctgattctgattgatttctcataaaaaattgggttagaaacttagaaatcgttaagctggtgatggaaaggctccctccattaccggaaaattcacccgaacaattttttattaatg

SEQ ID NO: 44840 - DNA, 473 bp, Arabidopsis thaliana landsberg
  unsure (1)..(473): unsure at all n locations
caaattgaatgcagacagctgccgttttgccaaggttgtttggtaaaatgccctgattaaactgattcggtaaattctatgcatattcatatccttggtatttgcggtacattcatgggcggcatcgcggnnnnnnnnnnnnnnnnnnnnnnnnnnnnnnccggctgtgacgccaatgtctatccgcccatgagtacccagctggaagcacaaggcatagaactgattgaaggctttgaccctggccagacctccctgaatcctgatatgtatgcgatcggcaatgtggtcacgcgtggcaatccgctgatggaagaaatcctcaatcgcggcctgccgtatatttcggggccgcaatggctggccgaacatgtattgcaaggcaaatgggtgctggcagtggcgggcacgcatggcaagaccaccactttttccatgctggcctgggtgctggaatatgccggtctggcacc

SEQ ID NO: 44841 - DNA, 566 bp, Arabidopsis thaliana landsberg
gtggttttcttacatgtctttacactaagtggtattttataattaatataagcttaaatatattaataattgtatttctgagacaaaagtaattatgcacacagaaacagaaattgtatgtaattctcatttgagatttgtaactgaagctacttgcttgatccttctaagtctccccaacaagacaaaagaacctggtaagtcatgaaaactaggtcttctttagcggtatatggtgaataataaattatttttcttacaaaagttgaatgtgcactaaatttattctagtaaacaaaaacattagtacacatgcatcttaattatttatcatgtatatctatgaagaataatatttatcatgtgattttttaagacaataattatgttaattcaatgatataatatctactaaaacggtaatatgtatattaattattaaaagttgactttttatgggtatatatatatcataattaatttggattttggtaccacatcttactataacactgattagtgacagagtctctcaaataccagcataactgacaattgatttcaat

SEQ ID NO: 44842 - DNA, 702 bp, Arabidopsis thaliana landsberg
gcttacttgcacgatgccgtttgtgaatgcttcttttgattttatcaaagttggatattaccgtatttttttgggttagtgatgacgtcgttgacgaggtcataggcttcaccaaacctgtagcttgcgttagggagcttggtctcgcgatctaggagcattgtggtggcagctttgttgaatctcatagcaagattactcgctttgttttgacaatttccatccaggcttagagctctttgcagtgggatacaacccattggtcctaaaccaagcgccattagcttcctcgctcctaaactatgtaacacctaaaacattacatgcatcacaaatttgtatcagttagatcattatatatatgaaagataaataggtacttgaagtgttgaattagtttagaaaagtaaaccttgagttgagattcaagtgtttccattaagtagtcgacgaaggtttgatcattgtatttccaagagtcgctatagacaggcatcaaatagttgttaatgaagtcattgctgcctaaagcgacaacgtatcgagcatcttgaaagaacttgtctgcttcttttttccctatctttgccacaactacatcttgtgtcccttggaataattctatttgcttccacagcgaaaatctttggatcttcacaaatacaatccccatgaaaaaggaaataaccattttttagaaaa

SEQ ID NO: 44843 - DNA, 540 bp, Arabidopsis thaliana landsberg
ctgcagatgcggcgccagcgccgcgccgccgccgccggtgacgacgatcgcgtcgatgtcccagtcgtcgttccacaggcggttgacctcctgcgagatgcgcatcgccagctgctggaacgcggcctggacgatgccggtcaggtcgtagcgcttgcccttgatcttgatcgtgccgcgcgcgacggcgtcgtagagccggtacaactcgatgctgacgccgcttttttcgtgcaggacgttggcgatcgcctgataggcgctggcgatgccggcgtcggagctctgcgagccgcgctcgagatagcgcgtcttctcgctgatcgtgtagtcggcggtacgaaagccgatgtcgacgatgccgatcttctcgctgatgaagcgctgactggcggccttgccgagatcgttgagcatcaggttgaacatcgagccgaacggctgcggaatgacgcgcacgcgttcgatgttgagggtctttttctcgcgctcgccgcccggcttgacgaccgtgatctggtgacggttctgcagcagcgt

SEQ ID NO: 44844 - DNA, 846 bp, Arabidopsis thaliana landsberg
acaacaaaaaatatgcaaagtggaattaacccgtaattagccttttgtttctacttaatctccatccatgtgctgccttctaaagcaactacacacgaatattctatagatatgcatctctatttgtgtgcatgatactattttcaacgaaacgatcatcatagttatataatgagtcgtgactatgatggatgattaagtttaagtgatgcggtaaaagatactttagtaaaggaagatggtgcgattagaaacaaatgagaaaaattaacaaaaaaagtgattgttgatattttaataggttatatagtaaaagtagttaaaacagtgtaaagtaaaagttattaatatatttataaaacgcattatacaatttaacaaaaaagttatacactacattgcttcttgtcaatttatagaattataggtagctagcaaggaaaccattccaaatttacatgtggtcaaatttgtcattataaaacaaatgattttggagtgatattttgtcattcagttagttatatatctttgcaacataatagtaatgaaataataactattttttgaacaaatttaattattaatattaaaaattggttaacataattattgataacattacgacataatttttaaattttacgtaaagtgatatatagttcttacatattcataactgctgcttattggtcactaatgatagctaagtttaaaaggaatagaaaaaaaaaaatgatacaaaataattaaactgattcaaaatggttttaatgggtcggaaaatccaaactaaatcattgcaaatctgaagttatcaaagacggaattgtaactacgataaat

SEQ ID NO: 44845 - DNA, 940 bp, Arabidopsis thaliana landsberg
tgaatctttataacaaagaaaaaaaaatcaaaattgtaatttttgtttgtatcttctatatgtattaagttttacatgtgttatttataaaatgtttgtgaaggttatcacataaaatttactcatcatctcatggtttgcttttttagaagagaatttaattttagaaatagaatataaaatcataagtcatatatttttttttttgaatataaacaatccgaaaaaatacctagaaactatcttgtttgttttgattataaacaattatatatatatatatatttatttagtctaaattttacgatgtttactaattgcataacaaccgttaaattagagggttgaatctatcaaaaatttaaagacaaaatattataataaaaagtttaattaaatgaggtattttttatcaataaaaaacaaagtaacaattaaacgtccaattaaaaatgaaatatttttttggttttttcctacgtcggtaactaataacgtcacaaagttgatggtatttgaaagaattagcggcaatttattccccccataaattttcatttgtgacctaaaattaactttccctttctctctccgtgcctcttcccattctctttcaatcttgtttgaatctccctcgattttcatttctctttcaatttcaaaattcgcacctcctcctccaaagttgttgaaatcagattttgttgaccggagagtagttatttatggaggaagatgagccaatgggcggcggcgagtctgagcctgagcagaggaaatctggaactccgagactttacataaaagagcttgtcatgagaaacttcaaatcatatgctggtgaacaacgcgtcggctcttttccaagggtaggattttacgctgattagatttgggttttctcgaatttgagcttctatgtcaatcacagtttagtttt

SEQ ID NO: 44846 - DNA, 591 bp, Arabidopsis thaliana landsberg
gctgcgccgcctcgggcaacccgccgacctggccaacgtcgtggccttcctggcctccgacgaagccgggttcatgaccggccagaccgtcagtgtcagcggcggactgaccatgagctgatcgagggcaacgcggtcaaggcgcggtgatgcgcagcaccgcgcaccacatgtcggtcaacagctcgagcagctggtcgccgtcggtcgagaagacccgctgtacccgccagcggaagcaaatctgatcgagctggacgaccaggaactggatgcgggtcctcgcggccccctggtccttcggttccagagccccgaggtactgctccagttcctgggccagctggtcgaacatgcccttccagccggcggctatccggggatcggacgccgacgcctcgtgccacggaccctggatcgccgcgtgccggtcccaccagccgaacgcgctggcgagccagtcccgaatgaccgcgcgcgagttcgtcgtcagcgcagtgtcgagccgtcgccagtaacgagcggcttcggccgtgacgtcggacaggagttcctcgagtaacacggccttactggcgaagtgcaggtaga

SEQ ID NO: 44847 - DNA, 487 bp, Arabidopsis thaliana landsberg
aagaaaggaatctgatatatatattttatagaaaacaaaacaaacctatgaaaccagaaaccctaacattcatgtcaatcaaatcatagagtaagtaaccgacagcagtaatagatcaaacaaaagctagggctctatgaagaaaaagcaattacgaaaaggctgcagatatcagtaacagctggaaaaataaacttaaacatgacttgaaaagagtaaaatatttaagtaatattaaattctttggggctatgtagatgtagacggcggctggagacagaaacatgcaactagaggctcagatttctgtctatcattcgtttttcaaaacaaacaaaagagccctaaatttcagagggttggttcaagttttttttttttcttttaaatttacaataaacccttcacaattgaggagagagatgttacctggaaattagggcgttgaagcgactgaagagcagctgccatgtttacagaccacaga

SEQ ID NO: 44848 - DNA, 538 bp, Arabidopsis thaliana landsberg
  unsure (1)..(538): unsure at all n locations
acaatatgcatctgctgaattatttagaggtatgtaaaaatgtcacattcttattccaatttatatttttctgatcatcagaataagaatagacctcgaaactttttgcccttgttgaaaaaaaaactatacattacagcaaatgcattatagaaaatagtttatatattatagatagaagaaaacaacaacaatacgttttttttacatggcaaaaaaaaacaaatcagtagaaaataggtatacgttacacacattattccatgtaattgggtctcaccgatcactgattgactcggtcaaaggctatggacaacttctgttacatgtctctgttaaacataccaaaatgttgctatttcacatgtaattacgcatcttcgtatatatagtaacacatatanggtgtcgaccgttgaatattagcctctcattaaaattctactttaggaacacacagctacaaatactcttacatctaactattcanaataaataaataaatccgaaaaaatggttatatgattttaaaagtaac

SEQ ID NO: 44849 - DNA, 605 bp, Arabidopsis thaliana landsberg
cttccttcgtggaagatgtgacttgtttttgggtgaggtagatggacacatgatgtttttctctggtgagaggggtggtcgaaagagcgtagatcactgactttggaacgagtggtgtcctgaagggaccaaatttgaaaagaagtgtctgtagtgtagacaaatgtgattggagagaatgtgcctgtgacactttcagacaaatttcttctaccttttatacgctggcccccatgtgcatcactaatactctatctaagatactctctctctataaatgcctgtgttttctgatcgggtttttttatcaacggtttactgtgcactgaatccatagccgatcatacccttttcattatataaacaaatttctttttaaagtactcttagatactcgttttgggatttacaacttttctaaagattctatttacgacgcacagaactataaggataacgacttagtcaccgtgagaagtaagttctcttcgcagcatgacgttaaactggtagtacagtgctgccgacgtttgatgtacgggaatcctgtttatcccatgaacttattctcttcttaacactgaaaccaaaaaacaacttaaact

SEQ ID NO: 44850 - DNA, 332 bp, Arabidopsis thaliana landsberg
ccccccctccccccccttctcccccctccctttttccccccccccccccccccccccccccctcctcttaacccctttcccccccttcccccctccttttccccctgtttcccctccccccctcccctctccccacccatcacccccccaacccctcctccccccccccccccccccccttctcccccccccctttctttccccccccccccccctttcacccccctttctcttccccctccccccccccccccccccccccccccccttccccccccctttccccccccttccccttccccccccccctccttctcccccccccccccttc

SEQ ID NO: 44851 - DNA, 776 bp, Arabidopsis thaliana landsberg
gccatcatttttattaaaaaaaatcaagttgtaaaagagatatatttttagagaataggaaatagaagaaaaagccaaatttacccttcaattccgtagctttggaagatcccacaaaaacacattccatgcatcatatccttctctctctctctctctctttcttctttctcaaagagtaaaatgaaacacaatctctgatgtgaagtcggttctgtccttataaatacccgctaagacttctctctctctctctttctcaccaaatagtttcatcatctcttcttcactaaatacttagacagagaaaacagagctttttaaagccatgtctcttcagtatcatgttctaaactccattccaagtacaacctttctcagttctactaaaacaacaatatcttcttctttccttaccatctcaggtgagtcatcctctctctctttgtcttgtcagagacatacgatcacacacttgtttatataaagtctcaaactttttttatctaatgagttttgtaatcgaaattctcttgtgggtttaatcatgatccattatttgactgaaatttttgtttggtctttttgattttccctagagaacaaaacaaaaattagagtgatgactctgtttttatgttctctcaacacccacgcgtgaaatatctctcatcatcatcttcctttcgatttttttttttttttttttttttccctttcctcaaagccttatagaatcattaaccactctccaaaattctctctggttttttttt

SEQ ID NO: 44852 - DNA, 718 bp, Arabidopsis thaliana landsberg
gaatcgttcttcttatcttggcacaaaacggcagtgttttttcgcatggtgatggaaaactgtgtggggttgggcttgtcgagtagacttaaatcaaagtcagcatttgcttattggaccagacgttagaagtaagaccataaataaagccaccactcgagctttgattcttttccttttctcaaaagttcagtttgttagtattatttttgtttttttaaatagagagatcaattatctaattgcaatttgcaaccttaacatgaatattagaaagacgaaaaagaaaaagtagaggtcgagggaagtgaacaagaaaaagaagaccattaaggaacgttgttgaatttttaatggatttttaactagctttcatcattcacgtgaaagattcaagagattaaaaaatgaaggctatattttcgtatcttaaaagtctcaattaaacaatgttttataaggctgtaatcttttttatattttgaagtttgatacaaaccagtaatcactaatcaattacatatcatgaaagaataataatgaaaacgatggtgtatatcaactttgacttattcaatttttctttgagttaaaagttggaatgaatcaaattaaaatatactcaatattatagatcctttattaaaaaaatcgcattaaacatacttttcaaatttagtgaataatatatgttccattcatctttgacaaaatgcca

SEQ ID NO: 44853 - DNA, 620 bp, Arabidopsis thaliana landsberg
gtaagcataactttaggtttttgaccacccatagccactaaccaagattgcatcaaccaaacataagtgtaaacagtatcatctgcaagcaatccacacccaagcaacacaggttgtacatgatgattaactccaacaaaaagaactagtggtactttatacttactcacgaaataagacgtctcaaaagaaaccacatcactgaaacttttgtaatcttcaatccctttagcatcaacccagaacacattcctcagaagatgatcttcactgaaatcaacagcgaaaaaaaacttgggattctcttcttgcatacgcataagaaactcaagcaaaatctctgcatcaccagtatcaagaacaagtctccgtcctttatcatgttgattcctcatataaccatctataaaatcaagatcatgataagcactgagatgtttacaatcagtcaacggagtgtttttcttcctactgagacgagaatcgttggatttcacaagctctgtgtttctatggcttcggaaataatgagcttgctctggtaaaagatcgtgattatgctccttgacgaaactgtaaacgtaccattttccatctggtcttcgttttcatgcatactt

SEQ ID NO: 44854 - DNA, 442 bp, Arabidopsis thaliana landsberg
ggtaagacacagccgcagcaggctcttcggatcgagttgggcgagataagttttggtttcgtccgctgcagcgagcttcccgggggtcagggcgcgcgcaccgccagcacggcgttgagcccgccgaacgcaaaggagttgctgagcgccgcgcgcacgcgcagctcgcgcggggtgttgggcacgtagtccaaatcgcaggccgggtcgggcgtgtcgaggttggcagtgggcggcaccacgccatcgcgcatcagaccgagtaccgccaccagcttcagtgcaccggaagcgcccagcgcgtggccatgcatcgatttggtcgaggacaccgccagcttcggcgcatgcgcgccgaacacgcgatggatcgcgggggtttcggagggatcgttggccggcgtgccagtgccgggggcgtgatgtattcgatgtcggaggg

SEQ ID NO: 44855 - DNA, 869 bp, Arabidopsis thaliana landsberg
  unsure (1)..(869): unsure at all n locations
taaagatattttaggaaataaatattttgtgtttaagttcattcgcaggttttctcaagtctttttatttgtggaacactagctagtgtaaaaaaatgattagattttctttctataccactaaagttcgctctctagtaatatatatcctaaagtttgcattaactcataagaggcaatattaagctaactaaagagattgttttatatcataagaggcaatattaagctaactaatgagttatgacaagactcaagagtcaacgtagtttatctatatgcatgctttaagaagagtaacgtcataaagcatattttgcgccgtgagccgtttaagtgaaaattagaatatttgaagtagtgtgggatatataacttttttttttttgagcaaatcgtgggatatataactattttataaaaataacattgaaattcataccacgaagctcgataaaatgtttttgtataatagtggttttgagtattatgtgcgtaaagaatatttgcatgaaaatgatatagagtacgatctaaactaaagctagctaatgtaaggaatataaagatacatataataagtaaagctagacatttatcgtgggaaaaacaaattatgctacattaagatatcaaataaatgtattgggcagtccacaagccaatctagtacaagtattaattaagttacatagaaacaaaaatacatacatacattacaaaaatatactgcgaccctaaattggacttgtctgaaacttacctatctttttgtaagtttcttcacgagaatccgctacaattattgggtaactaaatgaaaatactattatgtgtttgggaatgtggatangtcaattcatatatac

SEQ ID NO: 44856 - DNA, 795 bp, Arabidopsis thaliana landsberg
tcgaccatgattactcgagcgactagaaacaggcattgtcctgaaatggtgtatcttactcatatcttgtcttgaaggatcgccacatcgatagtaatagatagtacttggtttcagccctgcgtttcaaaaaccaatccataaccaagaatatcgaggcatacatatagctaaaatgaagaaaagaataaaagatgaacctgtaatgcgaacatggtgtatgattccagaagtgtagttaaggagaccgtcgaaaggataaagttgactataaacaagtgaatgtcctttagcttcatgactcagtgagtgcctcaaggttccgaattgaacaacactgttgatacttgtcggatctaatggcttcaccttctttccgatttggaactcacctttcaaacacaacatgcattaagttattattaacagctttcatcagagtcacaagatcctaacgtctggctgaagtaactaaaaagagttggataagattcttccagagttagcatttattacataattataaatttataatgcagttctttaagaggaagaagttaaagaaagatatatatagaattaaactgaagaagattacaaattacgtaattagccaaaaatcacttctgtaaatgaaaaagtggattaaaggaaggtagtaaaatgaacctgtgatccaagagacccagatggacatcatgatcggaggagagggacacagagatttgctccggctcaaaaccaatgtacgaaggcggacgcggggatcggtgtcgggcaaatcgatggcttgcc

SEQ ID NO: 44857 - DNA, 564 bp, Arabidopsis thaliana landsberg
tatagataaaacggcttctttataaagcaaatttaccatgattcgcctatttcgtccaaaaaaaagaggaatacatttaaaatggtttatttttgtctatgtattttagttgatttttaattcgctaaacgaaaaataatttacaattatatatggattttatctattattaagaaatcgttaaaataataacttttactcgtgtgcattttaaattttatcaatattctcaaaattccctaaaagtatatttttgacctatatatgtagacatcattgaacaattatgtattgtacattcaaaagagtgtgcacgaatatacactgaaataagatccttatttggctctatatattttaaaaaaatatttatatattacttcccttactttttcacaattatttatatattacttaaactatgtaaatatctaatgaactacataatatccccactaacaataatgtttcttaaaaataaataaaaagtaaaaatacatttggcaaacaaaaccgtgtcgctgtttcctccgattatggttttgaaaaaaaaaaaaaaaagtc

SEQ ID NO: 44858 - DNA, 538 bp, Arabidopsis thaliana landsberg
cagtaatcgaagataaagatgttgtagttttcatttccactttgcatggtggataaaaagatctgattgtctagaattttgtaacaaattttgatacttgttgtttgtaatctctacgactacccaaactttatgtatttgtttactggaagattgatattagagtatttatcaattttaagtgtcctttctaacagatactttatgcgaatctgcatatctgttttctatattcctcattgaattgcagcaaactcaacaattccatgagcttggtctcttattacggatttagtctgcaacttgcatttcttcagtggaaataagtaaacaccaaagtagttgatataacaaatgcattcggagtttgtgatgaaaaacactacataatcatgtggttacataactacaattagatagaacataacatatccattttcgttgtagatctttgacgtctctgctcaattggtagtcaaggaggctgcctttttgttcatagcataatcgcagatgtaaacacagttctacgtaacca

SEQ ID NO: 44859 - DNA, 691 bp, Arabidopsis thaliana landsberg
atcaggggctttctatattccaattgttattctaaaaatatttttcctttttcttgattcatcatctccaccgggcaaagcaaaacaagaatgtaattttcttatcaacctacatatttgctgagattgatgttcttagtgtcaaattttgttcttactacactaaagaagtggaaaatgacagaaaataaaacaaaaatagttccgacaaaagacaaagatgatctcataccttatattttgaaaagcttgaagaaaataatatttaagacaaataatgaaacactgaattaaatgatccagctaatgtgcttaattccagctgtgtggttctcttttggatactcttaacacattgataatcttacatactatttttaatttatatctttatgaatatatatgtatgtatgtacatatgatatcatcatcatgggaatggtaaattatccaggaagattctaagaaactatagatgtatgtatagaatcttcccgggaaaacccatgaaacaagtaaccacgagattccatggggttaaaaggaaaaaaagaaaaaaagttaacattctttgctttctgtcggaaaaaagaaaaagtttggtccttttttaaacttttttatcaagaaagtagaaaagaaaacagagagacttacttctgatgaagtcggaaagattcgagaacgaaga

SEQ ID NO: 44860 - DNA, 651 bp, Arabidopsis thaliana landsberg
catcggattcaaatctaaaataaacagatgtaaactgatccaacaaaagtgaggctaataatatcctttgtttgacttacactgttccgagtaaccaacaaaacatcaaagcaatcctatctagctgcattttcggcattgaaaaaaccgctcaaatcgataagcctaacacaatttacagagaatatgaactccaaaatcgctatagtaactgaaatgatatcaaaagattcaaactttaaaggtgacaaaatccaatcatacaataccgatgaatctcagtaaccagcaattcagaatttgaagcaatgtatcattctaataaacaagataagattttttagataccttagaagagaatcaggatcagaagggaaccaagtacttctcaaagcagttctacgatcaccggaatcaaaaccagtctggatcccaacaaaccctaaaagctttcgtctttcaacaacaacaccattattaccaccatctcctccgagctttcttgaagcagacacaacccgagaagtgtctttagatccgccgcatcgataaacagaagcaggaccggtggaggagagtgcgaagatagttccgaagacaccgatgaaaacagagacaagggagaagaatatgatagctacatgaatgcga

SEQ ID NO: 44861 - DNA, 468 bp, Arabidopsis thaliana landsberg
aaagcaaagacagtggaacatcgtgtttttcgttaggcgaaagcaaagacagtggaacatcagtgcttgatggtaatgtcaacataggtggtggctggttaaagatggagttggcactcattgcttgataaaaagcagcattagtgtcttgcaaaagtgataaaccatttgctactctctgggagcaataatcttctatgaactttttaacttcctccatcgttaaatgctgcagatgaaatattagaggttgacgttgcatagaatcaggagccaacagttgaatcaagagaatagcatggcaaatgaaaccaattcctccatagatgtcaagcttactccgttcctccccttctatataatcaaagacaatatataagcgatcaataatattgcaaccaaaacataatttcaataattacaaaagtatcaatgatagatatttatacccttgagatggactaattc

SEQ ID NO: 44862 - DNA, 593 bp, Arabidopsis thaliana landsberg
tcccggacacgattcagtcgaaggtagattcggattcaaggaaagagttataaatgatcagagatccttttcgcaactctgtttaatcgatcatatgatgttatgtgtgtttttatcttaaaagagtgtaatccacgatctatgtagtttatataataaataaagaagtaacttatatcacacgtaaccattgtgcatcgtctagatcaagtaacctctttcttcacatggctgactgtaataaacattcacatggttgcattggaaactgtattcattatctttctatctaaatcaaattcccaaaatatcattagaaaccctaaaaaggccttgtaaacctctgaaatctgtgaaccttcatcttcaccaaaggagctttcctggcaacagctttccaaatcatctgaactgcataatctccctcgtcatccttcaccggaaaacgcaaatcgaaatacctctccacttccttcaaccgaagccacatcttattatactcttctctgccaatactcctgacaagacccatcagaaaccctttctttaaagcgtctgatgatctgacaaagagacagaactcattgtagttg

SEQ ID NO: 44863 - DNA, 307 bp, Arabidopsis thaliana landsberg
gaaaaacaactgtaaagtttcatacttttgttgcaaaatatcaaatatcagagcagctaaactccttcatcaaatcttcattgctcccttctttgatccccaacttcatctgttctgccacaaagcacttggtgatcacattacagaacaaatacacaaacttgaccgaatcacgagctggcacaggatacgtaatcttatgaaagaactccaatggcacattcgggtccacaattgctacaaccggaatctgtagcttcgatgtcttaagtatcacagagctctttctctgagaatcaaacactac

SEQ ID NO: 44864 - DNA, 637 bp, Arabidopsis thaliana landsberg
gaagagtacataggatgttgttattcatgaatcatgacttcaaacttctaacgacggccaagacacactttattcatgttcattcatacaaagcaaatgaaagcaaaattgctattgagattaacaaaaagtaaaaaaatggttggaattagtaggaaccaaaagtgtcggtaaaaaaatggaagttgtaaaaggttgcagtcaaaaataaacaactttcaacacaaaccaaaaaaaaatatttacaaagaaatgtactttatgagtcaacagaaaatggtcaacacaacacagtctctgcgttaatgtctttcattgtctatctagaaacaaaaattcaattctcactctacccttttatgcccaaattctgaactcatcccacgtagacaataggacacaaatggaaatcccactcacccatttttttcatttttgtaatcaaatccaaaaaaaatgttcaaaaagtgtcttcaacgttcacataatctctaactaaattcacaatacggattctataaaccgaattaatcatttacatttttttaaaaactcagcctatgttaataattctttttttaccaaaacttagagccttcaaaattctcaagatcccaatttgttttttatcgtcaac

SEQ ID NO: 44865 - DNA, 970 bp, Arabidopsis thaliana landsberg
ctttaaaatctctggaccggaccggtctactcgcaacaaaatgatttatttatctaaaatgtgtcggatctactaatcttttttttttttgttgcttagtttgctaattactttcttgcattctttatttggttgcttttatccaaaaacagactaaaataatgcgtgtatagctttcactcttaagcaaaatccgcctagacaatggtcacgtcttcactcatttctctactattctcttatgaaaaatgtcaataaaaaatttgcacactgtataatgtaataatctgagtatcaaaaaaattttattttatatctttcattcgcaaccccaaaaagaaagtaaatctgctaactttagatattgaggaaatttcaaagtcagttttatttgttcctgtttttgtgttctctttgccttgatggtaggatctgtagttaacaagactagtgttacatctccaaactctgatcgctggaaaagtatcaagctttctgcttgattctctttcttagcatctgtcaagctttctttgaagataaatttgaggtaaaaatcaaactaatggcttctctcactttttgtttctacttcttcttatgatcttttgtctttgttttgatcagatggagcagttcaaagagaggaagtttgtttgtaagttctgtagcaagaggtttccttgtgggaaatcacttggaggtcacatcagaactcacatgaatgagaattcagctgattcagatgaagatgaggctgataagctcaagatgattgatgaaaatggtggtcaatctagttatggtctgagagagaatcctaaaaagaacaagaggtttgtggatcacagacagattatggctctgaaacagcagcagcagcagcaacaacttcaagagctgcgtcgttgcagagaatgtggtaaaggttaagtttcttctaaagctctttgtggtcacatggcttgtc

SEQ ID NO: 44866 - DNA, 508 bp, Arabidopsis thaliana landsberg
gattcacctttcccgacagacctggtgctctaatgaacttcttggactctttcagttcacggtggaacatcacccttttccattaccgtggacaggtttgtttcccatttcaccataaaaatgttttaatggaacttcgagtctcctccttactatacaatcttccttctttcaaaaaagggtgagacgggcgcgaatgtgctggtcgggatccaagtccccgagcaagaaatggaggaatttaaaaaccgagctaaagctcttggatacgactacttcttagtaagtgatgacgactattttaagcttctgatgcactgagtttgaagctgtggtggataatccaaatctcaggaagaagaagaacccatgagagtcttcctcgtgatcatggttgttcttgagattctttagtctgttttctctcgggtctgtgtctgtcggatgagcgttttagccactgtagttcaatgagtaacctctatttgctacgaactcttattcctag

SEQ ID NO: 44867 - DNA, 776 bp, Arabidopsis thaliana landsberg
gtgacaaatcacaatgatggagctgactttttcgttcttagaacgtatcacaagttttctcatactttaaatttcatctccaaattgttgaccaaacgacatcgtctgttgtgacaccttaccccaatgttttttcttacgtagcatggaccttttcttacactttcacataattatctgtctttttttctcaacatttatatccacatttcaacgattttctcaggatattttctatcaatatgcttaattttctttctttttttgttaaagaaattaattcccatagttaacatgagagggtttagcaaaatatgcttaattttcttgttcgctgatgtttttatttttatttattattactgattcagcattcaaacttatcatgtgatttggatggttattgaagtttcatattaattgataaattaaatgtgttgggatgatgagaggtgatatagaaatacatattgtagtgtttaaatagatatggattcaagtatataattaattcttcttaatcaaattaatttgagttggactagtagtctagtaagtagtaagagaacatattcggatggtatcttaaatttatgaaatacagtgtgttttcagtttttattggtagcaacaaatttctcggttcatacctcaaagatagtattatacgagtctacgattatataaaaaaaatcaatacaaaataattgttcattcaaaaacaatcggacgatatgaacattatagttacaaaactaagtaaaagcataaatatg

SEQ ID NO: 44868 - DNA, 484 bp, Arabidopsis thaliana landsberg
aagcttatcttatatgcacatcccctaatcgaatgtcttactcacaattgtatgttcatttctccattattgattttttttatttaacatatatagagatttgttgtaattgcactcgaaccaaaacaataaaacatttgttatttcaaaacccttttccaagacgaaaaagaaaacccatttccatagctaacctagtgtgaattttgttttctcagatttaacctcctcaaacggtgaaatggtaggattaatttatcaaaaacttacctatacgggttttatttcacttatgataaaacgattcggcccattaacccattttgtttttctgctaacccattggcccatttagaattaaagaatcatctgatttagtcatttcgatggttttcacttaaaccctagtctagtcatttctcagactctgacctcactgatcttcaatggcgaaaaccctagctcgcttcacagcgtcacgcat

SEQ ID NO: 44869 - DNA, 524 bp, Arabidopsis thaliana landsberg
acatccagaaggacggcacctattcggtggtcccgcgcatgtggggcggcgagaccacggccgcggtgctgcggcgcatcgccgacgtggtggacaagtacgccatccccaccgtgaaggtcacgggcggccagcgcatcgacctgctgggcgtgaagaaggaggacctgcgcgccgtctggcaggacctgggcatgccctcgggccacgcctactcgaaggcgctgcgcacggtgaagacatgcgtgggcagcgagtggtgccgcttcggcacgcaggactccacgcgcatgggcaaggcgctggagcgctcgctgtggcgcatggtcgcgccgcacaaggtcaagctggccgtctccggctgcccgcgcaactgcgccgagtcgggcatcaaggacgtcggcgtgatcggcgtggactccggctgagagatccacgtcggcggcaacggcggcatcaagaccgaggctggccagttcctctgcaaggtgaaaaccggcgaggaggtgctggaacacgcgggc

SEQ ID NO: 44870 - DNA, 783 bp, Arabidopsis thaliana landsberg
taatccactctagaactttttctgtcaattgttcaaaggagttaaactgacatgtgtcattttctggctaaagaaccgttcatagttggttcgttcgatatctttctattccctcaacaaatggatttggaatttattgtaattattatcaaatttagctttaaactaaagttatggctaatttaacacgtcctctgaattaaaatttgacagatattacgcgttgagagctctttcgtgtataggagcattaaacaggggtggattttcttctttcaaacctgaacatgtgtttcttctaacctttgtacgaatccgtgtccatatgtgcatctcttttcttttgctagcctgctattactataacacgctttaattacacaagagatgaactagtttttgttccaaaactcatactaatattttgacaataaaacttcaccttactagctactttcaaaacctttctacataattatgcataactaaattgtatttctctctccagtctccacatatatttctctaaattctagtatggtactactactagaatcattatctatttgtaaataaataaaatatcatttagtaccaaacatcacaaaagatgtttatagttagggaccagaaaaacattgcagagggaataattgagttacataatagtaagaaagaggccatgtgatgtgatgatgctgagattctccctttttcagttctttacttttaaattaaaaaaatggaatatttcgccaagctggtcccctttttttaaaaaaa

SEQ ID NO: 44871 - DNA, 521 bp, Arabidopsis thaliana landsberg
agaaggagcgtggtgttgtcaggactataaaacgtatttgtggaataaatccctttacttagccaaggaaaaaaacgtgcaacagtatatataaatataaatgcatgcaaatattatgaattgaatgtaaaaaaaaacacagataaaaccctaaaatcgaactatgagtattttcctttcgtatggtagtttcggccaaaaccaaaattggctttgagttttttgacaactcaattattgggtacagattgaaacaattgtattttgttttcccaaaaaagcaaataattagccaaaaaagaaacaaaaacattgggaacaaggaaaaaaatagtgggtaaaaaggtaaatttgggtaagatgtggtgaataaatgaagtaggaggacattgggtggcgtgtgggaggatgtgggacacatgaagagtgtcgacatgataggtgagagatatgatactagataggttctttagtcttagggttagacttttgtagacacctacctaagtggttttgtgtcc

SEQ ID NO: 44872 - DNA, 774 bp, Arabidopsis thaliana landsberg
tttcatatttgtgatttttgatgttcttgttattgttcctctgtttgtgaattcaattagggttatgatcttttttttttttaacttctctttatgttgatatatcgatatttgcttttgttgataacatcgatttcttatctttttttttttttttctcagtgtcattggctctcaatcgaagaaaacttttagctgacaaaatctgctttgggttgtattgatttatcaattcgtatggaaaatcctccattagaatctgagatcaaagaggtgagtttttcgatgtttaattcgtgtctcaatcgattaattactgtttttcttgtttgaacatggttaattactgaagattatgtaaccttgaatcaaaaacagtattgatgtttggtttttattcatcatagatttgtatagagtcttttgttttccggatctcgtttgtttacttgatttggcaaattacctaatcactgatcatagatcctcttcgtctttgaattatagactagttttgttgtttatgcttgatctttgtaacgctgattatagtttctaggtctgtttaatcaaacacatattcatatatttgttgttcttctctaaaaataaatttatgtgtgtttttaatatacaggatatgtctttgaagaatcatcctccagacaaggataaggacaaagacactatcatggaacaacctagtagtccacgtcatcggaaggtaatatgatgtaatctgatgcagaatccaaaacttatataaatcttgaa

SEQ ID NO: 44873 - DNA, 599 bp, Arabidopsis thaliana landsberg
ttttcagtgtgagtttcacactagtgccattaggtttaaggatcttgaagttgtagaatatatcctcatcgtcatgatcatcaagaaccaatgatctcttcactgatcgcctgctgctcatctgaaatgcaaagacagaaacaaccatgaaactgattaacttttttgaattacaaattaggcacgataaggattacagtggaagctaaacatggaaattattgattcctaagaactctaattgaattagtctcacagctattgaatggttttagatcattattgatgatttactataacgaacctacaacaattacaagaaagactgctgcatcaaaagtacaaactgtttcttccttgcctctaaacgattgaaaatcaaaaggactgtgtaaggcattcacagatttaagctatgaatatcatatcaatctagtacttgttctacacttgtactaaacatacacgcatgtacacagaattttgcatataacatgaaaatgtaacaggccaaatcgtgaagaaaagctacaactttatcaataacaaacgcataggcttcttaaaaaaaagcagcaatttaagtaaagagagtctcg

SEQ ID NO: 44874 - DNA, 124 bp, Arabidopsis thaliana landsberg
ttctgtggctccagggactgacgccgcagccgctgctaagaccgcaccaggaagcattatttgaaggccgggacagaggcctagggggggagttagccaaacggaaacgaggccactcgggccg

SEQ ID NO: 44875 - DNA, 576 bp, Arabidopsis thaliana landsberg
aaattaatggaaaaaaatctttcaaaaatcattttttttttggttattaaatcatttttatttgacaagtactaatgaaatatttatactatatcagtgggagaaaaatcttaaccagcccccatcaataaaaaaacctgacttttgaattgtaatatatctgatcttatattccaaatagtgtagaaaagaagatttaagtgaatttgtgtttttttgtgtttttaggagcatttgtttaatttttgatgagttttgttttctagaaatttatgggttcgagagtcggagagtgttaattgggcccagttgggccattttgagaggtccatgcatgcatatatggtaagcaacttacatgccttgtgactttttttttttttaaatgcattgtgactttgtgagggtaatgttggaatgttacactaattaggattaagttagtaaaaactaaaactttattcctctatcccatttatttgcgttctcattccttttcacaatctaatcaaacctctatttagtcaggttttgaatatatttgttcccccgattttaatttggttatgttctata

SEQ ID NO: 44876 - DNA, 419 bp, Arabidopsis thaliana landsberg
cggcgccgacgtgctgggcgcctgcgagaagtccgcggccgaaacgggtttgacgtccacggatcgggtgtacttgaccggcgggtgggacaccccggctgacctgggcgacaacatgctggcgatctttgccgaaagcgcatggatggtgcaggaagccaaccccgatccgggcgcgcaggaaacgccgccgggaaagcgagaaggttacccggacgctgagctgacccgagccggagctggcattcatgcatagatgcttatatgcagatacccttaccggcgagaaccaagcgtaatgaaggggatgactgatggttgtgcagggactgctggcgaaagcggtgggaacagcgttcaccagactggatggggtgagcgcctactaagaggtgcgcaaggaactggagaaggctccg

SEQ ID NO: 44877 - DNA, 570 bp, Arabidopsis thaliana landsberg
ccctcaatgccagagtgaaatatgccaaggccgaaccaatagagataattgttgacaggagttagattttagacgttgagataaacaggcgtgagagagccttctccattaatctcttcttcttccttatcctcaccagagcataagcttgagctcaaaccaagcacccgcattttacaagaaccaatgtctctcccaattcaaacaatcatgttcctcctaaaatctctgcaaaactagaatgaaaaggaagagaagctaaagtaaacaatctgttcacataattgaacactagggattcagaaaggaagctgctttggtagagctagtgagcacagatcaaagaatccgaatcagaacaaaattacggaatctttcaagtaaatcttaaaaattgctaaatcaagaaaacccatcaatcaaaaaccaaaatttagagaaaatgaactaaggctaaacaaatctgaagacctaattatacgagagagagaaaaaaactaacgcaaaggatccagacgaacaaaaatcgaaatcgagagggctcttagtctcaattcgcaaacattatac

SEQ ID NO: 44878 - DNA, 602 bp, Arabidopsis thaliana landsberg
ctgcacgacatcaacgaagatttacttgacattgatcaacaataaatctacttcctcatctaaagatacactagtacaatgtagatcttgatgataaagattgacattaaaaacgatgaaggtaacatacaccaggagataaatcatatccgatggcattagttcctactccagacaacagtaacaatggatgattcctcgtcggagcctaagagaagagagaaaattcttgatcacaaaaaaaaatatataatccaaattgcagatacagagaaaggtgattgttgaaattcgaaaacctgaggaggaggcaagtagcgccagagagcgagacgccaatcggtgttaggaacggagacgtaatgaagctcgtcggcggtgcaaagagaaggtttcgtggggagcttaacagaggaagaagagaaagctctcggtcgtaacaacgtcgttcggtgacgaaacgaaggagtagtagtgacggtgctgatggaacggtggagatagacggtggaggaagcccggcgaagagctgagcggatctccaagggaaatgtggaggccatgtggacatggtacggactctggcagatttggaaaaaaac

SEQ ID NO: 44879 - DNA, 495 bp, Arabidopsis thaliana landsberg
cacggcgcccaccaggtcgccacctaaggtggactcagcccgcccactcaagctgcgcagtatgtcggctgacacctgaaccgggctttttgcaccgaaatcggtttcaatgcccaccatgccttggccatcaatcaggcggtagggcagtttcaggccaaccacatctgcgtggccacggcccatcaggcgtttggcagagaaaatggtgttgaacgggtcttgatcggcgcaggccagggcgtcttcacccatgttgcgaacgccgtgctcgccataacgcaccaccgagggcagaatcactcggccatgctcatcgggcaggcattcggcgctgcctgaacgcacgctggccaccaaagagtgggtggtgccaagggtcgatgcccacagccaagcggtgctcgtgtggtgcggttgacaggccaggttcggcaatttgtagcagtgccattagctgggcgtctccagtatttcaattcgcttgttcaattc

SEQ ID NO: 44880 - DNA, 297 bp, Arabidopsis thaliana landsberg
  unsure (1)..(297): unsure at all n locations
tcttttattgtttttgaattgaatctgaaatttgataatcaaatatagatgatctgaatccaggaaagcgaggatgcaagtggggttgaattatggaggatgagacgagatcaacgtcatcactttccgatatagctattagtattatcgacgaaggtcctctttctccattacgacaacgtactgaaagaagttttgtatctcatatcanacgcaacttacagtcatgggggaaaccactgattcttttggaatcagctaggaaggcgtcctgctgcatcttcagaatccctgata

SEQ ID NO: 44881 - DNA, 520 bp, Arabidopsis thaliana landsberg
ttcgctaacttgtagtgattcttgtgtctgatgaaaacagtttgagttagacttgcggagttgaaaacgatgattcttatgtcatatttttatttatcaatgttatgtctaacttcttgaaataatttcagagtcattgtagaatttaattcatcagttaactaagggaagacgcaatctctttggtgtttttaagtcgtttttcttaaaaactttgaattttcttttgggtattaaaaattaagctcaataatcatacatacatatatatagcatgatatctttgactggatgttaaaaaggcaaagcttaataatcattatccgttttcattttatatatgagctgtatacatgagattccattgattaggtagacataagcattctcattaaagttcaagaaaatcttttggactcgaggttaaacattttttttttttttttttggtctagcgagattaaacattaacaatcaaagatatcatatacttaatacatgcgacctacaaggatccttt

SEQ ID NO: 44882 - DNA, 459 bp, Arabidopsis thaliana landsberg
aaataaatttaacatttgatacatgatttaataccttttttaaaacaaacttctaaacagataaaacagagtagagatagagagacctatattccatgaatgatcttcgagcattggatcttaatccatttgtaactctttctcaaagttatcttcatcttcccttcggctgaatagagtttgtatttcgccactcgtctctttctctttatctccggatcgttccaccatcctccaattgattattacgcaaacaaacattccacaatattaaaaacattataaatccccacaattaacattaggattatgacttgtttatatgtgtataattaattttgaacgcaaatgacttgtttatatcttataccactataatcattatttttaacttttgcaattaaatgcaagcaacaattttagatgtgcgctattaatcatataattcatttattttag

SEQ ID NO: 44883 - DNA, 789 bp, Arabidopsis thaliana landsberg
  unsure (1)..(789): unsure at all n locations
ccacaagcggctagcaattgtgatttctggtaaaaaaaaaattcgagttccaaaacatgctgaaaatctcggtgaattagttgtgtcactagtgttgatcatcaatacttccacttaactgtgttaaattttctctataatattataaaatgtagcaattgttttcttagtaagtactacaaaaaaaggtttgaagaagagcgaccaatcataggctacatagtaattctcaaaaacgactaacttataccttgaagaaaccaaagattccaatttcacgcatatcaccgtttcacgcaaattctgaagttatatagatcatgtgcatccatcaaaaaatgtatttgatacaaaatattcaatataataaaatacactgctccactctattagtctattttcataagatgtttataattatttattttttatttcattttatttgaagttatttaaaaagtgtaactgaaatgtaatttttttatttcccttgcctcaaatatatgctgtatttttactattcttttattattagttaactttaaaaaactaattaattgatgcttttcatgttaaaaacatataaattttaaaatatcttgcaaatagaaacgaatagagaaaaattcacgtgttggtagattactggattgttattagagagttgtttgaagtatagtgagcgaattaaaaatttactgtgttgcttgctgcactaaaatnacgatgtcgtttttgaatctaaaacatgtgagattataggaatgttctttgatcaaatctcatttg

SEQ ID NO: 44884 - DNA, 484 bp, Arabidopsis thaliana landsberg
gaccctatctccgacgagtgatcctgcattctgtctggtctatttaagctggttaacatcaagcccgcattatccttattctgaagcagacgcggcacctggatactcaaaattatgacatgtaaagcatattcttgcagaatctaatccctttggagcatacagatcccaatacagcggcgcctgttatgtaaaaaaaaaaaaagaaagcttcaagatgtgtcctaaacaaaatgaattacgttactgcttaaaaataagatcaagccgtacaacaaaagctgtttgccagtcatgacaatgtatgacgtcgggctttttgccggactgaataagcaactctagcgcagctcggacaaaatacaaaaagcgtctgaaatcatcttgctctccataaaactgtcctctccataagaatatgcttggatgccgaggctcaatgacatgtacaggccaacctgtcaatagagagaaacttcaaatc

SEQ ID NO: 44885 - DNA, 488 bp, Arabidopsis thaliana landsberg
tcctgtgttatgggaaagttatattaagtacgataaagtgtattgaaaataacgtttcaaccgcatacaaagagcacaatgtcaatgttaagattaatattttctagatatcagttttgagctccttctcacacatgctaatataaaagtagtggtcttgtgaaaaagcaaaagcactaattcagagttatttgaaagaaactaaattcctgatttaacaattcaaattaggttcgctgagaattctagaagaaagaaacaagtgacacacattggtacaggtttgattcttaacaccgttagtattatcccagttcttcccatactatttctactagggatagacaatacgtaaacatcaacactacaaacctcgatgaaagacttattctatgtgtgaatctgtacagtgttaactgagcattgaactttcctttcaacaaccattgttgcgcaatttggaaattatccaaacctttcacatgcag

SEQ ID NO: 44886 - DNA, 362 bp, Arabidopsis thaliana landsberg
tcctaacctcccggtccctgaaatatatccccagccaccacgtctatggtcttagttaaaccttcttatattcttctctttggtttagttgtcgaccgatagatactcatttgaaacctattgtttatgtttcaagactactagaatatgttggaagacacttggaacatggactttggaggtggtggtaacatgggattaccattgtgggatagtttagtatttttgccttcaaaaccatggcaagaagaggtgattggtctcgctgaatccattacaagcagcattctctctgctggtatatgttgtgatgcaccctcctgcattatataaaaatcaacacctaacaaaaacgttatcct

SEQ ID NO: 44887 - DNA, 711 bp, Arabidopsis thaliana landsberg
  unsure (1)..(711): unsure at all n locations
caactactaatacaccaggacgtgattggataaacattttcaaagggataaagattccgcgaagcactacttggtggttgagcagagatttgtcttcacacaagttcaaagattaactaaacatttcttctgttatttgaccgcacgagttggaaaaaataacagtagatatctatatgccatttcaagcgaaagcgaaacaatcttaaactagagtaaaccgatatggaacaactaattcagcatagtaaccaagatcaaacgcctggaatttgatttacagcgctttcatcagtgttcaacatagcaagatactagagtactggaagaagagtttggtacctcttaatgcggccataagcccgggagcccatgacaagaagatcagcatgcaaattctctacagcttcgcagattttatacttgggatccccaataaccacttgggttttcacattcacctgagagtaaaccatcacaacttgctcatgaatgaccaccctcaaatcaatatacacttctatagataacacataagtaattgctccagattctaatccatcagtgaaagagaaatattctaatccataaaacttatagaattacactactagatctggactatgaggtaaaatatcccattctcacaggggacacaagggaaataactctactcacagattnttcagcacaaatttgactagcgtgttc

SEQ ID NO: 44888 - DNA, 606 bp, Arabidopsis thaliana landsberg
  unsure (1)..(606): unsure at all n locations
acgggctgtcttcgtcttgaaacgagtcaaaaggaagggtgttaattccatctttcaacatttcattcatctatcttagcacacacggacaaaaaaaaactgtgatttgttcaattttttatattttaataggacaaaaatctatttaggagtttggaggttagttcctattgcatacttcatcttcggtaaaactaaaccgcctagaggtatcgatctctggcttgccctcttgttggagaagagagagttctcgaggaacattaatagtgtgtagaatggtttatgtaaactgtgaatcaattgtgactacccttggttaaaccggaaccttcttctataaaaagaggttttcattgtaacaaacacttaagaagaataacagaataaacacaatcttaaatcatcgtttgtatcataaacgtcattaatctcaactaggtcgtctctataaatttgcatctatctgtcctatcgtatttcatatctcacattacgtctttcttggatttatanatattttcaatatttaactataaatctatattattggattattcatatcattattagatttcggttgtattggtcaagaacatgatgatc

SEQ ID NO: 44889 - DNA, 560 bp, Arabidopsis thaliana landsberg
  unsure (1)..(560): unsure at all n locations
gacaatttaagaaaaattgtcattgttaactatatatgaatgttatgtcatcatgtttccaacgttggtccacatacatgttaagattcttttcgaattacacttggaaacaaggagagaaaaaaaaaggtatatggttcttgtgaataatccaaggataaaaatgcattattgcattaaataccaaattctgtaagtttacaataatgcagacaaactattattttttctttctatttggcttatataatggatgtactagtgcccatacatagttaggggaagaaaaaagacaaatatatcaaattatacatgcgtataaaaataattcaaaccaagagtaaatgtgaaagtagtattagtatgtttttataaaaccctattttagtaaaattcatattcgatccctcgcgcacgtgaccttatgtcttactcacgtgacctctntttccctccactctccactgtcgattccttttaggctattgcctttcttctcagtcattccttaagaaggttcattaacagatctaagaatgttacntgatcaagaatgaatg

SEQ ID NO: 44890 - DNA, 535 bp, Arabidopsis thaliana landsberg
catttatcaccattactagtctttgtttagacaaacgacccttctcgggtcatttactatgatcctccttagtacttttgtactgttatctttcattttgttgttctattgtatctgccattattgaaccgctaaaaagattttgtaacggttggaaacatttttacatgtattgattgattcatcttttcctgaatttcagtgaaattcccagaagaacagaaatctaactgaaaccgcaagaacttactgtaagcccaattctgttaatgataatgttaaatgggctataaaatgagccccgtcatcagccgctgaagtgaaacgcatcgtttagtatcgtcgtcttctggggaaaatatctttttttttaaacactatcaattcgactggaaaaaggatatttccagattaggtagagagagagcaaaagtactttcattcagacttcaatttaagctatggcggcgaacgattctacaaatgctattgacatcgacgggaatctcgactccgattcgaatcttaacactga

SEQ ID NO: 44891 - DNA, 502 bp, Arabidopsis thaliana landsberg
ggtgtcatcccaagttggtttggaggcttttatttcttgtatctttcggtttcggataatctcctaattggttcaataccaagcaccctctttaacgtatctttccagcttttggacctctcacgaaacaagttttccggtaacttgccttcacacttcagttttcggcatatgggtttgttgtacctccatgataatgaattcagtgggccagttccaagtacattgctagaaaatgttatgttactcgatctacgaaataacaagttatccggcactatcccacgatttgtcagcaaccgatattttctttatcttttgttgaggggtaacgcattaacgggtcatatcccaactagtctttgtgagctaaagagcatcagggttttggatcttgctaataacagattgaatggttcgatacctccatgccttaacaatgtatcctttgggaggagcttagactatgagatagatcctgactttggatcatcatatggca

SEQ ID NO: 44892 - DNA, 781 bp, Arabidopsis thaliana landsberg
cataactatttattgagttaatgccgccttttatttttacctttgattttcatttccaacaaaaaggaaatttttaacaaaaaaaaaaaatctggaaaacaggggaaactgtatcaatattacataaacctcaaaattatggtatcagtggttacttaatagttaagaactagttgaagatccatactggagccttagtgtacagtctctctagttgcattttttcctttggcttttagtaatggccttatcttttcactagacccactctcttattccttctctttaatctacaccgtccatccaatttggacgcaccagatcttatcacacataccattcacttcattgaataattactatataacagaaaaaaaaactcaattggtttgagtaactcttcttttaagctcctcaagcttactgtaaaaaaaaagtctatttgaaattttcaaaattttcaatataattatttattaatctggtttcatttcattagtaaacagtaaacacaacatttatatttgtgttgtcatattttcctacttaatgaatcaaacaataagatcaatgctatttttatattttatgtaacaaaggaacttttatttttaccaactcttttgactgacacagattttagtaggtaaaaaaaaaatccaagtgggagatatttcaagtggataaagatttttattttttgcaaagaaaaaacgaaaagttccattttttttgccaataaatatcaaaaactggacttggtatgtcgcataacccttaa

SEQ ID NO: 44893 - DNA, 473 bp, Arabidopsis thaliana landsberg
ttgatttgtgctccatatctgtaaccgggttgacccgacacgtgatccgcaaagcttttattattactgtagtatctatcttcgccatcacggatttctcataattgggccttcctattttcagtttctagaacccaccacaagtgattatgtagctcagtagcttttcattctacgccgtcgtttttagttttagaattttaatagatgaatgacaattttccttaccattttttaaaaaatcagttttctcattatgctaatatgatcttttattgccatttatctccatattttatattgatagattacacactggcttgtagatattgaggaacataaataattaagcagagcataaacaatggagctcaatttggcctgtgttactaaactggtaacttcatttaaacttccttcaacgactttgtttattctttgcgctgggaattagccaccaatttatgtttcct

SEQ ID NO: 44894 - DNA, 643 bp, Arabidopsis thaliana landsberg
atcccacacggacaacaaaatatgataggtgtagtctagatctaccttaattcacataggacatagcttacacgcgcatattgaaaatgtacctatgggaaaggttatttctgatcaaaggagaattatctaatatatcattattattagcagtatcacattttctaaactcaattaagcattttagtgcatatcctaggagggtatatatgacacatattgtttaaaaaaacgtatatattcaacatgctgaatcgcttttgtaaacacaattaagttaaatgttttcatatcatattcaaagtttattgaaaagaatcatcggcttgtttgaccaatttttttttataaatcttattaggcaactaattatagagttatttttaattaagtgtagttgacaaaaaaaaaagtgatttacaaaaaaaaaaaatcaatatatagttagagaaaattgtataattgtaacaaaaaataaaatatttatggggcattgaataaatacaccttatttgaccagataaatcatttttttgggaaaataataagcatgggcccacccagtttaattataattgtttctttggacaaaaaaaattatttttattttcttaaaaaagaacataattttttccttttttta

SEQ ID NO: 44895 - DNA, 803 bp, Arabidopsis thaliana landsberg
caattacgtaatgtgagatgagagtttggaccacattgatcaatgttcttttttgagtttcacctactctttaatttttgaaaattcaaaagaaaacatgaactttaacctttgtattaaatccagccttagttaattgagagttatttagttgattattctcccttaattaagccgaaattagccatagagacatgaatgatgctttgtctctttcaggaccactcaccacgtacgtaaataacgataagatttaacatgaatttacgtgaattcttttaaaacaagcttatagttttcattggaagggtcatgtgattgccacgtgtcttgttctagaactacatgtgtattatgtagtaatgtttacgacgtgatgtcggtctaaattatgagctgtacccaaaactaaatatgtatcgatttccgtttgattttgaaaattttataatccttctaacaaaaactatatatatataaatcttcatccctataactctagatactttggtcggtccacgagaactcctctacaaatttttttttttttttcacgtgatatgatattaaagatgaaagaatggtttatgtgaacgtataaatcattctttgagctttcagcttcgtaataataaatttaatatgataatgaaaacatgtttgttctttctgtatccgcgttttagatgtactcatgttatgtacaaataatcgtgaatgtttagcttcataaaataaagctaagaatgacgagattcgttataatagaaaactatgagttgttgaaaaaaaaaacacaaaca

SEQ ID NO: 44896 - DNA, 235 bp, Arabidopsis thaliana landsberg
ggcatcaccctctatgtgggccagcgcaaaggctcggccagcacctcggccagtggcccggaagcgatccgcgaaaccgtcgccgcggccttggcgattgccaagcataccttcgaggacgaatgttccggcctggccgacgcagcgttgatggcccgcgagatcccggacctggacctgtaccacgactggaacctcgagccggagaaggccatcgagatggccctggcctgcg

SEQ ID NO: 44897 - DNA, 437 bp, Arabidopsis thaliana landsberg
  unsure (1)..(437): unsure at all n locations
ggggggggggggggcgaggggggggggggggggggggggggggggggcgggcggggggggggggggggggggggggggggggggggggggggggggggggggggggggggggggggggggggggggggggggggggggggggggggggggggggggggaanggtggtctggggggcgggggggggggggggcggggggggggggggggggggggggggggggggggggtgggggggggcgggggggggggggggggggggggggggggggggggggggggggggggggggggggggggtggtggggggggggggggggggggggggggtgtggggggggggggggggggggggggggggggggggtggggggggggggggggggggggtggtggtgttggggggggtggtggtgggggtggggggggggggggtggg

SEQ ID NO: 44898 - DNA, 816 bp, Arabidopsis thaliana landsberg
ttccgacatcatcgtttccgggagaagtgtgaggatctattcatttttgtcttgattccatctcgctggattaggagcacaagagcgtttgagttgtgaggtaattaattattcgcttataggaggattcacttgtcgttaattatttttcgacttccttaatataaccatcttacattttatcaaatttttaaggtaaaattgcaatatatggttcaattttttttcgtaaacggggatgttacagaatacaaacgacctcataaaatatacgtgatttattttaaatgctttgcaacgagaataacttatttcgatatctacttcactttcatactctctctgattcattttgttgaagcctaattcatggaagtaaagcaaaccaactatgttgaaaccaccaagctatcccagcctcaagctggttaaattagaatataatcagataccttatgagctctgcaaatttcttcattatctaacttgttggcaaacaaagagctatcgtcgcgattcgagatacataggaaagtacaaacaagcatttctcaatgaagttatgtttcaacatgctgtgtcccatggttacccaatacagcaagctgtattctgcaagagagtacttacaagtaaagcgaatttgcaaacataatacctcgtcgcaagctctcgctagcagctgcaaacttgctctctaaactgctttcaccaactgcctctgctgcagctcgaagctgaaggaaatcaccaatcaaagtgtcatcggatttcttagaggtttacagaaaggtaattgcagagtttgtgacatta

SEQ ID NO: 44899 - DNA, 658 bp, Arabidopsis thaliana landsberg
ttctcgatggcttcgactagcgtgcggatgctggcgaagttgagtagtggctcacccccctgaaattcgaccgtcaaggttttggaaggccactcgaacagccgttcgacagctttgagggatgcctcggatggcatgtcgtaaccactgttggcttgaggctgacgggaaacttggcaataagcgcaggtatggtgacaacgaagggagacaacgaagatatgcagggtggggccgtgttcgaggtaggctttgcgcgttcgatactgagacaagagtggtgcaagggtcgaacgttgctcatcggcggtgatgagatgcttggcttgcaactcggcgaaaagaggttcgttcggctcaacctggccatccacgacgcgggtaagatcgtcgcgtgagatgatcacccattcccctgccatggaggaaacgagcacgcgtccactatcccaaggcagacggcggaaacgcaacggaagcagttgataggcagtattgcttgcgaatgcttgtcgggcccggaacttcatggagttcagctcgaagacgaggcgtcagccttcaggagcgccgctcgaacaagaatttcttgtagccctttggtgtcggctcggatgcgttctcgaagttgctcgtcgagcgccatcgtgcggaactg

SEQ ID NO: 44900 - DNA, 901 bp, Arabidopsis thaliana landsberg
  unsure (1)..(901): unsure at all n locations
gtctctgaacgtgacggcactagacttttccacttttgaagctcgtcgtgatgacctctttttcttcaaaatacatttttaacaatttaattcaaacagtaccaatcaaaatttgcctttaattattattattgttttataaaaattcggaggtcactattgagtcgagaaacgctatatagttaattccattatacggaaattaattagtaactccattgaaaccatcctaccaaatccaaatggctcgtgttgcatattggctgaactcttatgatagtgtagtgcacaaaagatattattctttttttttttccctttctttctttcttttgctaaaaatagaaaagaaagaaaagataagatatttcatattttgtgcatgggttgacaaagtatctcatcttactttgaaataataataaaattccttatgttatagaaaatagaatgtgcggcatatattgatcagacattactttaaagtaatttagattctctgatttctattaactatacttaccacatctttgcacttgaaccctaatttaaatccacatagcgaaaattcgtatactaatttgattattatcgtcagtttgtcatgtaccaaaaatttggatcgtgaacccttataagatatcaaactataacgatgatgtcggccatgcggctgaacatatatcttgaaatgtggcataaattcttggaagtgaccattcgaccccacgaatgaatatatacaataatagttaaaatacatatatagataatcataatcgtacacataaatattcgcttgctttcttttttgttttgcacgtcggccaaattgttaattntgcatgatccatagaagaaaccatgggccagattacgacactacgttcttcgaattctc

SEQ ID NO: 44901 - DNA, 588 bp, Arabidopsis thaliana landsberg
agaaactcttttccccgaccactctttgacgttcctcgataaatccgaaccttatgatcaatgaacacgacgagtcatttatacggaggcaacaacaaaatgtggtttcttctcagtttgcttccttgaaaatttagctgttatatactaaaaggccttttgtaaggctaaaaggccaagcctttgggcccattaacatcaccgtttattcgaaacgtatgttgttaagacttgagagaagtttgacggtgaaaaaaggaaaatatttacatatatatagtaaacttaaaatagtagaaagaaaaaaatcagaaagctacgaaagaaaaaaaaaacaatctagcaacagaagaagcttcgagaagacgatggcgacggagacgaacgagaatctgataaactccttcatcgagatcacttcttcatcaagagaagaagctaatttcttcctcgaaagtcacacttggaatctagacgctgccgtttcaactttcctcgataacgatgccgccgcagccgccgaaccaaaccctaccggaccacccccaccttctcctactattgccggtgcacatacaaaacatcaaa

SEQ ID NO: 44902 - DNA, 346 bp, Arabidopsis thaliana landsberg
cagagcaagaagagtaaccccatcaggttttacaccaaacttcagcatttcatcaaaatggtaaagcgcttctcttggttgaccatgcgatccatacgcagagatcattactgtccatgatacaacatccttctttggtatactgttgaaaatcctagaagcctcttctacattgccgcatttagaatacatgtcaagaagtgcactcatcagcaactcgtctgtttctaaactactttcgctaatgaacatatgaatctgcttgcctttctctaacgcagcaagtttcgaacaagcagataaaacacttgtgaaagttaccacgtctggcttcactccaacactc

SEQ ID NO: 44903 - DNA, 726 bp, Arabidopsis thaliana landsberg
ctattacaactaatttgccttacatacctactattattatattatttttcacagtttttttggtaaccatcgctttgttaatttttacatatatactcacatatgtatacataggttatatatgcatgattgtgggagtgactcatatatacacacgagtctagggtttttggcatgcattacataatacatattgccgtgcttctaggcattgtgaacagtaacctatctatacttctaagttcgtatctctatatataaagaatatataatatatatgcatggatatatatttatgttcttatgaatacatttcataattaatatgcccgtacaaatatacgtagttataagaaaatgaatgattgtggacataaaattatttgaaacttattggtgtttttctgacacatgacaagcaacgaccccttcgatttctttcatttgcattgtgaacaaacatgactttcctatatacattattacattggcggtaaaaatttgtacttttgtagttaattatagatatatatatcaaaattaatttgtagatacgattatatccaattcaagtcctgactatgtaatcattgcataatgatgattaagatagatcatatcatattttgattaaaaaaattacccaatgttttttcttagcaacattgtgatgccaaaatatatatatatataatggtgattggtgaaatgctttgaatgtggtca

SEQ ID NO: 44904 - DNA, 673 bp, Arabidopsis thaliana landsberg
  unsure (1)..(673): unsure at all n locations
cgaatatagcgtttcctcattatgaaaatagaatccaaaatactttctgaatataggcacactattgtaataaatagggaacaagggtaaatcactcaacgaatattgttggtattaattataaaaaaaataggttgttggtatataaatttgtcattacatgataatgatgatgattatgtgtaaggtgggaggggctagaagaattcaagaaaatggaaagagagccattattctgcgaaagtgacagagcaacaagaggctttaccaaatcatacaaaaatctccatttttattggattcttggtgctggtcattttgtaagtacactctcaatttttatcctttagtaacttctattcatttttaataattatttattcacatatgtcataaatacttcttgcacagccatcacaaatattgccatacagtgaaatattgcatagatatttattgaataacgtgagagatacgtgatgaatctattaaacgaaagcacaagtctcttttgtgtctgtttcatgctttctctctgtcttttttttcctgcattttctttatatcaaaacaaattgtcgactctctttaatactttgacactatctgaatccttatgattcctttatcacattcaatatgcaactgttaaaaacccttacacnngcacata

SEQ ID NO: 44905 - DNA, 834 bp, Arabidopsis thaliana landsberg
ggtttgagctttgcatttgtagataactatattctttatcttcatgaaatgagtggtcttattctattgctaattccatttcgaattgtctagcaactgttgctctctggaagtattaaagctcggctgtccaagataagctagtctctttcttcaggtatgtttttgctccgtaacttttaccactaaacacactttggtaccttaagcttgggtctatatgttaccactaaacacactttggtaccttttgtctttggtagtcttgtaacatggacgaagcaggagttgaagcggctatatcaggatgcagctcactcgagacattggatcttcgtttctgtccaaaggtactaacaataaacgagtgttaacttcgatattgaaaacttagcaagtaatccatttttatgtaacaattaaaaccttgtcttggtgaattaacagatatcctcggtgagcatgtcaaagttccgaacagtgtgccctagtttgaaacgcgttttcagcagtccaaatctcttgcaagattagggttttgcgccaaatgtttgattatatacaactttttctgcagattatataaataatgtgttgtgtggcgtggtgcttgggttgtaaatggctccaagtcataagtttcagttgtgcatataggcctctggagtttgtactgtggccttcttaggatgcttgtgtgatgacacaaacctaaacatcattcgtactttgtttgtgcacgtggttgatgatattgttgctactggtctatgtagatcttatatttaccttattaatttaccttctaagccttgatccacatgtgctcacata

SEQ ID NO: 44906 - DNA, 656 bp, Arabidopsis thaliana landsberg
catggctaacaactgcgacctccttctctggtctcttctaatattatatacagcaaaattaatcaattcgcgtagagaatatatatgctaatgttatttatacttcaccaagtcaaaatttataagggttaccatttcatgaactctaaccctctcgccaaaatcttctcttcggactctctaacatccggtctccataggttgtcctcttcactttcaatctatagcatgatccaaaatattagagaaaccacaatgcgtgtatccttacatatgttgaggaagcttcatgtataatttatttatatgaagagtgaaaaaagctctttgcctgagagaaatcgatggtggggaaaagaatttgatactcgctaacgtttcttctcatgtcaggaggacggactccctgcatgcacatatacgtatcgatatatggttaacatgaaattgtttgatcgacgatgatgaatatatgagacgtttctccgtatatatatcaaacatacattacggtctcgagcaacctcaagtgccaaaatgggagggctacttgtcatactcgattgtttgtattcatttccaaaaacaccaactgcggtttgcatagaaaaataaaaacataagccaataaaaataatcactccaagtcactaaat

SEQ ID NO: 44907 - DNA, 672 bp, Arabidopsis thaliana landsberg
  unsure (1)..(672): unsure at all n locations
tttcttaataatcataatatgtctcctctgttaatgttaacctcaacaagtctctctcttaaatggaaattatcattctttatttgttctctttctctaggtcttttattgcccattaaactaaacacaattataattactgtatcctttgattctataaagttgggaacttgatgcttgctttgttgtttgttcaagtaacccaacttggtgaatctctcgttttttttcctcatttttatttgattcctttttaaaaattctacattcaccccaattcaagcaaaaacagcatttgatactctttgaattgagtgtactatctcttcccttatttatctgatttaggtttaacagtgattgtaaattccccacccaagaatttgattcttcttcttttgtactctctctttccaaagcaaccacaatcttggagtatctctaacagggcttgtctccattaccttaattcccaaaaactcttgcttctctgatctcacacacacattcatatgtgaaaggcctaatcttcttttttttttttttttttcttgaaactgaagagattggtttatgagatagtgactttgctctctcacactcttaaaagcgaancctacttnttttcttctttcttttcctttttattttttctcttgggagctgtaactt

SEQ ID NO: 44908 - DNA, 568 bp, Arabidopsis thaliana landsberg
tgcaggtcgactctagaggatccccgtccattgaacggtgagctagtctgtggactataatatttttaccgagttgataaagtatgttttatcaaacatttggcaatttgatgagtttttgatgcataaaattataatatttatagaagaataacatacaagtggatgttgtcaataatttgtaacgcgttatagtaacaaaaatcatgcctcatatatatatgtttatgtaaagtatgaagagtgactgaccctcttttaaaaaagaggcataatgagaggagaaaaaatagacttacacatttctctcacgtcgagtttgatactttactttgagtgattcattcttttggatttttgtcttattgttcaaaaatgatcctcggattctcttcattttagaagaatctattgaagaaaaacaaaattcaacaataacaatagtggcacagaaaaaataacagtaataattttcactgttctatcttattttttgatgaaaaaagatgaagcttgagaatgaaactacgtcgttttggaaaacatgaagtcatgaaccattcttgtc

SEQ ID NO: 44909 - DNA, 709 bp, Arabidopsis thaliana landsberg
tttgatctgcttaccaaaaaaaataacgattggatcttcagtccatctttatagactcaatctttagatctatagttatatgacataggactttgataatatgacatcaaaccaaacgttttttattttcgcaaagccatcaaaccaaacgtttattttgaggattccttcttgacctacttaactaaagtcattttattagttatttggcgtcaaccaatttatttaattgtaatgacaaaggcgaggttttttggggtcaaattgtacgacttgcagcatgataatatatattaaaatgttatgtttgtaatttcttagaggagaatgaatttttaggaacagaaagcagataaacgatcacatcttagggaccatagaaactttataaaaaatcgtagtaattaaatgaatgaattagaatattgaattcgaaaatatggtacagaagaaaaaaaaaatacgtttatgggagcacgcatcagaacatgaaccatgactaaaagaaaataattaaagttatgatatgactcttaaacttagggggtatagtggaaccaacattatttggaaggatttaagttttaatgaaggtcttagtgattttggtgaatgtttggttctaaaaaaagaaaaatgatttttgggtgaatttagaagaaaaaattgttaaggattttttttctattcaaaattcctttttggaaaa

SEQ ID NO: 44910 - DNA, 539 bp, Arabidopsis thaliana landsberg
  unsure (1)..(539): unsure at all n locations
ctaacgggccgtctgcacgtcccatccgaagtgaccggtggtgtcggtcgtctcggggttcgtcggcgtgttcgggtcgaggaaggccgagttgctcggcaccgcggtgtaggtgccgccgaatgtgtcagagcgaagcagggtggtcttcgccccctcgaccgggaacccgaactggtcaacgatcgtgccgctcgggtcgatgtagaggtcgaccgtggtcttctgtggctcaccgcctccagccggcgtgtaggtgatcgtcagcgtcgcctcgcnnnnnnnnnnnnnnnnnnnnnnnnnnnnnnnnnnnnnnnnnnnnnnnnnnnnntccgtgagcgtgcccgacttccacacggcacctgacgggtccgtgatcttccagctgacggtgcctcccgaggcggcgtcgtaggacagatcggccgtgtcctggtagtagatcgtcggcgtctcgccggtggcgacctcaccgaaggtgtcggagctgagtccgacgccggtgggtagtggggtcggctcggtcaggtgaatgtccg

SEQ ID NO: 44911 - DNA, 783 bp, Arabidopsis thaliana landsberg
ccaatatttcatcagaataatcaaatcatctttagcattttacaatattagtatagagatatcagaaaatgttcttattgcatggcataacaaagatgatagaactgctagtattattttgtggcatgaacagaatgggccaaaatttgatagtcactgatgatttaatatttagattcattttccattgaagaaccaattttttgttttttgtttgtccggacttgttagaattggaatactcaaaagacacttacctggcagatgtgaaagatgacttgcaagagatggcatagcaccaaaatcttaaagattttgcttcgaaggaaggataatgttttgatttttaaaacgcaagacaaagagagtctctcgcgaaagcagagggttcaaatctaaagagaaatgttggctcaaaggcctaaacccacgccaccaagcaatcaattacatcttcctatcctagttttactcttaaacatacaatgtacccattacatgttggacatagatacaaagaacatgtctaattcatgatttcgagatttatagtaatagataataggaaaaaaataaccacatttaacccatgtgcccttcatcaacgacatattctacttgttttcctagagacttgaaattggtggtcacactaataacattgtatgtgcaattggtatgaatttcctttaaaacaacactgaatctaaaaccataaattgtgaaaatacccgtcgaaaggtattagccatgcgatgaaatgaatggatgatttatatattt

SEQ ID NO: 44912 - DNA, 480 bp, Arabidopsis thaliana landsberg
cgcctgattggccgcgcgggtgccgtcctcggcgtagccggtggcgcggtggccggaaaaccgcccgaccgggtcgggcgccgctccagcggtcagctcggcagtggtcagctcgactagcgtccgtccgccgacggccgtgaacgccgacacctcctggcgcatgagctcgtagtcgttgagcaggccggtcgcccgctcttcgatcatgctgttgatgaagatgtgctcgtgggtgagcgtcatccccaaggcatcagcgggcaccgggccccgagccgtcatcaccgacgccattgtccagccctctctcgcgccgaagcggtcagcggcggcgcagcgaggcctcggccagcgccggcgaccgccacacgccatcagacggattgaccgaggtgccgggcggcacaatgccgtcgatcgcgttgaggatgtcgtcgcccagcgtcacgtcgggggcgcccaacaacgactcgagct

SEQ ID NO: 44913 - DNA, 536 bp, Arabidopsis thaliana landsberg
acaagacatgcagtattcctgaagaaataaacacatatatactcgtaaccagtgccagagagataactactgaagcgtcaataaagtagctctttttctcaaaccttaataatgtgtctccgtccccttgcacgtctggcatgatgctgtaaaaggaggaatagttacctgttaaagagacagacagcatagtactgtaaatagaaattgtatgatttattaaccctccaaagaaaataaaacttatatcctctaaatggtacttactcgtccaacccccctgcatgttggacaaatgctcatggcagcatcgctagggtggccaagcccatctgtaaaatgataaacaatgcgagattgggattcatggttttgcaacaatattactttcacccaactgagtttactcgtcctctcaaagttagctgaatcagtaactttttaaagacagaaggctgtaaatgttacaagaataaaattaaaaaaagaaaaaaaaaaaaagagacaacaaactgtagatacatgtacattaacat

SEQ ID NO: 44914 - DNA, 1004 bp, Arabidopsis thaliana landsberg
ggaagcgttgaattgtttaaagatatgatgaagacgaatgttaggccagacgagagtacaatggtcactgtagtttctgcttgtgctcagtctggtagtattgaattgggtcgtcaggtacatttatggattgatgatcatgggtttggttcaaatctcaagattgttaatgctctcattgatttatactcgaaatgtggtgaattggagacagcgtgtggtttgttcgaaagattgccgtacaaggatgtaatttcttggaataccttgatcggtggtgacacacatatgaatctttacaaagaagcattgttgttgtttcaagaaatgcttagatcaggtgaaactccaaacgatgtgacaatgctaagtattcttcctgcttgtgcacaccttggagccatagatattggaagatggattcatgtgtatatcgacaagagattaaagggtgttacaaatgcttcttctctccgtacaagcctgattgacatgtatgctaaatgtggagacatagaggcagcacaccaagtgttcaacagtatactccataaaagcttgtcgtcttggaacgcaatgatatttgggtttgcaatgcacgggagagctgatgcatcatttgatcttttctcaagaatgagaaagattgggattcaaccagatgatatcacgtttgttggtttgttgtctgcttgtagccattcaggtatgctagatcttggacgccatattttcagaacaatgacacaggactacaaaatgaccccaaaattagagcactacggttgcatgattgatcttttgggtcattcgggtctattcaaagaagcggaagaaatgataaacatgatggaaatggagcccgatggagtgatttggtgctcccttctcaaagcttgcaagatgcatgggaatgtccagttgggccaaccatttgcagaaaacctcattaaggttatgcagaaaacccaggttcttatgtacatctgtctaacatttatgcc

SEQ ID NO: 44915 - DNA, 858 bp, Arabidopsis thaliana landsberg
  unsure (1)..(858): unsure at all n locations
ataggccataattggatccatgaattttcatgaaccatcaatccaacatcttatatttttttttgaactatccaatttttctctaataaactaatagctctagattcaataggattcaattgagttttttcccacattgctacttcccacaattggactatccaaagctattaatagattttctatattttttttattttttttgtctttttaactatgagtgattagtttttcgaaaatgttttgaagaacgttaacaatctatttttatacctcttagattctctcggttccttaagtcatatttcaatatacccattaattatcagaagagaatctctgacaattaacattacacaatctatttattttattttgatttaaacaaaatgtttgtcaagtaaaacccattgttttcttaaacaaaaaggcaccctactagctccaacgatttatcatcattttccgctatttcaaaattaaaatgaatatgagaagtcaaatgtatttatttttagtaatgtttcacgtattttactaaatctgattatccaaacagaaatcatcatgataacagataatgaattaattctataaaaaaaaaaaaacagatagtcaaatgatcacaaaacattaaaatcgatgacaacaaactaataacctattcaacaataatctctaatctccaagattaaaggaacaagaataggacttcaaaatcaagaaaaaacaaacaacgcanttcttatcttttctttttcctaacttgacttccatatataaaccccattcttctatcatcatctcaaataagacaacataaagctaattaacaataagaaaccaataaactctaac

SEQ ID NO: 44916 - DNA, 533 bp, Arabidopsis thaliana landsberg
  unsure (1)..(533): unsure at all n locations
taaagccgactattacaacagcagcccgtattattaccggggcatgactatctatccgccctccggcattgcttaccgtccgctgagctggagcagcggctccgcgccgtatccctgggccttttaggccgtgtttgaagacctccgcatcaggccagggagcgccgcacaggcggagcgccaaggagcgcggacttccagtccgcagcactccgcgacgcgcttcgcccttatccctcccgccgccagcgccgggccacccagcgcagcagatcactcacctgctcaccacgatgcggaacccttattctcacctcatcaaaaatgatggggaaacacggcctaggcgttgagttcgaagatcccctcgatctccacggcaatgtggccggggagcgagcccatccccacggcactgcgggcgccgatgccgttttcctccccccagatctggccaaacnnnnnnnnnnnnnnnnnnnnnnnnnnnnnnnnnnnnnnnnnnnnnngcgtgctgttcaccatgcccagcagct

SEQ ID NO: 44917 - DNA, 2162 bp, Arabidopsis thaliana landsberg
cacaatcattagttgctcattgacgtggagttgaaaattgaggtatatttgatatatttttttgtcattcatttacctgtgagagccttttcttttaataagtaatatattcttattttctttcacaacagacaaggtgacaaatgcattaagatttttaagcggcttaaaggcttgtcttttctctttatttattttgtataaccaactctttctcttttggcatcgacaaaacaatgacaacataccaaatggacctgtaagaacttaggcagaatggatcattggtagtttgtcatttgtgtcaagttacatgttttttggaacaacttatgtatcttttgtatatatcacgatggttaaggttcgctactaagttgttgttgtattaataattgatgcgtctttttgtttggttgattttacattggtttagtgatcagaccaaaaaaactgaataaaccatgtttgaactgaaccaaaacgaattattaatcggttcgttttagaaaaagttcattttccaaaaaaaacaaaaatcaagtaacggaaacagaattaacttttttcggatcaaaattgcatgcctataaaattttatgttattaatccaaatccatccaatcattttttttcttttttgaaaccgataaattatttgttattgtttgtgaacaatattcaaaagtcccaaatcaataaaaagaagaaaaaaactaattatgatttggaaataaaaaataagaattaatcaaatcaaattaaaatcctcactaaattgtaaacatggtgtacataatacgattacgtgacaaaatattattgaaaagatatccaaaaaattgcaaaaaaaaaaagaataagaaaaaaggccaaaaccaaattctcaattctggtcggagtttgtctttataaaaaaatcttagaagccatatatattttctgtttatatattttgtacaacaaactctttctcttttagcgtctacaaaatagtgacaacataccaaatacacttataagaactgaggcaaaatggattattggtactttgtcatttgtcaagtgacatgttcttttagaacaacttatgtattttttgtatcatgaatcatgatgattaaggtttgctaccgagttgtttttgtattcataatttatgcgtcattgttgttaacttgttgtttggttgattagtgatcagaccaaaaaaattgaataaaccatgttcgaactgaacaaagcgaattattagtcaattcgttttaggaaatgctttattttccaaaaaccccgaaaaatcaagtaaccaaaaccaaattaaccgttcgaatcaaaatcaaagacctataaaattctatgatattagtccaaaactaaatccaaatccatccaatcatcttgttctttttccgaaaccaaaataatatttgttattatttatgaacaatattcaaaaatcccaaaccaataataataataataaaaaaaaactaattaggatttggaaattagaagaacaactaatcaaatcaaataaaaatcctcactaaattgtaaacaggatatgattacgtgacaaaatattattgaaaaaatatccaaaaagttgcaaaaaaaacaaaaaaaaagcataagcaaaaaaaaagagaggccaaaaccaaattcccaattctggtcggagtttgtctgtaaaaaaaaccctagaagccatatataaacaccacaagtaaactcgtttcttcaccttccttctctccttcactctaattgcgattgattctcctgtcttctccaatttatcaggtaattgcttctgcttcatacttcataccttattttcccatctctcaatccatctttgtattggagcaaagtttatacctttcaatttctcaaactcgactagttatagatctatgcaagttcagttcaaaccttacatatataatatctggagaaaccaactatgtgtacttgcaattacaataagctaatagatttcgtactataaagttagatccacatagtacaattctaagttatgcagattggagctcttgtgaatttttgtttgattcgattttgcttgagactgtcttagagaaattgcagagatgacaccctgaataaaacgctccctcagtagatccacaatttgt

SEQ ID NO: 44918 - DNA, 643 bp, Arabidopsis thaliana landsberg
  unsure (1)..(643): unsure at all n locations
attctttttaaaattaattttttatttccgacttttatggttacgaaatttcgatttcttcatttcattacaaggtttcattaataaacgtgatttttttcccactcctgtttctttttcttccctagtagatactgccaacgcgtagctgttttgtctcttctacttttttttttcttttttttttttataatcttggccttcactaattttcattgattatgccatatgtgtttttttttgtccttttggtttagtgtgaaaatatattaaagagcaagttattgactcttggggaggtgacactttttaaaatgtaaaattaaatgatgttctaataagaaaaaaatgtaatatgatgggttttttttttaatcttatggcattagccaaagtgaattttatggtggaattacattatagactttacaagatttgtgaaatgtaaattttattttaaattttagtggcattgtaattaattggtaaattttcacccaaaaacaattttatgaactagnncacatgataagtggattcaaaaacacaattctgtaattttgatgggaatttgtttttttatagtaaaacatatttttttattttagccggaaaacacagctttacagtttaaaaaaaaaat

SEQ ID NO: 44919 - DNA, 510 bp, Arabidopsis thaliana landsberg
  unsure (1)..(510): unsure at all n locations
atatctttattgttattaacttcatcaccaccatgaaaagctttagattagattaccagattgagattgaagaacacaaaatcattactttgttgatgttttgttgtgcccacaaaagaagagaaacagaaaagcaaaagcaaagcaacaaagcaagaaaaaaatgaatgctttttttctctttttcttgggtctattaaaaactcttttatttctgcaatgtctctcctacgcagagaagaattatgagagtgtattgttatgaatttaaggagatgataatgaacacagaaaaaaagttttgattttgtgagagagaaagctagaaaaaacagagaggagagaaagcaagagagagtgtaggtagtgttgtggtttgtggggagggagaatcaggtaggaaagctgatacggacccgtatggtggtggatgatgatactttctcttttcgagttttttttttttttttttgtatatgctaaatttgngaaaggttgttttatacataa

SEQ ID NO: 44920 - DNA, 477 bp, Arabidopsis thaliana landsberg
aacgtatgtctattactgttcatgttattcattggcctttgaacaaatgtgatgtcattttgcataaaacctcgcattctcatattaattacttgtaaattaaaacaagttaaagtgaagacaaatagaaatttaggtcttgatttgacagcaaacctttaaagctattactggtaacatcgaatctgggaatatgtggagtaaaacgtacgtcttgataataaaaatcctttaatttaagtagattctatagaaaaaatcgtctattcgataatttattctgtagtggctagctaactgctataaatctcaatgctaaaacaaaattatgtgtatttcaatgttatctttcgcactgtgttctatagtacttatgtaacatatttgctaaaaacatttacgtatatgacattactgatgacttacctagttatatataagctataattctacgagtgatcaacctaaatcagaacg

SEQ ID NO: 44921 - DNA, 710 bp, Arabidopsis thaliana landsberg
tatactattctcgatgattagccaaattagttacttttcaatggctggtcaaatccgtgatttaagattatttgttggaagacccttttttcaattttctagaaggactatataagagttgggtatgttcccttccacttcgacatttaattcaatggatctttaaattggtcacatattttcggaacccaacgatcctccacccaccaatatttaatcttagggatgtacaatttatctgtaatattatagtacctacaattacttgtttctacttcaaccaaaaatatgaattttcatagtagaattaaattcaaaaaccaaaaaaaaacttaatgttggtccataactggttgaacacacacaaggtcacacagattgaccacacataactggttagattacaaattaaatcgagcttcaaagagataaggaaagtgaacaataaaatattgacagaatttttaaataggatgggttagtccttcgttcatcgcaaaatcaggcgtaatagtcggagactctatttaagatattaacagcaacacaacaaattatgatctttttacgtcacctaaaaaagggtcattttcaatcgttttctatattggagatttgagaacatacatacctagaaataaaagagtatgaaaacaatgaaaaagcagtaaagtacttttacacaaacccaaaaagcagccattactttg

SEQ ID NO: 44922 - DNA, 1269 bp, Arabidopsis thaliana landsberg
cttcgtcatcttctgccgttaatggtagttttgcatatattagagtatgagttggatcaagaaaaggaacctggaacagaagaaataatatatgaattttaaggtttccttatcaatcaatgcctcaaatctttttgatccgcagttttttattacctttagaaccgcagcttggaagagatcggggcaatgattgatagctgaagcaacaacgagtcctccagcactgtatccccaaccagcaagcttgttttcttctactatattgttctcaacaaggtacttggcacattgaatgtaatctttaatggagttaagtttcttcgcgcctcttccgtcttgatgccacttctttcctttcccacctccacctctaaaaaccgagaacaatggatacatgaaggaagtcttagcttcttgctgttgaatgttctgaacgagaagagaaagatgatactgacctaacgtctgcatatgcgagtacccagccacgatctaggaggcttttaagttcactacgccatctcttatcaagcatttcaccgtaagcaccatgaacatgaagtagaccaggtttttgattctcctctttctgagctcttgagtaaacaatacttaatggaaccatggctccatcatgagaagatacttcatggtaatcacaagcgtaaaactcagtcaagtcattccacaagttgtcattctcggcagtagtatcctcagtatcaaaactgacagttctggtgcctgagggtatattagggctctcggtggagtttgcagtgccatataaaacccgtgttctttcgtgaagcatgttttgctgctgtactatattccattttccatttaatagatcgtaatcaaccactgcatcaggcatctgcaggacaaaagtatctaaaacgcaaaaaaaaaaaactatctacagaagcagaaatagcatgaggaattgttctcctaccaccagagaagaaattgtaaaccgcattgttggagaattgaagtcgtagtttgtgccaggaaagatttgagaaacatgctttggaagaggaagataacgaggtttaatatctctcagatggacaggtacctgtgtataagaaaacaagcatggtcaaatttattaacagagcatcaatctaatcgatgaaagtaactaagtggagtaagctttacccgctctgtcttaagaggtagatcaaccacacaaattttaaagctctgcatttccttcacaataagggatagatgttttttgcagaaatc

SEQ ID NO: 44923 - DNA, 495 bp, Arabidopsis thaliana landsberg
ttaacaggaagcatcccaacacaattcttctcaatcccaacattcgagtaaaaaaaacttttttccttttgaatctacctaattagccacagtgactggtcagtactataatcacgctttcgcgacttatctgcagtcaaacaggaactcagcttatatgcggtgaaagtttgaatcagccatgctcatcaagttctcggcatccaggcccttaataattggttctttctccaattcacatacaaacagaaggacttaacttagtatctttatgttcagtcacatcctccaagaaaaagctgagagacattactttgactgcaagttgtgttgcttctataatcttattccttggagcaatggttatgtatcatcaccatcgcgtccgcagaaccaaatacgacatcttttttgatgtagctggtaagaagttacatatacttatagtcaaacatctcattagatcaatatgaactcttgagccaatatcctttt

SEQ ID NO: 44924 - DNA, 610 bp, Arabidopsis thaliana landsberg
tgaatttaactctctatttgtatccataatctaccaaaatccacgtaactaccactacgatttaacttactatttaataacccgttctatgaatttgattcatataaagtctagaaaaaaaactcagaagtgatattaaattatgttgagaaaaatatgaaaatacattttggttttcgttgttgatttgtttattgttgacttttcttttcttttttcttaaattctcattcaaaccctaggttaagctagaaactacatcagagtgatgactaaaacaacatttgtgctcaagaggaaattaagtcaattaatgccatttctgtaatgaaattataatataacgtaatttatgtataacgaatttaaagtacggaatacgtaaccggggagctgtcactgatcacctaatgaaacttcaacatatcttcatttcaacgattttgtttaataatctaaatatacgattacgtattttcactatttcggaaatatgcaatatatatgttcaatcatccttcaaaggaaaacataagagggaaagagaaaatgaagtgtttttgtcgtttgcaggttccgtgtaccggaatcttttgtcggagaaaggttt

SEQ ID NO: 44925 - DNA, 638 bp, Arabidopsis thaliana landsberg
cggaagccccactgtcgaacaatatcttttactccgatgatcaaattacttttttttcgatcgctttccttttctctcaggcaactctctctccgtaggtttcccagcttatttagcgtttcggtttaaatctatgaattgtccggtttgaaccggtctaaccctgaacaagcggttggtgtaaattagcgatcatccgttaaatttaaataaaataatgaaagaaatatcaaatatcatttttattgaccggttttcaaaaataccacaacaaaaataatcttttcaaaagtatttattaaaatacaaactccatttttttaaaattggaattatgggattatgtttcttatatatctttctcatcataaaagacttgacaacaaaattgtttaacatgccaatgccaagcacactcacaagtcacaaaaaaaaaaaaacaaattgcaattacaaaaatcatacattaattgttctataaagtaaacattcatacattttgattaatatttatttttcaagcttagatatattataaagaaagagaaaaactagtggacactcgaacgccctagatttactgctcgagataaaatttgattttcgtaaataaaattggaggcgaatttgagaaggcc

SEQ ID NO: 44926 - DNA, 746 bp, Arabidopsis thaliana landsberg
gatggcgaatgacatgtggtcgaacctttgaagcttgaagccttgaaccttttgtggtggctttgtaggaccacaaggactatagtagtgctatagcttatagattgtgttgaccgactggcatagctatagatgccgcattcattgcaatactttgctgcagctttccaccatgattcgaagctcgagttgagtaattatagttccataaatggagtatgctattatgctatgcaacttgatcgattattgtattgattgataacatgataacatgcaatgttggggtaacttgaaccaaaataacttgcgtaatgtaattagataacaaaagaaatgttgtttcaatttttttactctcatatttcaaagtaaatatttcatatattatcatatttgccaattaacatcattagaaatatcggtttttatgaaaaattaagcaagtgatgtgatttttggtgatcacaccctttgttaggtgaagggtgtgaccaatatggttttcatcattccggcaaacatgtgcgtctatttcaatgattgtaagcaagttatgtaattgcttatagctttttaatgatctgtatgagtaaaacagtatgcgagttataataaaatgaaggcaatagatcttggtcaaaagagacttgggtctttggaaggtttaaaatcattatattcttttctgtcaacaaacatacagttgattggatattattttatcctattttagtttaccaccg

SEQ ID NO: 44927 - DNA, 709 bp, Arabidopsis thaliana landsberg
  unsure (1)..(709): unsure at all n locations
aacgaaccaacatggtagttgcaactttgtgtttccttgtttttttaacaacccaagttgatttaacaacggttgggttctttgtttctggaacaataatttttgtcaaacgaattaacatcaccatttgtttgtctttattcggtataaaaaaagctttcatttgcataatttcaagggtgtccaatttgtggtttaactaaaccaagaagttggcatgtctagtaataactttggagtttggagtaagaaagttagtgatgcgtaaatttaagagttaagacaaagtgagcatcattagtcgttagtccaagtctgatgagacaaacaaaatgatctactttaaaattacatcatattcctagaattaatgttgtgtatgcattattnnnnnnnnnnnnnnnnnnnnnnnnnnnnnnnnnnnnacaaaaataatttaccgcatagtttttatatttcattgcccaaccagtttgtttaatatgttttcaaggttctacaaatatttagacgttttgaataggaagtagtcgatcaccatccagtgtatgcataaagaaactctaaatcggattgaaaaaatcctgctttattacatgacattgcagaaatgaacgaaatacatattaacataggactagcagacaatactttataagaaacttgtagctcacttaagattgggcaaatatcactagatgggcatgac

SEQ ID NO: 44928 - DNA, 566 bp, Arabidopsis thaliana landsberg
acgccttcaagttgttgaggctttccgtggttcaaaaaccctgtattgagaacaaccctgagtggatgatcgttgagatcgttccggttatcccgccagagttgcgtccgttggtaccactggaaggtggccgtttcgcaacttctgacttgaatgacctttaccgtcgtgtgattatccgtaacaaccgtttgaaacgtttgatcgagatcaaagcaccagaggtaattttacgtaacgaaaagcgtatgttgcaggaagctgtcgactcgttattcgataactcacgtaaagttaatgcggtaaaaactgaaggtaaccgtgccttaaaatcactttcagacatcctgaaaggtaaacaaggtcgtttccgtcaaaacttattaggtaaacgtgtcgactactctgcacgttcggtaatcgtcgtaggtccgaacctgaaattgcatgagtgcggtttgccaaaagatatggctgccgagctgtttaaaccatttatcatccgcaaaatgattgagcgtggtgtggttaaaacggtaaaatcagctaagaaaattgttgaccgt

SEQ ID NO: 44929 - DNA, 336 bp, Arabidopsis thaliana landsberg
taacaacttttttctcgtcacttaattcttccattctattcgatgatatttaaaatctgtgggcgttataaaaacctttttggttcctttgtcctctccctcaaacacaacacatccttgatcctattacaaaaaccaatcctagacaaaaatctcattttatccttccctcaaatcgctctattctatctggtaacctctaccggtaagtactacatgaatctcacaatatctatctatttacaccaccctatctgtcattctctactattaaaactacaaccaatctatcctatttcacactaactaaatatcaacactatactttctcttatt

SEQ ID NO: 44930 - DNA, 874 bp, Arabidopsis thaliana landsberg
agctgcaccataagctgaaacacttagctcaagtgattgacattgattaagcctgtgttgtttgacctttaatgcaaaaatttaactcaccatgaatcaatgaactgaaatagtgtctgaagtaagcagatcttcaggtgatatagttagctgtggactaaattagatactagaaacagtccagttcagttatttagtttggcttggctatagaaacttcacaaaataattatttgtttggtttccccaaagctgcaaataccgagcacgaaacatcaaaacaaaacttaatactagatctacttatgcagccaaattgcttctggtcatttgtcacataacatcaaatatggttcagttattggttggtgttcactgaattactgttcttgttctggggttccaaaattataacctcgtttctttgcagggcttgtcctgagaagatcatagagttcaaggagaaaatggcagcaaaaaagaagaaaccgaagccgaaacaaaaacagaaggaaacgagttcaccgaccaaatcttcttctcttgtcgaactcagcctcgaactccaacaccttgatctcaactcaacctctctagtaagtagaagcaccttagaagaagcagagcaagagaacgaacaacaaaactccaagaaacatgattacttgcgtcttatcgattcacctgatagagaaaattgcaataacgcttggtcaaacagggatagattgggtgttggaatgagttcatttccattgtatccggaaacaagaagtcattgatctgataagcccttgtcctgaaactcgttcacggagcgtggtaagaagttatcaagaacagaagaagccctgatcacccaacttgagaactg

SEQ ID NO: 44931 - DNA, 480 bp, Arabidopsis thaliana landsberg
ggttttttttactgtttttcagtgtcaagtatctgactttttgattatcgcttcaaagttccaatttgggagctttcttaatgcctgatggagtaatattttatgcagggatggatggcacaaggatgggccttgttccacatcacaaagctcttggcaagtatgttcactatttttggtaagtctagtttctctggaaatgacattggtctaagaatgtggaaatgtaaatatataaacttgaatacttaatgcagaagcaagaaaactaatccaaacaaactgacacttcatattatgttgaatctcgtttttaatcacacaagtgtttgcagtctaaactgatgctcttgtatttcctcaatacacggcttttcatgtctcgtgcctgcatattcctgtacttgatcgaactccatttgaaggtaataaaaagataacgatatatacatatgggtataaaagattttatacagtagc

SEQ ID NO: 44932 - DNA, 500 bp, Arabidopsis thaliana landsberg
  unsure (1)..(500): unsure at all n locations
atatagtttgggaacttatctcctganatctatcaagacttttcaaatttgtgctagaagaattctattttttcgagaaaatattgaaaggtatgttggggcgttattagacggctatgggcggagacaaatttataaaaaattctaaattttaaaagagttttactgtgagtaagcggttttatatccaaaaattaaggaaatgaatgaagtataaatcaatataagtggctgatatttggaaaaatatcgcataaatggtagagagtagacacgaaaccagctattctttgcatgaatgcgtatatagttatgcatgagcatgacactttgaatggcacttagaaacctaagtaaactaaacaaacattatttgagctttaaatttcatatccacattaacttatgcgtgagacataattatgcttgacgggatattcacttatcgtcgttgaataacatccaataaaaaaataatggtaacctaatgtgcacattac

SEQ ID NO: 44933 - DNA, 3051 bp, Arabidopsis thaliana landsberg
  unsure (1)..(3051): unsure at all n locations
taaatagatgttcgtattacattggccaagtgaataactttttttttttttggtaagactggcgaagtgattaactaattgttggaacttggaaccatcattttaacaaatattgataattcatactgtattattgcaaaaaaaattattggtaatataaacaaattgctctaaaacagacatttatgttgcattacatgtttttttttattttgcattacatgttaacaaatgcaagagatcattttcagaaaacataatcatttaaacaaagacaatatcgtttggtgaaatcttggataatcttcttaataatgtgattcgatatttacatatattttagcatatggcaaaattggatattgatgggtctaccatgttgcttgttgtgagttcaaagtgcataaagctataaaatccactctgttcctcactgtctctgtgaccgaaaaaacaacaacttcacgtgaacgattgcaacattttttattgttttcttataccttagaatctttttgactttacaagactaaattttaagaagatggaactaatcaaatctcaaattttatgcaagactaagacttatctacaatttacatggaatgtttttttcaaaaaacaaactnnnnnnnnnnnnnnnnnnnnnnnnnaaaaacactgttcctgtgaatccaattcatcatgacaaatgatcacatggcaacataaaaaaaagcccctttaatttttccgagtcaggctttcaagtttcagaaaccaaagatcttcacagcttgaaagtagtagactaacattatatatggagagataagctataaaaaaatattcacacttaagagttgggaagatcattagactaactactttaaagagatcttctagctgctttcttatttcctgcaactgttttatcttaggcttaacactaatattatgatcacatacctgcaagtaaaaaatttgggtttgaagtaaaaatacaaacttcagacccgcccaacaggcgagaaccgcggttgatacccgacggtgttgccattagggtttgaatcttggtccgggagtaacacggtttttcccctaactttatgttcatcacaagagcttttctgctcaaggatgttctctgacattttcctactctctgcaagtgccatgcatatagagaacgcttgtagttgtgaaagggatgaattatatgcaactgaatatatcccttctttgatcggtttaaagctcaagaacggatgctcctccgcttgttctccctggaaaaacgtagaaatgtgatgatgaaaccttttggttttgatttggcagagagcaaaaaaaaggacatttgatttaggactaagtatagaatctgcaccagaaagaagagttcgaatctgtttgaagagggtggtgagtttgatgttgccgacttcttgtaggagaggttgtgctgatttgtaagaattctgagattacagcccatgtcccaacctccacaatcgcaagatccacctgttctccatcgctgtatcaaagactatggccctgctttctgaggcatactatgaacaccgctttgaagtatgaccgtagcactaatgtcttggtcaaaaaacttgtctttgatgtgatcttcaagctctccactagttgcattgtgatcctgaaccgtgtttagtggagcccttctgtgaaacaatcttggcatcttcacgatgatcgcagctagctcgtttttcaactgcagatcagacttttccgtgctctctcgatcaagttctacagagaagagaacaaactctctgatggaaccagatggcaaagagctcgagacccgcatctgagcaacaacattagagatgagaccatgtgtttggccgctgcctctttggtttaaccacccactgtttctcttatggtctttaatagagaagaaagtataaacactagtacattcaccctcttccgagcttcccattttcttttgggtggccgcaataatgtctgtttctttgttcactgcaaatgtaaagagtggctgattgttcttaactgtaacccgcagaacagctcgaaccatggatgatcctagcttctttccatgagctgaatcattgacatttactgatttgcaacctgtgatacccaatttaagtcgttgaaggccttgacctttcggcccctccacagaattgccagagttagctgctcttggcttcaatagaggctctagcaaccttcttaaatggcttgtcgtggttgtatcttttttactgggtttgttgcaatttgagccgtcaacatcagataatagagccacattttgtgaatctatctttgtggagttagtcattgagtctagctgggttgtgggaacagtacctccttcactgttagttttgcttgccttacccatattgaagctaagccgctgaaaaggagatatacttctccccttttcagatgtcactttatgcgtctttgaatcttgtctctggcaaggctcatacatacaatgtttcacagataacaaagatgatgctctgtcttctgagattttacctttggaagatccattccatgcttttgttaagagtgacacgcactgagatagttcaactgaaacctttttctggtcagcatcagtggagccaagtttactctctgccaagcagccatcagcattacatggcaagggacaagaatgttgagtacagtaatctccttcaacaccgtgaacaacccggacttttctatttgaactcctcttgcaggtcttagcctccccatgctgctttcgaccaagttctccatcatgttcatttcggtttctttcgtgcaagttcttttcactcttcctatgtctgctaacatcagcctttgactttacctccatgttcaagccagcctcaggattcaatccatgtgacaaagttccatttttagagcaaatcttccctttcagatccttctcctcacacacatctaatcaatgtgcattagtacttggaccaaactgctcttctggtacgctgaggcatttgcgatcaatgt

SEQ ID NO: 44934 - DNA, 382 bp, Arabidopsis thaliana landsberg
tctcgacctgatcgctgcccgacgccagcggtttcgaattcctcgagcgcctggcgcagcgcggcccggtgccgccggtggtgatttattcggcgcgcgagctgacccgcgaggaagacctgcgcctgcgcgaatacaccgacagcatcgtcatcaagggcgcgcagacgccggggcgcctgctcgacgaggtgtcgctgttcctgcacgccgtgaagaagccgtcgagcccgacgtcgaccgcacagacgcctttggatctggccgagcgcacggtgctagtccgtgacgacgacatgcgcaatgtgctagcattgtcgaagacgctgcggggtcagggcttgaaagtgcacgttgctcattactgacacaaggcgctgct

SEQ ID NO: 44935 - DNA, 1290 bp, Arabidopsis thaliana landsberg
ttgtgtaaattaaatccctcatttgacagcatcagtttctcatcgatcacaccacatacgcattgaagataataaaaacacacacctatcaaataatgacacacccacatctataaatgtatatagagacatatatgcttcgcgatttatgtgtggatgttaaaagtataactacaaacttctcaataacttcctcgttcaataacatacacacatatagtttaccatgaaatagtactcaacatcaataaagaattagtttgattaataaaatttacataattcatacgcattatacttgtcttaccaatttattcaataataataacaaaattaggagaaacctaactattgccatagagttttggaaagggtcaaaatcagatcacaagttttaaatggagaaaaagaaaaagacggtgagagagaagtcggtgacaattattatttatggtccgtttctcttttctttatcctcgtgtgtaaggccgttgacaaaaagaagaaaggctttttgatgggccaaaatgttactttgggccaagcccatataaaagtaaactctgttctggaaaacccttacttataaggtctaaaattcgtcgtgcccggaagaagagctagagcgacggcgaccggagattgatattgatcggcggagacagttataaatcttgcaaaatgtttcgaaggaacaggtttctgtctttgccaatggtgatcggagcagttgtgtaagtagtcgttttatcttaattaggcccaaagtctgaatcttgaatactacgattatggtttccccaagatctggtagattctttttcttattggatgatattgaaatagaaaatggtagattactctgtttccaacttgattttaaacagtcactgaggtagattttttgaggattggaattgaaattttctgaaaagcaagtagaaaaaatcattactttagcacaaatggtataatctcctgaaatttgtcaaatgtctgattcattcgttagtagagtgaagccatctcaataggtttgttttggttgcaggcttggtgttgtttcagggatagccattttcgggccaccgcttgatcagtactggaaagataagctccaagaagaataaactgttgttgccgaggaagaagtcatagtaaagagcccagattcatcgtcaacctaaacctgtgtgtgctattttatgtccaaacgtaatgttctccaaccagtggttccacttagccggggagttataactctacagctctgcacggcatgttcgcata

SEQ ID NO: 44936 - DNA, 1469 bp, Arabidopsis thaliana landsberg
  unsure (1)..(1469): unsure at all n locations
aaaagaatcaaagacaccgagaaaattgattatatggtaggcctaaccgggtcttgtaaaccggtagttgacgaaattgaccttccctcttgcacatttaatgacggtttttgtcggttacgcgtctttagtctttgttgggtttgggccttaaattgtaacagactaagcccatctcatttttttttcttttttttttgctgaatcagaaacaaaatcaatggctatcttttgctgctactgctgaattacgaaaattctgtgaggttgaggaagcagagtgaagagaaagatagagagataagaagaagccatgggttcgatttcgatgcacataactccctctactgctctccctatacgccatttcagagctagagtctcttgttgctcttctggtaatttcgtttttcctccgtttgtgagaattgcatgtgattgtataattatagtaattgtcgattgtttgatggcttttcaaatcgagaaaatgcttgagctgatatctttgttgagtattttagaacaatcttttgtaggaaaatgcagtgactatgactgtctttttgattattcttggtggagacaacaaattaacaaaagaatgtgtaataattcttccaaagagacacattgggattgacttaagattagcgttgttgtgtagggcatgtatcatttatcaaagatgttgctgccactgaacctccaatgcatcttcatcacttactcaaagtgcttcaaacaagaggtaaaataatgctcaattttgttcctcatttatgtccaaacttatgtattcgtttctttttatatggtttgggatagaacatatatgcaagttctggttataacatatgtgaaatttggtattctggatttgtaataatggagaaagggaaacttatggttcttaaagtctcagttgcttcatatatcttctgcaggtgagacaatcatatctcctggagctaagcagggactgatccctcttgctattccgctttcgaagaattcgtcaggtaagaccacactttcgatagaatccattagctttttccaggagcttgtctttagttttgtttttctggtttttttttttgtctaagtaggctctgttactgcgcttttgagatggcctactgctccaccagggtaagagatttggatctctttcttggtaactcttgcagtagtaaatatatgttgttgggttattcttggtttttaacttttttgtattcgagaacagaatggatatgccggttgtggaagtttggaggagtggagtcaggcttatagctagaaatgtaaagacttctcattctgtttatacgtagcttatccttttaagaggatttatgtcttttttgtgttaccaagaaacaatcttacattttttgatattcaggtagatgaatacattcaccggattctagttgaagaagatgcacaagagtngacagaac

SEQ ID NO: 44937 - DNA, 557 bp, Arabidopsis thaliana landsberg
aattgaggcttattacaatcatttttatttttccattaaaaaattaaccgtttagagttatagaaaaagaaataatttctaaattctacatgacattcatcaaatcataggcctcaaaataagttgaaaattttgcttttactttaaaagctagtcataaaattgaataaggacatgacatatattttattctgatataaaatcagaaaacatggtaaaaataaaaaagtttaaaactttaccgcaataataaaccctatattattttatcaatcataaaaacaatgacaatgagcatcactaaaaaagttattttcaatttttttatcattaccaattacaattatttacttctttttttcattgataatcactatatgttaccaaaactatatttatatccgatttcattttcgcgaaacgagaaaatccaatgaaaaattaactcaagaaaaaaaaagttacgaaaacattttatttgtaattaaatgaatcatatataaaatcaaaaacagcagaatattggaaacaaataatctggtaggaaaaataatcaa

SEQ ID NO: 44938 - DNA, 1065 bp, Arabidopsis thaliana landsberg
ctgtttatctttggtttatttcgaaacaaatgttaatttcttttgttgtctgatgtgtgttagggttttgttgtatgtattgagggtctttggaaatctttttgcattgtgcttgtaatgttgtatttgtgataatagcattttgtttgtgagtttataattgaatttttgaatgttatttttgccatgtaattggtatagttagcatttttttttttctttagtaaattgtttatagtacgaagatactgtttcttggtattcatgaacaaatggtaggtcaaggcaatagggcgatccttttaaggtactagattgaatcaaatcaaatactcagaagaattaaatacagaaattaagaattttcccaaaaaaataaaaaatacagaaattaagtgaagagacaaaaaaaaacttgtaaataaaaatagaaagaaagaaaatatacataataatcagggaaataaataattttgatagacaaaactgagaaattgagggtaaggtcattatgcattgaagagagtgaaaatcaaaatgaattgtctcctgatgtgctctatgtttggttcccttcttccttagcatcatctctctccatatgtattgtttttataatctatctatcttatgaatatatcttcttcatttgacagctgttgtcttcaacaatggctagtcccaaattttcatgattttatttcttatgatctgtttatattattataagtttttttaactttttctttcatgggccacttgatcttctgcacccacatggctaacccatcttttagggtactagacaaagtattattaaattcattcttttagttgtttattagaaaactttcaacttttgtgtggttttgggatttagagtaaagttgttttacttgtgattcatgtgtgtttgaggacttaggttctttccagtaatttccaaaagtgagaaacataataatatcttaaccaccctttgattgggagtcccgggattagattggcatcaaacattaggagcaatagacattacataatattttaaataacacccaagtgttt

SEQ ID NO: 44939 - DNA, 777 bp, Arabidopsis thaliana landsberg
cttactcttgaattgagcgatttaaggtgatcttttcttttcttttcttttctggcttttgatcatctcatctctaaaaaaagtgaatgcaacatgtttcaaagcaattagttcacaattagttcttccgagtcatcttgttatatgtccggaataagaaacttttcctaaatcattattatgcgatgcaaatggtttcagccaagatataacagatgggataaacaaatcagctaaagcggttcaagcagctgaagctggaatcaaacagattggaacacttgcacagcagcaaactctctgtaagcttcttctaatcttttggataatctgtaataaaagctgctgttcatggtggcaacagttcacactggtaaaaaaaaagcggaaaatatgatctgatgatgaacttgatcttgtgattcagcaatgattgaagagagagcaaatttaccagaaatatcactacaacctgttgtggctggtgcagccgaaaagacttctcacgcaatcggcagtgcaaccaagagactaatgaacattataaccggaggaaacaaggatgaagatttagacatttagaagttttcacttggagtgtgtttttggtccgtctttgtttgaagggattagtgcaaggtaaagtccatttagggaaacagagaatctatgaacaagaagactttttagtaaaatttggtatattaatgaaacatgaagtgtaactgtgtaagacacaaaagaagaaataataacagcctcagccacaacagcctg

SEQ ID NO: 44940 - DNA, 725 bp, Arabidopsis thaliana landsberg
  unsure (1)..(725): unsure at all n locations
cacatatctcagactttcgattactggattttagaaataagaataataacttgctcgaaagagattcgaccttctttatcttacttcattttaaagaaaactgataagccattgaataagaacataattcctctttttttttgttagaatgagaagagagcaaagaaacttcttaaaatgttataaaactaattaatactaggaagactataagcttgaaatatataaactattacagagtaagtactacatatataaaaaacacagtgtgtgtaaacatgatttattttgaaatttgaactttgatgtggttttttttgccctagaattgaggaattccatttaccaagattctcttaatttgctcaaactcagtctcttcaccaattagtggataattatgtttggctaggatgcctagtccagctagattagattatgaagtatataccaaacaatgttcatttatcaaattttcaattaacaatcaacgaaattttaaaatagaagctctacgaaaaatacatttaacatgagaaaccaacatatattttaaaaactgttgataaacaataagaaaaaaacttgagacacagtttcgagttttttatttgacctggtgactttggtttcgcttaaggaccatagaaactgctaactcangaaaaggaccaccttcgggcacaacggtcaggtgttcgggcggattggtctatgccatatcg

SEQ ID NO: 44941 - DNA, 521 bp, Arabidopsis thaliana landsberg
ttttatagcaaacaaagaatgatgattaaaataattggatatagatggacataaatctggagtttacggggggatttttaatattgggctgtttaccacccaaaataggaaaataaaatatataattatgaaagttaaaaataaaaataaaaagaataatataaagagacaggctgggaaaagagagactctcgatgaatcggaagtatcatctaagtttcttcagacagcctgtctgtcttccacacgtgcgatttataccacatgatccaattttattacatgtcaacttattgaagtaattgattagtatataaaatcaacaattaaagctcttaatgattcgattattacttggaagagatccacaaatttgtcgtggctttaacctattggaagcttttagcgattgagaataatcgaatcaatcaaacttctctttgttgacaagtacaaatgaaacacgaacctaccgtacctgtctttaatattggaaacatcatactcccgtttacattttg

SEQ ID NO: 44942 - DNA, 605 bp, Arabidopsis thaliana landsberg
ggccgaactcaagtattaacaacggcccattatccaaaaccctagaagccttgtttataaaatgactgtttttttcaggagatgaaatgactttgatgcatccgtacgaaaatggagctctgcaccaggtctaccacaatcatcactcatctccctgcgagcttcaacggccatggatatctagcgggaaaatctgttgatagaatctcacttcctctccagcgaaacgttgcgtctctcgttcttcaatcccgtacgagaatttgagaaaccctgtttttgcttcgtgctatgtgattcactcacttttgcgtaattggatttttcaaaaccctaaattgatgagtaatttcacttttttttttgctatttcgaattggattgttttcggattttagttttctaattagtatagatgatgattcttgattccttgcgtttcgtcaatagtttgattgcttgcttaagtacaatttcatggtgtttccatggtttttaggcacgttgcgttgtagtagaaagtttccaggagaaacagttactgaagaaacatcaacaggagtcaatgagtttggtgtggaggatcgtgatggagtatttgccgc

SEQ ID NO: 44943 - DNA, 1024 bp, Arabidopsis thaliana landsberg
agtgtttctttgttcatgtaagatctttttctctctttcctctttccatgtttatgttttctattatttagttggcttttggtattttgttggtttctgggtttaagccatttttttcccaccgcctctgcagctctgcttttttagctgctattttttttttttgcttttggtatgtataatcggatttcttctttatcatttatcaaatgtttgaattcttccatctctcataattcttaagtggtcgtggtgtgtactatctcctaagctctctgttttttttttgtttgttcattggctatatttcaggtcttcttcttcttcttcaagaatgagctaatactcacagaagaagaagatttttctttggatttttcactactggtaagctcggttcctccctcttttgactgtaatttttaaattcggttttttttttggtgtttttctgaagaagttctgattattttatttgtgaagtttggatctttcttacagatttagtaggattaaagaatgttgttgtctgtagttaatcttcctctgtaaatctatatgctttgttacaaatctatgcttcaggaatctagggtttatattccactttgtttactttaataaaatatagtttcttaaaccctttttgtctgatgaatcaaaatctaattactttatttgaatcaagctaaaataaattggtactttaacatccccacagtgttcttctataatcttgattttttggaaattttccagaggcattgttgtgaaattggatggtagtagcattggaatggcagaacaaaagagtagtaacggaggaggaggaggaggagatgttgttatcaatgttccagttgaggaagcatcaaggcgttccaaggaaatggcttcaccagagtctgagaaaggagttccctttagtaaaagcccttctcctgaaatctctaagcttgttggtagtcctaacaagcctcctagagctccaaatcagaacaatgtgggtctaactcagaggaaa

SEQ ID NO: 44944 - DNA, 868 bp, Arabidopsis thaliana landsberg
tctgggcctgattggtacagtccgaccaaacagaacaagcagcagtatgttactgttgctaagtggtttggcttttttagtttcattcttgtgtttaattaaaattgctggattaatatagaggttgtgtagatttgacgtcatttggatgggagaatttggaaattaatgttcaactacttaatctataattcaacaaacgataaatgaccacttaattgctaatagcctctagttaattcaaaacgcaaacctatgttatgaaccacttgtcaataaatttataaatctttagttgagactcaaaaaacaaagttactttatcggaaatgtcacatttgacgcatgagagacactttcttgccgttacttgttattgtcgttgcaacaaccaaaactatggttgaactaaaaagccccaaaacgtgctgtatcacagttcacccaaagtgcaaataatctttacattcaagactctagactcagtaagcaataaaaacagtaagtgatacaagaacagagagttgagttttgagcgtgaatccggtaaaaaggaagatgcgttacatatacatctgaagcttgcaatggtacgaatccttctattttaaaatattctgtcttgtctctcttttttagtagctataaatacggctctctgctgcacaactattattgaaactctcaatcattttcagctcattactcacctcaactaactctctgtggccaaaaataaacagagacatatcagactaaggagtatttaataagcatcatctaacaacaggccaaggtattaactacacgagctaaatctgttttagtcaggtttgatagaagatacctatctttctccatcttaaat

SEQ ID NO: 44945 - DNA, 410 bp, Arabidopsis thaliana landsberg
ttatagcaaacatagaatgtggattaaaaacctagtttttacagggacataaatctggagtttacgggcggatacctatatattggtcgggaaacgagccaacattggaaaatcagatatataatcatgaaaggccataaaatcgatacatttaaggagagagggatgcctactgaccaactatagactctcaaagaatgagaagtatccattaagttacttaaaagagactgtatgagtacacacacgtacaaaaaataccacaagattcagtaaacttacaaggcataccattggggatatggttctacataaaaaagcaacaattaaaacatttaatcaatcctcttgcacatagaacatacccacaaaatggtttttgctttaaacaattggacacttttaatgaa

SEQ ID NO: 44946 - DNA, 980 bp, Arabidopsis thaliana landsberg
caaagcatgttcgatgtattaccacaagacataaccgccgacatctccggaggttacttctttattaaaaagaactgttcttgtcttactacgactcatcaatacacaacaaacacaacattcacaatcagacaaaacgttggatacgtttacaatgttaccgtctctgcttactctggtctcgcgtttccaccgaatacaactagagcagctcgcgctggtgcagtggtttctgttcagcttctttgtggttgctctagtggtctctggaactatcttatgagctacgttgctatggctggagatagtgtacaatctctctcgagcagatttggtgttagtatggatcgaattgaggatgttaatgggatcttgaatcttgataatatcacagctggtgatctcctttatatcccacttgattccggtaagaaagtttcgatttttatgctaaagttagggtttttgaaaagaataatttgatgattttgaatttgtttatgaagtacctggagagccttatgagacaagtaagataaatccaccagctccttctcctgcgcctgcatcatcattagctaatggcaatatctcaggtttggtttctgttattatcttgttttgtctgatctgaatctcaagtttctatttttagtatcatgaaacttaagtttagatgtttctgtatttgtttccaaatttggaaagatgaccaggtgaatcacactgcaaagagtggtagtcatgtgccttatatatggattgttggtggtcttggagttgtgcttgcacttcttgttctgtgcatacttgtatgtatctgtttgagatcatctagttgcagttccagtgaggaagatggtaatggacacaacttccaaatccttagaaaatccggtttcttttgcggttctggtcggtataactgctgtagatcaggggattttagacaaaccaatggtgaaactcaagttgtgcta

SEQ ID NO: 44947 - DNA, 433 bp, Arabidopsis thaliana landsberg
tcctggggaagattctttctctccctgagttctgttcaccatttgattttcctagattgatcccggcacatgaggtggttagtactctaagtcagacaactgagcaaccagatattctacaaacaccagaaaccagttcagctacaaatgatctgactgatgaagattcggataaagacgatgatacattgtttaccattgatgtctctgttcctagaggtgatttgtttcttcttctctttttgatatgattctttctgtcccaaacacatcttaataatgttctgacaacatgttactaaatggtttcagactatgggaatgaaactgagaatatagacaaggaagaggagagtgagatacatccattatctgcaacttgtagctcttccgtttcccgagaagtcgaaaatgttgatgaagatgtagaaaa

SEQ ID NO: 44948 - DNA, 359 bp, Arabidopsis thaliana landsberg
tatttttatttgtcattataaatataaagtactccctgtctccctctatagtccctccgtccaacttttttttttccttcattaatttattctgttagaaaaaggatgttatatcatgaattacaatttaccctcgacgaaagactactaaaggaaagaacttaaataccagtgaacagtcttaagggagtttcctaaatttaattagtacggtaagactcattatatttagttgtgttgacttacgtatgtgcatttgaccagattaaaaaaagaaaaaagggaaaaccaaccttccaaaccttatttggttaaaaaaaagaaccattggtgttttaaaaaacacatccttaagggtt

SEQ ID NO: 44949 - DNA, 561 bp, Arabidopsis thaliana landsberg
ataagaaagtgtggaaaggccacttgtggtgacttgttttatttcgtgggaatttgatagtaatgggatctctttgtaagcaaatgtgttaatataaattctgtcaactggagttttccccaataatgataattgagacttgagagtcttgtaacacttatggctttaagcctttaaccatgattgggcaaagtaatatccataaaaaatgcatacatgtgtatttctataaaaaaatgaatataaaaatatgaaatgtatatctattaatcattaaatatgttcttattcaattttatttcttataacatttttaaggtaatatgtttagttttaataatatttatggagtgaatacgatattcaatcaaattttctggatatgtaaaactaagaagcaaaaacattaatttgacttttgtaatgaatatctaaacctccaagaatgagcaaaaatcagacagaaaatcaaatatgaaaaatggggcggatcacatatttactacaccaacatgtttcaaattttttttggtaaaaaaattggggacaaaatttaccaat

SEQ ID NO: 44950 - DNA, 628 bp, Arabidopsis thaliana landsberg
tgcaggtcgactctagaggatccccttgttcaggctaagttgcccgatcacaaatctggaaaggtatataactccaccagctttcttttctttctgttccgtttttttaaaggttggtatgttggagataaccattatttgttgttttctgagcaggctgaggttcagtatttccatgactatgctggtatctctaccagcgttggattcacagctaccccgattgtcaacttctccggtgtggttggaaccaatggtttgtctcttggtactgatgtggcctataacaccgaatctggcaacttcaaacatttcaatgctggtttcaacttcaccaaggatgatttgactgcttccctcattctgtaagtgcctccctccatatgaaatgatgacttgagattttaatgctgctggttttaaaagagttgtttcttatactgttttttttcaggaatgacaaaggtgagaaattgaatgcatcctactaccagattgtgagcccgtcgactgtggttggagctgagattagccacaacttcacgaccaaagagaacgcgctcactgtcggaactcaacacgcgcttgaccattgaccacagtgaaggcagagtgacaatgctggtgt

SEQ ID NO: 44951 - DNA, 780 bp, Arabidopsis thaliana landsberg
gctctttattgtcatatcatctagtacgaaactacattttgtcatatcatctagtttactagctaataataattatattttctctatccaggactgtaaactttttaattgaaggtttcatgtgtcacacacacaacgcagcatggcatactctacataacattatatgtgggacaggaagcaaactcgatacgtatctagacatcgtacgagataaactaaagtgcaacgtgaccatcttccacggaggagacgacgaactcatccctgtcgagtgtagctacaacgttaaacagcgaattcctcgggcacgagttaaggttattgagcacaaagatcatatcactatggtcgttggcagacaagatgagtttgccagagagctccaagagatttggaagacttcttcttgctaaaattatgtttgatgagagaacttgtgatttattatgattgttctatgtaatgggttggtaaaaatattcttaagagttttataattacaaattaaggaaatccttatgtatcatgagataatccaggaaatggagtattaaataataatttcgcatctgttttttatgctaatttattcatcatattaatatatttcgtttatatataaataggtatgactttaattttggtatgccttcattatttgaacctttttgaccaaattaaatcaacggtatatacctgcagattttttaatttttaaagatagaagagttctacaaatttaaattcgtatatgaacgtcgatatatatagtcatca

SEQ ID NO: 44952 - DNA, 729 bp, Arabidopsis thaliana landsberg
gtacttcttgctcattgtttaaaagcctgaagagaccagctgcttctcgaacccgagaaaactcaatgcagaaagcttgaacttctatgaatagatccttcactgttacattttttacccaaaaaaaacatatatcacccacaattgtacatcatactaatagactataaaagcttcctctgtgaatgtatctagtgatctttctgtgttattagcaaagcaaaacgcctaatttgatagcaatcagtcagaaacagagaatgcataccgttgatgatcttgttacgaattaagctttgcaagaagacgcaaacaagccgtacaagcctattctgcatgtatttgtcttgctgctacagatcgaaaacaatatatcactataccgttaacaaaacaactacattgaaatcaacaaatccgagaatcatatacacaaagcacataatgcaaagcacaagcagaagttttttcacacaagattataggatggcgttatggatactcatagaaagctttgttttaagtacctaacgggaaatcaaaaggacgctttgttttaataccttagcgttctcacaagacgatatgcaattagtgatgtacatccgtatgaagtccttgggaagttcaactgcagttgtgagcctattcacaacttccattgagtgcaggctcatgtccatatttcctagagcttcataatagctgaagaagcattctagattccca

SEQ ID NO: 44953 - DNA, 570 bp, Arabidopsis thaliana landsberg
tcggagtctcttcctgatgtgttacaaagggaagttggcaacccattcatggaaaaagtcgaacgcattcggattcttgctcaggtttcatcttctgtctattcgcttccatatgcttagatcatttgataagaatctcacatcgtagtaataagagatatagtcatatagatcaatcaacttatcgaaacaaatatgaatgatacgtcttatttttgtgtggtttttaaatgtttcagagtgcgttaaatttgcgtatggctggtattgaggataccgcaaaccttttggagaagcaattgactagtgaaatatccaaaatgccactagaagaagccttaacgttggctcgtacattcactcattctcttaacttaatgggcattgcagacactcatcacaggtcatgatttttgtaatcacattacaacaaaaatattacaagtaataaacatgaatagataattctaaacttaaacattgtggattctaataataaacatttttattccagaatgcacaaagtccataacgttacacaacttgcaagatcttgtgatgatatattca

SEQ ID NO: 44954 - DNA, 911 bp, Arabidopsis thaliana landsberg
agaagaagctcttcaggtgtcaatggtgggtcatgttatagctcctattgctcctgaaactagaactcttctataatttcggatgataggtataataaaaacactcatttgaatagtaattatccataattatcatttgttttctgatttttgttctttttgtgttaattgagtatcttaagataaatagttttgtagaaatagtttcaatggcttcaaaatgaaatttcatccttttttttttagtttttggttaagcggctataatcgttagttttctttttactaaaagtaaagacttttacagaatggagaattttctcttttttattttctataaaatggtcagtgaaattatgcaaaaaatttttaaaaatcagagagtccccccaactttcatactgtaagctttatttttttcttttcattttgatttattaatctctttttccaactttttaattaaatgtatatttctgatttagtgaagaaaatatacttttatcagtattgtgactagttaacagaattttccacctacacatcaacaagcatcttctccagtaagctattgttaatgcgaagtacggaaatataaacaaatcaccaccttcattgcaacttgcaatcaatttttactcattttagtaaggttttgtttttctttttctttcagttttttgtgatttagtttaagaaaaaataaaataaaatatagatataatttgatcaatttcttatagttgacagaaaaaaaatcttataactattgtcttttgttatatttgattggattattatttgatatttttttgggaaattttcttttatatctttgatattaagttttggttatacttggtatctcatttctgtagatatgaaactaagatttttttcttctaaaattt

SEQ ID NO: 44955 - DNA, 636 bp, Arabidopsis thaliana landsberg
tttgttaatctaaatcgcatttgtcgtgtcttatcaaagaatcttagacagtcttgtgtgtggaatctacaatatttacaaaaaaaaaaaagtttcgacaaaattgttttttttctaaaagcgaatataccgccgtagagtctggcaaatagaatctgaggaggctgatcatacagcaatggtattttgaaccaatggtggcaaaatgccacaaagacaaaccattagattacatatcctgaccttgaagttgaaggtctttagttttgcttttgtctctttggaagagcgaaacaaatgttaaatactaatacgatgtggtgatatatcacaaatttatgtcacaaatttaccaaaaactatttcaaaagcttttgatgggtgatcaagagagtgcaacattatttataggatatgaaagtaacttaggcaatctgcaaaacccaatctttagtgtcttggatagaaccagtttgtattccgacaagaatagatcgaagttgctgtgtaacaatcccatcttcaactttgtactcagtcctgcagattatttattaacagataaatgtaaaattctaagcatatttttacatgtattcagagaggaagaagagaccttgtgttcttaaagtgatg

SEQ ID NO: 44956 - DNA, 556 bp, Arabidopsis thaliana landsberg
ggacagtgatataactacggagcaagaactatttgaaagaaactctcaagtcagtgaagaaaagagtgaagtttcttcagctaccttcaaaccaaagtttactgagaaaagagtgaagggatggaacaatgtgaagaaagtcattcttctaaagcgatttgttagtgacttaggaagtctgacaagactcagccccaagacacctcgtgttttgccatgggaacccgatccagaaaccgaaaagatccgtttgaggcatcaggaaatcggagggaagaggaattcagaggaatggatgctcgattatgctctacgacaagccatatcgacattagcaccgtctcagaaaagaaaagtctctcttcttgcacaagctttcgacactataagcttacaagatatggggagtggttcaaccccggggtcagcagcatcgtccaggaacatctctcgtcaatccagcatttcttctatggcggcccattatgaaaatgaagctaatgctgagatcataaaaggaaaactgagaaatctccaagaagatctcaaagagagt

SEQ ID NO: 44957 - DNA, 357 bp, Arabidopsis thaliana landsberg
tcgcataacggtcagaaattgattctatccttcggcttttttttcttttaattcgccttttgctggcttaggctttttggccagtgatctggcgctcctctccgataggctattacggcattataattgaatgggtgggggaggcaatttctgggatttgatgagaccatatgctcagcaacagggctttgatccattcagaaacaaacgagtggctgatcatctctccttatcgatcgttcagaatgaaacctatgttaaggggtacgggcttaaaccagacctccgactcacttacttcctggctatcaacctactataaaagggcccatttttttttgattgattgctatgcgc

SEQ ID NO: 44958 - DNA, 772 bp, Arabidopsis thaliana landsberg
agagaggttttaggcttatgcttctattggtgttgcatctcaattttattgtttgatgctaagcttttaaattttatttaaaacaaagtttgaggtatattacaaagaacactactcaatgatataatagagtaactttggcaaaaagaaaataaaaacaaagttatagtgagattttggaaaatagttgttattttatccaaaagagcattagtactcgttaatgcttctatatgacgccttcggagatgatgttgcgaatatctctgacaataatcttgaagatagatgtgtgagggatttgttgatcgttgtgcaacacattatttctttatcgccaaatatggcacacagaagtttgtcaacaaatattacatatatgaatgtatacacatgtttttgataattttgtttacgcacacgaccaaaagtactaattactccttaacaatatcatgtattgatatatgttaacaagcgcatttacacgtctacctataacaaataattgaaagatatggcatattatcctttttaaaagcatgaaaaatatatagacatgctattgtctcggtggtacaaaccattggtgtattatatcattccaaaaacctgggagcgtcacacattcttttgagacctgataacaaatatttgtaacaatgcaacgataaaatttagaaattgtgtggcccatagagctggcggctctcacctaacattgatacttaggcatgaaatggaagccttcccacttaccagtgggataaaa

SEQ ID NO: 44959 - DNA, 636 bp, Arabidopsis thaliana landsberg
gagacgggaaagggaatgtttttgttttggaaagaataaagaaaccttaaatcttttataccaaaatgtttactgcatttttttcaaactcatttccataagaagaaattgcttgtttctcaagaaaattttcaattttttctttggtttgggttatgaccatcagtatttcttctttcttttggtttaaaagaagaagaaaaatctagatttagtcttttttttgtcttgggaatgttagtaactccagttcattcattattgacataattgattgctcaataatactgtataagtactattagcttgctcccatctgtttacttctaagtcctagtgttgatattacaacaaaagaactaaagaagatggtgagaaatgttttctcactagatatttgggcttaaatgggcctttaatttgagaattgggactagaaaatgggcttgtagtcctaatggtctactctactcattttgggatgcaaaaatttcatcacgttgtcgttctcatttttaagtaactttgctcttttgtcccaacaaaaaaaagtaccgttgctctgatcataagactgtggtctgggatttatacaatagctatcacatattacttgatttggtatgggcctaaaaa

SEQ ID NO: 44960 - DNA, 514 bp, Arabidopsis thaliana landsberg
  unsure (1)..(514): unsure at all n locations
ttttcctagcggataaagagggctccggaacgtatctagatggaccaccncccttccttattttatggagagaataattgctgggttgactagttggcgtttgcgggccagaccgcgtgaaatcgcatgtgtgtgttggttgtgaagttgagaagtggcagaatcgagcttatcccgaaggagtcgaccaaccaccgcacgccaagttaagcataaactcatgtctagagcacggaattgcgagcacggaattgcgagcacgtatataaatgacgagtctaattgaactaagcatcatctgcaagctagaatgttattcaattttaacatccgtctatacgtttattgaaaaataacccccgaaacgactctttctccccgcataaaattataccgtgccggtctagcaatgagccttttgttcatcagaaaaagttgctttgctcaatgcatatcatggattaagcatgtttgattcgaagcttctagaatactgttctgattctgttcacac

SEQ ID NO: 44961 - DNA, 666 bp, Arabidopsis thaliana landsberg
tgtgtgcaaagacgtcaaggtgcattaaaataagaaacaaatacttaaaagataggaatgacttttaatttgattctaatgaattttttaatgacatggtgatacagtgacagggctgtgcaaaataggaagtaacaggatgaggaggaccgttagatgaatgaggatcaagcgtagatccgacactgacccgaccgtcgagtatgcaaccctatttaacacactctggccgaaccaccacagctgaataaaactattatttctaataataataaataactttagagaaaaggtataattcaaatccaacggatgagatctgtttccaagtccactcgctaaagaaagtggaccccagagagctcagaaaagttcacttacgatatgtaaacaagccaatcactttcgatttaccacaattgtcccttttcaagatttcgttgaaaaacttttgttagtttttaagtagtaccttatatataagaaaataagtaaattcaaccatcatgtcatttttaaaatttttaagcaaagtacgatttcttacatatttgatagaaatttgtagcctagttattctcgatagtatttgctcttctgtgacacactacacaaatatttaatccagttgattgcaaagtgtgagatgtaggaaaaaaaagagag

SEQ ID NO: 44962 - DNA, 616 bp, Arabidopsis thaliana landsberg
cgaaaccggctcacacaatgatctcgcctttgaccccggttatatctttgttcatgaccccgttttcatcggcaaaaatgcgaagttttgctgttttttgggccagccattcggcatcttccaaaacgtccgtttcttcgatccccaataagactagcaggccgtgaccaataccgctcactgttttttggtcgaccgtgaccgatgcttccgaaaccctttgaatgacaatacgcatgattaaagatagaatttatgatttattcgactattgcacctattaaaaaaccattaaaaagcttaaatttgaaaatctttaaagggattatgacaactacagccataaaaaaacagcttaacgaatacttgcctttgctcagcctccaacaacaggaattgctattggatatggccaaaagccttttgcatgtagagcctggtactaaacgcatcagtttaaaacagtacaataaggagctggcaaaatctgaaaaaagcatctgcaaagggaaatacatgagtcaagaagagttggagaaactgacgggaaatggtgagacaatagaaagaaatcatttggtcgaaagagccaatcatgaactttcagagataaacg

SEQ ID NO: 44963 - DNA, 622 bp, Arabidopsis thaliana landsberg
ataataatagaatcaagctcagcctaaaaggaagtaagtgtctgtacaaacaggaagaagtacttggaaactaaagatacgacttttatgcagagaaaatagtggctaggattggtaagaccattgcgccaaagatgcaacttctccatctcttacaatccacaagaaattaataccaaaacagatgcataacttttctctatatccaagagacactgtgatagagtaaagacttgaaaagaacatctccaactagtaactacctttgcacggtatttttttctaccagttcgatccctcccaaaaaggaaaactcattactacgccaactaggaatacctactgctcttcaacaacttattaaataaagaaccctaaataagtaaatacaatcataatccttaaattctcccatgaataaagtactactagaaatcaaccaatatcgataaatttcgccaacgtaacatacaaattaacaagaacacagtaccggaattatatgtgtaaatatgtcgaagtattactatacaaaacacttgaatactcaaaagcacatgcttgataatttagcaggcacattatatagcttccgtataagctggggttgaaaaggtatgtt

SEQ ID NO: 44964 - DNA, 784 bp, Arabidopsis thaliana landsberg
  unsure (1)..(784): unsure at all n locations
gggaggatgatgttgtccatgtaagtgtaagcaaagacgactcttgagaagggaccccatgccctcccaagatacaaaatccctgtccctgtcaccttacactttacgaacgagaatccggtgtcctctagaacactgctcctcccctgtgccgtcactgctcctagcttatccgctatcgcatgcacgtggcacccctaaacaccacttttgttagagcaaggaccaaactaaaagttctaactttaaatagtattctaagtgagaatgcttacttcataaagagaaagggcatttccaaagatgaagtccactgatccctcaatgtaacaatctttgtaataatgtcttcccaaatggtcatagagagtgtcttgagcaccaagcattctacacccaaaaaacgcggcattgtctgccgacaccctcaatgctaccgcctgtttaccaactgcaccgggcaaggggactggggtcgtgttctacatacatataagatcgctaagatggatataaaacttatacgtccaattaaattttaagacaactagtgtatatgttaataagttatataccctgaatgtgatattcttagcgacaaagaaagngagagttgaccgcgaaagaggccgagttgtaagtgcccatggggttgccttttgagcaggngtttgtgctgtgtctccccattccactgtgncttctctgctccttctccttctattgatataaatgccttcaaggggggtatgctcaccttctccctagacacattttcccacat

SEQ ID NO: 44965 - DNA, 813 bp, Arabidopsis thaliana landsberg
gttggaatacttgggccgagcaaaggctgaagaagcagaaggacctgaagctagtagtagctctagaaaaggaggtattgcaaagaagaagagataaagcttttgcagttttgaatcgctttagttatgaagctgtaacactttaaagaaagagtgaaaattttgaggaagaatgcaaattcctacatgaactatggcgttttgttatgaaatacatacacgaacaacttgtgttgattcctgcatgaactaaattattttagctaaaattatctccaatacttaatatacgcttaaaatgaaaaattttagtcaaagtaaatgtaaaatgtaaataatagtatagaacaagaaaacgacgccgtttttatctatttattttcttgacgaagaaaaggaagaagagaaacgatttgagaattggacaagtgaatctctcgacatatcaatttcgcagaaaatgaggtaaaatattgattagggttgatctcgaatagaggaaattgtgttatgcaagtatctagagtagggtttatgtcgaacttttcgtttagggctggagattgtatggaacaatttagtctttcagggttaaattttatatgcatgccatgtgtttgattaaatgcctaaacgagtttctgtttttgtttaactttgtagttctgatattgatgatggtgtgaatgataaatcaagtgaagatgcttctcataacgttgaagatgagacagctattcattatgattatgagtttgatgaagaaaatctagttgaatgttatatcactggatctggtgaggaagagaagaa

SEQ ID NO: 44966 - DNA, 390 bp, Arabidopsis thaliana landsberg
gatatcatgtgcatgtcaaatgaatctaaaatgcaagtaatcttttataagtatactactaactaaaacatatattaaagaagagagatctttattatcttcttcactttggttacagtcttttcaagctggttggtcttctttgttggatatttgaagttggaaaaaacaaaaaagaagagagaatttttttatttttaataatttgtaatcctacattatataagagtaaaaaaaaacagatgtatagttggaaaaaccaaacaaatcactaaagttttttaccctcccgctttagacgattaagagtgatcaaagaaattcgtttttactggtaaaaactttctgaataagttagaaaatatcgaaaacattgatgagtttgtgtct

SEQ ID NO: 44967 - DNA, 862 bp, Arabidopsis thaliana landsberg
cgaagatgattctaccatccaaccactatcacacgtgatcgacgcacgtgacaccctttttttgtcattttctgtgtgggataaattaacattcttattcgtctattttcagtagaaattgataaaacaatactactattggtttagaagtgtttattatatgtattttgttaacaagcaaaaaacaaatagaaggatttgttatcagtttcaatgagagatcaaatagtctaaacttaaattccatttcagaaagaccactatacttttttttatccgatgaatctgatccatgctctttaagcatcaagaatacctcaagccatgtttatcttagctttgaaaaatataaatttctatttgattctaataccaagaagaaaaaaaaatcacataatttcaccacgatgggagtatttggtttcagttcaatttcaagtgatcaaatatcataatgccaccacgagcaacttttggagtctaacaaacaaatattaaagatctaaaattagttccaaatccataaatttcggatatatattttcaatttaacaagtaacttaattttgggttgttctcttaaatattattatcaacttacaccgacacgtaaaccattttgttaatttgaataatccgagtctatatgtttgtaaattgtccaactgttgaagaaaacatatataattgcccgactttagttattgcttacctagtcatgcacattaacattggttcaatataataaactaaaaggccatattattgtacatgaacatgttcgttgttgatacaacaaatccattttaaggataatccacatatattattaccaaaaacgaatgcttaatttatcaagatt

SEQ ID NO: 44968 - DNA, 396 bp, Arabidopsis thaliana landsberg
tccaattttattaaattggtagaaaacaaactttaggctgctacctttgattctatgcatttctacttgaaatcttcttttaaactattttaatcaattcaatctttattatcagattttttttaaaaaatgtatattaaattacatatatagtaattgctaattaagtaaattttaaaaaacgtttagagacagaattataacatatgacaatcttacccctgcctacctgtcatctgcgaaccgaccaaagtagtgagtgggcatggagttttgaactgagacacttgtgggtcctttgggttgtgctttgttccttccttcaagaaagtaagacgtaaaacccgatcaataattttggatccaatttaacccaaccctgactaatcaacctga

SEQ ID NO: 44969 - DNA, 564 bp, Arabidopsis thaliana landsberg
tgtaatttctcttttcagatttgaataatatacatgagtttcaaaagattaatgccttttagatcattatcatataaaactaatccttgactatgcgtaaccatcattaatttgattactacagataaaatagaaaccaatttctgtattccaataagattgctaccatatgaacagttgaaaaagaggatggtcatgaagattataggtttatatacgtgtgcatgcgtgtgtgatgttacacgtgtgtctcatatttgttcttcttggttttacagtcaccactctcgtcactcattggaatttcattcaggaacctaacctatgctgatgatattcgaatcacgagcatcttggttaatttcgtctgacttctgtaagtatcaagagtttaatcattactgcagataaatcctcatacacaaacttataatttgtgttttatcgattttgtggaacttaaaagttggttgcaaaatgcttggtatcataaattgattaaaggtatatttgcagatgatctaaagttttgcttttcacatttacattcaatatataggtatc

SEQ ID NO: 44970 - DNA, 519 bp, Arabidopsis thaliana landsberg
agatggcatcaatacacagcattacaattttttgaactgaccaacgttaaatgtcatagggggtaattttaaaagattgtgcggggttggagaaccacttattataatgcggggagaacttgggatctcaagcaaactcttcgccctttgggtgttggggttcttaataaccatgtcctctagaagtcgtaagctggaaatacattttattgatatcagtcgggggaaaattcacaacctacactaatggcaacatctcatcgcttgatggacaatactgcatacacactataccaactattagtgcaaagacctcacaaatgataaaatattgatatggttacctcgtgcagaatcatgtagtcccatttctttccatattcatcattctcatcagtataatggtcggcaccttgcacagcctttgtattgttccgcacaatatcataggttgatagaagaacacctttaccctacacaagttaaatatgttcaagtgggaaacccataccatttttc

SEQ ID NO: 44971 - DNA, 469 bp, Arabidopsis thaliana landsberg
catcaatcggtgccctcctagttccacacgtgtcatagctggtttccgattgaacatagaagaaacagtatttctggatgaaaaatccagagggagtcaggatggtaggaagtaacagatctcaagacctagacgtgagatcttaagacattctaatggattccggaaacagaacagatttaaatgagatcaggtgaatgtaaataatggtgttctggccagtatacttacattctgcgcttctacgtcgagccacgcaaatgagagtcgcttgcttttgtgtgcacaagctgctggcgttattgatggatccttggaagcgtcatctgaatcgtcatactttgacaaagcatcttgtaccctgcacatggtctacaaacttgttagattagacaaaactctaatcaggaaggagacaagaacttcagataaaatggacgatgttgaaaaaagattttactcacttacc

SEQ ID NO: 44972 - DNA, 587 bp, Arabidopsis thaliana landsberg
cttctgcagagataaaaagagaactaacaaaatccttacataaacaattttaaagactttaaatgatattttcagcgatttaatttccattgagcatcaagtcaagcaaatcttacctgtttttgctcgctccattcttacgatcctcgttctcgcctctgcatttgaaccttaccaaacagaaagatcaataaaatgtcctgcaaacacacaaaatagggagaatcagaaatgttcagtatcatatatatccaaaaggaaatctctgtcattattatacgtgacaataatcttttgtttatgcattgatgggagaaataatcttttgtcctgtaaaatggcaatgaaccacatatctgattacttttaccccaagaaagcttcacaaaaaaccagaataagagaacgatctcacgtaacgatacaaatggggatcaatcaaaataaagagaccactgaaacgatttcgatcagaaagactggaaaaaagaacaaactgtattctacgatttacatttgttctttaaaattaaccacactttctcacaaatttacatttcttcaaatttgacggaaaaaaaagattt

SEQ ID NO: 44973 - DNA, 737 bp, Arabidopsis thaliana landsberg
tgcagaatattactcacgaaaacctcatccttctgcaaaagattgataaactggaatctgtagtgttggagtctaagagttggaagaccaattatgagacatgcatttgtgagaaaaaagagcttgcagagcttatggagaaagaagcggtggaaaaagctcattatcggacaaggcttgctactgtgcaggctgagtttgatgctgtgagaggtaagtttgatgatttggctactgcaaatggaaatctacagcagaatctcagtagtctgacggacaagttgataaacacgttaggctgctacaatgaaaaactcgtttccttgccccagtgggaaggagtggatcttgattttgagtcccatgatttaacagagcagcttgataaattcttgtgtaagatatgtgaaaagtgtttcgtacttatatcagagaataatggcctgatgaaagaaaaatccatgacagagtcatatttaagggctgctgagtctgatgttatggagctcaagcagatgcatgagaatgatgtacaatgtatggtcactaaattagaagcttccactgccctcctccggagactgcagttggaaaccgaatcggtcatggataaaatgaaggttattactgaagatgaacaaaactatgagagccgtcacttggaccttctttctcgtcttgaccattttgagaatgaaatgcatctacttgtgtccaagaatgagggacttggtcaa

SEQ ID NO: 44974 - DNA, 551 bp, Arabidopsis thaliana landsberg
gttcatcctgctccattcctgcggctctgatcgtcctgccatagcgcgcggcacgggcgattgttcagtattttcggcttgctgccgtcagctccggccgaacagccgctcgatgtcggaaagcttgagctcgatataggtcggccggccgtgattgcactggcccgaacccggcgtcacttccatctgtctcaaaagcgcgttcatctcctccggccgcatgcgccggccggagcgcaccgagccgtggcaggccatggtcgccgccacatattcgagcttctgcgataggcccgacgccgtatcccattcggcgatctcgtcggcgagctggcggatcaggccgttggcatcgacttcgccgagcatcgccggcgtttcgcgcaccgcaatggcgcccggcccgaagcgctcgatcgccagcccgagctcgccgagcccttcggcatgcaccatcagccggtcgcaatcctctttcggcagatcgacgatctcccggatcagaagcacctgcgagggcaggcgcttggaatgcagcgccttgcgcattt

SEQ ID NO: 44975 - DNA, 720 bp, Arabidopsis thaliana landsberg
  unsure (1)..(720): unsure at all n locations
tccgataaaacagggtttgttgctcgtgttagtcgcaggaagactttataatttagaaggtgaagtgaccttggtatggagtgtggagcttctgtatgagtttatgagttgaagaaatacttgtcttgttttttttattttgttttggaatatgattatgacttgacttttaaaatgggataggatcaaaaccttttactctgtcaggttcatgtggtcaccttgaaggttgatttagtaaatccatggacttcttttttgtgttaagattattcttagttcaaaattaatagactaatgatattaacgtccacaggcattgcgttcaacatctcaaattaaagcgtggaaggctcagaaagtccaatatacactatgtttatctacagttacaatcatactacaaaaaacaaataatgtatacggtttggtctaatatagccgcatacgatttagtatttaccaacaaaaaattggtctcaaaccaaaccgaacaattggtaattaacaattgttcttttggtcttgaaccgaaccaaaccgaactgaactatattaaccgaccgacttcgtcctttcctcctgatcaagaaaactcgtctcctacaaaaatcccagaagacaagagattggttcttcttttgcatcattcttacaaaatccccaaaatcattcgtcacccctgagtatcacacttaacccacagnnataaatttctga

SEQ ID NO: 44976 - DNA, 598 bp, Arabidopsis thaliana landsberg
  unsure (1)..(598): unsure at all n locations
gcccacgacacccccgagctgttgcgctggaccgagggcacgaacaccccgtaccggccgcccgcggagtacaggaacggctcttcctcggtgaccgggctggtggccagcactgtgttctgctcgcactgtccggtgaacgccgccgcgggcgcgccccgcccgcccgagtacacgttgttccacagcccgccggggcagccgttggacccgccgatggatgagttgcgcacgaagtactgctggttgccgtaggtgttgaagtcgccgccgatctcgctgtccgcgatgtacccgccgctggcgtagtcgtcgctggcgcagtagtcctggaagttcacgctgccgttgatgtcgacccggcgcagcggggccgcctgggacactgcccagaactcggcggtgttgtcacaggcggcgccggacgangtcaggggtcgccggcaccgtagtccggcgtcgtggacggcaggtccacgttcagcgtcaggttcgacagcgagcgccagaagttgacgtcggcgttgcagttgccggtcccgtcgactcgttgttgaacacgtcgatcgcgccgtcgacgacggtgtcgcccgcttcg

SEQ ID NO: 44977 - DNA, 449 bp, Arabidopsis thaliana landsberg
ccatctgaaagggctagagtctctcatgtcttaagagaaccaagagcaaactaagtagcatttgtactggattatggctttcaagagaaaataagaaggtaaccaaaccttagaaagatatatcaacgttttttttagctaactagacagatattcgtaaaacaagatatttttgatcagttttgatctgattagggttacgtacatacgtaatgtctccatcgatcacgatcacctgtgaccattcggtttcgaagcgtaagaatgtgtgcgttggttcaattttgaatcatttggcaaataaacatgcacatgatgtatttttaactgtttaacacattattttggttaaattttcaaacttatttatttttgaatgatcaaaattgtaaattttgttacggataggaatgagattcatcgaattagattcaagatgcataccttaa

SEQ ID NO: 44978 - DNA, 1003 bp, Arabidopsis thaliana landsberg
cgatcgttgatgtaaaactcaacccgattactgtaaattcaaaataaatgacatgattttatgtgtttacataattatgaatatatttaacgtttgagccattcatattgcatgatgttaatctattgcaatttatgcagaattcatctcaaaatattaagtttatagcttcaaactagtagagatattttctatggtgaatttgtgactgcatatatccttctgaggttaacatatcatgtgaatgttgaacttacaagaaaagacacaaaatgtgaaaactagttgtctttataaggattgcaaaccctttgtgtcaattgtcaaaagataacgcagatgttttatctttctaaaagtagcctgttttatattgaaatctaatgactttttttaatgaatacttgagtgtgaaggctccagcgattacggatgaaaagtgaatgtttcaaaagtatgtggatcaacatgtaattatgttagaattttgtatatatatattccaagaacatattgtcctgacatgcgtcaagtacttagtgatttagaattaatatggaaaataaaatgacgcaacgatgattatgtttagtagagactagagagaggtggaacttttgggtgatgtcgttgtcgccttcgtgacaccaccacgacaatgtttgtggtaactggtcaattatggcgacctacttttttgtatgtttttcctaacgagtcaaaacccgatattaacacattcctctaaaaacaactgatattattaagctttcggctttgattagaagcatatttagaaatggttttcgacgtgaatatccttatcgtttatttatcataccgatggataaaacgaatagttgcatgaaacacttggtctaaataaacatacggttatagttttacaaagtggttgtaaagacaaatggtttacaacaacacttggctcttacaacagatggtttacataaacaaatggtttacaacatatggtcattggtct

SEQ ID NO: 44979 - DNA, 638 bp, Arabidopsis thaliana landsberg
  unsure (1)..(638): unsure at all n locations
gaactatctaattgggacttttgggacctttacatgtaaattataatgaatattttcttttagtcaattttacgtagacttaatcaaagacattttagaaagaataatcatgtttttttagtcctcgaaatctaatttaacactgttaacttttagttagtgtggccatgctaagataatttagctagaaaagtaataattttgtgttttgtgggccagaaaataagtaaaataatgattagaatccaatttgttgtaaaggcaaggcggcgatcaaatacagtcactctcattaaaacgcagagttttttaaaaaacccaaatcacagtcgaattttcccgcgcaataaaccctaatttggatttggtgcaggttccaattgaccagcaaatcggagcaattgattggcttcaagcccagaatgagattcagcctcgctgtttcttctctcgtcgcagtgacgttggtcgtcccgatcttcttctcgatctagctaacgagaacggaaacggaaacggaaacggaacagtgtcatctgatcgtaatctggttagcgttgcttgtatcggctctgcagttttcttccgngaccttgatcctttctctcatgacgattggagatccatcagaagggttt

SEQ ID NO: 44980 - DNA, 529 bp, Arabidopsis thaliana landsberg
cagaatcctcttgaactggttgttaatataagattttgccgttggttcttgaatatattgctgatcaaatttccaataatgtggtagataactaccgatacaaatgagatctcctcctttgaaatgatggattccatcgccagcgaacagcatccctgcaccttcaattacatggataaattcaaactccggatgatagtgccagctattgtgtttataagaataatggtcggatcttgcactaaatgagatggcaggaccggctgttattttaagtaggacaggtttcataaagtgattatttattctttgattcgctaaaaatatgtaatatttgatagaatagtgtatgtattggaagaaattagcgcttttttacccgtaacaattctttttctttgttagcattaaatcgaacatcatgctactttctgacaaagtgatcgtcattacagggggcgccagtggtattggatatgcttgtgtcaaggcatatattaaggcaggggcgcaagctgtggtcttggat

SEQ ID NO: 44981 - DNA, 535 bp, Arabidopsis thaliana landsberg
tcattttatcttatatataaagtagggtttacaaagttgctaactctcgtgatcgcgacaacatttatgagatgtcgatatgtgctaaactttgattatatacgaactattgtatgcataatataatgaaccaagatggctgcgaaggtagtggttaccgtggttcaccacctccaatgttgtaagaaggactagtgattgtgaagtgcagtttccagagggaggttactgcaaccaacaatgcgattgtgtgtcatatggttaaagtatgattgcaacatcaaatgttcaaagtaagggtattgtcaatcgagcctggtccggtctgaagcccacaaaacccgtatgtatctgagcacggcccgtaaatattccgatcttttttttttgaaatcccgacgttatcaattttattttctcaaagtgtatttttcaatttctaagtacatataggtttaaatttataagtttaaactccatatacattaatgttattataaacgttcatatgttgtgtgatatgaattaaatgaat

SEQ ID NO: 44982 - DNA, 412 bp, Arabidopsis thaliana landsberg
tgttgctgcccaatgccaccgtggccgaagtgatcaccatgcccacgcccgaggcggtcgagggcgcgccggactggctgctcggccggattgcctggcgtggctggcgcgtgccgctggtggccttcaccaagcttgccggcgcgaaggaaggcgatgccgaactggccgtgcgcgtggccgtgctcaaggcgctgggcggcaacccgcgcatgccgttcgtggccgtggtcacccagggcttcccgcgcctgaccacgctgaacgcagagctgatcatccccacccacgacggcaatcccttgccggcgggcgtcaaggcgcaggtgctggtgcgcgacgacgtggcggtgatcccggacctggaaggcatcgaggccgaactggtccagttgctgggcgtggacaaaga

SEQ ID NO: 44983 - DNA, 528 bp, Arabidopsis thaliana landsberg
gccccttctgaccacccgccggatctgccgcgagctcatgtggaattcggcggcgatctcctccaggcccgcgccgtcgtcgagcatcccctcgccgatccgatgcgcgatccgggtcgccacccgccgccccccatccaccggcgcgaagcccggcgccagctccggccggcagcggaggcacggccggaacgtcgcacgctcggccgccgccgcgctcccgaagaagcggcagttctccgccttcggcgtcctcgccgtacacaccggccggcagtagatgcccgtcgacgtaacccccacgaagaagaccccgtcgaaacgggcatcgcgcgcggagaacgcgctgtagagtgctgcgtcatcgtgtatcatgccccgaagttagccgacccgctggtcaggatctagccattttcggacaacagtgcgcggcaactcagcgctcggggacctgcacggcggtcgcgtccacctgcgccatgcggcgggtgctctgcaggatccggggccattgccgcaccccct

SEQ ID NO: 44984 - DNA, 430 bp, Arabidopsis thaliana landsberg
tacgacctccacgttgacttcctcgtcaggggggcgtctgcctggaacccttgtttgctttccgccttgatccgcgtcatggccggcgttcggcgaaaacgcgcttgcgaaaggctcagtcgcagtcgcgacagcgtgtgagctgaggcgcttggccgaggcgcgccgcgtcgatcggtcggccgcagcgttcgcattgatcgccgaggcctgacattcagccgagtgagggcgtgatcgatggtgatgagtcgggcacgcagactgtcggcgtcatccacgaacaggcgaccgagcgtgtcatctgatgcctgcgtggcgcacggtgcggagccgttcgcgcaggacagcttgcggcgcagcgtgccggccagatattcgagacgaagatggcgcggattggtttctgacatgggcatgagcatggcaa

SEQ ID NO: 44985 - DNA, 582 bp, Arabidopsis thaliana landsberg
  unsure (1)..(582): unsure at all n locations
tgctacacaattttttaagccaatcttgaggaagaagggatcttacggcagagtggaagcgtgcctgaaatccaaaaaatgaaacaagaatttgatgaaggaacacatgtctcttttggcaagtatgtgtagcagtgacagagtgtcctcaatgctcaattgatattgcacttagaacgacggatcctcatgctgttgctggactgttgaaaatgttctttcgagagatgcctgatgctgttgtcccacagactgtgcatgaacagttggctggcgtattaggtatgagctgaagggtgcactgactatgctctgagtttgatatgcttgaaaacagcgcaattgaacgatcctggaatgttatctgccatttcagaggacttgctgaagagcagtgtttgcaccgaatttcaatccttgttgctgtcattggcaggtatgctcttttaaataggtaaggatcccgcccagctaacacctgtttgcagataccaactacgaagtgattaaagtgctcgtgaaattcttnttgttagtgagggaagcaaagcaagaacaaaatgagtgtcaacaatatttaat

SEQ ID NO: 44986 - DNA, 562 bp, Arabidopsis thaliana landsberg
atgtatatatttcagtatatgcaaatttaggtgtcatacatcttacgtctccatttaaaattgtcaattgtgttgtacattgcaaatttaagtaaatttgatcttttaagtgtttgaaattttataatgttatttgttgtctatctaaaatattactatagtaatcgaactgatatatttttaaaattcatgatatgttgtcagctcataagccacttaagttcctaatgaaatcatgcggtataaaacaattttggatgcgatatatacaaagtattatagaaaaaatttcggtttgtttgtttctttggttatcttgtggtaagtacacctttcttttctgtatttttcctttgtttggattatcacgaacaaacgtgctacagagtttttgactttaatgtcacctagttgatcaccaatcagcatttatggatatattatgtctttattataatcaagacacagtcaaatgatttccaatttttttacctaaaaggtaatgttgagatatatggataggaatgattatgtatcgatgacaaaaaaaaagaaaagaagg

SEQ ID NO: 44987 - DNA, 593 bp, Arabidopsis thaliana landsberg
tataaagaaaatatttcgttgttagagtttataaaacaggagcatttgcttgttgatataagcaacgacaaatttttactgccaatttaattacaatttcattttcattatctaacgttaatatgttttaatgtacatagttaaatattatgttatacacttatactaataaaataaatacatgaatcaaactctttttttatctgtccttgagattttgcgattgaggaagtacaataggcacggaaatttttctcattatcttctcgacttccatcatcaaaattcagagagtagctcaaataatcatatcggaacatgcttttgttatatgtcgaacgttgtcttcttacatttttcagctttccacacaaattttccattatatttttcttggagatcttgcttagcctttcaacaaatgttgcagttcgttagaacaatggattttatcttgacgaaatgtgctgaaattacgttagagcctacacgatagataaaaatgttagaattgttaaatgatgagattgagaacttggcttttatgaccaattaactttaagaatgattcaactacttctagtttggagaga

SEQ ID NO: 44988 - DNA, 413 bp, Arabidopsis thaliana landsberg
aaatagcaaacacgaaaacaacgtttggttgcatgcaaaatgtttcttttcttattttcagggaaaagtatagaagaaacaatataagttttttttccttttttttttttctttgtgtgtaaaagaagcagtatgtgtcggtggactgttttttgatattgggagattccaaatcaattccaaaatctatgaaaacaaaaataaccaaaaatacggtaaatttttgttccaatatcttgaactcccactgtttatcaaaaaaataaataataactatgacaacatgacatgtttttcttattttcatactgttcaacacccatgattaaaattgtaatgaaaagattttaaacaaatgtttagaactatatagctaattagggtctaaactcagtacagtatatgaatcaacc

SEQ ID NO: 44989 - DNA, 541 bp, Arabidopsis thaliana landsberg
  unsure (1)..(541): unsure at all n locations
cttcgcttcatttaagattcgttcgacggtttcagtttcaagtttggatttctttatggcaacaaataataaaaacaggacttcgtgtggtccgcttctctgccacgtttggggactctactcacgtgttcgttcattctaccaacatattctgattcaactatctcaattatttctttatttggaattctagatgcaacaattatttgttgtttggaattcaacatgagttattgagtctcatctccttgaccagacccccacaaaaaaaaatccttcaatttgcatgtctgatatcctctttcaaattgtgattagactagtgtgtctattgaaccatgttagtttttcgagtcaaattttagtttttccatgttatattgggttgggacgttacaaaagcatcaaaaagtatttagagaagtgtgaatcgctaatggttttggtttggaacgaaaactaattttaatttattggtgaaatatacattcttattggtgagacactatacanatcgagacgagaagaganatgagggaat

SEQ ID NO: 44990 - DNA, 556 bp, Arabidopsis thaliana landsberg
tgagggtaatgaatttaaagtggcctctctttactctctctttatgtttcaaagaaaaacaaaaaggcttcttttagagacatcaattgtcgaaaaccaattccactacccaattgtagtgaaataatctggttaattatgatttcagttatgccggatctgaatttaactgtggactcttttttattttttccatatacacacataatttggagaaaatacttaataacaaataagtttcacttttgttaaatacacttgctaaaattatttttatctaagaaagtccaaaagcaccatttcaaaattaactgatacgaagtgaaatggttcatgttttttatatactagattgcatttttttatgaaatgtttgatgcattctactttctaacaggaggaacgtctgggatcggtgcggaaactgcgagagtgttagcaaaaagaggggtgagagtagtgatggcagtaagagatatgaagaaagcagaaatggtgaaggagagaataataagagagaatccagaagctgacattatgttattcgagatgatct

SEQ ID NO: 44991 - DNA, 845 bp, Arabidopsis thaliana landsberg
  unsure (1)..(845): unsure at all n locations
ggatcctgagatgaagaatcggaaggtaattttattagatcgatccttaaaatcgccattgttttcttcttcccacatcgttctactcaaattcgaatcaatgcttctctgaactgaaggttacgacggagaagagacagatcgcaacattttccgacgtatcttttgaaagcacgaaggatccgatggattttagtccgatctctcagatttctggtgcgatctctgattccgaggctgaggtatatgcttcgctccaatgttttagttaggtttagtttccatcgaagtttttcgttgtgttgctttgtaaacgctcagatccgttaagattagatgttaaattttcgaaaattgaatcgattttgtctgcgcttgatgacgaattggaaagattaaacctcaattgtagccattatgnnnnnnnnnnnnnnnnnnnngctcgaattatgttgttctctcctcagagtgttattcaaggatcgagcctagacttaatgtcaaccccagagatttgtcttccnnnnnnnnnnnnnnnnnnnnnaaccattactagtgtggaggctcgtattgacacgtcttctactgatcggatccagtcgattgtggacttgcccgcttctgtgcaatccttgcgtggggagatcaatgagctgaaaaaactgatctgttcagttgacaattctgcagaaattaactgggtcgatagagttgttactgtgaaattccgcattgtgcttttgagtttcattctttgggctatcttagctgcgattgtggtcttcttcagctcaggagaggaacgtgcttaccgtggacaattccaacatgattcttcaaggtaa

SEQ ID NO: 44992 - DNA, 917 bp, Arabidopsis thaliana landsberg
  unsure (1)..(917): unsure at all n locations
caaaaaaacgatcaagggaattttttattttctggataagttatgatattaggtatcatattcttattcatttgtttcaatattacaaggtgtttagatttgggcaagatgctgtgtaaattaaatatagaccattcatggtcttaaggtttagtttcttccaaataaatttggtaatgagcatttttctaggggcaataatgataaaatcattgtttatatttggagacgatattaatttggatattaccagaactcggcatgatcatcgggccataagagtgtagcgtgacgtcgaagagaggaacccatgccggagaatccttcagaccacatgagcttatcatagaacatggagatccgaaccacaccgtaaccagtggactcgtcgggagatagatcggctaagatcttacgatgcatgggtaaagagaaaagcctcttcatttggcaatcaacgttatggagtaacgagtgtgagacttcatggtctgtgatatgaaacacaccccattcctcacaggcttgtcgtagtagcccatgttcctccgggttggacaagctgatgacgggaatgggtccgctcgtggtttcgggttcgggtttggaccagacgtgggagtcgggtagggttttggtgttggtgaaatctagtgggatgatccggtcacggttcacggggttgttcttgaatagctgtgtgacagagctcatgattataattataggatttgcttttgttgcttctctttcttttgatacttttgatggagaaacattgtagctttaggactatatatagagtcgagtaaccagtatacacacatgtgggtttatgtggagaaaagctgntattntgattttgactctttttctttctctgngaatcataaataagaataagatgttaaaaaaag

SEQ ID NO: 44993 - DNA, 359 bp, Arabidopsis thaliana landsberg
gctctgaatgttttagtgtcagggttgactggaagatgagcacatgctagcggactcatcagcactctggcatttgcccacataccggcgcaccaggacccatcgcgcgtatgatgcatgaggagtatccaggagagcgccaatctccaccacctaaaggcatgttgcgccttgctcaccgcagtatgagcatgcattgttcttatgctcccgcgtgtggcgggtacagacaacgcgtatgtgtttgaccttattgcgctgctaaacggtacggcgagttcttctgttcatggtaccgactcgagcatgcgaatctcggttctatgtccaatacggtagtccattcacatctaaggcgg

SEQ ID NO: 44994 - DNA, 933 bp, Arabidopsis thaliana landsberg
tgggaccacttcctctgttttcttcttctccttcatgtagcattaagatatattttagtatcaagattgaagatgcacataagtgtagtagcatttgcaaatcttctttcacttgagctaatcgtatttgatcaaactgatcgctttaaaatattttgcttgtaatatacattataaatcctaagtttaacagaaataaggtatatgggtctattttaaaacataatctctactagacatgatcgcagcttgtcttaattaggaccgtagaactcacaatctctacttttaaacattaatattttaaaacatatttttattgctcaactaggttccaaatgaatggattgagcaaaatttgcaaattaaatccgtttatatgtatatttaggtagttttgttagcatgatatgactgatcatatcatcgtattatatagaggtttgtggataaaaaaatgaaatatatctctattagttgaacatatgtactacatgtgttagtgtgttacaatagtataacatgtgtgtgagtggattttaattatttctcggctcaatgattttggaaacaaaacgtggtgattacacgacaactttgaatttcaagtgaatcataacaaagtagaaaccttggctttcattgacaaggagatatgtaatagttgctctctcaaaacatcagcaggatcaaagaacaatagcataaaccagcgtattaagggccctttatgggctaggtagagccttaaataaggcccagcaaatattaatatgtctttgacgtttgtcttgggaccgagacgaataaggacagagaggagattacaaacaaactcgcgtgcaaatcagcagctttcactaatttttcttaaaagtttgaacatttgaagagaaagcaacaaacaagaagtgagtgtaattaggtttactc

SEQ ID NO: 44995 - DNA, 391 bp, Arabidopsis thaliana landsberg
cagatcaaatactgagatgaatataagattccggctagaactttatgagatgaatgtgatgatgccattttaaatgaatattcacactctaacgtgctcggaaactcatcttttatggctgcatcaggtttgccttgacatattccaaaacttccttctacgtctaccgtccaagcaactgatatcggtgaatataccacccacggattgctttcgttccatctacaattcggaccaaaccattacttagcgaaaggactaaagattcaaagagcgatatttgtttggtgaaaaacacgttataaaccttttgaggtcttgatccatgagcgagtggacaacacatatcctttgagtctccacccgaacaacgcctttcttatatgtgaat

SEQ ID NO: 44996 - DNA, 458 bp, Arabidopsis thaliana landsberg
gcggctaaggggcatagcgtcgaccttcgagcggtcgattgcttgtttgtttgtgaaggtccaagggctgatgatgccagccgacaggccaacaccacggttcccaaggaacaccagcaattcaggaaggtctgcctcatcgatctgtggcatcttggctcgtgcaatcatttcaaccatgtgctctcctaaggttctcagggttctgatcggagcgacttccttggatagatgggccgtgtgcccggttaactctatgacacatcagaacttttctactctcagaagcctattccgtttggtgtctattttggctgtgaaaaaggcctacacctcaggccttcctcagtcttataggtacaaaaattaggtttacaagtggaagctaatttcgaagaggttctgtaaaccgaaggtcgggagttcaatcctcttaaccggcaccaagttcaaataaa

SEQ ID NO: 44997 - DNA, 629 bp, Arabidopsis thaliana landsberg
  unsure (1)..(629): unsure at all n locations
gctctaacgagtaaaggctttggagatccgacagtttttgacaatgcatactacaaaatccttcttgaaaaaccatggacgtcaacttgtaagtctcataagtcataacaaggttcttaagttcttttactcatagagtttcagttttctaccattcctccctatgttctgaagattgattgtaagactgagattgtatatttacttagttttcttacaatgctgtagctaagatgacgagcatggtcgggcttccttcggatcatgctttagtgcaggatgatgagtgcttaaggtttctcatctactcaaagttcttaccttatcatttcatcacctatttttctctcaagtaccattcaaagtagatgaacacttagagagtataggatcattggcaagactgtaaactgttgatcactgttcttgccatttgagtaatctggataactattcaactgatatagattcgtggtttgatgatgcacaggtgggtgaaacggtatgcagaagaccaagacaagttcttcgaagacttcacaaatgcttatatcaaactagtaaattctggagccaaatgaatatgttatgatatctaatctagtnttatattttgttagctcataagt

SEQ ID NO: 44998 - DNA, 463 bp, Arabidopsis thaliana landsberg
cattttagctcttgtaacccatacatgaacactatatgccaaagtagggatttcaaatatgagattcgatgactgatgccattgtaacagtgcaagacttgctttaccggcaccagaggagaggagcttaacaagtgcaactattccggtccctcccgagtcctttcctcctgtagccatcccgatgatagaactacctcttccgttggagaaatccctagcaagtggagcaccatcgaatagagaaaactgtgaaccaataattgaagagccggcctcgcccgggcaagagtgcactgaaataaccgagagtgatattgaagatgcttactacaatgaggaccctgacgagatcccaacaataaaactcaacattgaacagtttggaatgactctacgggaacacatggaaagaaacatggagctccaagaaggtgacatgtccaaggctttggttgctttg

SEQ ID NO: 44999 - DNA, 474 bp, Arabidopsis thaliana landsberg
gtcaacgacgcgctgctgcgtcacttcgcctgacaccgggtgggcgttctcctcagcctgctggccgccctcgcctacggggcctccgacttcatcgcaggcgccgccgggcggcgcggtcatcccggtgccgtcgcggccgtcggccagccgcttggcgtcgtcgcggcggccgtggcggtcatcgtcacgcacgcccactcgccctcggccgggaccttgtggtggggggcgctcagcgggatcggcaccggggtcggcacgctggccttgtactggggcctgagcgtcagccggatgagcgtcgtcgccccgatatcggggatactcaccgccgggctgccggcgctcgtgggtgccctgatcggccagtacctgtctgcgctcgcctgggcgggcgtcgcggtcgggatccccgccgtggcgctcgtgtcggcgcagtcggggggcgaaggagacgccaggggccgtagt

SEQ ID NO: 45000 - DNA, 593 bp, Arabidopsis thaliana landsberg
ttggtcccgacagcggatgagtagatttcgattcatacacatgtggtgaacccttttttagccttaagaccccaccaattcgacaaagacttgccatatacgttcgctcctcttcatgtaatcttaaagatatttttgcatctcttttcttttttatgtcaataagatattttcatttcaatatgacaaaagttgtaaaagtcgataatgatatctcaaaactacgaataataataacagaaaatagacacaacaaaggttggagatatttttctccagatatttttgccccttttaagtctctcttttcacgaaccgaccctacaaataattcaaaagatttccattgcaagagaaatataaagttaggcctcacaatattaattggtgtcatgaaactaaatgagtaaaggctagagtgtagaaagaagaaggaataagaaagagaccttaaaacgaggtcgtttatctgcgttgagttttcggacttggtaccttatcttcttagagaagagcctactctgttctttctctttgtaccttaacacacttgcttctcttcgcatgtttctcttctcctctatcactggcac

SEQ ID NO: 45001 - DNA, 554 bp, Arabidopsis thaliana landsberg
aggggatagctaaacttcatcccttgatgctcacttttttcttattttggatcattcaattctattttctttcgttagattgtaaataaacctctttgatgagcaatagatttacatttagaaaagaaagtatattcattttggtaagaaaaaaaaaaaatataggtcaaatggtaaattgaagcaacttgcccctcctaaattcatgatcaaatcccacgttagctattatatgaaatgtggataaatattattattttttcctatttagaatttaaataataataacataattgtttgtatctttaaaattagtatagtattttatcccctgcatgtaaattttatttctaaatccgcaactgcatgtacgcctttaggttaacttacttttgatatccaaacattagcatccatattgttctttgattaagattacgtttacgagtctattggttcagtgaactttctttaagaaatagtattagtatatataacaaactacttaaaatgatgaaacttgagaactgagaaacattaatctagggccttag

SEQ ID NO: 45002 - DNA, 500 bp, Arabidopsis thaliana landsberg
aatcgagcaacggtacgttgtcaggaatctgcatgacagagaacatgatacttcctgaatattatccctgattcaggttttggagttggttttcatttacaacgttagaatgttgcagcgtgtaacccaatccgtagttgattgagaatttgttgatcttcttatccccattaacgcggagtgtcgttctacggttctgatctttcggcatcaaacccttgatctgcgcatcctggagagagatgtaataatcacttcctgcaatcgatacgttattctggaaggttgaacctgtgttccagaagttggttttatcttttttgtggatcgggctgtacggacctgtctgaacggaaccatcctcgaggtgcggaccgatttcctgtgtgctgccatcgtaacgagggccgtagatctggttttcataaggcacatattcatagtttccaaaatcatctacagtttcacctgcacctgctccgaatgaatgttgaagctta

SEQ ID NO: 45003 - DNA, 553 bp, Arabidopsis thaliana landsberg
agatgataaccgcagtgacgcatacaatccagttccaggagtgatgaaaggtgtgccatcttcaagggattacaatggcggtttcgcctccaaacttatggtcagtttcttaagaaatctctatatcattgatcctgtaaaatgtctctaaagcacatttcttttgttacacaagtctttcatgtatatagtgtattgaaaatgcaggctaaagacctaaacctcgcagcagcctcagctgaagaagttggacacaaaagcccattgatatccaaagcacaagaaatgtgagtacttcagtagtcttttctcctagaagctctattccttatgagttgttgtgaacaaagaaggcttgtgaatgaaactttatggaaacaacgtagaaatttcttatgaagcaaaaagcacacacatcaagctgaagattttgtttttttgtttttgcagttacaagaagatgtgcgaggaaggacatgaaacgaaggacttctcttgtgttttcagacacttttacaatgggaaagatgaggtctgagacaatcttaacaac

SEQ ID NO: 45004 - DNA, 528 bp, Arabidopsis thaliana landsberg
gctagctgtcggtctcaggactttgcagccagagtttgcagcatactgtgtaatcctgcaacagaagaggttcgctggacgttctcagtgtgtgcaatgtcaatcgtgcacaccgatttgcagtatgcggtgtcggttgggggatagccggcatgattgcacgcgatagcgaagccatgcggcacctgggtactgcacgttatcccgtattgaaggcccgtcatggcgccgcagctacgcttggcattgcccgctttaacgccaccctcaagtggtccgatactgaaatctccctctgctcgcctcagacgatatcctcgcacgcccatgctccctccggagccagcactggaatcgcgtccacagcattccttcctaccccagtaagtttagtgtcctcgcagcctgggtcgtttcctatcttggacgatgttacagtcgagcagctgtcgccttccgaggccgagcggttgggtacgcgcgctacgtgtagcccccactgctctacgtgcacatcgccaccgtctg

SEQ ID NO: 45005 - DNA, 677 bp, Arabidopsis thaliana landsberg
acttctatattaagtctaaagtctataatcttcgagaatcatcaaaaaatggcaacttcagttgaataaaatatgccaccaacctaaaaccacatacatcgattcaccaactatcttattggaatcaatgttatattcgatctcaatcttattgtacgatcgacttctgaataggatttgctacatttgctccgtacacaacttgccgttttatttatttatttaaaatcaattttttactcatataagtaataaaattttatggtgtataatcaatgtgtaatggcttccgttcttttcggaatatccgtgtcttgtggtgttggtacaggtagcgtgaaaaatttaggatttttattctcactttctcaataatatctttcatttttttttttttttttgtgaatctatgttttcagttcatttcctattcatatatgccatgtgctgatgtgcatagattcgtctaataagaatatcacattataaaaaatattctaacgtacgtgaaaattaaatgtaccaaaatggtttatgtgatgtctcatgtcttaatattagaccgagataatcgttgagtcggaactatgtataaaataagtttgttgacatagcaaggcatatttaaacagggtttacatgacacacactaaatttttattatctccatcaccatc

SEQ ID NO: 45006 - DNA, 469 bp, Arabidopsis thaliana landsberg
ggacgatactaaaactcttcccagtgatcatgaaacattgatttccttccttcctccactcacattattgggcttatttaattattaggctgcatgtgacgatatatggatatacttttaaataaaccatggttcaatatttttaccattaaaatatcgaaaatctagaattgtttcctgagccaactcactgtaaacttgatttctaataagataaaataagatgctgccaaaggagaaggttcttagagtagaggtcactctctttcaaccttacaaaattcgaatgttttttcaactatgagtcctatgggttttgatcatttttactgaacaaaataaatacataaagttttactataaatacagaaactctgcctaatgcgagcattttttaacttcaccggacatgccacgagcatgttatgggcatttgcacttcattttatctttaactttttttagcatt

SEQ ID NO: 45007 - DNA, 1085 bp, Arabidopsis thaliana landsberg
agtgagatcatgacagcataaatttttttaaaaatactcttaaacacatcaaattctttctattttttccgccgcacaagttgtaaaaacgttattttttctttcgagtttaatttaacattacatttaaaaaacaaatagtgctttattggtttcgagtagccatttcattatgaaatctggaacagtggaatgtatctgagccaaaaacaaaattaagtagagaattttgttatcatttgaaagcagaattttttgtttatagattttatttttgaaattagacaataccctatgggctatgacacatttaataagatctaagacaaaaacgtggccatttgctaattgttgtttttgttgtagcaataaccttagtcaaaggattttgtttattgcggacccaagttggttggtcggctcttgcttaaaccacatttggaatttgttgttctggagtctggagatcattgaaacacaaccaagaagatagcgcactggttttaaagtcgtatgtgtagttctttgttcaccacgagtttaaggttctctttcatgtctcattgttctaaatattcatcttcggttgcatgtttaacttcatagtccagtttatattttccatctagatgattgggaacattttgcttacttttatgatcttaaacagatgaacggtctcatgttaacaacatagtactcttgacttcatgataatttcatatcatctaatgactaaattctttgcagagtttaatggtgttgattgttgaaacaagagcagattggtcaatcactacagaaaaaaaaaaagttggtaacatgtaagtttaacgttatttaataaaggaggatctaagttttctacaaaagctataatttttatgatgaccatataatcctcaaacccttcaagatgtgatgtgaattatctacatcccaacacgaataaatgagattttttaaagttagctatttatccttagttgatttcttaattatacgttaatggcaatattctttgaaactgataatgcgtttctttcttttttctgaattctagatgatcacgtgtaggaaactga

SEQ ID NO: 45008 - DNA, 973 bp, Arabidopsis thaliana landsberg
gatgccatagtcctcctacttaggtgcgagcaaaaatgcagtgagaccgatcaactacacatttcctttctattagcaatctaacaagttcactgctaggtagagagtctcaggcatcagatcaaatttgaaaagtgcaccaataaccatataagcaacgaacgaacaaggtaaagagaggaagaagaattgagaaagcaaaatcaagttgaacttacagtgaactactactcacttgaattagccagttgatagaaattccatgtttctaagttaaagcccaaagctgggttttgtgcctgcatcagcacttcggtttaggataatcaaatgctaaaatacacaagactgaatatggtagacaatgcaaaagatcaattctacatggcagttttcaaggagactatctttagtttatccagagaagagaataggcataattaatgagtgaattacaaatgagaaaagctttgattcactcatggaatccgtaattagagtttcgaaatcccttctctatatttacaacgctgctcatcagaaataaacaacaggcgaaaattacttgcatctcaacaccattagaggaggaagagaaaccctagcttaaacttaagatttcacatggaataatttcgtcgtacctcttcctacatcatcaagtaatgcggataaactatcaattagaatcatgaagaaacttagggtttcgtggagatttttaccttctcgaagctcatcttcttcctcacatctgccttttccgctctgtttcgctttctagagagcgagaaccgagaaagaggaattgcacttgcaaacttgtgaaagctgaaatcatttgagacaactttcagtatttgaaacagagacgaattatgaccctgaatttaccgccttagtcttcacatatatagcccaagcccattacatagcccattagatcacattttagcttaagtccaccgatgtt

SEQ ID NO: 45009 - DNA, 669 bp, Arabidopsis thaliana landsberg
tccttgctgtgggactctcatgtgcagaatctctatggcaatttaggagtttgattaagaaaccaatccacaacataacaatgttccctaattcaaattattcatcggaagagagagcaaaccagtagctgttatttactaattccactagattattgacttgagatcccccgcccattagttgatgtatcaaagagtgtagacattattgtgtataatttgcaaaccagtccagtaatatatttcttatcggtggacttgtgtctttaattcaaggtgtgttctcatcttcttgtggtgaatgatcatccattagtatttttttttttagtatacaatgccacaagtcatgcgaccatgaaatcaagaaacaagacaccagtcgtttaacgttatgttttacatcttatcactaacaatcttctaatctatgttttggttactttgaaaaagcgggactaatcccaaatttaaagcaattgaataaacaacacctgttaagcgtggcggacaaaacgacgacaatgtaagagaactgagtcagagattaaaacctatgaccaacccattggaactaaactatcctaattctctatacggagagtatatataaatggaggaggagaagaagaagagcagagtttttgatcatcggagcaacatgaagat

SEQ ID NO: 45010 - DNA, 545 bp, Arabidopsis thaliana landsberg
caaaggtatatagttgtagtatgttctaacaatgcttaactacaaatgtttcttattctttaggacatgcggaccacggaacactgagatgcttttatggaaagactccaaatgtgaaagaaacacctcaacattgtttcttataagactattttcttgtagcctttgtttaagactttctttcttgacgtctttgtataagagcacctcaacattgatttttttttgaataagagtgattgtttctatcaagagtggaggaagaaacgtctaagaaacataagatcgcctaggcgttcattatgcaatacgatgaacgattattttacacatttgaagcataagatatgattagatgtttatcatggtaggtgacattacggaaaaacaagggctatactataagcgttcaaagactctgaaaggctcaatcttctataacactccaacgaaacaaagatggcagctcctagataacgacgattattagctgcaccaccggtgtcggcccagttaccatgtggacgcgagcttccttttcctca

SEQ ID NO: 45011 - DNA, 524 bp, Arabidopsis thaliana landsberg
tagatattacaacatgatttgtttgtacctttttagtattaacaaaacttttgttagaatgactcatcctctgcatatatataaaaaaatcattagtatttttatatcaagtctacaaattattttcatttactttattatttttttttaccaaacacatttagttctatatactatttattcttattaactaaagttactcagaattataggtgtaactggaaaactggataaagagagaaagagagagagtacataacataagtcctcgaaagtgcagctattccattagcggccagacagctgttagtatatattgcttcgtcacgggctcttttttttttctttttaatttaaagatcccttaaaaaaatcttttttgttttaaagaagagagaaattgtggttttgttgcgtcgtcgtcgacgactatctctctctctcttcccgatccaatcttgtgctttgtctgtcgacacagacaaaggaaacagctgagaaaaactattatcatcatcatcatc

SEQ ID NO: 45012 - DNA, 521 bp, Arabidopsis thaliana landsberg
  unsure (1)..(521): unsure at all n locations
tctgccggcgagatggttccagtcgtctttgttcccttattgatagaataatcaaaaatccgagtcggagacgacgaagacccgagttccagctattaactatgcagataccatcaagagagcatagtttcattctatttctcttcatatctggtaaaaatcctcgtcgcacgaatttgccctctctcgaatttttgagcttttgaaattttatcttttgggaaatgctgcagcttttgtaattggtgctgcgtctgtacctgtacctgattctaattgctacgctctcgacaattcaagtcgtcttgtcgattttgtatcctctttctattttattaaagcttaggatcaattcttagtaaaaaagtttgctttttgttgcattggtttgatttcgtgtcttgtaaagctgcttcctttaacttggtttgatcagagcagctggatcggtcatccatttgaatatgatggcaagggtgngtatatgtttctcattttttagtgttgagagttagttttaa

SEQ ID NO: 45013 - DNA, 937 bp, Arabidopsis thaliana landsberg
aacacgcctcatattccaaaaccactcaaaacaagaattcccaaagattacaataaccaaataaacacattcacacactcacaaagaaaagcataacatacaaaaagggtcaaataataattataccaattttcaaaatccaaggtcgagaatcgagaggttcaacaacaaagataacataatgatagaagaatcgggtaaaacacattccttactaaagaaaataattaacctgattaactctttacgatgatgacaacttacgttacaaatacaaacgaggcttacacttaacccttgctcggaggtatctatccaaattagcgagagagagcgagggttctgtttacatactcttaaataaattcattcaaaaataaatcatataaaaaaattatgtatatatgggcctcatttttagccaaataagaacaattggacatttaaattggatccactaagtaatttgttgacttgtaaaatagtccagttgaagttactattcatattattcgcgaaattacgtacgaattgtcatagtgtcgcgttttacgtacgctaattaacaagaccaatcacatgtggtcctcattgttagttgactttctattgggttacgcatgacttcttggacatatctttggtctttcaacgtaatccacttttctgttatcttttaaatgtatagaaaaatataaaattttcagcgatagatactgatattttctcacgttcacaatggttactaaagtccaatctggcttcaatattttatataagattcattatactagcatcactaatctcaaatcgaatttccacaaataacttttttgttagagaagcttcaagatataaaatagattctaacttcaactttagtcaaaagccgacaaaacaaagaagagccaacagagctcacaatgtcatttttttg

SEQ ID NO: 45014 - DNA, 542 bp, Arabidopsis thaliana landsberg
tggcgatggaactgatggttttaaaaccaacttttgcctaaattctaatctcggatgggtttagtcctttgcaggtcgctatcgaaaaccaccaagttcagttagcactagaactagtcaagattaatcctgatctcgttcttgttgctgggagaaaaggtattatttgcttcgttcttggtttcttaattagtaggtcaatcagaactttgattgttattatgtttgtcttcgtgtttatatgtttaaatgttttaatgttgtgcttgtgttaatatttgatatatatgtctttttcttatcaaacaatagttaaaaaattactgtttgcttttagacttttcaagtgatttaatctttgataaggaaaactaaaataccatgttttcaaaatgaaatattctagttcatatatatatatatatatccctttcttaatatacaaatatcttacctcgatatttttccaaactgaaaatatttgtttttatgttgatgcgctatagcaggagaaaagtcgatgcatctatgttgtaggggat

SEQ ID NO: 45015 - DNA, 810 bp, Arabidopsis thaliana landsberg
tttatgcatttcacattcatatctcaaggaaaatataaagtaagtctaaaaatcataagcacaaaagattgtgttcgaagcataaattaagtagtaccatgagtttccatcacattcaatcttaatcaatttcaatgatgcttttcctttgttctttctcattattcacgaatagtgaaaatataggacaaaacataacaatttcattgttaatgcatgtataataatcacaaaatcccaattattagttttgataaatgactacaacagtatttttaattaggtttatgtctatctaattaacgcctataaatttggttacaacattattgcttttttttgtcgacaacatagcttttttctttaaacatataaatgacaacacgtgatatatcaaattcggcctaatacataatgtaactgatgatgaaattgataaagctacttgttgaaacagtatatttacactcatttctaacgatacgttacctaatgctaaccaaacaaaatttcaatatgaatcgcgtacttagaacaaccatcttatattatgcattgattatataatactattcaaagtcaatgctttgtagtatctttcgtttcgtggtaagttcaaatactcatattcaagataatacaatcgggaccggtcataagttgatcgaaccacatactgcatacataagagaaaaaaatgaattcctacttagattataaatatttttattttagttttgatatgtgcaatacgaaaagagtaacaactatacttactttcaaaaataaaatggacccctacaaatatat

SEQ ID NO: 45016 - DNA, 381 bp, Arabidopsis thaliana landsberg
tgcacaaattggctatgttgtcagtccttccttgtgcaaaattgatcaccggtcaagcaaggttaacaataattgctttttctcaagatttgaccagcggagtattacctgccatgtcaatgcgagagtggtcaatttgctgatactggggccttaaatctgatgaagaaagctacctgactaacaggctttgtcactttcaatgtaaaaccaactattaaaatggtcgacaactgcatagaggcccgcttcggtgagaagacgaacatacccattgtaactatacggatgggcatgaaacctttgatatttccacggtctttactgatgagagagaatagcttacacaccatgagtactgacttccatttctagtgatta

SEQ ID NO: 45017 - DNA, 438 bp, Arabidopsis thaliana landsberg
caaaacttaaaacaaaaatattaggtccaggactttggcatctcccactttcttgaaaaacatggatactgtatggaccttcttatttactattgtcataatctttgttctcataatctgtttactatactcataatctctcctcctcataatacatcgcccactttcttaacacctcataagtcttctcataatctttttactatcataaaagtttctgcttgtattggaatgaaaaaatttgaccatttaatttggaattctaaacccaatataaaattataaaccactcttactagagccaggatcccagtttcaaatttaatatacgtaacatgcatgatttggccatgtcttatggatatacatataggcgatgctaatccattgattttgtaggccaacattatatagtttacattattggattgggggatg

SEQ ID NO: 45018 - DNA, 613 bp, Arabidopsis thaliana landsberg
  unsure (1)..(613): unsure at all n locations
gaccagtcggaagagcactggccggtgccctattgggatgtcgacaccgggatggcggcgatgctcatgctgttcggcgccgtcgacgagggcctcggcgcactcttcttcggcgtgccggtcgagcgactcgacaccgtgcgcgaggcattcggcatacccgctgaccggaacctcgtcggcgtgatcgcgctcggctacccggccgaccccaagccgtccggcagcacgcggtcggtccgccggcgcgacctggccgaggtcacgcacttcgggcgtttcggcgccacgccggtcgagtagaccggagcgctagctgaggccataccgagaccacgtgcctcaccggtcggtgacgagcgaccggtccaagtcactcagcctcgtcacgccggccagtcccatcgcgtgccgcagctcgccagtgagttcctcgagcatggtgccgaccgccaccgcgcctttggtcgcgagcgcccacatgaccggccgccccagcatgactgcttgcgcttcgagcgcgagagccgtcagcgcgttgaagtcgttgcgcactcccccgtcgacaatgaccggnaccgaactcccacttgtgaaccacttcctgcagcgc

SEQ ID NO: 45019 - DNA, 591 bp, Arabidopsis thaliana landsberg
atttcaagccatcatgtggccaaagggaaaccacacaacacaattttaaaataatggtgcagcagaaagtcaagtcgctgtcatagactcatagttgaagcaatcagaccaatctctgttggattcttattgggcctaataaatctactgtatgggcttgaccatttttttgttagcagtactccaggcctaatttgttatcaatgaccatttatgttcatgattggctttttttttttttttttttaaataaaaatcggaaaggtgctagatgataacacatgcaagagttgttgcgatgttacttaatttgattgaatttagacacatgtaatttggtatagacgtccatcattgtgcctggaagttcaccgatatacgtctattgcaccaatatgcaaacgctatacttctctatcacataagtatggattgatatacatcttttagttctacattttcttgtcttaaacatttgattttcagtatatctatatataggtaaatcgttatagtctaccaaatagtttcttgaaaggtgttattttccatattacgttttcgaaaagggtacttataaccaaattgatt

SEQ ID NO: 45020 - DNA, 567 bp, Arabidopsis thaliana landsberg
  unsure (1)..(567): unsure at all n locations
agggaacatttatatatactacttcaagcaacactcaagtaaaaccacagattgatataaggatattctttgtgatgatggagtccgacattgtctggaacctggtttgctgaaacacacaaatgtgaccaaatttaatcaaaatctacctattgaagtaataattccaaggcctacgaagacataaaagctgaaaaacctaccatctgctggagaagattttggacctgcatataaaaattcaaggattcagtgataaaccaagtgaaattgtctcaaagtcacaaaaataccaaacaaagagaacgagaatactcacaaaagcagtcatatcagcagtgctctgcttagtatcctcagaatcatgaccatcctgtcagcaaaaagaaaaaaaaaactgtaagaagaaactcaaagacacagtaaatataacaatcatcaggacaggaaattgaagctntataataacgaaaaaaaattgttacaagaaataaacaagcatgaactattgctcattgaggatatttctatctgaacttttttttagtactacgaacattacacaca

SEQ ID NO: 45021 - DNA, 601 bp, Arabidopsis thaliana landsberg
ctgtgctctacagagattcaaggttgctttttaactcagccgttcttcttctttccctatctttcttgtccaatgcttcttattttatcttaccttcagcaagagactctttcgaaaatggtgctccaggtccaacagttttctcaactacctacaagttatatattcacacagaattggttggtggtaatgaaatgaatcaagaaaatcttggaaacaataaattcaggataccaccttcagaggtattctgaatgtccgcttattcagctttttttctgcgcccagagaagcaacagctggctcttctgctgttgtatttgaagcagttgctgttttcagcatcggtttgcaggtcttctttattttcttgggaatcctagtcagtggcattgcctgttgatgtagttgtgttactatcaatagtcacgttcttcttaggaacgtctacccattctgtgattgcaattacagcatctactcgatctagactgagaatcccgcttctacttagagagatatgcagatttgccttgataggtgctgatagatcccgagaagaatatctgtccagatcagtgaacttacatttatcaactta

SEQ ID NO: 45022 - DNA, 692 bp, Arabidopsis thaliana landsberg
caacttattttaattattattgtcgttaatatattaaactactttgaatcttcattatgtttatcgtaatgcctgggttacgcctttatttgctccccatgtgtttactcttacctcattttcgaactccaaacttagttccatagttttggaagattgctgtaaatggtcaaacgtttttagaatatatatgatcatagttacgtcaagatcttcaagaaacaaatctggtatacaaaaacaattggtcacaaaatcacaatcaagaaaatgtatgtgttacattttatggatagtgaagaataataaaatagtaataagaattgctgaagaggactctctagttgacatacacatcttacattcattccaaccatttaaataatgtaaacgaataacaaaacgcattatttcaataaataatattattctgatactaaaatttaaaaatctaaagtgtaatgatgaataaaacaccccacgagccattcacacatctcaactttttattctcctagaagaaactatagattatatctctcattatctcactatcttctccatatacttgttcaattcaatcattcctttgctttgctcctaaaccacaacaaatggctctcgaaacttttctaataaaactcaaaaacgctatttcctccaaaccaacttctcgtcgaccacaccgatca

SEQ ID NO: 45023 - DNA, 272 bp, Arabidopsis thaliana landsberg
aatattgctatttggtaaaatcgctcattactagatgttgatatataccactgtcgctctctcttatatcataaaggaagtcatcatgaactagagtatgacattgatctgttgtcttgatatgatccgcatcttgtaactctttaagatgttctagagggctgtcgtgatctttgtgatggaatgtcagtctgacaagcgtcatttgtacgcccgagatggaactggcctcatcacatgggccgatctaccttgtgctctcgatcttcaag

SEQ ID NO: 45024 - DNA, 745 bp, Arabidopsis thaliana landsberg
  unsure (1)..(745): unsure at all n locations
ccatacgaattacgaagaaatttaatataacatttattttctataaaaactaagacatcatcccaaaaacataaaaaaaaacaatcgtcttaacaaagacatttaacaatgagaacaaccttcaaaaggccaaagcataagcaatgtcggaaggcaaaacttcaggagcaacctcgactggcaatctctctactaagatatttgcttcaaaagtatccaaaacaccatccggtgcaagcactcgcacttcagtccttgccgggaatgctcatgaaacatgcaatatggccgatcagcaaattcttcgacatcatcagcaaagtnnnnnnnnnnnnnnnnnnnnnnnnnnggaataatttcactatttagtaagacaaattaacaactacaaagatatttaaaggtagaagaattagattttacaccttatagagttcttcccatttccttaccaaattggccattcgaggttgcaagagaggatccgctagcaaaaaaggatctgcatcctctttaggcaacgtttgccacaaaccatactcaatacaaagtgacgggtaatgatttacctccaaacactataaaagaaacataaacataataacatgtagcaaatcctttaatcagtatgagcttacaatgccatgaaatgtgtcaccttttatcagtgtgagcttacaatgtcatggacaaaaatgaacaatgtcaacanagggagtacaacanaaacattaacaggatcagc

SEQ ID NO: 45025 - DNA, 696 bp, Arabidopsis thaliana landsberg
acatgatactgcaattatccctaacacgaaagctgttttgcttggagctttacactcgagcttattgtgcttcacctgccaaaaacacaattcaaccatcaacgtcatcatcatcataatcacatttcttgattaagatatatatattttacatattgttgggcggcttgggcttgtaatccgacgaaaccagcgacgatatctaagcctacagtcaaaacaatgcaaacaatgatgacggtaattatgcatcctttcttctccgttcctttcccctcttccattctctattataaaacaagttttgtcttcttgttttcttgttttaagaggttaaagaaaaagggttaatcaagaagaagcgatcagattccttgttaaattgagaatcttgtgtgaaaggttttttttttaagtttaaatagaaatattatctaaacaaacctattttaattgttgttttacagtattatgacatgtggggtaatttataagttataagattcttatacatgtttacatggatctaatactaatcaaatcgtcacacttgtccaatagaaataaggggatataattaaagtaacaaaacaattatatctttcaccaaaatctatttaaatacctatagatatctacttcacagtagttattgaagataaaattacaaataacactcattccaagaataatttt

SEQ ID NO: 45026 - DNA, 554 bp, Arabidopsis thaliana landsberg
gttgtatttcttccagtttaaggttatcgacttctcggggttgttttggaacgtttaatactattcaatgctctatcaagtctttcagtagagagaagagctattcaatgggttttgattcggatctttccacaagacaaataagacaattatgcgtcgatctcttagtttcaagttcagtcattttcctttcagattctcatgattcttagttcactcattgaaggtttttctgcttattttctaagttttagcttatggtatttgtatttttggttatttatacttttttttttttggttcttgtttttagagatattattttgttctgccgacttattttaccgagaattttagttccttttgctggttttgtaacttggactccaccatgtatcacccttaggcggtgctatttcatgaataattcagacagaaaaatataataatttaaatttgatatggataaatgagaattttccaatctttcacacttggacttataataattcatagagacatacattgcagaatttaaaactctttcattcttt

SEQ ID NO: 45027 - DNA, 514 bp, Arabidopsis thaliana landsberg
gtcgactctagaggatcccgtctcaaaaaaaaaatcgctgccaataaaaataactagacagtcatccgaaaaacaatcttctattatttctcttaatttggtttcgattaaaatcattgcagaaaatgccagttataagttgtagtaccagtggacgccttcttccagaaaaaaaaacagaaatgcaatatctatccggcatccagagcaaagcggaagctatcaagtcatcagagggtgtgttccgtcttttttttctctttttttctttccttctgactctaatcgagtaaattgaattagcaaaggccaaaacagacaacatccctctaactctaattgagtagattcggttagaaacccatgaaaagccacgtcatggtgtagatgtacaccgtatgacgtctagacagagcgtgatctgacaagtttttcctttgttttttcaaatacaaatgtatatatcacgtatatgttctgtgcttgctggtctcacagtaccctgtggcactgc

SEQ ID NO: 45028 - DNA, 573 bp, Arabidopsis thaliana landsberg
ttatcacactaatatctaaattttatagatacatgaacgcattttcggtctaaattcaacatactagcaataacagttacaatcacaaatatagtatattctttttgatagatttatctgaaaatatatttttcactaaaacaattaatcttaactaataaaatggaaaaagaaagttcatttatgaatttttgtctttttaacaataagagtctcgtcacattaatattgttagtgatgaaatatgttgaaaaataggtttacttttggtagtaaaccaataaaagaataatctgaatttgtagcattgatttcttataatattgtgaattttaaatacctgaaaggtgaatttaaatgatcagtaattacaatattagtctcgcaagaaaacaagaaatttccttttccaaaaccgaaataactaataaaatcaaatccaagacttttgcggcggtgacagactctataaagaagtttcagccccaagactccctcacattattttctctcgctctcgaacaaaatggtcgtgaaatctggaattgaaataagaacaaggagatgagttta

SEQ ID NO: 45029 - DNA, 548 bp, Arabidopsis thaliana landsberg
ctagaggatccccgttattgcagttaacttctcagacagttcggcctctcctttcgtcaagggtaaccggaaacccttcccttctaagccttctataatcctcatcaccttcaagcacacaagccagaacacaacagtaaatgtaactttgaacgtaatctggactcatataagaaggtaagatctttcaatgcgatgacttctcttaccctcaacatgcgtctttgaagactctgctccttctgtctcaacctttcaatagatgggaaggttgatgcttgcaaatgtctctgaagctgtagaaacaaaatcaaacaatttctcgttaaattaactcctaataatatgagagagaaagagagtggtgaaatgataactcaccattttaacattgctctgagtcgtttttattctatccctatctgagacgagaacttcatcttgaagctacatcaacccaacaaaaaatagtgtcaagattcatttgtccagtgtgctaaatgaatgatttgtcacatatcattgtggatacaatcttaaaagaaaac

SEQ ID NO: 45030 - DNA, 900 bp, Arabidopsis thaliana landsberg
ctcagctctcccagtctcagaactttgggagagtgcggatggggaagaatttcttgaactcgcaaccttttcatcatccatgtctcttaaatttctttcagaagaagagccactgcatctttttgtcgaagagacaatcatgctatcggacttgattagcccctttggttcatcactttcatttctcacaacagcatcgcaatggtttgaccattcagggtttgcagaatcatcctgggacttctgtctatcagctactggagagggaaatgagaatccaccatctgcaaagtttttaagcagcatactcgcatctttaccaggtggaggcttaacaccagcaactccaactccgcgataaggaaggagctccagatcccattcactaccttctccaggaaagtattcaggtattatactcccattgtcatcaacatcatcgctcattcctacaccaattgacctaactgcagcatttcgatcatcttctgcgcggatatccttcggacagattctaccagagttgtcctcgactttccctttcttcaacaaaattacatcattttcatggctgacaaatcccttccacacaggttcagtgtccatcaaacttagctcctctgcatccatcaattgcccgtcatatcgagcaaccaaatcagcttgcttggtcgtgctgtatgtttcagtcattgagagacccatcggatcattggaagcagtaactggctcaatgcctttagcgagtacatattgctcaccggagaaataagaatcctcctcggcaaatgaatgatcatcatcattcttggtttgacttttatcctgcgtatcaggaacacttccgtgctctgtgcctttctcattatcactaggatagttgacttcgtgacccaaaaa

SEQ ID NO: 45031 - DNA, 440 bp, Arabidopsis thaliana landsberg
aaatattatggttctttccccccaaaactcaatctttgtttcaccaagaagcagagaaaagaaacattaaagcagagaaaaaacaaagacaaataatctccatttgctttcttctccatcttcttctaattttcttcaagttttatcaatggctggtgttactggaatcttaaagcttgaagcttggagcatcttgtgaagaagattaactagtttcttgtatttttcttttctggggttttgagtttttttttctcttccttattaccggaagtaatggcatgtcggagtatgatcgcttttagtttagatcctgaaagaaaacaaagtggaggacttaggacaaaacaagctggaagaggatcttgccgtggaagttagtttttgttcaaatccattttcctcttaaagaatgtaataatgggtttttattgattgct

SEQ ID NO: 45032 - DNA, 773 bp, Arabidopsis thaliana landsberg
atattgtttgtactaacagaaagctagaataaattgtttgtactgaaacttagtatattttatcgtattcgatagtaataatagatatcattaaactacaaattgtgagtagttagattataaagaacaatgttgttaataatatgtgtaatatttactattgccattacgttttaagatgcaaatgtgacaacaaacggataataaaaaggaataataggaagaaataaatatccaaatgaatgtccaatgcgaaccccaacgattttaaggacataaagatggaagaaaacgagaggaatactctcccttggtcaccatttccttacctatttaatgacgaattaatttacaaagtaattaatgtgtaactataaacttcgtaattaaatacatttacttcggggtcataatattttaagcaggtgcatttaagcagagcatttaattagaagcattgtattaatcccttgttcatccgtaatgtcttgagaagataaaacaaattcagattttgtctgaagaggcattattaatctggatttcttggattcgcttaagagtttaagtcataagatatctaaaacaatgatcgcataccattaaagaacttgtcaaatatggtaatgaactaaccactgactgcataggccagtgagtttagtaaccatgaaaatacatcactctgtaaaacttaaaagttaaaaactaattatactccctctgttatattatatgtggagtttaaggaacttgtttttctttcaaaataa

SEQ ID NO: 45033 - DNA, 480 bp, Arabidopsis thaliana landsberg
aattggtaattaaatataattattgacacaaaagccaccattgtgtttgcccaacgcatatatttagatgagagtgccaaaagacaaatcctgctttacaaaggatccattttcatcattattattgattaacaccacaaaattcaccattttcaaattaatatctctcttgacctcctcctttgtgaatcaaatcaaatcaattctccagttttgatcattggctattttcaatttacttttcttttccaactatctcaaagagacaacacgcactccattttgaccaaatgctttctctttatttaagctgtgatagcagtctaatgatatactactattagatgaaagcgtatgatcaatttttttttccaataaacttttccttgattatcgccaatttgattagttttagttttcagacttaaaccttaccgtcaaacatatctaatatttaccgaataaattcatagaaaaaat

SEQ ID NO: 45034 - DNA, 335 bp, Arabidopsis thaliana landsberg
agatgtgtgccgggacgacgatagactacatgccgggatatcagaaatgcaaccacgctacctgtagacggtcagtcagcatgtgatctctaaaccaaattatcactcaatgcttacgttccaccaatatctttattcttttcgtaaatggtcaaggagaacttctccaagcccctagtcatcttgtaagcaaggcatagtcctgaaatgccggccccaatacatttgactttcagtggctttgttatttgagagtgatatctatctggcacaacgcttggctcgacgtgggaacccatgactgatggctaagtacaactaattgtgttgatcag

SEQ ID NO: 45035 - DNA, 516 bp, Arabidopsis thaliana landsberg
aatcaaaaatgaaattaatttagtaaaaaataaataaatgtatggtttaataaaccattttttaattcataatatgaaatattaatatatttaaataacaattgttataatattgaaatagtaaaagtaaaaacaaatgtattcactattgtttctcttcttatgtcacataatggcaaaaacaaagagcaaaatgacaaaataaaaattgtgcaacttctaaataaaaaaagatgtaaccataatttaaaaaaatgtaaccatattttccaatgctatcatgttatttgtttcaaccaccgacgaaaagaaaggtcctacttaattacaaattttacaatctcttttttttttttttttgttgaaacaagtttctcatgtattattagcaatcaaccctatatagggctgaatacatatatccatccataagcacaagatctacaagttttcatttccggccacacgtagttgcccgaagtggcgaattacaatacattacattagtaaattaaa

SEQ ID NO: 45036 - DNA, 432 bp, Arabidopsis thaliana landsberg
aggttgactctagaggatcccccttctttatctagtgctaaaacgtttgcggagagttaaatgtcgggcactcaataaagacaaagtttaccgagtattcgacaaagaactcttctccaatagtgttgtcgcttaaggacaaactcaatacaggatggtaaaattatctgggttgctattttgtttcatcgtgttgagcctgaaaatgtaatcctaatactcttgttcctcgtgttcaatgacatatatattggattattttatctcttttgtccagaaaattttatcaaagaaggccatgattataatttcttaagctaggattgtcgaagttttgaacctcgctctgacaattaatttgttgtgcgtgttccgagctccagacggtgtgcgaggtgggcgtaagatttatactggttcagccaaaatgtt

SEQ ID NO: 45037 - DNA, 912 bp, Arabidopsis thaliana landsberg
ccttctttatgataattctgagcaaagaacacatatcacctccttctaagatctaatttactggagaagaaaaatcaggataagggcttacttggtctatcaggaccaccaataagaacatcaaacttttatatgccctgttcaatatgtcatgctgaaagttgagatttctgtagtactgagataacgcaaagcggttccacatgcagctgtggtacttttttcctttcttaagcaatttacggcaagagaggatacacatgaacgtcaccagggagacctaaaatatgtatacacaacacgattattttctctcttaagatcatgaaaaaaggaatgctaggttacaacatgtgtttaggacagctctgtatccatcctgcaaagaagagtagccgatgctgatgtttggtcctaaggggtaacttacttccaagctttatagtcaaatttatatatactgcaagaactgacaggatcaagtgatgcaaaatggtcccaataagcatgatccaatagagtttaccagtgtagagggtggtgggcaagattgtcttctcttaaactgagctcaagtaccatgagacccaagtaggggccctagtgtacatgctctgacaataaacttagccaaaagacaaaataataacaagtaataactatgcagtaaaataaagtttttacctattatgcagtaaatcttggcagggagagaatgtatgtacccgcgatgtgaattactaacctaccataaaaaagatgagaaatagaagttagaaatacttttctagtaactttcacactatataatatgcaagaaattaattaaaaacgtcacaaaaatatcttaatttgcagcaagagacaaaaagtaatggcaatccagctatatagtaacacaagtatatgact

SEQ ID NO: 45038 - DNA, 601 bp, Arabidopsis thaliana landsberg
gttctattctggatgttgggttgaaaattgatagcacatcaattatcaaatcaagaagaaaaatgttaaacaacacgtaaaagtagtaatagtatatgatagaccccaataatggcaagtgacttaaggaagtgaaaggagaagaagtctaaatgattgtcccacaacttgcaagtctcccttttttatatttaaccggacctttaatcttatattagggttgcagaaaacaaaattggaggcaaaattttcaatcaaattgaatcgaattagctgacccggactgtataaaaatatagttcgattaaatcggcttcttaatagtaattacgatgcattaacgaacttcattagcataatttaaattgtaaaccagtgtaatcatcaaactgaagcaaataagctagattaatacggttaattaactatgtagctttacaaagccttcaattacacaaaatttaccgcatatatattagagaccaattttttttttttgtcgtcttatacacccacttattaaactaaccattttaaaaatagtattacactaacggccatataattttttatatttactatctactctctaatatatgat

SEQ ID NO: 45039 - DNA, 615 bp, Arabidopsis thaliana landsberg
tgcaggtcgactctagaggatccccatgccataaacccattgatgcagatagtttgtcctgcttgctccaacttcactatgtactgcagcacaaaggcaatcagtggatttaagagaaatagaagaagtatatgtttgcaccaaagaatatccaataaatgaactgtaactttgaaaatgagatcatggttccctagacaaggtttcactactaattcaaacactgaagaaactgtaagtagggagttacctgctctggtgttaaggtgaaagtcttgtttgcaatggtgaatgcaagatttggcatctttgagatctgatgacaatcaacagttgactcgccattggggctagggagacgctcacagaactgcaatgcacattaaaataagaaatgctgtcacattctgcacagttcccaatcatagaactgtccaaacataacaaagtatcccaacctgattagcgtcgcagagacgcaatgatcctgcagaaccaaaaataaatcaatactttcatctagggaaagaacatgtgacgaaacagtcagaaaaataaatcatagaaagctccttccaagctttaaattatgtcaaagcgctcctaaaataattt

SEQ ID NO: 45040 - DNA, 1120 bp, Arabidopsis thaliana landsberg
cattaggatggggactcaaggaaggcctaaagctcttgacatcccacacatgctttcgctagatggatttctagggttcttaaaatcatggcagcctctagtgaaagcaaaggagcaaggagaggatcttttaacttcttatatgattgatgagtttaaggaagcttggggtgatgatgaacaagtcaaggatgttcactacaaggcatttatgcttgcagggaaactttaggtaattaatatatgttcccctttgagaatatattaactatatgtcatacacgcatgtcatcaatgatcaatcgaattaggattgaaaacttatgtttaacaggtcttgagagcaacctggttgatttacaagcggatcattactttgtataactttcgtttctgtataaattaatatatttatagcactgtaaatataaagatgttatatataaataaaaggttaatataagcaagatgctcatatctgaaataaatttcttcacaaattgattttcattggttacacttacccaaataacactatttaataaatctaattcaaaaatttaaaatagtgaacaaactaattgatcggcataaaaaaaattgtggctatagttttgtacacttcacctaaaaaagttcttactgttttttactgtctaaaaataggaaaaaaataattacaaaagagagaaaagtcaacattacacaaaaaaaaattcaatttggaaaaaaatcagagtaggttaaaaatgaattgggcaaaattccgtgaaactgggagcccagaagacaccgacatgtcttctactccgatctcgtccgacacgacggcggtgtccaaagtgatcgatccaaattacgtattaatggttgctgatttcttcaaagctatttccccagacgaatcttgcaacgatttcagctctttcgactctttctccgtcttatttcaaaacaataccagagctctctccatcgcacgcggccgtgtctcgtgctccgtcaccgtcacgccaggcatatccgtaatcatcttcttctctctaattagatcaaatgggtttcgtaaagtttcgatctttgatttgtaaaattgattggtttcgttgtgaaaacagaa

SEQ ID NO: 45041 - DNA, 802 bp, Arabidopsis thaliana landsberg
  unsure (1)..(802): unsure at all n locations
gacctatattcaacttattcgcggagacgttgatattgtttcacaaaaataggaaattaacacacgcatagaaatattcatgtatctatttgtgttcatacaaattaaagatgtttaaaataagatattgttaaaaaaaagatattgttaaaaaaagaaaagaaaaacgatattgttataataagaaaaatataaatattgtcaatagtagcatgtaatatgagaaattgaatcaaacgtaaaatcgtgatcataaaaaataaaattcaaaagtaaagaaaaacatgcattgtccatttttttttaatacttgaatttgtttaataattaatcctcgagttacgtacgttcactagttatttccaatcgacaaacaaattcaacggtttcgaaaattctgaacagaaataaaagatgtagtttcatacaaaataaatgttagttttttattttgtttgtgtgatgatattcagccttccaaaacatatttgttggtgaaagacaagtttttggctgtcggtagtacgaccatttaaattaaggaaaatcaactccaagattcacggatgtacaaaatccaccatttgaatactgccacgtggcagtagaccaccagaagacgtgtaaaagtgtgtctcctcctctccatgtataaaagatgaccgttgccacttgccagtgccacatatgatcgtcggctccggtgattntcgctctctctgcggccacacttgtttgcttggtctctttgtaatactttaacatcacttagtatatggcatgtttcattctttctttctct

SEQ ID NO: 45042 - DNA, 575 bp, Arabidopsis thaliana landsberg
tggcaaaagcgtaataagaactaacacggaggggtataattggaaaatgaagccatctaacgttttctttgctggcataaaaagtccaaaaccgaaccacttttcttctcctctctctcaatttcttttgtcggttttaaattcatttcatttttttataaattcgctaccgtttttttctgtcaccggagctccttcttccaggtaacaaaaaaaatacttagatcacttgatgattgagctaagtttcgatatctctgttttgattagatctttgattccaagttcctagttcttgctaactcttcgatccggtgcagtagcccatcttttgtttgtttgtagagttttataggctaaaaactcgggttgtgttcttaagtttttttttttctactatgctcttaagtggttccggtgattgtttagctgtatttatcaatggtatgtttaatttctataagaatctgctcatgttacttaatcatagctatttttggcagatttgtaattcatgtacttggatctttgctacgctcggatataatcctttcatgcataaatccactaaatct

SEQ ID NO: 45043 - DNA, 541 bp, Arabidopsis thaliana landsberg
  unsure (1)..(541): unsure at all n locations
tcggctccattgcacgcattgaatcgctcctcgaatcttgaggctttgcctttcacgatcattaccgatattcgatacatcgcccttccaacaaaggtccgaaatcctttgattgaggcgttcatatctaccttaccgcctccgcctgaggagcagatgactgcagagcagcaagaagagcatgaccgaaagcagcgagatcgggagaagcgcgaaaaagctctcgcagagcgagaaaaacgggttgaagaagacaagcgaagacagcgcagcgaccttatccggggcaagcaccttctacgagaaggcgaagccgaaattgcggaggctatgaaggnnnnnnnnnnnnnnnnnnnnnnnnacatggaagttgatgagctcccaaccaaagagcaagagaagccaagcaacgactgaaaaacagagatcttgtacctattggtatatactacgaaatattgtgttcataattcccccgtctctagtctccaagagctttcatgaaaactagctctgtgctttgaatgcctcattagttcaa

SEQ ID NO: 45044 - DNA, 331 bp, Arabidopsis thaliana landsberg
gttcgatggctacggtcgccgctgatgccaactcgtcgatgttggtttgggcctgtgtgttttcgcgcgcaggattctggccacgaccaccacggcggacacgaccacggcggttacggggctcgcgtgcttcgcctgagggctgttgcgaacgctcgcctgccgcctgcagggcgggtggattgttgcgattacgatcctgctgatcttgacgttgttccgggcgctcttgacgttcctggcgctcgccacgttctgcgcgcggttggcgttgctggtcctggccacgaccgtgttcgttaccaggcgggcgctcgctacgctcttgacg

SEQ ID NO: 45045 - DNA, 731 bp, Arabidopsis thaliana landsberg
caatacgcattaagcaatatacactctcaattcaaagaaatactaaaattcttctttctttatgacaaattttgagcatttgacatggaataaaatggaaacgcaaaacaaaagaggtatcttaaaactgatccaatgaagcagcaaaaaaaaaaaaaaaaaaagcagaaacagccgtatacgtttggagataatacagatattcgaattgtccaaaacacaatatatcaaacaagcaaaagcaaacacattgagatacatacacgtaaccaccgagaagctcttttgaaccaaggagagtctattatgcgaattggcgcgttgtaccttataacagatattgggtattgaaggtgaacttccggcggggatttaaaatctggtggtggatagcgacggcggacggcggcggctgcggccaagcgatgtggaagcggccgagcggataagtgagagaaagcggactaaatttaggaattaattttattaaaaataaaaataaaactcaaatgaggaggaggaaaaacaagaaaatgagaggaccgatcatgtccaggtgtcatgatcatgttggctaatggctagtggtggtatcaaccataacggcatcgttaggtaaaaaaggaaactaggctcgagtcggtgggctctagtagcgagagtggttcgagttgacaatgcttggagaatttgttaaaaagccgaggcgcttgtagattgaaaattgttgg

SEQ ID NO: 45046 - DNA, 451 bp, Arabidopsis thaliana landsberg
ggctaacgtctccccccatatcaataatatcgctgctacatgttggctcgctcttgtcttatctatttttgtgcgaagaacggataagaacaactcaacaaccgttgtctttcatggggtaaacaaacataaaatatgtgtttaccatacgaattagtattgcatatatggcaattataattcaaaagcataaagaaactcaccgaaacaatatgttatacactgaaatatctaggatttgattcggaatccaactttttggcttggtattcttacatccttggcaacgtagatgctaatattattgaacatgattgagttcatgttttctggattagcgtaaaaaagctggactaaaaaatcccaaatacctttatggcccggcctatagctggtgtgttgtcgtaaacatgagcgagctttgagggaaactattaatgttatctttttg

SEQ ID NO: 45047 - DNA, 454 bp, Arabidopsis thaliana landsberg
  unsure (1)..(454): unsure at all n locations
cgcaacggccacctggaacacttatttattnnnnnnnnnnnnnnnnnnnnnnnnnnnnnnnnnnnnnnnnnnnngtcagtggattacgtgctggggtcgagcagtctacgagtatttgtgtaagctggcggggtgtggatggcgagagtattaatcaggcgcatatacgtgtgtgaatggatgatggtgatgtttgatcaactgctagagttgtctcgcatgctctgcctgcgctgtgccttacaccgcggcaccgcactcgactgctggctcgggctcggactatgctgcgtctgatgtggagcacttgtgggaccagctactgaccatggacgcgcagatcctggtgctgtacaagcggatggcgtactttcggacctgggtgctcaccattcattaaggaatgttctgcgtgaacccgctcggcatcaataatttacggggggtatacatt

SEQ ID NO: 45048 - DNA, 686 bp, Arabidopsis thaliana landsberg
  unsure (1)..(686): unsure at all n locations
atcagagtatcgggaacactacttattaaaaaggggcaaaataaatacatacaattagatgcttttagaattgaagctggagagacaacaacatataaaggtaaggaaggcattgagcaggtagtttggnnnnnnnnnnnnnnnnnnnnnnnnnaagcacaacaagactcgatacaaaatgacaaaaaatttggaggcttggtggcagcagtggaatggaatggattttagtaaagagattatttttagcacaatggcaaaaaataaatgcactctttgtgaccaaatcgagtcaattcatagatcaattttcctccttgagctaattgaaaagcaactgaatcaatagaagaactcaacataaggggatttgcatgattctaaggaacaatcgaaattgaaccgtaagccctaaacaaaatggagcaatcaaaaaagcccctaaaccaaaacacattacgaggttgccccaaattgcaaaaataggatcgaaacccatcacacatagatctagccacagagaaaaagagagagaaagataaacacccgttctgatactgaggatggtggagaaccaaaaatgacggagaagaagacgacagagatgaagaaaaagaaggaggaggaggagagccgttgtgcaagagctcttgaagctgaccgatgagctgtctaagacatggcaa

SEQ ID NO: 45049 - DNA, 1075 bp, Arabidopsis thaliana landsberg
tatgatcataggctattgtttgcaagatttaataatcaaggtcaaacccaccaaatagtggtttcgtacaagaattcaccaaagagagtgatattgtataagtaaaaccaaaattatcacacttaggccaaagcaacatcgaaaggtggactacataggcggtaggcttcaagaattcaccaaaaagagtggtgttgtatacttgtataagtacatatattatattctgcttatttcaaattaaatgtaattttgtagaaatgatcattattgcaaatatgttgtaacgactagaaaataaaacacagttccgtgtgtaagttttctaagacctctcgataatactcgaattctaattcgactctccaattatctaaatatgtttttttgcaatataaataacgacaaattacgtaatgtcaacggaggttaaatccaccctgtcgctcttgtttgcttctttggcaaaacaaaagtcaactattattttatttctttgcaactttcaaattctttattgtaggtttgtatgtcatttttgtataaaatatttctttcgtacaaaataattacttaaataaaaaccaacgagtacacattttttctttgtttttaagcacacaaaggcatatctatccgtgtcgacacctcaaacatgtgtagatgaatgatctcatgcatatgtaagtgtctaaacatagagatgaaaattgatgagatagacattacaaacctatttaagtggggatagtttagaaggtaacatttggttttattaaaactaaattcaaacaaaattagcttatacgaaaattaatgatctgcgtcaagtgggatcttcatgtttattaccttggtacagttatatatatatatatatatatataatttataagaaatatgacttaaagagcatcatcaaaccaaagtaagtgaaataaaaattatgatttgaattaggtcggttttcaagtgacagtttcctgagtcagattttgaccccacaaatcgatataaaattgcatgccattttagtttccatctactaatattgttataagttatgataaagtaa

SEQ ID NO: 45050 - DNA, 543 bp, Arabidopsis thaliana landsberg
atggctcaagaaccaagcaagagaatttaaggacatgtttgtcatcaagactatccttgatattctctacaagaaccgtatgtgtgagcttcagaactggttcaacagtcgaaaaccacaagtctaaattgtcattagacatgccacttttcgatgaaaataacaagccgagacaatcaaccacagaactgtaaactacaaaaccttgaccattgcagaaatcaacccccgaagccaaggattcgttcagggcagataaaaatcttcccgtgataagcccaatagcctttaataggtttcttgacaaatttaaagagactcccaagattgtcgcctccttcaagcagaaactgaagatctcccaacacctgaagtccaaacatggttcagaatctaaatcacacttaactttaatattcttctctgaaggaatcaaaagagactggatccagtcgctgagaaatatcatcagccccgatatcttaaccgcttgacattcaacatccaaattagtcccattttctcctccataccctttaacaa

SEQ ID NO: 45051 - DNA, 488 bp, Arabidopsis thaliana landsberg
agaatcggagttctctccgtaaacaggattccatcggcgttttggtttcgttccattagatagatatcggagtgagcgatttttgttttattgatctttgttgtggtttgagcattaaccagctcttaggtatcaaaactgtaattttgttcatcttctcaaaccttattaataatttggtttcaaaattgagggaattgagaaaaaatacatatagatccattagatcacaatctaaagctcatgttcgacgaagataacacagatctgaatcgcaaatctcacaatcaacataaaaattgaaatgcgattgggttttgtgaacttgagaaaaatacagagctatggcacgcaacaatagagttttgttagtttctgttaattatgtaatattaaatataaacttttgttatttgatacgaagatgctattgcgtctaaatggtttggatgcttgtaaaagtattctcatgtctcatgttccagctc

SEQ ID NO: 45052 - DNA, 395 bp, Arabidopsis thaliana landsberg
gcccttttttttttttctttttttttttttgaggtgatgacttggtgcattacaatttgcaacaatgtgtcatctctcagtagcactgttttcaagattcaggtcagcttgtgacaaacatccatcacaccattacgtggtcgtggagtggtctaggaagttggaatagacccccactgtgactctaaagcacaactaccgcacaaaaagcacaagtagaacatatccatttatctaaacaacacatgtaaatatgacctttatagatcatgtggtcttacaattaaggaagaaaaagtgtaacaagggctgtgaaaaagagaaacaccacacataaaacttatcagtagtccgcgctgacctcagagttttcattaacagcagctagttccaac

SEQ ID NO: 45053 - DNA, 767 bp, Arabidopsis thaliana landsberg
gctgataatgatgaagacataatgtcatggctctatgtttttattgctctttcctgttatttttttttatgaactgatattaaagaatatatacattatattggctggtccatttcagtttttcttttatttggtcccgatttgattttatgtacataaaacatgtagaaccaatagtagtgtggtcgttatctttctaataatcgaaggctcgaaaccatatattgattcttggttagcgtatcgtctcttttatgactgcataatttacatggcttgcctatgtgttacacattatctcgatttcgatttcacgttcttggtaacatattaaagaatttagtatacgaaacaataaattgcatggggaaaccgatattcataaccaacgataatttgacaacacaaaaatggatcatcattcgccattgcccactctgccatacatgagaaggacaagttatatgttatttgctctctgtgaatctaattaagttttttactcgtcagtgggaaacatatagtacttgttttgcttgccttaaactgaaaacgtatctatataaataaaaatgtactgatatatctactatcgtagacttagtattcattgtcgtgaaagtagcacaaacaaaggatatggtcgatgtaacataccaaattgtcatcacagcattcatcgtgaatgtgaagatgagcgtatctatccgtgcaacctaatattgaacgagatgaagtatatgatcataatctgatctcttttgctt

SEQ ID NO: 45054 - DNA, 579 bp, Arabidopsis thaliana landsberg
tatgacacattatattgtacgtcgggaaaatcaaattttgagattgaagcatattattcaatgaagaaaatttcatggattcgctagtgttgccaaataaagacgtccaaagttttttgggtccatagattttattagagaacaccgaactcaagaaaagtcatattaagaaatatcggaaaaaatattatcaatttttaaaataaaattaggaaaaaacgttgtgttacgattttggttaggtacggtgactcagtgaggcaggtgtacgttagtgatgtatttgcaatacttgttacgttcaaaatttagtcttttttagggtggagagatgtgtacattttctatttttggaattcaaacgaaaatgattataaagaattgacataaataggaaagaaatagcaccgaaacaaagaacaaaatgatgtaaagcgagaagaaaaagagaggtcaaaagcgaccagttattttactttccatgcacgaaccaaattaatacctgaagaaaagaaaaattcgggtaacaaaaacacactaaaaaccaaaccacacacaagagaaatctcaaaagtattg

SEQ ID NO: 45055 - DNA, 823 bp, Arabidopsis thaliana landsberg
  unsure (1)..(823): unsure at all n locations
aaatatgcatgggttataatcatcttatgacgttggaaaaaaagcaagaataaatcatataataatgaaaatataaaagtaatcgaaacttaaaaatgacatgaaattggtcgatttgtttgtttccataatatttattatctaaaattcaaaaaatattctggtggtgcgattatctcaataacaaaagcgtgacatgtgacatctgaaacgtaaaacttttttttttttcccacacccacccggccatctttttccacgtcatcaatttgttaccttctctggcgatttctgtgggccctactgccccgattgccacgtatgaatatatcgtccataggtatcacacgtgtcgattattcattggatatttaacaagaacagtaaccacacaaaattaataaaatcgtattacagcatacaagatgaaattagaaaatttcttcaacttttttttgttttgcgatattgtcttgataatgtattatagtaagatatagcgagtatttgattttatgtgttagtgtaaatggcgaaagcgatatatatcttgaaattatgtacaaattttttgttttgttaagatatatcgttttcgacgttaattccagcctcctctccattgtcgtagttcgtccgtgtcgcgaggctatacataaaagtcataaacgcagagaaagaaaattgatatttaattcaatggttaattgtagctattatgtaattagcaatgactaatctaaccttatgcagtttggttaatttagtaattatacacagactcgacatgnatagtcaggctttgtatatgtgtcgcattgtc

SEQ ID NO: 45056 - DNA, 1034 bp, Arabidopsis thaliana landsberg
  unsure (1)..(1034): unsure at all n locations
tttgccaccacaccccttttgggtataaataattttccaaacaatgaaatttctgttcaatttaaataattggttttaataatttataatttgattataatatatttacatttgtatatgttaatatcaaatagcttattgtttcgctggttgtttcaactaatctacatctttaatgattgatattattcaatcacccatcttttcagcatgaggaaatttatatatatacatgcatagagtataataatagagcgctggtccggtcatatacatgcttcttgttaaagaactagaaaagttcattactcgaaaacgagaacataacagagaaaccgagacgatcaaagacaaaatgtcttatgaatatttaaaggaaaagaaaactcctaattaagtagctctgagtacgtaaaagacaaaagaatgacagctgatttaggaaatttcttaagttattgtcgaattaggtgtcatttaataatgtgcatggccattaaggagagttgttaagctaattctggatgtgttttgttgtcctatgcatgtgttgtgttgtgttgtgttcgttagtgatccaaataaaaaagacaagaaagagttatgtcttatggatggacatatatgtgtccattatgtctcatgaagtctatatgtatcctgttattttcaaccagatttcatctctttaagtctccaagactctctcaactcccactagaatcactggcactcatttgaattgggttttaatttgtttgaaaacaaagatgaacaatttgaacatgaacaatttgaaaccatcattcttgagctctgatgggagtttgtctgttcatgctcggacgttatctacgatcattattgttcctttatgagtaaatggtctttatttgcttttttggacaccttcgaattactaataatttatttgttggaaacaaaaactatgatattttttttgatccatatgaaaacactctgntaacctcataccatatattttcagaaaataaaaagctttgggtttgttt

SEQ ID NO: 45057 - DNA, 726 bp, Arabidopsis thaliana landsberg
cgatctaatctgtgatgttctcatgtggtcttctaaagtcaacaagaagctctgggtttatggctttggccattcttcctttctaatggattgttttagctgatctatagttcggggatgcaaatgggttacggtttctttctaaggacatgtcttcttattctgcttatcttactggtaattatagcgctcttggttcttggagtaggatatctatacagaaaaaagacaagacatatgtagatgtaatagaggctttcatgcaaaaaagaagtagtagaggcatgagaggaggttcttcctggtggtaaagacacgtgtttctaaatggaattgctttagctcttaggtagttatacactgaaatatcaaggcttctcatgttttgtaaaatgctgagttaaaggcaaagtgagtaggttttgtgtgaccatgggtccaacctagataccgttgtctctgtgcgaactttaggtcaaatcgcatggagcttgcaacaatggctgtttgcacagtaactgacatgtatgcctgtatgcttgagcaaacttttggaaaggaaactgtgtaagctgggatgctagctgatagactgtttgaaaatgttggaaacagataagatctgagttcagcttagaaaatagggtcgctttgctcaaatcaaatggtgtgccagaactgaaagccttcatggaagaagtggtgcaatatcttgaagttggaacc

SEQ ID NO: 45058 - DNA, 610 bp, Arabidopsis thaliana landsberg
atattttgagaactaattggattcatgtgattgcctcatagtgagctgacgaccgttcgatcattgatatacatacacacatgatgaaaaaaagatgctaatttctccttgctttttatttttggtattttccaaaaaggattgagacaaaaaagaaagagaaaaaatgatgaataattaggtacctttccgagaagcaaaaccctcgaaactctcatcaaatatcctaaccatacctttctttaaaatttggattttgcacaaatccatttacaaatttaattactttttcttttcgtaggtatatatttatttatacctttataaatatataactttataggaagaagtatcgtatagtactcgctatacaataaataatacaatgcgaggttgtttgtttcttatcacaaagttgtaccctatgcaacaacattcatataatcatccttttcccgagcattttgactgatcatgcttcagtgcttttcattatcatacaacacgttccaaccaaacttgaatcatgtatttttccaaatcccaagtacacctaaatgataccaaagattacaatacaactaacatactcctagttttttttatggaa

SEQ ID NO: 45059 - DNA, 480 bp, Arabidopsis thaliana landsberg
tagaatttttgccgataaccccggttaaaccgaatcagagtttttttgaagtaacgcaccaaggcttaacacccgatagttcacgagcatcatcgtcaacgaattcatgctgatagcagaccatgctgtcagccaagactcccctgaacaggatgtatcctcagggaagcggctaaagaagccaagtgtcgccgggacctcaagtcacggtcagcccccagtgcatgactctcgttcgtgcagtacataccccgcccctagggccggttgtacattcgctggtctccagccccgcctgtcgccaatcgtgacatggttcaaccccgccttgagcgcgggagtcattcaatgaaacgcatgttattcaacgcgacgcagtcagaagagctgcgcgtcgccatcgtcgacgggcagaaactgatcgatctcgatatcgagtctgccggttaggaacaacgcaagagcaacatctacaagggc

SEQ ID NO: 45060 - DNA, 516 bp, Arabidopsis thaliana landsberg
taaggtgtgtccagaggaaaaaatatttgtgtaaataaaactttgtaactgcttaattctattaagacatttccttagtcaaaatactacacgaattatttatatatgtactgctttctaactaacgatatttttattgcctaatacatgcattcgtgttcgggctataatctttcttatctatgtgtatctccatgattcttgattatatatacaaaaacgtaagaaaattatctggttttctttattattcgattaatcagtttactaaaagctaatccacgcttgtcttaaccactatgattcttagttaagggtatcctatgtttcatcaatattattttaatttttatttacaaattattaagatcataatgtcagtccaagcaaagaatatatgtagatcgcattaccgtccaactcgcattttatttttgtcaacccgaaattttttaagttaacattcgtttactctaattttctaaagtaaacaagtactttgctttagagtgaaat

SEQ ID NO: 45061 - DNA, 787 bp, Arabidopsis thaliana landsberg
  unsure (1)..(787): unsure at all n locations
aaagtcctactacatgaaatgctttcgttttccaattggtttgtggtgaaaattctattgtgtttggaattctcaccactatctatatctatctgatggagacctattcaattaataaagatcactatttaagtgatacaaaagaagagtttgaatttctcgaatcagaattttgggttatttcagttcacaaatcatcgatggcgctacgtcatttatttacgacgattatttggtatttttatataaaatttggggaaacaaatccgtttgagatctcttggaatcattatgtgaatttatgtcaaaattttacaatcacaagcaataataatttgatttgtttttacgtaaagcataagccaaggaccttccatggccatctaagtggctatgtcgtgactagtgactactactgacatggacaatacaaattaagagtgtagtcagtagcaacacatagaagctgtgtccaaattcgttccaacaccttggctatttcgtactatagtgaaattggcttcgccatgagatgcttttgggtcctcctagggacataaagctacagaaatcaaagccaaccaaatcaaatttattatacttaccaatacatataaaaagttagatggtaggcatcaatcagagtgtaaaagactcgatcgactcaagggattaatagaaaatgatttaacacttgttcacacaaaagcaattaanaaatcacagcatattataattgatgaacattcaatatgtgtcgnctagttcttggatgaaagagacttaa

SEQ ID NO: 45062 - DNA, 765 bp, Arabidopsis thaliana landsberg
gagagacatgaattagtaatagtgagccaattagcatgaagtaaagaattaaaaataacataccctcatattcttgtgtcttgcactccttgttttggcatgttgcaaccactgtttatgtctttggaaagcagatttacttgagagggcctgtgatgtgacaataataataaaacatgagagcccgtggaacatgatgaaggcaatcaaaattttcctaagcaggacaagaagaaaagggagaaatttaaaacaaaagcaagggaaaaaggtacaaacgttgtaggtgactatctccacgacctcagcattctcaagaacgtgagttggggaaacaagattaccattgacctgcagtttcaagccattaagtatcattaaagtctggtccaattgttgtctctatttcaaagataacaaatcgagaatcaaagttatcatggaaagaacgacataactagggaaaatacctttgctgctaccatcttgtttccgatttcggtgtgaatcagataagcgtagtcaacaacggtggcccctttcgggaggttctttatctgcaaatagaacaccaaagcatttaatcaaaaacataaaaatgttagatgatggttaaagaggctttgaggtatagtagtccttacctctcctttaggtgtgaatacaaacacacgactacctaaaagatccctcgtaatggtatccacaaattctctagagctcatgttacccacaaactcctcttgccattcccttattgcattt

SEQ ID NO: 45063 - DNA, 595 bp, Arabidopsis thaliana landsberg
  unsure (1)..(595): unsure at all n locations
gaagaaggagatttcaactactatggacttgttgaaaatcgtactacagctacacaaagttttattctttacaagagttggagctgggcaagtgagacttgcagctgggaacaacatcagtggaaaagtgaaagctaacatcagtggacaagtgagagcttctgctgggaacatcatcagtgggcaagtgagagctgcagctgggaacaatatcagtggacaagtgagagctgggaatatcatcagtgaacaagcagggctaaggaagcatgtaggaaaccgatgggaatgaaggagccagtgacgctttggagatttgactcgaatttagcttgtgttatagcgagatacttgttgataaggaaatagtgaacaacacccctccatatatattctttatatattgaggaatatattaagcttagcaccaaaatgctntctctagtcgatccggtacagagatggagtttcttgctagtaagaatgttcttcaaggcaacaaagcaacacagccccaaaaatgttttaagaaaggaaaaacgagcatttaccctacaaatcagtcacaaaattcacaaaggcaaaatgacaaaaa

SEQ ID NO: 45064 - DNA, 545 bp, Arabidopsis thaliana landsberg
aaaaccatactgaaaactttgaatttttttaaaataagaaaatatattacaagaggatgataaactatgattatatctatatttctcaatattaggaggaaaaaatcaaaattctgaagactatattatttctttcaggcatattagctaattccagcaaaatcattaaattcctttgactagaaaattaaacattttaaatcatatacaaaaaccgtgtgacttggtgaatttaattagtgactatgactcaatttcaacaacctcttgagtcttgaccttgcatcttttaaaaaactccccttagttgtcacttaattgtccatatatacttacaattatttgatttaaattgacaacctctaattactcatatcaagaaaaaaatctctactcttaaagccatatctcagattatgttgccttcctatttgatattttccttcctttatttgatagctttttaccatacaacacttgaaacgtttccctacgtctctctatcatatctatatatcttgagagattctctattctttttttca

SEQ ID NO: 45065 - DNA, 766 bp, Arabidopsis thaliana landsberg
gaactggaaatcaatgtccatgttattcgattatcttagcatgctttagttggtttagttcgttaggaagttaacaaggagtggtttgttttgttgccctttgattgctatatctttgttatcggatttactgactatggcagaattttgtatctaccattaatatgaatagagagggtagcatcaagcttagaactttgttgatgagctgcactgagttcagtgtcagggattatataaagtcatgctaagagtgtctaactaattagaaaatgttactgaagtcaatttttaaacatctctctgtttttcttcttctcattcatagtaaatgactggatcttaattcattacttgactcgccatggtgttcttgaatacttgagctaattgttcatattcttcaatgtttagccaactttatatctttgaaagaggcaatgcgctgtgttacttaacgaacagcgtggtagcttttttctgttgagttggctttttattttcatttccatggtgtggaacgcaggtagcttgcacacttggaactattgtatttacgagcattctacttatacgtggactttgggccggagtagcatacatgcaagagagccgcaacaataggatcaatgaactcgctgatgatcctcgtgcatggaacgggatgcaaccagtttcctgatgaattagcttaacacttgtagaaatcagaattctgacttttgggagagccataattgtttaggttcttccaaggcaataaagc

SEQ ID NO: 45066 - DNA, 700 bp, Arabidopsis thaliana landsberg
aggtctcgggttcgaacccgggcaaagccattgtcaatacttttattttaacgtaatttttacttagcttcacaacgtcgtttacatagaaccgttttcatgtgactcaacaccacgtcacacatcgtttattctcgcgccacatcagtctctacattcttattggctaatactctccacgtcatcatctcttcccgtgaaaacacgccatttaaaaagactccagaaccatccacaaccttcttattccgtcttaacaacaacaaaagaaaaaacactgatccaaatttgggtccttctaattttgcgcaatcaaataccttcaaagcctcaaatttcgttcgttctttgtgataattctctcgcagctttgcaatatataaatctcgagggtttactcttttaaggcctggttttttttggtcaatccaagatgggtcacagagtattggtttatgttggagctctgtttctgattttattcacgatttttccatcttctagtgctttaatttcgtctcctgatgctaatcctccttaccctaaagctatctccgtaagaaatttaccatcttttttataattgtcattgcgtttatagatattgataagaaagtgtcattatcggtcttaaattaaaatcaaaagaatctctttttgaaactcgtagaatatgaaattttgattgtttggttaattt

SEQ ID NO: 45067 - DNA, 497 bp, Arabidopsis thaliana landsberg
aaccagcgatagaaaaagataaataaaattttattaagttaaatactaatttcatttattactggggaatatttaaattaatggggaataaccaactgactagaaaaaaagtcactctaacatggggcacaacaaacgaattctttcatctacaatacaaattgcacaacaaacttcaaaattatcaaatcttgcatggggcacgtgccccagtactcatacacttgcgtacaccaatgtatatagtcccatttgtaatgatatggccgatacaatgaatatctcacattacaaatgaaaatacaaggtatatagatctttccactatattggaagttacaaacaaacccgtgattcctgatataaatacgtgtaatggaatcctaattatgatgtccattattacgatgatgaccattaattaaactaatacaacttgctttgataaatgtatgatattgcataaatgtgtacaatctatatttagtttttgaaac

SEQ ID NO: 45068 - DNA, 1761 bp, Arabidopsis thaliana landsberg
taaggtcaacgacccttgggatgttaacagagccaagtttagtgagcactatgtgctcgttttttcttaacacaattctaacgtggtttggccaagccaagtcaacattttacttacatctcgttttccaataatggttttgtaatcgataacctaaatcattgtaatgaatgcgttcctccctatcgatcctaggccttagacaatgctgaatgattcataggcacgcgaataacctattcatactaatatggaaagaaagaagccaaacttacagagctcttctcacggtcgtcgaagaaaagagagtctacagtcagcaacaaaattagtgttgccatcatggcatcatcttgcagctttttccgcacaaataatttatcatccaaatgttgttcactaaaccaaaaacaaacaagcattacagcgaagaaaccaactcgtagatacagatttccaaattcatgccttatttagaccaataaaaactgaaatttctcttcagcgaaaaaaaaaacaaacaaactgaaatttcatatagatccagaagatagaaacttgtaggctcaatcgactagactagaagatgctcacccgatcgtgcttgagatagcgagatagtggcaacaccgacggtagaaataaaatggacgacacccatccaatgggctaatttagattaacgggctttaagggtttgataatggatgttaattaactgaggcacatgggattgtatcacgtaggcaatgggtttgataatggatgttaagtaactaaggcccatgaggttgaagtacgtaggcaattgcgtgagcttacgttagcgatgccgttagagacacgtagtggatgaagtggctttggttagcaaaggacacatgaggcacatgcaaaggctataaatgactgctgctttgctacaacttgcgattcccaaattttataaggtaatggaccctatcacctctgctcgaagctaagccacccaagtttgagcttcaccatttgacacgtctctagctaatacttaatgcttaaactttaaactaatacttcatgtttaagacatttctggctgacacattatgaaacatttatgaattcgttctatgtcgtacgtacaccggaaacctttaatttaacaatattaaccgtgatctttttaaaaatatctatataaacgataagtatctcatctaaacaaaattgaataatgttcccgtttgtaaaaactagaaaaacaggcaataatcatcattatccaattacacatctagtaagtgtgatgcagtggcaaactggcaataaaccaagaaaaatcgagaaagagcagatgagacagtgttgtgttgtcagggttaataaaaaaaaaatgaagatatttttaaatttcataatatttaaataatgaagtagttttatgatcttatccataaatcaattttaaaaaggtttaatctttacttttccgtatccacagcgtgtttcgagaagattcgggaggacactcgtcgaacggaaaagtcgtctaagcctttatgttcgaatcaaaaactgacacgtaaccttgctctcaaacagaaaaatgaactattgttagaaaaatctagagaaggctataaatactccgtagatactttgtcttccttagatattttgatttctgctaaagctgtctgataaaaagaacaggaaaactcgaaccagctccccccaagaagaagaagggtagataagagcaaaaagacaaaacacaaa

SEQ ID NO: 45069 - DNA, 565 bp, Arabidopsis thaliana landsberg
tgacgcacatgacctggaatgggatgagaagacagtgttcaaagagctagaaacggctcatccaccagatgttttgggtttgcctctgcctgcagagtataatgacgaggtgcttcttccaagaaagtgggatgcaaaatgcatcgaatcggactatgtcaaggctgacaatatcgaggagtacgtcaagccgatacatgagacgccgtattggccatcgatcgaattcgacccagcatttgtgcgagatggaaaactccccagcggagacgcggtatctgagctcccagctgagtttccgccaaagggccctgaagcagtgcggagtgaaagttccgagagtggggaggtccatgagcaacgctccaaacgtggccattctagtgacaatgaccatgccgagcgacctctcaagagacagagatcacggagtgcttctaaccccagccgcagaggatcaaacgacggggattacagtcggtgggataggcagggagtcaaacgcagatcacgtcgggacaggtccgggcatcggagaacggaggcccgtgaacgagatcaacta

SEQ ID NO: 45070 - DNA, 224 bp, Arabidopsis thaliana landsberg
tgatccatcaatggaaccggttattctgccatcaggaaagcctttggtaaagaatcctcttatatgaactgagccataccaaaattacatgagttatcgatgaaactacacattagtgctgaaattctcaagctaatgtcattctgcttgttaagtctgttgtcaacagttctcataaatcccaaaaattaatatatgtgtactgaatcaactcacttgtgggc

SEQ ID NO: 45071 - DNA, 990 bp, Arabidopsis thaliana landsberg
  unsure (1)..(990): unsure at all n locations
tgtttttcactttatcagtaaaagttctctaagtttattctttttcttctttttttgtttgtttgaaagtgatgtaagggtcctttgtggccacggttttgcagattccaatttttcatgaaaatgtatataatttttttaattcatgtggttttgaaagattcataaaggtatatcaatattgggataatagcgacaggtcttaaatgcagatttataagatacctattaattatgtcagctaagtcggcaatatttccacgtaaaaccatctacaattttatatactttgaattttttttattaaaattgtagataaatataaaaatataaatcgtattctttaaaattcattcatctttaatcttttttgcttcaagaacacgatgagcgacaataaaaatcttctcctgagacgaatggaagaagaagatcgagcaagaaaacaaatctctgttttatcctcaaaaagatcccaaaccacaaacgcaaacgcagctgttacagctccgtccgaggtggcgtttaacgtttgttgtttatgtgtttattgtcctctttgtgttctttggtgctgcatcaaacagccttgtacaattggatggagagccattctaaacgccaaacgcagattaagcggttgcagcggctgcggtagaagctttagcaggagggttttggctgctgattattcgtctttttcggatattgattctgatgatgtgaattgcaaagctcataattgctcaacacgaaatcggtgactacaaaaactttattgagtttcatgaattttccaaacttccttttttctctgatctaaacgccgacgcanacgctggagttgacttcatagttcataatgctgagttgatgaaaaatctcgagattaagctctattatttcgattaattagaggttaaagatgttgctgtgattgattttataaagatgtatatattacttggtgaagaataaagttgttttttt

SEQ ID NO: 45072 - DNA, 904 bp, Arabidopsis thaliana landsberg
cgttttcattttcaattcatgaccaatctttgactacagaccacatgttctaattttggcaatccggtttactaggttggattcggtttcatttccggttttatagaattcgaaatcaaataaaatcatttgtaatccggtttatttggttaaatttggctatacctaaaaattggttttagtattgattcgtttttggtcgaacattacaagaactgggtttataagttcaaattcaaattgtgtatttcttcggcgtgattgaaaaccgtcgcgatcagaattcggtctactgtcaaaattggtacggagacgttttgaatcacacaagttccggcgaaagaggatctagtgggcctgataatgggccgatctcgaaacgaactattacgtgaagagaagaaaacaaagtgggttgcgaattgaaagtctacagaaaataaaaggactggattggaaaaataaaaagaataaaagaagttttgacacaataacgcacccactatctttctccttcccttccgccttccttcttcttcttcttcatcctcctcactgtttaacgcagagcgccctccgtttcttctcttctcctcctctctcttttctctctacacaaatatttttcccttcttttttcattctctttattcaatataatccttttgattcgctggtgatcggtacgagaaacttataatcacacgaggaagctgtgtttcgtttatcctcgcttaatcggaatcgaaatttgttctggagaagaaatttaacgaatcatagattcctgatgcaaaaaaaaaactatcacagatcggaatcggagacgtaaccattacataatgcgaatctggatttaacttgggtataatgatgagggttttttttttcttcttccccgtct

SEQ ID NO: 45073 - DNA, 465 bp, Arabidopsis thaliana landsberg
atagcaccttcactgaactacctaaaactactgactatatgaaatgacagaaagcatactttgccttgagaggcttcaaccatatctgaggattgctcaactgactgcaagaaactaaaaagccgcttccagtttccctcacaattggcaaagagctctttctgtgtagtcaaacccattcccacgtagacagggtgcatagagcaaagctgagacgccgcataatcagctaatgatctgaatttcaaaggatagaatccatggctccctccgaaaaccttagaagtcaattccaagctaagtagatcaaccgcactaagcctcccagaggtcaacacctccaagatcaaatgagaaggaagatcctcgaacgaaatcaaacagtttcgatcagccatttcttcccttcctaattctaagacagggtttcaaaatgacctaattgaacgttaaggaccagacttt

SEQ ID NO: 45074 - DNA, 543 bp, Arabidopsis thaliana landsberg
cgactgaatagcctgtcagattgttctgacaccaacagctggaggcggtgaagtgggacaatcgctgagccagttctaccggtggtgcaaggacgcggtacgacgcatcggcttgcgcgtggttctcgtcctcggcggctacatcctgctcgccgtgcttgcggttgcactgaccaacagctggatcaaccggctggccgatctcaacctgcatatcgtgcaggccaaggatgctctggtaacgctggaacagctgcgtaccggcctgatgcaggccgagagcatacagcgcggttttctgatcacttcgcggccgggctatatcgcgccttacgacgacgcggtcaaacaggtggatgccagcctggacaagctggaagcgcaactgctaccggccaacggcgaagagcatgcccgtttcgatgagttgctgaaacgcatcaccgccgccatcgagggcaaggtcaccgaaatgcagatgctggtgtcgctggtgcgcgacggcaataccgaaggcgcggtcaaggtcatcaataccgatga

SEQ ID NO: 45075 - DNA, 743 bp, Arabidopsis thaliana landsberg
  unsure (1)..(743): unsure at all n locations
agtctgaagaagcacagaaggattctcgatacccatccgcatgcgatcgtgcaagagtctcccatgagataaagacctcaattctctgcaagcctcaaagagacattggtaagaatacgagctaacggagacaccagccttatccatttcttgcaagaactcaaatgcttcgttgagcttcctatgcttcgacaacgaaaccaaatgaagattctccacttgtccttgcttatgcgagattttaacagacggagaagaagtgctcgacttcagagaaacccacgacggaatttgatcgaaattcgcgttctttataaccggaactcgagaagagctaagcgaagactgtacagtgagaatcgtcatagttgatggagaaattctacaaaagtttagagcttttccctttcgagaacaaacgacagagaagcaaaaaactcagactttactggcttcagttattgcaacaagccaacaaccaaaacgggtcaaaatcaaaatcaatggttggtaataaacgacagcgtttagtacagagacccgaagagtggaaggttcaaagtttccttctttggtgtctctcatcaaatgagagtgagccgnacgatttctctcctcttcttgttttaaaaacctatcaataatattcttcttcttcctcctctcaaatggcggctactagggttcgttgttgtcatagcaatgcagctttcaccagattgccacttacccgccaccgaaac

SEQ ID NO: 45076 - DNA, 799 bp, Arabidopsis thaliana landsberg
caaacattaaaaaacagataaaaaccactctctacttaaccatcatgcccctatatatatatgtttggttctgccttttgtgtatactatacactaatttcattacaaaccaaactaaaataatatacatcgttcatttcatattcaacagaaggaatcggttttaaaactcaaagagaaaaatgaacaaccttcgcgtaattatgtcagtgttattggccgttcttgtcttcacagcgactggtaattagtttctttacctttaacgcaatgatcggccgctctaaacaattaacagtgttttaattgaattgttctctttcttcttctcgcagtttcagagtctgcagaggaaatggggaagggtgaggtcacaatctcacttagatgcaaaacgaaaacagaatgcttaaagaacattgcctgtgaagcttgtgtcgattgtcgatgcgataaaggaatttgtaaatgccatggtttcacagcagaaaccaacaatccaaccgtttaactcatatttctcctaaatgttttctttcttttttaatataaaatgtaaaagaaaataaatcgcaaagttcaattaatacaccaatgaaaactatttatcattatcaatcatttgttatatgattatatatggaatgacgacgtgtgttaagattgagatctcaaattccacccacaaaaactatggaaacagaaaaaaattaaaagcacacgaaccaatgtgagatttacgtcatcttttcgtctttgcataataatgtgaaggagagaaagagaattgcaatggcca

SEQ ID NO: 45077 - DNA, 422 bp, Arabidopsis thaliana landsberg
atttctcctccaacttgaatctcttatcttcttgcattaagaaaacccaaggtaatggtcttttacttatcacgcaaaatcattacttagctgttgacaaaagacggaaagtgtgacgattttgatcttgcatagtctaggaagtccatatcttatttgatgcatatttctcatgtcctttatggttcttagagttaaatctgatgacatgatttacatatatttttatgtgtttcttcgaagatcacatttttatgtacaagtttgcgactttttcggattggaatacgtagtattggtaagcgtatctgcacagcatcatagatgaagtcctattttaatggatacttcactacaacgaataacccgggctacttgaaaccaaatgtcaacctgcacttgacttcatgggtctctggttg

SEQ ID NO: 45078 - DNA, 2287 bp, Arabidopsis thaliana landsberg
cccatgtttgtatttattgacccagacctaatttttgtaccagggcctgaggactatatccaacttaaaccacaatttcaaatattattttggcgttttaacttctaaacgctttatctttatcatgcgacttgccagatgccaacccaagccacgtgcattacgattcaactaatttttgttgtctttttttcccctttttaacgaggcaaaatagtagaactatttttctattttcatgaaattgtagaagaaaatagtaaaatttccgaattttcctaatctatagtttcactttaaataaaataatacttagcgtgacgaaggcaactggcttattcaactttatgcgtttaataaaagataaaataaataataatttcgtatatatttctctcctttgttcataaaataattaaaatatttttgattgattctttcgaaaagtaaaaaaactcatttaattacaagaatataatatatgttaacccaccatgacaaacatatattttgacatcttagataacaagtaactaaattaattacattcctttttattttattttctttttaattttatgtgaatgtaaaaaacaagaaaaaaataaaatttatttttctctctcgcttggttcaaccgtggttgttcatcggaaaaatatcttcggcttcaatttcgttcgatttaccctaaattctcgactagtgttcgtcaatcccacttccaattccacatttcaaaccttttcaggtaatatttctcatatttttcgtgttttttttcggggtcaaacttattttttttaaaatttcaattcaaatttcgagtttgtatttagtaaccctagttcttaatttttcaatttttcgtcttcccttatgagatttagcttaattagggtattgaattaagtagaattgggtttttgtttttgttgtgatctggtgaaattaattttagggttttattgaaggtgaaatttgtttgttcttcgttatatcttcgaaattagggtttttcaaatttgtgtcgtggatgtaaaaattatgaattgcctgtaaaatttttctgtcggttgctaaatttcttgtgattttagttgatgatcgctatgtagagtttcgccttttttttgggattttgaatgttcatggtttaggattcattgctctgatttgtaggaagttgaaatcaaaagcatgaatgcttaaacagtttacgcattattgcgaaatgcaagccgagctgatacccgaaggtcctaacggtgagggccgtttatcaaaccagaacagcaaccctaatttactctcttctgcttctatcagtattactcagtttcctggtatgttgcattgatttaaaagttgtgcttgtatgcttgttttgttagcttagttgattttttttaatggaaatggcgatgttgcagctaagaagccgactaggcaatgggctgcttggacacatcaagaagaggaaagtttcttcactgctcttcgtcaagttggaaaggtatcaccttgacgttcttcttctctatgttgttaacctgttatgtgtgtgaaccttctctttgtgttgttttgtagaattttgagaagataacttctcgtgttcagagcaaaaacaaggaccaggttggttgttttagttttgtgtttgttttcttttcgcttgcacttgctggtgtttgcttttagtttctgatggttgtggaaacttcttgtgatttgcaggtcaggcattactattatcgtttagtgaggcgtatgaacaaacttttgggcccggatctgagccttgatgccaagaacccaaaggacaccaatgctgcaatgctacgatggtacttgatttatacatttcttttctgttatgctttgtgctggtatggtagattgttacgttatcgtaaacaaatgatgaatatcactctccgggtatttttctagataacaagttatagcatgttatgatactatgagtattattaagtaggcatggtcacattcgtttaagggttccatttgcgtaaagtaatttctgtagtatagctatgcatttcctgctagtgacaatataatgttaaggtaaggttttttgtttttttcatgtgctttgataatatctgccaggaacctcatacatgatcagatagtagcaactgacttatatttcagacatcatagcttcttccattctcctagatgacatgatttcacatatcatgatcttaattatcactcagctcgtctgactaaagtaaacatgctttttcatgtg

SEQ ID NO: 45079 - DNA, 593 bp, Arabidopsis thaliana landsberg
aagatttggtatattctctaatcaaaaaccttactaacctattaaaacattataaataaacgttcatttctcctacctctaaacacaacacaccaatacaattccaatctctcagattgaatctctagctttaaacgtgaaaacaatacagtatgagacttcagacttttatttagtttttttttgatgttttggtttatgtttttgcattcttagtaattttgtgtgtgataaacaaaggatttttatatatctaattagtaaccaatgaatttgtctgaaaacttattagtcaagagaatgtatcggtgtttaatatcaaaaggtagaaagtattttcaattcctaaatattagttcttgaatattagctaaagctaattttcatttgtttaagtgtcacatgtttctagaaagcatgtagataagtcctgtgatttaagggataaggagaagcataaggaatgaatgaaagaaaaagacaaaatcgggtgaatgaatgaatgaaggtaacaaaatcgggactcaaacattagcattgatcgtgtggccaccaaggtgcaaaaacaatattttaagccactatgtaaccag

SEQ ID NO: 45080 - DNA, 2031 bp, Arabidopsis thaliana landsberg
ttatacatataattagaattggtagaaagtttatctatctacttaataaatttaaattgtttaacattaaaccaaaaaaaaaaaaaattaaaattagttctcttaaaaaaaaaatacaatttggtaaaaaattaatgtaattgtgtttgatatatggtttgcaagtaccttactctgtttttaactcttgctgctgcactagtttgattacagagaaaacaagagttacataagaaggagagaatcgaaaaatgctttacataatttaactctcaagttgatgtcatcaacattcattcttggtttgcaattacaaagcggacttgttttatagagattataaaagttttaagaaaaatttattgaagaccatagacaagcaaagctccaacagctccaagaccggccaataagccaacaatgacaccaattggaggcaatcctcctcctatggcctttcctgtgttcacgtcatacttagcaaacctcttctttggtgctatacattgaggacatacgtatgtctccggctgaagaaagaacaccaagaaaaaaaaatcgaaaacttagttataaaaatcagaaacatatatgcagccaaaatcaaacttgtatataaactaaaagtaaaggattgagactcacctgttcatcaaaagatttgggtaaagtgtatatgaatccacaatcaagacaaatgtgagtagctcttgcctgcaaaagagaatgtaatggtgttaagacaaagcaatcagtcaagtttctaaaaaggggttttaaatgcaataattcaatctttgaaacaacagattgctactagccttctgagtctcagttaacttccttccaaaccgtggaggagccggacgcttatttagtttcttgacatcaacttctgcacctctgtgtttgaccaaagatcataaattgcatcagaaaccaataaagaacctcaaaaagcttaatgaataacctgaggtgctaacttatgcagcttgttaagctaagcattgcgaaaatctaatgacatagcataagaagagaactaaacctacacattgcacaccaagaaaacttaccaactatagcatcagaccatggaatacttaatcaagactacagcttttcacaggtttcttgtgcacaggattcaaaggaaacatatttgcgacaaatttgatcatttcaatctaatccttatttcaaaaagcagaacccacatttctagcaagataataccaaaataaaaacaagagaggcaatcacaaccacactcaaacttacctgctaacaacaaagtagacagaatcaggttttgcctgaattgcagttttagtaaagccaagcttatctgcaggccaaagctcatctccaaagaaactgcttgtgtacacaacttgatctccagatttaagacctgcttttgctgcgttcccacctccgtccacaccctgaaaaccaaaagcaaatccctcaattttatcaaacaacatatttacaaagatgacattccattgcagagacttaagtggaaaaaactcacggtgatgataactccaccgccttgcttctggcctagagtcagacccaaaggcttgtctacttcaacctctatcgtcttcgaagctgctgctctcgctttgatttcgaatcttctcaacccatttaaccctccgatctttctctcggagacagcgaagatctctgatacactcttcttcgaatcttccaacgaaactccttgaaacacagttttctaaacacacaaaccaaaacaagagaaaaaaatatacatacttttagatgaagaaaagtccaaatcacattcaagaggaagaaaacgagaaattgaactcgaccctccattgaaaacaaacttctaattgagaatttcagattcgtttgtaaagatatggaagagaagatagagccctgtgataaaagagaaacagaggaatagaatagggagatgggtttgaagtagtagtagttttggtgaagaaggaagaggcagtagcgcctaaaatagca

SEQ ID NO: 45081 - DNA, 528 bp, Arabidopsis thaliana landsberg
  unsure (1)..(528): unsure at all n locations
nnnnnnnnnnnnnnnnnnnnnnnnnnnnnnnnnnnnnnnnnnnnnnnnnnnnnnnnnnnnnnnnnnnnnnnnnnnnngcttatagaagctttgggttgagaaatttcaggtgcattgtgaccatcatagaaactttggaaagggaatgcccaagggtaggcccctgagctgatatccttngctctctctgccagagattgtatcggttatgtaggaggtccccatatacgtcttcatacacgtagaaaggctggtagaaggagcagaaccagtggggtagagcatgttctcccagaccacattgaatacatctctgcagttattgacaaggttggtgccatgggaattgacacccccagcgtcactgcattggttggtgcacacagtgttggacacacccattgtgtgacgcttttgcaccagttgttcccacagattgatccagctattgatcctgacctcgtccctgacattctgaataagagccctgatgacattccagaccctattgccgagcattacgtgaga

SEQ ID NO: 45082 - DNA, 554 bp, Arabidopsis thaliana landsberg
gcaaaaggtttttagggttttgggaaaaccacatgcaaacaccaagaaaagctgtaaactttgattcaaatgtatatatagtcacttgattttgtaggatactactatgtatatgtgtatgcagttgtacgcatatgtaagtaagtgtgtatgtagagattgatagctacaagatccttttcaaaagaaataaaagaacttgtcataagagaaattaaccgacactgagtatctatctttccttccgtatatatctttgttctttattcttttatttcttttctgcttcatatgaccactaattaggacatatatttatacaaaagaaaattattacactgatcattcttaattgaatttcaggagcttagttatagatcttacaaacatcgggaaaaaatgtttgtaattcagaatttttgctctgctatgatttttacttactcgatgcatccatttagtcacaactacaaattacggctcatatatgtatatgtttatataaattattactgatcaactttgttggggtcagagagagaaaatataagatc

SEQ ID NO: 45083 - DNA, 539 bp, Arabidopsis thaliana landsberg
  unsure (1)..(539): unsure at all n locations
nnnnnnnnnnnnnnnnnnnnnnnnnnnnnnnnnnnnnnnnnnnnnnnnnnnnnnnnnnnnnnnnnnnnnnnnnnnnnnnnnnnnnnnnnnnnnnnnnnnnnnnnnnnnnnnnnnnnnnnnnnnnnnnnnnnnnnnnnnnnnnnnnnnnnnnnnnnnnnnnnnnnnnnnnnnnnnnnnnnnnnnnnnnnnnnnnnnnnnnnnnnnnnnnnnnnnnnnnnnnnnnnnnnnnnnnnnnnnnnnnnnnnnnnnnnnnnnnnnnnnnnnnnnnnnnnnnnnngaggttttctcccgccgggaaataattgtgtttcgggggggagaaaaacacccctttggggtggaaaggccccctttcctttttgggggggggggggggggaaattttattttttggggggaaaaatcccctcgcactacccccctggggagggaaaagaaaaccccttcttttcttttttttttttaaaaaaaaaaaaaaccttcttttttggggaaaatatattttttttttttttttccccccccctcttataaaaaaa

SEQ ID NO: 45084 - DNA, 496 bp, Arabidopsis thaliana landsberg
agacatggaaatctaaaaacaacttttagaattggattgttttggacaaaaaatggtttttaattttctatttctttttggttgttttggaacctttttcgcatcaatgtatactataaaatctgacgaaccataacaatccataatatacagaatatggtacagtatacttacaataactaagtaaacctttacctacaaatatacggcccaagattaaaaaaacgtaaaaaaaaaaaaaaattaaaaaccgtaagattaatgtcgaagttactaattacataggtacaaaaagactattattacaaatggacctggccgtatcttttcaaaactaggcttcttgtgtttgtaattctttatgtcgactcacgaggatttagcaggaatgatatcataatatttttattttgtaaaggaaaaaaaaaaaggtcaacactgatcaacaacatctgctatttgtatagcacgtctttatttcaattttctagattcg

SEQ ID NO: 45085 - DNA, 540 bp, Arabidopsis thaliana landsberg
aatggtttaaaattaatttccgtgggatttaaagatttttattttgtgatcaaggtggtttgacgtgggactgtagctagtctaaactagctagctaggctaacaaccagtaataatagctgaccaatcatcaacattcatttctttggatttaataaagaagctcaataacatcgactgactaattattaaaatgataataaaaactatttagtataataatcgtcgtccacgtcagagtttcacctttttctctccggctttgcatggctctttgtttctccttatctccctcccttacctattatacttcctctacaatttcattgcttcttgataagagctctctcttctttctatctcttgggctttaatttgtctctctctttttctctagcaatgcttggaagctatagagaagtgagtattagtgtctctctctttactttcactatctttgattagaggtgtgtgtcggaaatataaccggactaatatacgtataacttatagttattctatcttgaccattgatatatg

SEQ ID NO: 45086 - DNA, 600 bp, Arabidopsis thaliana landsberg
  unsure (1)..(600): unsure at all n locations
cttttcttctttttctcctacttccaaaattctctcttgtcttcctcttaagatgaaagaatcataaaaggaacccaaagaaaagcaaaaacataaccatggctgctccaagatcaagaagatgctctctttctctcttaacctcttttctccatcactcttattcttatttctgtttcactctttgtctccacaaaaccagctaataagcctttcctcgattacagaaaccagttttctatttccatctctatctcttctcctcttgaacaaaacacaacaaacactagttttgtctcagcctctcctcctttgtcccctcttggtcagagcaacacaacaaacactattcttgcttcttcttcttcttcttcctctttttctgatcaccaaaaccaaaataagtctccaagtcctacaagtaaaaaaattgttatcagggtatgtaatcattctttctctctttggttttttctttgtcaagtctcacaaataaataattttgtattgatcaaactctntttctttctaatacttttctttgtcaaagtaaataataatctttacttttattttactatgatcagaaaagaagtgggt

SEQ ID NO: 45087 - DNA, 484 bp, Arabidopsis thaliana landsberg
  unsure (1)..(484): unsure at all n locations
ccgcccacgcgaccaccctccagcgcacgcttcaccgtcagcatcttctgtacccagcttacggccgttgaggttacggatggcgtagtccgaaacggtctcgtcagcgtactcacagaacgcgtagccctggcgcgaggcacagatatgatatgttattaaaggcggcgtgaataatgtatgcatgactggggtgaggctcagcaccggcagcccagtactgcgtcagcaccggcagcccaggactgcggatggcggcagagctatagacggggaggcaatcaagcaacacctatgcatgcagattggcatactgatcgtgctgacttcatgctgtgcttgcccatcagcaaggatgcatactagcacattgcatagctgtagccgtagctacgtgacgctgttgcagcagtgcgctgcacgctcccgctgtgtaccttcgacttgccggtgacctnnnnnnnnnnnnnnnnnaagctcttga

SEQ ID NO: 45088 - DNA, 468 bp, Arabidopsis thaliana landsberg
acccgtctaatcaccgaagcgttcgcgacaaggcacgaatacaggtagcgctgagacgaccgggatcagaccagtatatccaccttttaaatatagggtggaagtttatatatgcatcttccgactgactacaagcaatttatcaaaatctggcatactgcaattcggacagggtaaccccaatgccaccaaggaacaaccgtatctaaaacgcgccggtgaaactccaagagagaaagatttcaagggaaggcgttacacccctaaccgactatgctctcggttaacgatgcctcagggagttaaattgcctcagaatgtaaaaaaatgggtgaccgagattttattctctggacgggaacttacccgcaaccggctgatcggggtattttccttacgatgcgagcgcccggggcagtctccgtggaagagctgcctattgtgattaatgcatatgccccgggtagt

SEQ ID NO: 45089 - DNA, 845 bp, Arabidopsis thaliana landsberg
tcttcttatgctcctttctctttctatgagcccttttgtaaacttcctcctcgtcggaagaagaagaatctgtcctacgtctcaataaaggtgatcgctctggctgaatcactagcttccgatctcctgtatcagaagttcttgacaattccctctcaggaagacagggtagcggttcatccatcatagcaccaacagaacctctgccacgcttgaccctatcatagaccagaatcacaagttttatcagcaaaagccgatcccaaattcgatcattattgtaaaggaaataatcaggcagcatctgagtataatggaaataccttgattggagaaaagtcttaacctcgacatctcctaagccttcatcatcatcatcctctgattgccatcttttgcttctgctccggcttgatgatggtgataaactagtagtagtaacattctcatcaactgaagtacatctctttaaaaaatccctcctattgttctgctcactttgaccattgctgctctcatctcttgattttcttttgagcctttcaccaaactcaatctctttactccgaagactccacatctcattggtttccacagctttgtttgctgaatggaataaagaagaaacaaataagagataaactaaaaaaaaactagattttgttggatagaagcaaagtctgtcaacaaaagattataccttgctgaacaccaagaactgtagcagtgagaaatctagagttaggtcgatgccttacattaggcttctcaagatatgctctgacgccatctttctcagcttgtctcctcaattctgctgcttcttttaaaagatggaagctatt

SEQ ID NO: 45090 - DNA, 723 bp, Arabidopsis thaliana landsberg
tttgtgacattaaatatgtgaggttactgttttgctgattattcatgtgattctacagagaatctttaaatggttggcacaattgttactggctgttaactatttgcactcaaaccgtgtagttcacatggatctaacggtatatatttaaatcctagtacattactcttgctgatgtgtgattcttttttgtgttatttcttgaagaatggcttctctgattatcgattatctatgcagtgttcaaatattttcctgccgaaagatgatcacgtccagcttggtatgataaatgagaatactgaatttactcttcattggaaactatatatttgtctttttatgcactagttagcttttaatctctactcatggcacaggtaattatggtctggcgaaacttataaatccagaaaagcctgtttccatggtgtgttatctatacctttttgttttctatttatagtatctctctgcacccatttgtacatctagtatctcaaatgtcagttctttttagattatctaattaagagtactttttgcataggtttcgggtatctctaacagcatgtgccctgaggtattagaagatcaaccatatggatataaatctgacatatggtcgctgggtaagttaagtttgaacaatgtagacttttttatgtcattaaaaggaatcacatttatcctgctttgttcacgttgttgtatgtatgaaat

SEQ ID NO: 45091 - DNA, 460 bp, Arabidopsis thaliana landsberg
gccgacctcgccgcgctgaaggcccgcctcgacgggctgggctggaaacgcgtgctctcctcatgcctgcagcacggcgacatggacctgctgatccgctgcgccaaggccctcgacgccagatacatccgcgtcgcgctcacccccatcctatgcggcgaccgcgcggcggccgggcagaagtggcacgaactcgtcgcctcggtaaacgagaagctcgaggcggtggtgcccaagctcgaggccgccggcgtcacgctgctgatcgagaaccaccaggatttcacctcgcgcgaactggtcgccctctgcgacgagtacggcccgaacgtccgcatcgtcttcgacatggccaacactttcccggtggccgagagcccgctcgatttcacccgcgtcatcgcgccctacgtgcgccactgccacgtcaaggaactaccgcgtggtgatggagcccgac

SEQ ID NO: 45092 - DNA, 495 bp, Arabidopsis thaliana landsberg
tataaaagtttcattgtagagtctctccttgtatgcccaaaatttatcattgaaatgctcattctgcaacagagaatgtaattgataaatgtcgaaaccataaactcaatttcttctctctagatcaatgtacaaacaaaatctcgaaggagaaaacatgctaaagaatcaaacaaagaattctagagtaggtacgagataatttgcatcaagacagaaatagggaatataatcataaatacataccccaggagtctgaaaagcatcatggcctggaagcatttggttctcagatgtcccctgaaagacctaataaccattggaaaatagcaaattagcgttttctacttactgtcctgaagtagttttgcatacttttggaaggccgaagaaaaatacaaggttgacaaaattaaaattgataaaacctaaacatcactaaaagaaacaagtaaaggcactactcagtttggtgaaagcctgaaaaatgataaa

SEQ ID NO: 45093 - DNA, 901 bp, Arabidopsis thaliana landsberg
aaaacattgtagaccactacgaaacggattaatcagttttgacacttcttctactacatatacgtgaatgattttccaagtttcttgaagatgactaaaagagtcacacatctccacggggctgagtgggacacacattgcccaccatttctattacaaagtatcttttaatccaataggacaaacgctgaccaaaaaaaaaaaaaaccaatagggacaaacaaaaaaattgaactcctattgatttttattttaccaatgggggaaaagcaaaacctactccccaacttgctccatcaattattaattttctcttaaaacttttttctttagcaacttttaagttaagtaattattacttgacatcttctctttaactatgcgtttagaatctttctttgtatttaacaactatcaaatagttctcctttcgagggtgtacacatggaggactaatcagatcattttatgtaaacaatgggagaaaatacaccctctctttccaatatcgttgggtttacaatgtaacgtatcaaattaaaagcaagtaattaacaaagtcagcggcgaaaattcaacttttatattcattttttttataacccttattaatttgtcaactctacttggtccctttattattggctccaaaactctgcctaataaattatattgattccaaatcaaaggcattttttaataatgattagtgctaattgctgatattttctgacttcttacatagaaatatcttttttttaaagactacatgttgagaaattcgctgcccaaaattctcaaaaaaaaaagaaatggaaaaaataataaaatctctttttctcttactctagaatatgggaatctccgtcctccaacacccacgtagcctggaacagagaca

SEQ ID NO: 45094 - DNA, 575 bp, Arabidopsis thaliana landsberg
  unsure (1)..(575): unsure at all n locations
nnnnnnnnnnnnnnnnnnnnnnnnnnnnnnnnnnnnnnnnnnnccacgcgtccgcccacgcgtccgccgcctcatctgctctcttcccccgtcttcttcccaagcagccacgttgcctccctcagctccagcggcccatggcctccatggcgttcgccctggcgggggccttcaagggcctctccctggcgcccaccaccaccacctcctccttcccgcgctgcgaccgcgcctcgctctccgtcggcggcgcagcgggcgtgccggtgccggtgccggcgcggcggctcaccatccagatggcgcacaagaagggggccgggagcaccaagaacggccgcgactccaagggccagcgcctcggggtcaagatatacggcgaccagctcgccaagcccggggccatcatcatccgccagcgcggcaccagggtctatcctggaaataacgttggaatgggcaaggatcacacactcttttctttgatagatggactcgtcaagtttgagaagtatgggccggacaagaaaaggttagtgtttacccatatgagatggaagcctgatacccaaaca

SEQ ID NO: 45095 - DNA, 636 bp, Arabidopsis thaliana landsberg
ggcggcaagggctgcaagctgagagaagcaacgctcctcatcatcatctttaacagttcactgatggtgcatagttgctgatcattcatcatcttcttgatttcgtcgagcgtagaggtatgatctccgttttttgccatagcgattcctattctagaggcccctcctttcggcgccaaatgatggatgccagaatcctcccttaagaatttcttgaaagtgtgtagtattaatcgtgatagagttatgttacaagattttttcgtccaccttacaatacaaacccttctctatgtatatgtgaaccttagactatattacataaatgcagccattttcccgctgtgaatacacttaaacgtaacttgcaatccgcggaacgaactattaaatgcaagatccgaagaaccgaatctgaatggaaccgatccatgtaactaaatggccaagcttatccctaatcctatatatgtttatagcattgagagtgcttcctggaaaagttccaaggaatcaaagagaaaatgtgtgaatgaaagaaagctttttcactgctctcattccacgtcacaaattgagaaatgaagtcgaacagactttgaagattatagaaatgaaaaaacttcgtatatacct

SEQ ID NO: 45096 - DNA, 663 bp, Arabidopsis thaliana landsberg
  unsure (1)..(663): unsure at all n locations
cccccccccacccccccccccccccccccccccccccccccccggattccccgggccacccgggctcccttggcgaangcgaaccccccccccccccccccccccccccccaccttttcccccccccggggtacgggcgccccccacccacacccnnnncccccccccccccccccccccccccccccccccctccccccccccccccccccccccccccccccccccccccccctctcccccccccccccccccccccccccccccccccctcccccccccccccncctttttttcctccccccgccgtttgtttccccccccccccccccgccgccccccgccccccccaccccaccccccccncnnccacaaccccccccccccccccccgccccctccccccccccctccccgcggcgcccccccgctcctcccctcgccgcgcccccccctccccccccccttccccccccccccccccccccccccccccccccccctcgcccccccccccgcccccccccccccccctcccgnctctccccccctccccccccccccccccccccccccccccccccccccccgcccccccccccccccccctctcccccccccccccccccctcctccccccccccccccccccccgcccccccc

SEQ ID NO: 45097 - DNA, 592 bp, Arabidopsis thaliana landsberg
  unsure (1)..(592): unsure at all n locations
ctgcctcatatctctctctccacgccaaaaatgtctctagcgtaacaggttctccatgagggacaattacctgcaaaaataaaatttagacaggaagagaacaagcgatacgaaggcagacacatatatcatgcaaaaaagacttgaggttctttgcagcttatatctgaaatactgagcagacaacaatacctcatcctctttggcagcttctacttcggcaaattcagctgcatcatcttgcccatagtgttcagacaaccagtcctttgctgatgagaccagtgtatagatcatggccatacctagattttcagatgcctgtgaaaaatagctttgtgttcaggcatgcaattcggtgtagaaacagcatagaccagaggccttccagttttatacttcatgtataaaatttataacaagccataaagttgtacaaatatattacctcttgttcaagcttctctttcaagatggtgaggtcactaacatggattcctcgaatactggaagaatactctacccacatgagtgtcatcatcatatatctgttttagcttgataaaattggntaaccaagaattacctttta

SEQ ID NO: 45098 - DNA, 832 bp, Arabidopsis thaliana landsberg
atatatgtatttaaaaacttaaaaatagaagagttgtacgaattcactaccgaaatagacaagatttattttggccaataccaaaattaatggtatataggacatgagtgagtcggcttaaagagaagaaaataaaaagaaataagaaataggaggagatgtaacagaatggaaaacgaaaggtgtggaaattgatttgagaagatgtcgcctaataatattaaccgacaattagtggcctcttctctgacttttgacttatacactgttttttcacatttgttggtgctctctcactcccacccaatcacggcccttcttttctaatcttactctataaaattcaatattttttttaaaaaacttatagtgatcatagtgtggaacatttgcttcaatagttgacctagtaatttaatagtatctatatgatgtatacaatgttctttttgttgccaatatcgatagaaaaaaaagttttaacttattcggaaaaagaaaacaaaaaatattatagagtaggttcttgtggatttgaatcgatttgtgatttgtgaatactacttaaataaaattatgtaagattctacaattagtgttttatgtggttagagatgataaaaattacagttagatgattaaataataattccgttgatacggattggattctctaccataaagaattccaattgtttatgttgatgagaagtgtgatcagttaataaagagaattaagacgttaattaagaaattgatatgtgcaaaaattaatagggcatcattaggcaaattaaaaagaataatagagaatggcatttaatcctatcaa

SEQ ID NO: 45099 - DNA, 193 bp, Arabidopsis thaliana landsberg
gtagtatgtgttgtgctctctagtgctaatactgtgttacttgttactctgtgtttctggtgtgtctgctgtctcttgtattgtactatgtatcctatgttatatgtcttctatgtctctgtgtctatgttcgttctgtgtgtatgtgtctgtacttatgtatgtatctgtatgtatatgtctgtctatgtct

SEQ ID NO: 45100 - DNA, 524 bp, Arabidopsis thaliana landsberg
catttgggtttatgttattgcttgtagcgcgtttaggagtgctcagactgaggatgggttccgcaaatacaaacaaggttgggtctaaaatgtgtgtttgtgtctataaatttgtttgtagtttgttgagattggagttttcggaaatagctcgtcatattatgatttctttgtgtgtggaaaaggtttttttctttttatggattttgtttctatgtttatcagtttatgttcgacaaaatggcacttatctatgtaaacaaacaactgaccctaattggaaaactgattgttgtcatagagttttctcagtttcttctactaagaaaaacttaaccgttggttaaaacgtaattatcaacaaagacttctcttttggtctgtgacgttgattccaacgataagaacaaaacctaatctttgttttcttttgtcaacaatagtactaacacctttgttattaactacttttttgggaacttaaattgacaaccaccgaattaaaatgtttaatactatcaaaa

SEQ ID NO: 45101 - DNA, 248 bp, Arabidopsis thaliana landsberg
attcacggggcctgaaacgatcagcacatcatactgacaactgagctaacttgatttttgggcctttgaccacagagaccagctttcgcattatggctctttcatatttgtacatgggtaacaatcatattgtatgatacacgagataacaaaactgatttgccatatatggacaatcaccattggtggatatcgtcgttagccctgagcgacacgaaaacttaaccttctgttcttgtatggggagt

SEQ ID NO: 45102 - DNA, 660 bp, Arabidopsis thaliana landsberg
atgggcagaccgctgctttctgtgaggttttcaccgagttttctcaggatctatttcaaaatatgtaagattctgtgacaaacactgtgcgagctgtgcttcatgcttagaaccaagcgcaaccacaaagacctaatcggaataatctggtgtttgatgaagattcagaaggggatgatgacaattcgtttgaagttggaacctagcaacgtggaaatcagcaacaagcgttaggtgatgttctcggaggagaaaatcaccgttgggagtccggtttttggctcgatcttctggagttctcgggtagcgtgaaaccagaagagtttctcgattggttaagtgcgacggaggagttgttagagtttaaaagtgttcatgttaacaagtgtgttcctcttgtagcaccacgtttcggaagcaaagcttcggcttggtggcaacaactcaaagtccagcgagctaattctcggaaaagtagcgtggatgcatgggaaaaactgaagaaacatatgccgcgttactttcttccttataattatgcatggatatcttacacccagcttcaaaatttaagacaaggaaatcgaagtgttgatgagtattcgtctgattttttttctttgcttgctcgcagaagtttttctgagacagaggagcact

SEQ ID NO: 45103 - DNA, 625 bp, Arabidopsis thaliana landsberg
gctaaacgtgatttggatgctaactaccgagaacatgagcctcgccgatccgaagcagccagcgtttatagtttgaagaggagcttctgaggctgaatcttctgaccagagtagtcaaaaggtatctatcaatgatgtgagcctcacagctgtaacaggacgttaatctcagtctgtttatatacataatagtatgtaatatacacgttttgagaaactcctatgtttacaaattttgttatctgcgtctgtgcaatggttagattactgaaataagaacagagaagttattttcaggtttatgaactttgttgaaacttgacctattcttacatataatcagatttttggaattaactaacctggatgaagaaactgaacctgaagaaaacaggacaagaacaaaaatcccttgttcttgagaaaaagccacagcacataggttttgtcttgagaagaaagaattaaaacacaattattggttttgtgtattggttgctttgctataagtatatgtatattggaacaaacttggataggggataagaaaataacatcagttttgactttttcgtagatacattaactacataacaaccttgaattttctgcacaaaattattta

SEQ ID NO: 45104 - DNA, 531 bp, Arabidopsis thaliana landsberg
  unsure (1)..(531): unsure at all n locations
tatcagcctaagagaggttacattgggctggagtattacgggaggactgtgggaatttagatcatgcctgtggggatcaacatgggtcggattcaatcggtgatgagatattcagaagaggagggtaaggtgatggagctcagaaatcgcttcgaaggtaagacagtgttgcnnnnnnnnnnnnnnnnnnatattttcaagggtataaacctgaagcttctagcaatggaacaaatgctgaggcagcacccgaattggaggggaagggctgctctggttcagatcgtaaatcccgctaggggtaaaggtattgatgtagaggaaatacgtggtgaaatcgaagaaagctgcaggaggatcaatggagagtttgggaaacctggatatcaacctatcatatatatcgatactccggtttcgattaatgaaataaatgcttattaccatattgctgagtgcgtggacgatacagctgttagagatggtatgaaccttacttcctacgaatatatggtgagcagacacgggtta

SEQ ID NO: 45105 - DNA, 435 bp, Arabidopsis thaliana landsberg
  unsure (1)..(435): unsure at all n locations
tatgtatgtgtatcccctttattatgtgcttgttgtgtgttgtctttgttattgttgcctactatacttttgttgttgttattgttgtttactctgtttgtctattttgttgtctcttattatgttattactagtttattgctatacttacttacttattactatttattattattgtgtgtcattcttctattaatgttcttcatgtatattctttatatatgtttattgctactacttttcttgttctacttattgtgtttccttctttgttcattgtctacattaatattttcttctcttgttttcattaattatgttttactttattgtttacatattcatgtgttgtcagtaactattgtaattgtgtataatctttgtgtcnatgtctctatgttcttgtgtatagtcttgctttgtgtaatatatgtg

SEQ ID NO: 45106 - DNA, 657 bp, Arabidopsis thaliana landsberg
gatttgtcgataagggtagtcctcgtgcgttggagtttttagttaggatgcagagagaaggacttgtgttagacggttttgctttaccatgtggtcttaaagcttgtagttttggtggcttattaacaatgggtaaacagctgcattgttgtgtcgtaaagtcgggtctagagtctagcccgttcgcaatatctgctcttattgatatgtactcgaactgtggctctctaatatatgcagctgatgtttttcatcaggaaaaactggccgttaatagtagtgtcgcggtttggaattctatgctctctggatttttgataaatgaggagaatgaagcagcattatggctgcttttgcagatatatcagtcagatttgtgttttgattcctacactctaagtggtgccttaaagatatgtatcaacttagtcaacttaagactcgggcttcaagtacatagtttagttgtagtaagtggttatgagttggattacatcgtaggaagcattcttgttgatttacatgcaaatgttgggaatatacaagatgcacataaactgtttcataggcttccaaataaagatatcatcgctttctctggcttgatacgaggctgtgtgaaatcagggttcaattctttagcattttatgctgttc

SEQ ID NO: 45107 - DNA, 936 bp, Arabidopsis thaliana landsberg
aaaaatccgggtgaaggtgaagttaccgaaagaaagaagtgaagatgaagatgagtctcctcagcctcagaggaagcacttttgtgtgatttgtgagaagcagtttagctctggtaaggcttatggtggtcacgtgaggatccactccattgagtacaataacaagggaaagatgaagaagatgaagttgaagaagaagaagaagagaaagattggtttggtgaagaaagagaaggagaaagagatagatctggctaggactgacgtggaaggtaagattaggtgttgtctttgtggaaaagagtttcaaacaatgcactctttgtttggtcatatgaggagacatcctgaccggacttggaaagggatacgacctcctccaccatcggagaagttcaatctaagctacttggatgatgatgtcgatgatgaagatgaggatgatgatgatgtgatgagtagatccatgatgatgagtgatgtacccgaggatgttcagggagctgcttgcattctaatgatgctctcttacgcttcaagaaattactgggctgggatagaggaatcaccaaaatccgaggtaagaagttcgagtttctacaaagatgataaaggaaaagataaagtattaggagatagtaggatggatgaaaagaagggtttgattgtagatatgaagataaagatggaaatggaagtgaaggtgaatagtcctcgagatgaagctaagaggtcattagggtttgatctcaatcagcctccttaccatgaagatcatccttaattccagttggaactagttcaattggtttcgcagttcgatttcaaggaatggagtagattaaagttctaacatgtttcttaatgaatttacatccttctacctaggcttttgtacataatgaaatccttgtttggttctagtcatatttcatt

SEQ ID NO: 45108 - DNA, 462 bp, Arabidopsis thaliana landsberg
gtggatggccgggatataaacaaagcaccccaattgcccagcctttgtaggcaagcgacatcacgaacctttaactaactgagacaaaatcaacccaaactcgaaaacaatgccctcgccgctaatacaagatttgcgcccagtgcgtaaagccaggcgcctccaaatgtggtgcaactccaacaaaatccgaccaagtttcaataaccaaaccccatcaaccacaccactcacactgtcaacgagcccgattcttgcgctcatactccaactcagacatacccattccgctcatccttcatgctacgcgcatcaatcctactccttttcggctggacctgaaatagtctgccttggaaagaaagcgactgcgtacctaggaaccccttgatccggtcctcgtccaggaacttgatccagccgttgtttaagtagaagctttggtggtagtcttttcgattg

SEQ ID NO: 45109 - DNA, 442 bp, Arabidopsis thaliana landsberg
tccttggtctactctttttcttcccaccactcccacttccctcattcattcctttcataaccgcttcctttgccgcagccaaaatcaaccccgccgcaagaaccgcttgctcattcaaacgcgctttttctgcatcttcctcaacgacactactactctcaccaaatattctactgctgatattcaaagcagggaggccgagaacaatttctctcatattggtttcttcatcgctccattgctcatcagattcctctttctcttcctcagtaacatccactttcgttttctctgggttcggattactcatactattttcgcactttagtctagggattgatgtttcaaaacgacattgaattagcccttatataaagttttctctgaaccatggcggttatgacagttaattcctctcccgccttttcgtttgaagatttgc

SEQ ID NO: 45110 - DNA, 556 bp, Arabidopsis thaliana landsberg
gctttcggatggcgttgacattgttcgcacgcagttggacgcaattttcaggcattggcacagtgtgtgcgatgaagcgaatttgtcggtaattgatcgaaatcgcctgctaagtggtgcctttttgaatccttttgcctttacagcattgccggcggaggctcagactttgcagaacctggcgacccatgctcgtgaaacgatgggccaagcgcgacagtaaaccaagttgctttctaatttagaagatgtcatcgtcaacctaactgtgcaaccgcttttattagaaattatttatttaaaataattattgcttttcaataattttatataaagtcctttggtgcaatgtttgcacagggccgctggcgcgattgtgacgcgttttcataaattgcgccataattgcgccaaatcattataaaatcgcgccaatccaatcatgtcaattcagcaggactttttaaacagcattcagtccgcaagtcagggtcttaccctgtctgagctgttaaacatgcaccccgaggtttcgcgacaacagcgcaacgggtgc

SEQ ID NO: 45111 - DNA, 550 bp, Arabidopsis thaliana landsberg
  unsure (1)..(550): unsure at all n locations
aaattttataacactatacttttgtcgattttaatccattcgaagttaaacccttagttttaaatcgataccgatatttttcctacataatacataaactctctacaaccactaaagtaaactccatacaataattttcctaattttcttaaattttagtatcaaaattaatctctttgtttttactactctaatgattaatgctaattttgattttatctttgacagctacgatcctcttgaaaacagctccggtgcaccttcacccatatcttccaacttcattttcagttcaagttttgccataaaacttctcgcttcaacatttccctccttgttgattatgtgtttcaatcaagcatttttgtgttaaatcacttttgatgtaaatttactactctttagtctctaacacatactcatcaatcatgctaaacatgatcgaacatctaacgcaaaccagaatccaaaattcatcgatcgtacaaaaatcaacacactccaagaaacctttatatcaaaccgaaagaaacaccagnttacttcattc

SEQ ID NO: 45112 - DNA, 650 bp, Arabidopsis thaliana landsberg
  unsure (1)..(650): unsure at all n locations
tattccacgagatattttaattacttaaggtcctactgaaacaattattaaacacttcttctattgttgtaatagcagtgtactcacttgaataaaattagcaatttcttatagtgattttttttttaatccatgaatattgttttgagaagattacttgtttcgaaaaatatttttatacggtatatgcgtgtgcattaacatgcatcgttaccctatggaagtggagttaggtcagcaaactttaatgactcattattccacttaaattctcatttttcgtcggtttaatcaatgtattaagtagccttaccagtactctatgtctacggtgaattcgtcatactccacttaatgtcattgggaacaaaagatacttgaaaatacttaaacgtcattagattaccttaatgtaaatattccgttacactaaaataaaagaatcaagccagattgtttaaggctgcaagcgtgtgcattttgtataagaatatgattttcaaaatactccatccgtttcaaatactagatgttgtggaatatttcttctcgtttcagaaattagatttttttttttcattgaatgttttttattttcccttttagtttaccctaatttaatctanagaaatttctaaataatatgaata

SEQ ID NO: 45113 - DNA, 716 bp, Arabidopsis thaliana landsberg
ttttttgaaacattggttaaaacttaaaagcattagagaaataatggattatgaaatctctatatacagttactagcttgctttacaactaaaaggttagttgttataaaaatttaaaacacaagccaatgaaaattttaaataatatatttaatcaatcgtttctttatattgataagacatttcaaatctttgcttggaattttgtttcgttaaacgacaatcatacataaatttgaagacagacaatttctgaagtttaaaacaaacaaagaaggatatctgaagaattggcaaactagtgttgatggaggcagatgtaagcgagaagataaaagacaagactgaattttaacgaagcaaattctacgtacactagctagttagggctatactactaaagctgacaaatacagttagtcatgagtaaaccattaactactgttagattttgggcaaacaataaatggtgtgttgcattttgcatgtgttataatatattgattagtacatttcgtagcatgtgcaattgtagaaggttttaggttgtttttcttagtactaagttctgatattacaatgggtaatccaatccctgaaacactacctaatttgctatatcttattagaatcccacgcttgattgtttgaggaggattgtttgaatctgatgaaaatcgaagcggtaaaacaaatttgaggttagaaaaatatgt

SEQ ID NO: 45114 - DNA, 700 bp, Arabidopsis thaliana landsberg
  unsure (1)..(700): unsure at all n locations
atgtgattacatatcgtgccactataggctttgaccatcgaacgaggccattcttatccaatcaagaacgtaacaggcacgtgtgggttgtgtgagagtaagtcttatatgtcccatgggaagtattattggacggtgcatgctaaagtgattttacgactaatccaagatccatcttttaaaccaatctaactttatttactgtagctagtcaatattatcttcctaatgtctcgttcgttataacttacacgaaaccgtattatcccatgacattcacgaaacaattgttcgacaaaaacaaaggcatgatgtcgagaaccataaacaactatagtactctttttttcttcatatatttcaaaaaacaaagctaatgtttcatctaccattaacctaaaaacgtattgtcatctattaatatgtctcttgaatttgatcatatgttgtttgcgatagcacatagtctcgatgtccggtcaacgagacgatgttcaggggatgatgcatttttgactcaactttgttataattggacgtagcttccgaacttaattagtcgagttaaggtttcgcatatactccgttctatatgaacactctatatatgcacaaatcggacccaaaaaaaagcaagatgatgtattggttttgttgggacaattaaatgacacatagattttagaanaaaaaccattac

SEQ ID NO: 45115 - DNA, 837 bp, Arabidopsis thaliana landsberg
  unsure (1)..(837): unsure at all n locations
aaaaactttttttctaaataatcattatagactacaagcgattaataaatgtaacatagtaaattgaggtgggggcacttaacaaatgacgtgaattacacgtgatttgattttgtacgctagttcaacaatttaatgtgctcaagagaaannnnnnnnnnnnnnnnnnnnnnnnnttctcttggaaaaaatggtagatcaaaatcccatattgatgtaaattaaaaatatagtcttacctggtaggtccaatttcatcatagggaatttttttcagaattagttacgaaaataccgtaccactatgtcgtttaaacatataacaaagaaaaaaagtagttgttttggtcaggaaaagtagttatttaatttcatttatatgctcaaaagttttgttgaaataccatatagaccgaccgacacattcaattatgacttttcaaatcaacaaaacttgactcgaaccggattcaaacccgagttattccaaagaaacaaaaaaaagatgcaattgagaggaaaagttgctaaaacaacttcaagaaaaaaaaaacagagcaaaaagtctcaaacttgactgtcaaattatgtacaacttcgattcagaaactgaagacatttctagaaaaaaaagaaagaaagaagtatgctttatatcttcaccatcctctgttttaaatcttcatgtgaccacctactaaatcctgaaccgagctganactctttggacggatgctacacttctcactgagcatctcacagagtcatgctgggttcaactgattcctctatgccattcttcttgtcttacatttgctcatccgatgaaacgtctga

SEQ ID NO: 45116 - DNA, 745 bp, Arabidopsis thaliana landsberg
aaatccaaacttagtcgaaacttttttttttttttttgtgaacttaccatcggacccaagaagaaagctcccacatcaaaggagatttctcatctctaaaagcagaaagtttcagataattccgaccaccggaagctggaaatacagagagctgatcttggaggatgaaacgaccgtgtttgacgatgtgatggataatgatcaaagacttgagagctacgcaagcatctccggtggtgtgaagacgttccattatggattcgacagctgaagaagcggtggctcgtgagccagtaccggcggagagaataacggcgaggtgacgattccccggcggcgttgaagggtcatgagtagtggcacggaggacagagagatggaaagagagagtcttgcttttagtgtttgatgatactaaagcagctttgctttgagaagctttgcctttgattctacctattagatctgcaaaacttgttattcttcccatcgatgaatcgacgatgatctactacaccaggtagatatgacttgctttgtttctcttgctttttgatggactaaaaagaagataatatatagtagttttttttggtcaataaaggaaactgttttattctatgcaagtatgcaaccaacatgggtcaaataatcaatatatatggagaatcacttaatcggcgattgcattattatttcgttggtgattggccttttcaaacctctttccatattcaaacaaatt

SEQ ID NO: 45117 - DNA, 563 bp, Arabidopsis thaliana landsberg
aagcaaaactaaaaaaaaacctatttttatttttaacaaacagaaaacaataattagttgagacagcttaacttaccactgtcgagaacaccgacgatgattccatcaccatgctttgccttcttcaaaaaatttcttcccacacgaaaccgatcatcggcatcattttttcgacgtggaacatcactgtcggtttcttcctcctccaatcctacaaattcccatgaccgtgtcgtatgtgcttcatattttcttggatggctcttgaatactgaaacaacctctgctaattctgttttcataaaaaaaaagacaaatttggttttagttaatacttaataccttttcattcataacaaaatatcaaaagggtttcattccaaatttgttttctttacttactttctagtttagaggcttggtcaggggttagctcagccgcgaagccattgatgctatgtttgtagctatacaagagcgatgctctagcgtcttcttcggattctttaaccgattgaagataaaaatgatgatgttcttcaatttcatgaaaggctttatca

SEQ ID NO: 45118 - DNA, 941 bp, Arabidopsis thaliana landsberg
ctctctatgtctctgaggttaaatcttcttttgttacgtaatttttcttatttctttttaactgttgtgcaaaaacattaaattgaaattttttttaaaatgattttaaacaaaataaaacaatttaaatagactgagattttatgcatatgcaaatgttgacaatttaaatatttaatatttgatagaaacgtatttttacatgttttctcatcataattttctacattttgtgtgataaaaacatcatatattatgacaaagaataacaaaaataaagaaaaaataactcactattccattttaagacttattggtcagaatataaaggattatatatctccatcaagtttcaatcatacttggagttggaagtaaacactaacattagcatcatgtacagctgcatatcacatttcaaaatataattttgcaccgctgaagtatacggaatatacacctttcattgtaattaatcacaaaaattatataaaaatatgttttcaatatttttttaatgtgttattttgtatcacttttaactatttatgtactgctaatctatctttttactagctaaaaaacttaatactgtgttgtgttattaatcagatcctttttgtttaatatttaagaaagatgtttaacacctagtttcttactattaatctcaaagtagttttatctttcaaaattttatacatacactatgttcaaataaaattttgttaaatcaccaattaatatttgttagaattatactaaatccaaatccaaaataactacaaattgtgttgccccctcaattttgttaaatacacacgtttagtttttaaccccctgttaatgggtattctattttagtaacaaaaacacttatgatttgatagcattacttccatacccttttagtaaccttattttaatgggtaatcaatttt

SEQ ID NO: 45119 - DNA, 537 bp, Arabidopsis thaliana landsberg
attgtctctctttctctctttctctctcacttatcttcttcttttctctcacacaatctcactcacacataacacatttgcttactaagctttaatgaaagtagagaattgattgggtttgtttttttgggttacttattactgtgcttttttgacatttctctaacaattctgtctttttcttctcgtttaataatgatgctttcatttggtcccactccattgaattttagtatcattctccaaccaattctttttttattttcaatcatgtttctttgtaaaccgcatatacacaaaagacacacgagctttagctcggctggagtgatagtgtactgacggtggccaatttgtttgtgtattataactaaatagataacttccataatagtttttccttacgtattcacaccatctttgaaattatagtttgaactgtcatttaattttaggggagattagcaaatcttatatataatggtctttttaactgtaatgtagcataatatttcgaactgcggatgcatgctttcg

SEQ ID NO: 45120 - DNA, 614 bp, Arabidopsis thaliana landsberg
tcacggttgggaataatttatgaccatgtaagtattataatatcagacactcgtcactcaaaaagcctctacaaccaaatcttttgagtgtcttgtcatcttgtagggtccatccgtaccatcttatttatatatatctcaaagtacattgcatgtaaaagtggatcggaataatacaaccgaaaaacaaacaaaagggttttggaaaataggaacaaatgggcaagaaattggaaagaaaaaacacgagaaaaagtaagatagcgtgagaaaaaaggaatatgaaattattaaatttgctaaagtaaagtagacaggaaagaaaaagcagcaacgcgtccctttgattgataagtgttgaaagttgtgtatgatgttttttggtttaaaaagttgtggatgatgtttcgatgaagtttctaggttttataccttaactaatttaatgcacatgcatggatgatggacttgtaaacttcattaggaaggttctttgaactctttaacaattagatttgagattaatacaaaacgttttgacaaataaggtgactagctctattggtttcttttagaggtaaatatccaactattgtttcttgtcattgataaat

SEQ ID NO: 45121 - DNA, 681 bp, Arabidopsis thaliana landsberg
  unsure (1)..(681): unsure at all n locations
tattgttgttgcaagcttcatttaatcgcaatcggaaagtaaaaaaagaagagaagggaggtaaagaaagcattaagtttcatcaaccaaaaccttaattgtttttgttagaaataaacaaatgccatcttcatcttcacatcccatatggaatccaatttatgctatacttttgtaaacatacggtatatcgtagaaaaattaaaacttcatggctatataagcaaagccttttgtcgaaaatacacatgttggcaagttgtgggagccaccaacataagcatattatattcaaacaaatgttcaatcgcacatgtgatggtttagcgatttagctaccgcacaactgaatcaaaagacttgttaaattgctctcttagtcttatcataccttcatctcatatccattataatcatctttagcaatactattttatttttaactacgaaaaataaaccttgttacgccgttattaacagtgatcatttctttcgttaaagaaatttaacattcaaaaaagataaagaatgatcaccaataagcgtcatgatcttccgtatggtgatgataaacatcgtttgcagttttgttgtatagtacaacgtatatgtagccgtaacgtgtgaatagtgtatggttagggtcattntatttgtgaactacccacattttgatagcag

SEQ ID NO: 45122 - DNA, 622 bp, Arabidopsis thaliana landsberg
gagttttctgctaacgtgtgcgtcgtttgatctgagctcatggaatctaatggaagatcccaatgtggaatattcattcacgtgagattttttttttgtttgcatcaaatctcacgttggccaatctcagccgttcatttcttcatggggattttcctcccatgcatgtgggtacttttttaagtttttgctggatccagcggctacgatccgaaatttggctatgtgcaattaagccaaataaaagaactcgggttatcaagtctaattagtaattagctttaactatcctagcaatgaaaggcgttgggagattcaaaggtaaactagtgtctagtgatatgataattgtatttgtaagctacaaaggccatgcgattacgtaccgttttttgaaaaaaagtaccgtcggaaacaactatggaatgggccttcattttcaaagcctgatacatagtgatatgtaataataagaaaactatatccaaaaattgccatgtcgccgtacatcaactcatatgccatccctctaaatatttgattgaactaaaactcagaataattgacgataatataggttatttcatatatttattatatttgaatgatcgaattcgtttaa

SEQ ID NO: 45123 - DNA, 922 bp, Arabidopsis thaliana landsberg
  unsure (1)..(922): unsure at all n locations
agccgatcgcatgaattcaatggatttgataatcgtttatcttgaaatcttgatccattatatctaaacaattgcttaacccactttgacatctttaatctgaaaccgcttaggaaaaatatgctatatagaattaatatagctgattgtctcaattcatctaacttaacttagcaattagagaattaatctagctgactatctcaattcatccaatacaatcttagaatgatcaatttatatgagtttatctttcgtatcattacaatcattttggttatcaaaccatcattttggtcgtacctttatccactcattgaaaaatataaaaatatttggctccgattagtaatacgcgtaattgcaaaatgacatttttttaatacgagtatataagaatgttaccaattaagaaaattaacataatatttattaaaacgcaaaaatacagaatttttgttttcttcatagaaaaaaaaataaaaattcattatgtaaatacatattatatgtatatttaattttagacacatatatttgtttgttttattatgcaatttttcattctacaaatttatagttttgcaaatttttattctcctacttatgtcattaaaaggattatnnnnnnnnnnnnnnnnnnnnntgatttcaaatcttgaaaacacgttttacgtagtcactatttatgtaagttaattaattaataaatgcactaagagaatcaaaatcttataacaaagacaaccttacatgacgtttcttttctgtttggcgcttacaaaaacatgctactataaccaatagttatttaaaccactaaaccctaatttaacctataatatcgatttagggtcgttaagctattatttacctcactcatactaacgaaatacctaaattccggtaaggtatttaaacc

SEQ ID NO: 45124 - DNA, 671 bp, Arabidopsis thaliana landsberg
tcaaagtccatgagaaaatcagttaagttctcagcatcatccacggcctcgtctagagtcttccgaccttccttctttggtttaggctgtttaagaaaccaagctcataacatcaacacaccacacaagacatataatgtggctcaagttgaatgtgactttaccttggcggtgcgaagctcaggggtttccttcaagacactccagttcctcggcactttctcgtcgtctttttctacatctgcatcgtcttcgtcgtcctgtcaaaaaatgtccggagatgtttcagagcatgatacatcaagaaacaataaagaagaagaggatctgatgtaatcgatgatactcacatcgttttcaccaatatcaacagcttgtgccattgcatcatccatgtcaggtacctgcattcatacaatttatcgaacatatcaagcgaaaccctgaaatctcacaatcagagttgtgtcaaaggaaatgaaagattggtcactttacctcgagctgctcggttttctcttttgtcagtagtgcttcatgcatctctcttgagatgactttgccattctgatcaaatcataaacaaagaaaacaatcagaccaagaaagaaaaagaatgaaccttgagcaaagcagactaacctcctttagataagagagcatatttggtg

SEQ ID NO: 45125 - DNA, 116 bp, Arabidopsis thaliana landsberg
tgtgtatactgtatgtatatagctatgtgtgctatatgtgtgctatgtgtattttatcttgtgtcgttttctcttcctatgttgtgttgtatgtgttatatgcttgtcttactatg

SEQ ID NO: 45126 - DNA, 715 bp, Arabidopsis thaliana landsberg
tcttaagtgttctttaatcattaaactctaattagtacggtgagatgaataaactcacagatctaataatagatcttacgatagaagaagaatcacctctcgattttaagtgagagtctaataagtcgaggacatttttgtaataaggatccaatgtatccaatctgagctctctccggaaccctaatccgaagctcctcagccgctttccacatcttcctcgatgtctctctccatcctttgcaaaccctagccgccatcagtaaactagacggaggtagccgcttaagcacctcccataaacccaccgcatgaaacctcccaggctgaacaatatccgtatccaattgtagatccagatccatcgatgcagcatccagatcggattcatcgagtgaattacgcgcatcgacgtcatcgaacgataaagctcggcgtaagtgagtgaaggtctgtcgcgatgacggcgccgctgttaaagataagacagtagaacgggaagaagatgcggcggcggagatgcagctcactggctcagaagcgatcggagtagtgggaatatcaggtggagcagttaaaagacagacatggcctttcttaggttgaccacatctaccgcaattgtaacttcctcggttttttctactgcgctgagaatcaagcgcggctgagatcgcggcagttgcggtgttcggagaaatatcggctaggttgc

SEQ ID NO: 45127 - DNA, 624 bp, Arabidopsis thaliana landsberg
aaccatgcatcagacaataatgaaacaaaaagtaaatgctcttcatggaaaacgagaattatcaatttgccaaaaaataaacaaattttcgttattttttatgtggttttttaatttgactaaataagattttaaaaactgtattaaaacttttccggaaatggataaaacaatgatgactatcaaggactagtatctaacattttaaaattaaaaatggggcaataagttttagtatcctaggtgtatgagtaggtgtcacatcatgaatgccagaaaaaaagaagaaaacaaatcatgttgcacacttttgttcttttgggcaagtctggtcactctaatctgtaagctgttttccaatccgtgtaatctaaaacgaattgtttcttccgagattaaagatagaaatctgcatgtcaataaaagaagcccatttaggcccaagtaaagcatatatcacatttccgaagaagagaacccggagaataagtaaaaatgcccaccggcggcccaactatgtaatttacttccacgtttatttgcttgcatgtgtttggtgattcttacgttgttgttgcatttaacctagaagagtgattgcataaacttttctgcatggtttta

SEQ ID NO: 45128 - DNA, 656 bp, Arabidopsis thaliana landsberg
ccgacgacggtgatcaagcagcgtttcggcgagcaggttcgtggcgaagtgctgtccgacctgatcggcagcacgctgcgcgaagcggtggagcaggaaaaactgcagccgatcgcgaacccggcgatcaacaccaccggcaagccggaaaacggtgaaatcgcctacaccgcgacgttcgagatcatgccggagttcccggtggtcgacgtggcttcgctggagatcgaccgcccggtggcggtggtgaccgacgccgacatcggcaagatgctggaaaccttgcgccagcagcgccgcagtttcgaggaagtcgaccgcgcctcggtcgagggcgacttcgtgatgttcgaatattccgccgaagcaggcgactaccgtttcccggccgaaggcctggaacgcgcgggcaacgtgctgggttcgggcaccttgttcaatgcgctggacgaggcgctgaccggccgcaatgccgacgacagcttcgaaaccgaggtcgcctttccggaagatttccgcaacgagcaactggcgggcaagaccgccaaggtcgatttcaggatcatcaaggtgcaggagccgaagctgcccgagatcgatggcgaattcgccaaactgttcggtatcgacgaccggcacatggagacgttccgtaa

SEQ ID NO: 45129 - DNA, 484 bp, Arabidopsis thaliana landsberg
atcaatcatctaataccctttctctctccctaaactgatcatcttcataaaggtaatgcaaatggcaagagcatgttcttcgtaatttattacattgttcataaggttttgtctcgctcttccctttttgtatattgtaattattgtctaagaaaaacaaaacaggagagagattaatggaggagccgaaatggctcgaaggtctcttaagaacaaacttcttcagcatttgccctcgacatcgcgagacaccgcgaaatgagtgcaacatgttctgtctctcctgtcaaaacagagcgttttgattctattgccgctcctcctttcactttgatcatcccgtccttcaggtccttcattttctcaacacacaatgcatacacatatacatatatcacttttgactcaatccgattctttatcaataacaataagacagataaaaagatcgtcgtatcatgatgtggtgagagtatcggagata

SEQ ID NO: 45130 - DNA, 1464 bp, Arabidopsis thaliana landsberg
gctaaacatgccaggtatagattccaagtaactgaaaattaagtaaacccccaattaaaaaaggaaaagttttgtaagacatgatttaaatgcggcgtatgaggtaattttctctctgaaaattaactacaccgttttcaatttggcattttgggcccaaagtaaaatgaaattcctcaatagaatagatatatgtcacttgaaccatattccatttacatatgaaactaaagtgtgccaaaaagaaatgcatatacaaatatgcatacatttttacaatcagctattaaacgatgaaaacattcttgaaagttaaaaatatatattagtttgtgtcgtaacaagaaaacattcgattattaaaaaacattcacttgatattaaggataaaacctaacatctaaataaaccccaactatacatattgacaacaataaccaactatacataattgatgtataacaaatagtgcccaataattgggtaaagatatttgaagtcctaaattattaggaacatgtaaagttcatcctaatttctaaatagtgctattaacttttaattgggtcctaaactaatcaaagactaatcattcgtgttgaagaccaatatccttttccatctgtgttatcttctttgttgggagttggattgaaggcataaccaaatcctagttgtcaattttggcatcgttgtaacattattccaaccaaagtaaagctttttatcaacaataatacacgcaagttgcatttcaatgcaaccaacccaattatatcccaacggtaaaccggattcagtattttatgagtgattagtccggttattgaatccacaagtcgaaccggtcatagcagccaacacgtaccgccgctaagaggggaaagattctaattttgtaagttagagaaaattaataattaaccaattaattgttaaattaatagcactatatagactaaggtttgttgtccagcaaaccccacgtttaatacggtgttagtcaaataattaagtcctaatccgaatcagatcaagatgataattgaaaagcatccctaacaaaccatgtggtggcattctgagttatcactaattaaaacttaagagaggccacaaaatatcaaaacgaatccatcgacgtgaaatgcttacaagttatatgtcttcttatgtcctttaattaaattttctctctattatttccggcaagtatatgtgtcaagtgagtttgttcacgcatgctgtttgtgttcttatatttgatgttttggtgtctaccaaataaatgataatgcatggccatggtatgagatggcttgtgaaagaccttggttcttaattaacgcgtaaccatttttttctcttgtcaaagaactcttttttttgtaaaactagattaaaacaagaagacattcgtttgaagcaactaaatctatgatcaaaatttggtatttttctaat

SEQ ID NO: 45131 - DNA, 180 bp, Arabidopsis thaliana landsberg
  unsure (1)..(180): unsure at all n locations
ttgttatatatttattatatactaattagattatgtaatgtttgttcttttgtgtgctttaataattatatatttttatgtattttatatattctattattgtattctcttattataatatataactatatattgttatgtctnttgttctatcttatatctaatatattatatatattg

SEQ ID NO: 45132 - DNA, 613 bp, Arabidopsis thaliana landsberg
  unsure (1)..(613): unsure at all n locations
cagcccacctggcgcctccgctgtcatcggataataatgccagtcccactattttggaaacacttcccagcatacccagcacattaccggctattttgtttgactggtgtttctgataataatgaatgatctccgggtctttggtacgatagaacagcgacatgaattgcttacttcccatatacaatgtatcgtgatacagaatattattgggtttggcgccgggaagaaaattcatctgccgggtatcgatacgctgctgtgcctgcgaagaatacccgagaatacatagcagtatnnnnnnnnnnnnnnnnnncatgtgtacagtttggaaataggtaagccggaaacttgttggtccgcacggtcaaagatcagactttcaggtaagtttccagttcttccatcatttttttactgccgatgaaaagaggtgtgcgctggtgcaaagccgtgggttgcacatccagtatacgctggtggccataggttgccataccttcctccacacctactatgaaggcaaagggattggcctcatacaaaagccgcattttgccgcccggttttttcatggtgcctggatacatgaatataccccccttgatcaggt

SEQ ID NO: 45133 - DNA, 1226 bp, Arabidopsis thaliana landsberg
ccctcagctcaatcatcccggaacataagaaaaggaaaaaactcttttaataagaaaagtttgtgaatacctcggggcgaatggttcggctaccttgatgtggacaagtattcaagtatacattaaacacatctcgaacgtttttcccctgtaaaacaaagtcttttgcttagtgtccatatcaaacacatgtagtatagaccaaaacagctttagatctttaagaactttttagtcactgtgagagacaaagagctgaatatgaggttaccttatactgattatcatcttcaatactttcttcaagcccagcaagtccaccaaatgcaatcaataggtgcctatgatttcaagccataaccattggagtcagtcccccaaatttaaacggctaataatgtgtttagacacaaacttataccatgttaaggggaaatgagaatcacctaaatgttggtattttcagctcagatgaactaattaccaggccgtgctccgaggtaccaatcaaataatcgtaaccaccctgcttttggtattaggaaataaggttatgcaggaaatatgatctaagttgtagaaggatgtggagacgagtatcattattattacctcgaaagggcattccttgaatactgaacttaattgtgatgcatatcgtactttgtatccccaatacattcctgcttcttcccttggcttagagggtggaacaatctggcgtaccaaatctacatgaaccaaattcaaaatatattaactcaacaagtagatgtaggtagcttagagaaacgtatataaatgatctaaatagaaatttaaagaaagaaaacagatatgcatatggtaacttgaaagaaaatagagattatcagtacctaaatcgtggtcagttcccatggctaccgtgactctaattcctggacccagcacttgatcaacaacaacactctgcatcacgagcatcgaataaaggtcaatctcatgcaaaaaatgtgtaaaacaaacaggtaaaatggaggccaactgagatataacaagctgagaggaagtaacgataccttgcttaaacccacatcaaccaatgtaccctcagaatttggagccttttcactcagtgtcacacctaaaagattatcatttccaaaacaaaggtgaaacaaaacaaaaaacacaatatcacagctttctaaaacaaggaaaggtagcagctttattcatatttc

SEQ ID NO: 45134 - DNA, 556 bp, Arabidopsis thaliana landsberg
gcaaacaattattgaaacaacagctaataatattatgtctttttaaaaaaaaaaaatgtcttctcaactcaatatctcaaatcagctccatcgcttgaataggctctttcaagtttcaagtttcaacttgaccttttcttctttctcattgagtgggctctcagctctaggcctctcgttcaacctcctgagttcaaattagttctttgttgttgggctatattgccttcgataattgtgggctttctggtaacaaataggtatggtggtgggtaactcctactagcaacgtaccagcattttaatttcggtaatagccaaattttacaaatttatacgcaaagttatcttaattgtctggagatggcacacaagagatgggcattggatcatgccgcaagcgattaactgtaaatagttcgacgtaagaaaaaagaagatttacaggcataagagaaagcaaacgcaccgagaaaacatccagcaatttgcaaacagcaaaagaggtgatagttcaaaaaaaaaaaatcatatcaatcttttttacttatctatt

SEQ ID NO: 45135 - DNA, 867 bp, Arabidopsis thaliana landsberg
  unsure (1)..(867): unsure at all n locations
tcggggcattctttttcgttgtcaccgaggcagcgttgatggaatgaatgcatacacatgaaatggacagctgggatatccaatgtgaaagtgcaagcagtacacttgctaagttgaaatattctggcattggtcctgagatcttcaatctcttttctcatgtttttagtcgtttcctgcatcgttcaaaaatctgattaggaatttaaactgggagaggattgtgatagacaactggcttttggataagaagtaggatcagcattaagagaacaatttttctagttgacttgaaatatcaggcaagaaattaatgatgaaacactaacctgatacttctctacagctcgccggtcctcttcaattatttttgactcttgctcaagtttccgagctatgtagtctttgatgacagaaagtgtgaggcatggattctttgccagggtctgaagaacaatgataggaggtaaaatatcatcccgttcaatataagtgagaacctccttcacctctttggtgcagtcctctccaatttcaccgaaatacttgagaagatctgcccaaagagatggatcccctcccttgctagaatcacctaatcttttgcagcatgcaatcagtccctcgtgatcatgattctgcatgtagcaagcaataacctccttgtaaaatttcattttttcatacagatacagaagtccatccttgaacgaattcatctcgcaaagaattacagcaaggtcaacatcatagaggggttgctctaggtctgacggccatgccattntaagtaactccagtcccttctgttgtctttccgtacaatccttctccattgcatccttcgaatcagcatttgtcttcttt

SEQ ID NO: 45136 - DNA, 689 bp, Arabidopsis thaliana landsberg
tcagggaagtgggactcgccagctggcgaattgtctcgtagttaaaaccttaaaacacacataactgaatttatggcaccgttaattaatcactagtactagatttattgcctttttaacggtaattatatcgtaattatagtaacgagatttagtttccgtaatttcttctgaaattttggcagttttcactaaccttaacttatataattgaaatgaatttttccagatttgttattggaatatgattttattgattgatgtgcacgatagtgtagtgtatttagattagactataaaagtctatatacgccacacaaaaaaagggactagaaagtgtaatttagttattaattaaaaccataaagtggcgatttatttataatatatagtttttaacggcaattatgcactaattatatcacaggcccgttaagtttgttacttgtaataataatacgccacacaaaagggactagaaagtgtatattataaaaccataaagtgacgatttatttataatatatagttttatacggcaatcatgcactaattatatcataggccagttaagtttgttacttgtaataataatcctagtgaaaatcacacacaatcgaggtttaatttccgtaatttaatccgagtttttggtatttttcaccaataactatatattattcattgat

SEQ ID NO: 45137 - DNA, 675 bp, Arabidopsis thaliana landsberg
  unsure (1)..(675): unsure at all n locations
atatatatatgtatatatctgtgtatatgtatgtatatatgtctagttgtgtgtgtatgtactgcnttctatctgtatatgtgtgtgtctantntatgtgtgtatgtatatgtactgttatatgtttctatatgtatgtatctatgtatctgtatgttnttctgtatatatatgtatatatctatgtatatgtatgtactattgtctatttgtgtgtgatattatctacnttctatctgtatatgtgttcgtctatttatgcttgtatgtagatgtaatgttatcatgttctatatgtatgtatctatgaaactnttctgttgttctgtatatatatgtatatatctatatatatgtatgtatagttgcgttattgtgtgtgtatgtattatgtatatgtctgttgtatgtattatgtgtcatactatatgtctgatatgtatatatgtttgcttataatatgtcttaatgtatactgtatgtctatcgatatattgtattgtgtattgatatactacgaatgtgttatgtattgtattgtaataatgttnatatacgactttttgtgttgtattattgtaactactaatacttgttcnatattattgactataactcctattgctcatatgttataagatgttaaattgataaacttgtgttgatttgtttgct

SEQ ID NO: 45138 - DNA, 722 bp, Arabidopsis thaliana landsberg
catcaagttgtgaagaaagaaaaaatagtagtacatcctaatttatattactatttattaaacaagtgaaataataagcgttcgtgcaaatttcattaaataacttcacatgggaaattaagtgacgctgcaaatattagtaaattgctttcggtgtgaggctaagtacatttgtagtgtatagccattactaaccttggcatcgttatatctataattattttgtgttttttatttataatcatctgaatgtgattaacattaatacccaattaatcaaatcctcttttctcctccaattaagacacctatacgctatgcatgtacattcgtctacgaaatagtatatataagtagtagtatacaatcttttgattttgacctttgagtaactgctatattatgtagtcactttacgtcctgtcgaagtttcaaaactcaaatataaatcactaggtgaaaaacatactccattataaacccgtacaacagataaactaacacatatttgaaaatggttcgtgcttaacctatggttattttatttatcaaacaaaaactatggtattctaaaaatgtctatctattagaaaatgatgtttagtatctgtatctatagaataaaaaactagacgaaaaacatgatttgttagatctcccttagatcaattaacaagttttatgaatttttcaaaataagtcacctatcatcgaaagaagat

SEQ ID NO: 45139 - DNA, 622 bp, Arabidopsis thaliana landsberg
ctatttattatgataaaaattgggagattttcttccattttttttcttaatctttctttactggttttgaattgatagattggaaacatgtaccaacacaaagaacagaagcaattacacagggagaaacaaatctccacacactaagccactataagctaataacaacaataacctatacaaaacaacagagccatataacaaaaaaaaaaccaattcaaccaggggaaatgactctttcatcacagaaaactgaatggaaccaagacggatgacttgatgcaacatacaattgcaacctgcaatcatcagtgatactctatgacataatattccttcttcttttggatcagattaattaagttttgtttctaattattaagtcatgacacttcttccattcttaattattaagtttttttttttcttgtatcaaatctttaattattaagttttttaaaaaaaattattaaaagtcatgacacttcttccattcttaattattaagtttttttcttggatcaaatcttaattattaagtcatttattgttgtttcacctaaggtaccttcatttaaaagcaccaattaaaatatttcacgtgtcgtctcattagaaattc

SEQ ID NO: 45140 - DNA, 561 bp, Arabidopsis thaliana landsberg
gaacataccttttggtagtttacaaatttctttcttgccaagactttctttttcaacagaggataggttgcttggtcgagatttctgcaagatccacacagaacaagtatatctgtgagatgatgtacaaaaaaggaaaccaaagtaaagcaaataaacaacattttcctcacctgttattgtccaaggctgaagaattttccttatcatcttccctatcaacatccgttgcattagtagcattttctttcttctcacactccaatggcaatgcattttccttgtcttcaatctccacagtctcacattgctttgctttatctagtccactcaccttaattacagcaatatcttctttatcgatagccgcggcaatattagcattctctttgtcctcgcactccgaagctaatgcactttccttttcttcaatctctgtgatttgatatttctgtgatgtagcaagtccactctcctttattacagcaggatcttctctggcctggagctgattgttcatgttagccttcgatgtgtctgacaattctttagatttgtttt

SEQ ID NO: 45141 - DNA, 613 bp, Arabidopsis thaliana landsberg
cgaacatccaatagctgaccagatgactgggtgttgttttaatgtcgaattgatactaagggcagaaagcacgcaagtatggtgcttccatgaaactcgcccagcccaagtatgctcttcttcctgaaggatgacaattacaggctcaatataacctgaagaagacacaggatgcaaaaacacataatcaaaagaagcaccacttagtttattcacattatgcctactgggaaaactagaatatctaaaatttcagacagctagttattgaaaaatcaaagaaacaatacatttcctcttgtttcaaactgtaatcatgaccagaatacatcagttgtcgtattgaatctacaaacaacaacttagtaagctagatccattcaaggacacaagattcgatgcaagttgagcagctaagaaacaatcatcataatatatttatgattaactactgattcagagataagtttatgaagaaaccttgcttgctaaacctaccatgtagaaaaacaaaatctttgacgtgtttcatttccagatcacgcaagttaattatgtaagatgattcaactcgagcagaaactgtccctccagaactgaacgcatcatcatc

SEQ ID NO: 45142 - DNA, 305 bp, Arabidopsis thaliana landsberg
gtattcattgtcctgtttactgctgtatatacctactgtgtattctctgtgtctgtgtgtctaatgtgtatactctgtgtcttatatgtatatactctgtgttcctactctgttgtatgttgtgttgtattctttttgtgttctgctgtgtgttcgtttcttgtcttttgtgatcatgtgttattctgatctaattgtatctctttctctgtcactgtttctactcttatctggaatactctttgttcactgatcttgtctcctcttctctcttaatattgtactacctgtgttttatgttgtgt

SEQ ID NO: 45143 - DNA, 790 bp, Arabidopsis thaliana landsberg
ttttaaattctatatccacaattattacacccatttataggtttcataggtcacagggagaacacgttggccataggatattcactaattgtgaaaagaagtaaaaatggcatttgacaaaaatgctgtacggaaaagctgagcggtgcaaaagctatggatttgatgaagactagtcaaagcttatcatgcaacaaagttgcaactatacgatattatttctcgagccctctttggtagtagtaatctaaatgattgataatacgataacacggagtaaatcatcacgtctaaaaagaggtggatgaatcaatctggaaggagattatgctattagggactccaaaatgaggttatatatacccttgtcatagactcacaaagagtgtttggattagacctgagatatggatccaagtatactcactattttcatgaatgttttactaaagtttacctgtcccaagtttgtagaccgattttttgggtgaagacttgtttagttgtgaaacagtggtctggctaattgcaaagtgatttatgtgtacttgagaccaatacttttgatttggtagtatagtaatgtatggagtccggcaaatcttgccaaatatcgcattgatgccatggtggaagatggtaaccgtgagtcttcctatgtgtgttgcatttattacttgcacatgtctccttggacccttgggtggaggaaaaataggtagtttccggtcaatacaagtgaaattttaagaaaactttgacatttatgatcttttaagaaagaaaaaaa

SEQ ID NO: 45144 - DNA, 424 bp, Arabidopsis thaliana landsberg
aacagaaatccacatatgatctttataaatttcttttgtcatttttatctcaagcttttctcttttgttagattgttattatctcaaataattcaaaattcattacactcaaatgaaactttgttacagtattctaatttcatcatctatccatcaattacgttgtatctctatataattatattgaagcatataattgaagtatataatcaattaaaatgttctttttcccaatattttctcctatattaatactataaacgaaagtcgctttcgagatttaatttgatagaaacaaaattgttgtattcgtggataacaacaacaatataacaaagtactcataaaaaaaaagatgaagttaggtgacgtgtcgaaatcagaacggtggatatgaatgataaacaagcaaaatgtggaccgg

SEQ ID NO: 45145 - DNA, 1034 bp, Arabidopsis thaliana landsberg
atagaaagtagaaaccacttcttaaaaaacacgatacaaaaagttagcagcagcctctacttgtctcgttcagttcaaagcccaaaatttaaataaagttatgataatacgcattaaaaaaatggtttgaaaaatgaaaacaactatttaggaattcacacagctcacttacagacatacgaaaggaacagcgacgaggaaaaaaaaaaaaaaaaatcatttaaacatttctttactttaagtttattttataagtaaacagtatgtttatttaatacttagggaacctgataccactttgatgtgttagtgcgtggttcttgttcatctctctctccctctaacaaaaatcttttcttctgccaagaaaaactatttctgaaaataatcaaatcctctaaaggtttctgtctatttactgatataatttttatctgaaacttttattttagcaactctcttcttcttctctcttcgtcgtcttcctacttctttgttttttctttctttgtattgtctcaccgatttacagtttcttgttcttactttactttgaatctttattaagtttcaaagatccaaacttatactcttcaaaaataggtatgcttattatatatatatctttaatcctctgtaagtttttgatattttatgatccatttcttctgttcataacattataaaaaagggttttgtttcttggattcctaatattgtcttctcagatttgttgttaaatctcatgtttcagttggttcatcccacaagtagagattactgtttgtctgaagagtttgcttatcttctttcaatgtcttgaattttttttcttagaaaaaataaatctcaatgaactttggtttaaatctcaccaaatgtatgttctattaccttctgtgtcttgatctattagtttcttattgcgatgtcttgagttcatatgattcattgcataaaataatactccaatcagattagaaactgatgcctttttttaggggaaaaactttgaagattaaaaaccactcttt

SEQ ID NO: 45146 - DNA, 1063 bp, Arabidopsis thaliana landsberg
  unsure (1)..(1063): unsure at all n locations
ctgattaatattagtaaattgtagtgagtaaaggaagaaggcattacctttaacctcgggatattcgaggcagagagagtgtaaaaaggcagcaaatagacagggacgaaatatttctttttgtagccatacaccactagcctacttctccatagacttcagctttccatttaattcatcatctcatttaagccaaagaagttatataagacgtgaatattagaatataccaactcatactcacacacacaaaaaaaaaaaatatatatatatatatatacgaattctaggttaatacactatctttcaaaatcattaaatgggaattttttttgctatcattgtatcagttatatatctcttaccgagtttttttacatgttaacaatatagatacgggaaagtgttcaaaacgaacataatagggacaccaatcataatatcaaccgatgcagaggtgaataaagtggtgctccaaaaccatgggaacacatttgtccctgcataccctaaatcaattacggaactacttggagaaaactctattctcagcatcaatggacctcatcaaaaaaggcttcacacgctcattggcgcgttcctcagatctcctcacctcaaagaccggatcactcgagacattgaggcctcggttgttctcactttggcgtcttgggctcaacttccattggttcatgttcaggatgagatcaaaaaggtattgtcttagaaaatatattagtagcaaactcacacgtacgtactaggtcacatgctataacacattttttaattggtagaatgtttgttgttgttgttgtagatgacgtttgagatattagtaaaagtgttgatgagcacatctcctggtgaagatatgaacattctcaaacttgagttcgaagaattcatcaaaggtttgatttgtatcccaatcaaattccctggcactagactctacaaatccttaaaggtaaaatatttccttataatacatgagcatatcaatatctgatttcattttgttagtgtgtaaatactanggtttaatacttcaatcatg

SEQ ID NO: 45147 - DNA, 458 bp, Arabidopsis thaliana landsberg
  unsure (1)..(458): unsure at all n locations
tactagcattagacctcgctcgcgaatcgtcgcatatattcatacaagaaggcagcttctctcgtcctctcatctncgacatcaaaggtcggatgctcagcaagcttttggaactccttgacgctgtgcagtgtacttagaccaatgatcagtgcaccgatgatggcatcttgctggtcctgcttctcagagaagagagccagtcgtcggatcacctaaacacaaaacaaaacgcatcatcaccacatttcgaacccgtgcaacaggaatggtacggcttacgtcattggattgtggacacgctggctgctcactccagtcctagcagttgatctgggcaacaaggagaatggacaaatacacaccacgtgagagcacaccacattcacgtgaaaatggtgatgaagacgtgacgcaccacaatggaggtatcagagacctcgattcccgtgcagtac

SEQ ID NO: 45148 - DNA, 972 bp, Arabidopsis thaliana landsberg
cactttatgttctttactttattaaacttatcggttatcattaatcaacttattatggtatggttaattagtcagtaatgcaagacttaccttcaaattaaaagacaatagttcgagtttttctttcaattttgtttgatatcatactggttttaaataccaaaactactaagattttcacatatgaaaagtttaatctaaaattttagtatgaaatcctccaattatattttagaaatgacaaaaaatattttctcctaagaaaatgttctatttcatgatataaacttcatggtaattatagacttttacattaactataagaaaatacacaacatatgtgtcaatgttttgaatcttaggtacacatatcccaaaactcaactatataaatcaaacataaaatacatcaatgatctaaatatctcctgccacatgaattttttaaaactcttttaacaagaattgactagaaagaaaactctttaaaaaatatgttgactagaaagaaactcgttaacaaaatacataattggtgtgaaaactaaaatggatccgttaattcagggtacgagaatttaaagagaaacagtgttgaaattacttttaactagataaaaagcaaaatgaagtatcttggatccttcaactacatatctctctcatatgggcggctcgaataaatatcagaaaaataccctcactactcttcaaatttacacaatatgccatcaccgtagaaaacaaataaggaaaaaaaaaagctatcgtagaaggtaaggacttgaagacatcagagaccaaggaccaaaaaaaaaagaaaaagctttgattaccagaagaagaagaaggacaaagtttgagactttggaagatttgaagaaggaagctctaagatggtgaggagagaaaatcaaatccttttctcttagtttccttgattggatcgggaaaatctacaagatgaaagat

SEQ ID NO: 45149 - DNA, 691 bp, Arabidopsis thaliana landsberg
gtttattctacaataatcaaatcaaaaagagagatttttttttcagttcttcaatttctggaatcaaaagaacccagatcgtagggaaagtacaaattcaagattaaggaaaaaagcttaagattaagaggacccagatcgtcaaaatcagatttttggaagcaaaaatttcacctggaaagagccagaattgattccacgaaatcgcgaattccgcatatataaaattaagtggtgggattagaatattctacgtttgaattagctttctaggaaaagttcgcagctttcgggtaggtgagagagcttaacgtaagaattagaaagacaaagacgaagacgaagacaaagatctacggagaaaaaacgcgtcatgcgtttttgcgatgaaacgaaaagtaaaacccccgcgaagcaaatgattctataccgcagattcctatgggacccacacatctctttttctgattctgttgggctttttattttacgcgttatgggcccaataagcccaagttagtgtgatcgtcaatgggccacgtcatctaatatatgcttgctccggtagatgcgtttagtaaccaacccacctgcatatataaaccacacatgccacatgttgaaataacagaaacatatactactataactaaattatttaaaaattatagttgtaacgtgtaagtacaaa

SEQ ID NO: 45150 - DNA, 555 bp, Arabidopsis thaliana landsberg
cccatgattgacttaaacagctgcttcagctctggaagggatctttctttttactgagatggtatcaccaactttgattgggttctttccttcgccttcagtgttggttaacttccaattccaaaccatctccttgccaaagaaaacctgtcataaaccgaaatcaatatattgaataggtttagcatcataatcaatccaacaagtctcttctgaaaaccagactagagcttatatagctaacctttccacgcggtttcttgtcaggcattaagacattgtctgatctgaatttcatcagagtttcagttggttctgctttacccataaccccggtttcttgattcacagttggtacctgaaagaacaaaatggttaaaagctcgacttgagaatctgagtgttacattactttcacgtcatattcagataatcatcaccttgcagcggctacatagcctaactccttggaagactaaatcgtttattttgatttcatcccaaagatcttcaccgaaaggatcacaattatcaacaagaatgctagagagaaac

SEQ ID NO: 45151 - DNA, 859 bp, Arabidopsis thaliana landsberg
tgatttctggctgcttaaaagcagtctcaatgatatcttggccagggatgattttccacgaaggtatcactccactaagtttggccaatatcgaaattaccaaagggcttggtttcatttcttcagcaatctgtgacatcagaaaaatttattaatcacgccacatgttaataaattttatttacaccctagatttatttttttatgataatatgcttttagcattatccataccataattacttcacaaacttagtgggatgcctataataattatacaagattagttaagataaattgatattatgtaaataaagtctgagtctcctcaataattacctaaccagttgctatactaataattcagcatctttcacatcatgatgaccagtttgaaaaattgacaaccaacattttggcacataatatatgtttgatcctttcgaattgagtgggcaaaaagttgcatcacaccaaaataatactgttctaatcatattcaaacttccttcttataatatatgaaccagtccggctaatcatttctatatatgtgaatatatatttgttaaaaataaagaaaagcataaatttacattctttccctaataatcccccctataaaatacaagccatgctgtgaatgcatactggctctactttctatatttttaaaaaataattatttgcatatgtaactctcactttttgccactaaaaagacagaactcatgttttgtaaacaaaacacactttacgtatgaaaaaaacatcacctaaacgatattgcaacgacccataatcaacatttggatctgaaaagacgcatgagagaatgaacatttaccttacacattgg

SEQ ID NO: 45152 - DNA, 791 bp, Arabidopsis thaliana landsberg
tttatagatagatggtgggaaagcttaccattaactttccctgcttttttcccctttcgaaaatgaaacaaccattcaacaggaaactctttgctatcagcattgacttgaactgcatgttgaatgacctacaaatgcgggttttctttttctctctaaatcccaataaacaatgcatcatatgcatatatattaacagagcatttgtaatcccatgttttttaggtactgttttggtggggtgtttagagtcttacctctttgatggatgtgtgcaaagcttcacattgctctttggagaggctagaagcagtctgcaacgggtggattctggcctgcgaaaaaaataaactagaattaatcgtacagcatgtaaacccgtttcttctgtcgtcaaatgtacagaaaacaaaagtggatactttgtgaatcaaatgagtggttacatagatgctttacttcatttcaaatgtaaatgtgtaaagatcacttacttggtacagcacttcatcagcgatccaattcccaatacctgaaatatatccctgcaaaagggaagatatacataatcatctaaatgcgagctttttatataaagaaaaggaacaaaactttgccaaataaaagaagatcatttctgcagcatctataatgtcatatatagccaagttctagatattgtgatagaagtggtaaggacaagaaagagctgaaagatgcataaaagtgagagaaaatgaaatttgatctctgaacctgatcaagtaggagaggttttatggttttgtctt

SEQ ID NO: 45153 - DNA, 485 bp, Arabidopsis thaliana landsberg
acgccgtgggctacttgaagaagaaaggattcagtagcgctgctaaagaccttgaatcttatcatcaccagaacattaatggtagctccttcacttctgtcgattatcataacgatcctgagctcacgaagctcattcgctccttttctcagtaatctctctccctatctctctctctcgtttcaattcttaatgcgaattgtgttttgaatttttgggaaagttttagtgtcttttgtgaattttgaaaaccgtaaggaaaaattatgtaagctccaacgtttttgagaatctaaaaattaatataattcactttctgggtgaagtttatgtgaatatttctatcagtttatctgtcaaatttaagattttgatgacatctcagtgggaagaaattaggtttttttgtatggcttatgtagagagagctaatggtaatgaaatgtctgttcttttgtttgcagacaagaagatgatccaactcg

SEQ ID NO: 45154 - DNA, 1076 bp, Arabidopsis thaliana landsberg
taatacatgtatgtcaatgcaacaaagatttgggctttttaatttatgaagaaaatgttggtgggatatggacaaaaacaaattggagaaacaatgaaataattcgaacccatgacgttacaactagtcaaaagtccccacatgatcttatcaaacgtaggtccatggatgagttgttttcgatatcataaatttctcacgaattttgttatatggcctttaagtgtaaaatgacaaaacttgccaaacaaatcatagacccaatgcaatttagatatcattggtgaatggttatagtaagtttaatagctttcaattcaaaatcaattgaaatgaatggcttgacttatgttacttagttattattattaatttcatgatatttcttatgtgagattcgtaacatgtttcttcaaaataattcatctttcatctcatcttgtatgatatcatgatgagtgagatatgatttgttttcaagtcttataaagcctattaggcccagaaccacgaatacttttcagagaagaaaacgcccattagtaatagtataggcccattaagtattagaataacaaaaattcagattttttttgttggtcacgaaaatttagctttttaatttaataaaagaaaaatgggaaaagaggacaagtcacgtcacgagacaaattagcatagcacgccaagaagaagaagaagaagaagctccaagaatctgtcgcagaaatcgccatggcagtcacagcatttaacacattgaaacttgtatcgtcgtctctagatccgattccctcaggctcttgttcttcttattcccttctctctgatatatgtcggatctccttacaagagatgtctaaagcagtcatgttctgttcgagctatgacttcttcttcttcggctgcatcgacttcttcttctcctttggatcgagaatggaagagagttttaggaaaacagtgactgaaaacactgtcgttatttactcccaaaacttggtggctcgaatggtcactactcttctttcggtatcagttttaaataaggatttgggtttaatttcttttctttt

SEQ ID NO: 45155 - DNA, 572 bp, Arabidopsis thaliana landsberg
gcaaaactttgtgatcgtcccctaaattctcgtgtcatgcaacatcattttcctgggaaagatctgatctttctttcagattcgttttgcccagacagggtttggatctgaaaggatcggttagagagacaagatcgaatctttccttgggggattcatttcaaaggatttgtttttgtctgaagaatcaagaacacaaaagaaaaaaaaaaaaacagaggaaggaagaagaaggaaaatgatgaagctttgtccttgtttcatcaacccgcatcaacttggacctaattcacctagagattcatttgatgaaggtcttacagcttatagaggccatagccgtaaactctttgctttgttcacatttcgctcacatcgaaaaggtactcgtcttgttcatctaaatcaatcttcttaaagatttgatcacatatcatttggtttctgaaaatgtttatgaacattgataaatgcaagaagctgcaggcagaagtctataacggaagagataaagacgtatgggaatgttaagaactgcggtcgaatctttcaattcaaggaactaatagctg

SEQ ID NO: 45156 - DNA, 403 bp, Arabidopsis thaliana landsberg
ttcgattcaccgaagataagggaacctatagtactcacgtacgtgtatcattcgttcttgataaacatcatttgtcttgtcacgtcgtcgatctgttaaatcatcatccccatactttgcttttaactctatattcattcgttagtataatattactaatctcctctaagtttttttttattaaaaaaaaatattctcctctaagtttaagctgctccaaatgatatatgtctttgtaagagaacataaaagttaagaggaatgaatacattactagtcaaacggaaaagaaaaacacacactaaactcaattcatgatcagtattgtattctagcgaatgacgattttaagatttgagtttactctttacgtggaattcgaacagtaatgttatacaacagt

SEQ ID NO: 45157 - DNA, 673 bp, Arabidopsis thaliana landsberg
aatctctttggactcgaccaacaacttcttaaaagttttggtttttacttcaaaagaaaatgttggattcttcagagatcactggattcttgagcttcgtgatctgtgtttgtttgtgagtcatatgctcgagattctctgccactgacatggtattatcttcttcatcaaagactttgccaaaactaaagtaggcaatatcctccattgaaggtactaggtattaagcttagacatgaatgtactaatgaactagattacaatgtttcgaaaatatttgtgtaagttcaaattttggtgtttggaaataatattttgaagatgaagtaaggaagatagttttttacatgtatgtttgatgattctcccgattttgaaaattggatagttttttacatgtatgtttgatgattctctcccgattttgaaaattggcatacatgtatttccttttccttatattaaatcaagtgattgtgctgaagaaaaacagatatttagcttaagaagcgccatttagttaagaatgtgaggtacaaacttttcctgtgtcttttttttgcataatgttggcctttgggatttagtgtgagcacttcttctcaagtctctcaaccattaacacggaagttatgtggtctcatacctaaagtaatttctgagcacacaagtt

SEQ ID NO: 45158 - DNA, 366 bp, Arabidopsis thaliana landsberg
atcaacctcacatttcagtcataaaggcacaagctttttctttctttttttttgttcattgattgagctctcttgcttctcctacaatggcggcttttattggtacgattttacccattttatagtgtttttggtttgtgtgtgaggttcttgtggtgttcttggtttgtgtgtagggaaaaaagcaaactttttaagaatctaacgagttttaaataatctgtatatttgtacaatcattgatactatattactatctatgttgggatatgtcttggctttttgtgttcctcaaaagacaaaaagacagattattttactaccttttatgcaataaaacttggtagtgatttgctaaatgttatc

SEQ ID NO: 45159 - DNA, 650 bp, Arabidopsis thaliana landsberg
gatgatcaaatccacctatggggttggggaacatctggtaattaatttcccatcaaacccaaaaatggttgtgggatcaagcactcatgatgacgagaactcggtaactattcttctagagactttttcaagagaccatccaggtgaaatcgacacacaaatcagtcgttctccttgctcttacatttttcatgatccaagaacagtgtgtccaactttaaccttatgtcgagttataaggtcttgtgacggtttggtctgcatccaagagttaattaaggtactaattatcatgtacataatttggttgactagctatcatgagtctttgcatatgcaaggattacagaaattggttatgttttcgatatcgtcagtgaattttacttttgtcttcttttttttttacctgtgataatcatttcaacaaatctaatttcctcaattattgtttgaaagtattgtaatgacaatgttttcgttaatcatcactgatattataacctaaactttaggtgtcgggaaaattttgaatcaagtgtaaatcaagagaggaccggtaactttatccaacgcagttgcatgcaacatggtccaggttatatgtcgcatggtttaattcgtctcaaacttgcacattttatgaaagc

SEQ ID NO: 45160 - DNA, 465 bp, Arabidopsis thaliana landsberg
ggatgtataaaaaaatacggataagcggatggccggaaagatgaacggcaacttctggagaattttttccaatacctttgaaaccgttactggcaaaggatttcacacggttgtgtgattgcggacggaaagaacatgcagcatctttgcatcatcaatcacagaccatgaaaggaaaatacatcactacttcattactgatggcaatactcggcagcgggcgcagcgtataagtggcggaaacaactgccaatacccaaaaccacgaactcatctgggccaagggcctgcccctcgtaaaagcgcagctggaaaagctgaaagagaaagacgaactgaaaaatgcataagcacttatggaaaagcgattcctcaatatcatggaccatttcttcaccatcctgatgctgttatcggaggagggggaatatgaggatatatctatcgggcatattttgtagtttg

SEQ ID NO: 45161 - DNA, 678 bp, Arabidopsis thaliana landsberg
atctttccttctgtgcataaggagaataccatttggtgagccttacctttccttgccggctatttagattcacaaaatgtatctgaaaacacacaaatcaaaaacacaccattggtttcttattaggatcatcaactcaccagcttaagaaagagtccaacaaacaaaggtttcaaatttgaagccattgaactgaactaggaggatcgaaactacgaaaaatcaaacccagaagctagcattatcaaactaaagtcaccaaattttctatctgcaaagaataatttgaagagaaatatctgaaaccaccgatcaagagcagatccaagtatcaaactaatgaagaagaagcataagaacgaatcggagatgcgaaattcaaatccagggcagcattcgtaaacacagaatcgaagatcgagcattgttaccatgatttcgtaactcaagacgggacaaatctgtagtagcgaaatccagaaactgataatcgatgatcctcaacaagaaaaaaattctctttgctcaaactgtcaaacatgtcgagtgccaggggtataattgtcatttacataattaaaaacggcttgcattcccgcgtcggatccatgcaaacggattgcattctcagctaaatttgttccattattgcaattatcttcttaatctgatcgtata

SEQ ID NO: 45162 - DNA, 1234 bp, Arabidopsis thaliana landsberg
  unsure (1)..(1234): unsure at all n locations
ttttgatagatttggtttgtgattttgttggttgtagagcctattttcttcttaagattcaatcattggttagtttcttggagaacatcaatcaaggagatgatattagggagcaaagcggcggattcacaagagtgatcctacctgcaactctcaagagagaggcagtgcacatagtcgtcacgacagccaacaaatatccggccaccgannnnnnnnnnnnnnnnnaaaatgtctgcctgcaactccatcctcgtgatttctcctacttttgagtcatgtgaatctctgctgagaatggagggtctcacacgaaggacatgaactcttcccgagcttgagcatacagtcaccaacctggaaaatacatggaaacagaaggaggaggtaccttcataaatccatgataattaaatacattcatatgtgcttttcccttgcagttaatacctgtctgatgcaagcagttcatgcgattcaaaatgcagattctcatcaatgtatgcagatgctgtgatcgggtccccaatattgtattcccacacaagacacccagattcctgaaataaattccaaaacaaaagtcttgactcatggtactgaagttttgagacgagtaccacaaaaacaactgatcctcatgaacgtccctatcaatgtccttgcagtaataaaactcaacctaatatatctttattccactgattttgctacagattcaagtatatctttagtgcatccacaagctgttaattccaaaagggtatattccttctaatataaactcggaaatcaatatgccaatgaacgcggaagaatcttattaaactggtgtgtttcagaaaggactccctagaagatgcataggaagatgtatgaatttagaatatgcagtgacatgataaagtctattgcacatcatatttcagccctaaaataacaaaagcccctagcacaaaaaaaaagtcgacagcagtaaataaactatacaatacccatgtccaagggatataagaaagtaccggttctagggaataaacacatccatttctacagcacacaagcacctgtagaaaaattgacgtgtaatcagcctcagtgagatatctctacacaaaaaggatatactgcagatgttctcaggaatcaagggcacctgagaaggaagcacatgtgacatgcaaggtccagcatatattggtccacccaggcctatactgcatttaatgtaacc

SEQ ID NO: 45163 - DNA, 557 bp, Arabidopsis thaliana landsberg
cttttatcgctttttgcagaaaaccgatacttcagtctccctctcaacggaaacctcaacgttcagcaacctttttgttctcctctatcgccaccgcaccaaagaaagaacaaggtaaaagacagcttcaccttgaaattgccgtttttggcttaatatgtaaacagaacctttaaacagtgtgcatggtaaaatagataagcgagcagtatcaccacatcggtttccgctgctaagatctggttcggttgctatccgaccgtcatcaatcagccggccaacaaccccgagcaagagtagagcggtaactccaactcctaaacgggtaagcttcggttacatttcaaaaacactcacttctaggctctatctctaacggttgattcttgatattttctggctcagtatccgtcagaaccaagaagatcggcttcggttcgggttgcgttcgagaaagaagctcagaaagaaccagagcatcaacaacaaccgagcaagagcaaacggctgctaaaggcgctacttagccgacgcaaaacaaagaaggacgatacgct

SEQ ID NO: 45164 - DNA, 801 bp, Arabidopsis thaliana landsberg
aaatcaaatcttaatgactcaagattattatttaaatggcattaaaattttgagaaaaaacaatcacgcagatacctaaaaagaaccaagaaatttgatgaaaggtaagagaaaagcgtaccatcctcaaccgccggagacttatcctcagcgacggcgactaagacggcaacggagacactgagcagaaacaagaaaatggaactccatttgcatctattgttgctcggaaccatatctctcctctacttcttcttcgtcttcctcaagatatctaaatgctctctttatctctcttctctctctctgtaagtgtgaaatgtgaaagtgtctttctgtatgttcttttcgggcagcgagcaaagacagggaaggttagtgtccttttatccaagattcctcactccttgtcttttttttttcttttttttttaactctcaacatttaatttccactatatttaaagctgtttacagacaaaactccatgcacgcataacaaaaaaaaagtaaaagaaatgtttctactgtaacatagtatttaattgttctaattagtagagccacgatggaataagttttagtattgacctaggttctctctttttttttcccctctcattggatctgtgctagatgcgagactaaaggtggcaactttacttttgatccaactttttttttttaaggctgtggagcgaattattagtttgacaacaccaaaaatgtttttgtaaaatcttgggtttttcactattatagatttggaaaaatgttgtttaatacataaacttttaaaat

SEQ ID NO: 45165 - DNA, 632 bp, Arabidopsis thaliana landsberg
aaggttggaaaataaaatgtctatttgaatgattaatatatactgtatgttccgtggccattcagttgcttacgggtagccttagagaccaacacaaatatctcttattggagagaacaaatcgtgtcgtttctaagcactcgttaaatctattaaaaacacacacaaagtccacaagtcaattagtcaaattcaatccacgtgtggttgaacactgatattttatttaccaaatttggcttatagtttcaggttatgttatatgccgtttcaggataagttttggaccggtccgtttgtcagagacttgaacacaaaatttgacattccagaatcaaaaacagtgccgtttgtacgatcaataaacggcaagacacttaccgttgcaaatagtcaatcttgctttttgagctaaagactgtaatctgaagaaaggataagactttggacacagagaacacaaagagatcactgaaaagaagaaaaaaaaaatggcagctttgagttcttccatgaccatctcatatctacattcactttcttgcagcgaaagttgcttgcttacatctcaattcccaaacccttgtttataaaccaaaacaaaaaaaaactcagattctcgatttccttct

SEQ ID NO: 45166 - DNA, 223 bp, Arabidopsis thaliana landsberg
  unsure (1)..(223): unsure at all n locations
tatatatgtgtctntgcttagtgtatgcttagtatgtgtatatgtataatatactatatgtatactatatgtgtgtgtatatgtcttagttctgtatggtattcattatatatatgtattctctgtgtgagctgtatattctatctattatatctgttgtgtatgtctctctgtatattgtccgatgcgatgtgtatgtattcgttttgttgtgtatgtgtgt

SEQ ID NO: 45167 - DNA, 642 bp, Arabidopsis thaliana landsberg
attttaattaattcatagttatgatttcaatttataattaatttatggagataggaaattaattacaaaagaaaagatttttccatttctgtgaataaaacaaagaagaagtacggtttcattaattttctcgcgcgccaaacatccgaatattaaaagacaaaataaaagcagagagagaaaataaaaataaaatttaaaaaaaaacataaaatcttttaataaaaaaaaagaaaaaaaaaagaggacaagcgtgaaataaaacccttcactttctttggcatttgtcttcacttcttttatctctctttctatctcacacagagtgaagaatccagagagtctctaatggcagaatgaacaaaggaattagcaatcatcttcttctcggaagagaaaaatcatggctttagaagaggaggaagagagtcaaaacgcaccattttgtgttcttgatggtcttttctgtgaggaagagagtgagtttcacgaacaagtagatttgtgcgacgagagtgttgaaaagtttccttttttaaatctgggtttgtctgatcatgatatgttgtgggatgatgatgagttatcaactttgatttcaaacaagaaccgtgttttatgacgaaatcttagatgatgagt

SEQ ID NO: 45168 - DNA, 533 bp, Arabidopsis thaliana landsberg
caacaaaactaatagaatttattttaattacactcaagatttaatttaaatgatttgctactgcgacagttctttgtttttgttttatataaacttgatatctaagatatgtaacttcatcaccatgtaataattgaaaaaaatgcttgtttagtaaaataatttccatttactgttgatgttgttactaaatccctaatatgtttttggtagatattatacgagatctagaaaaaatgaatttaatctggctgagatacttaacaactaatacttttttattttggttaaatgaccatttaacaaaagattaatttcttaaacttgttactcttctcaagattctcattttgtgctacttttcataactaaaagaagctaattagtttatctcaatttctgatttcttcacaagcctctctttaattatccctcctcacaaacaatcccacatatgatacaacaatctaagttctaatgtgaaaaagcaacaaaaaaaatgtcggtaaatcggtttctcttcacttccttct

SEQ ID NO: 45169 - DNA, 187 bp, Arabidopsis thaliana landsberg
  unsure (1)..(187): unsure at all n locations
tatatgtctagttgtctatctctgtntatgtatgtgtcttctgctctatatcctcgtgcgttagttattatattatgtgtatctattatattatgtcttattgtgtgtattactattactatctaaattagttatatgatatttatattatcaataattaagtatatttgtgattattagtattata

SEQ ID NO: 45170 - DNA, 696 bp, Arabidopsis thaliana landsberg
cctcctcatagttggctacttcctctgttcactataccaataaatttaagccaattagttttacgttttatggacttgttgcggcccgtttagctttcatttgttattactaggccggaaacaacccactggcctttacacctctataaaccaccaacgcaagttattttcttttcgacattgaaatttaatatatgttttcatcaatctcaaattcatcacaatgcagtacaagtgaattaactaactacactgtaaatctgtttgggttacataaattgtatagcgtgagctacatacaaattttctttcttttcggtgtatgtatttttgtgttggtttttgttttaggattctcatggcttttgaattgtttctagttatgcttcatgtcaaagcacaatttcatttaggtttgacaaagctagtcatagtcatgaaaaatatagggagtatattaaagtaggattttgctcttctcctattacacaacttgacatgctttttgataatcaatatttataaatagactattttatttaaactactcaacaaaaagacccaatttaattgattattatttaattatgaaaataaaaataggactattatgtttctttttttaatttttaaattctgtttctaatttggctgcttagtgagtagtatgtagagactgtttattaatactgattt

SEQ ID NO: 45171 - DNA, 223 bp, Arabidopsis thaliana landsberg
  unsure (1)..(223): unsure at all n locations
tgtatgtagtatatgtatatatatactcatatgtatgtctatatgtatatgtatatgtctatgtgttcgtatgctgtactattatgtatatgtattctctatatatatctgtantcttctatgtctatatacgtgtatgtgtatgtctctctgtatatgtgtctctatgtctatgtgtgtgtctatcatctattgtgtgtatatgtgtatcttacactgtgtg

SEQ ID NO: 45172 - DNA, 238 bp, Arabidopsis thaliana landsberg
  unsure (1)..(238): unsure at all n locations
tatatatgtggtcttgtctgtagtgtatgctctagtatgtgtacatgtatatatatactatatgtatatctatatgtgtttgtatcatgtcttgtctctgtatgtgtgtcttttatatatatgtnnnnnnnnnnnnnnnnnnnnnnnnnnnnnnnnnnnnnnnnnnnnnnnnnnngtcctctgtatatattcnctatgtctatgtgtatgntcttatcgttgttagtgtatgtgtgta

SEQ ID NO: 45173 - DNA, 531 bp, Arabidopsis thaliana landsberg
ggtcagcgagtaattcattcccgggtgacataagtgttatcaagaaccatccatatgcctccccctaaagtgtcggcctgacccttttccaccctcccgttctgccctgtgagacacactaatatctttccctttgtctttatagggtcaagcgatccaagtttgcataattgtctgcaacaaagagagagattcaaaattaacaattaacataaaacatttggcgtaattaagtaaggagattagccaaactcacgcatccaaagctgaagcgttcttagcttttgcatttacagatgccataattggatagaacttagcatgtggcaatgccgtggatgacaagctttgtccctacgaatgaaaaagattcaagctcaatttcaagaattcattttcaagatttgagatagagatatgatccatattcttggacttaatatctaaccttgtaatgttttccattaccgagaacaagattgctagcaaactcacggtccatggtgctagcaccaacggtaatctgccatg

SEQ ID NO: 45174 - DNA, 537 bp, Arabidopsis thaliana landsberg
cgtaagcgagaaaaaaacgaaatttaaaaaatttattaacttaaaagacgacgatgacgatagcgatgaggacgacaatattattaactcttcaaatcatcttttctatagtctagaagactttgtagaaaagaattattatttttaaaataaaatttcgtgaaacttttcccgccaaccaaacgaactttcgcgctacataaacaaacggttatgaaaaatagtgaaacacacaacaacacatgttctatcctcttctttatacgttaggccaaaaaagctttttctatattactctttaacttcatcgattccaagagaagaaacgaagcatcagtgatcttatcctctcatagctaccaccgaactaactctctccatcaccaccataaccattgattctactggtaatgaatttttttcttttcttacttttttttacattttggtgtgaatctaaaaagtctctctttcacctaacgaacggattaatcgttcatgtcgctactcaccccaaaacaatgacttccggagatc

SEQ ID NO: 45175 - DNA, 740 bp, Arabidopsis thaliana landsberg
tataacaaacaacgaagtatgcaccggatatattactttcaccggtgcaattctcaatgatgtgttatagcagcttactacaaaaacatggttgaaactttttgacaataaccatgagagcaaaccagtatagtaaacctcttaggattcctatatcggttcgattttgtgggttttaaatcgaatcaaaccataaccgaatgcattataaaacccgtttccgagtcaaaaccaaactaatcacttgatttttctgtcattgtttattggcctatcggattggttttactgcggttcggttatccctaaaccgaaccgaaccgactaattattttctcagtcactctaaactaatcgcttaaatttaagaggctttttaagaacacgtggcagcatataattgggttgctttgtcagacttttttatagcgttacacgacgacgcatgtcacgcatctaaacgccgtttccaaaacagcgttttgcgtctcgacaaacaacaatcaaaatctccttactctgtctccgtctctctggttttcgatttcgtgaatccaatttttgtgtgtatgtattcgcttcgtctctccatttttcttcgtcttacgtttacgtaatccaatggcgattagatccttgggaagaaaactatcatttgagattctcagccaaaacagctcctttgagaatgatgatacatcaatttggccgatccagctcagatccaattaccggaaacg

SEQ ID NO: 45176 - DNA, 191 bp, Arabidopsis thaliana landsberg
  unsure (1)..(191): unsure at all n locations
tatgtatgtgtattctcctcctacttgtctactctatatatgtcttctgtntatatatgtactctatgtacttgtgtgtgtctactctcctttatctacttatgtatgtgtgtttgtgtgtatccctatctgtgtctgtactattgtgttttctattctatatgttctgtgctatatattatatgtatatt

SEQ ID NO: 45177 - DNA, 487 bp, Arabidopsis thaliana landsberg
tgatctaggatcttactgatgtcgtttcctaaaccttaataacattacattcttatcacacacaaaaaaaacatcataaattgatgaaatatatactttggacaattaaaactacctgttacgggagcaattcaacaaaacatcacaaatggttaaggaagctactcgtaaaactcctttatagcccaatgggccttatatggtgacaataaaaatggaataggctaattgggccggccgaaactagaaaccttggaggagcagtttctggttatcgtctgcccacgtaaacctcggttcctcgtcgacgtctccgatcttcgtggtctaacgcaaaaacacacacatttatatactttctcgagaaaacgattcaaaaccaaattgacaaaaatggaaaacaaacaaaaagaggaaagtcaaatccacgattaagaagagtgactttgcacgcggattctagatgaggtcgtagagcaagagcgtt

SEQ ID NO: 45178 - DNA, 554 bp, Arabidopsis thaliana landsberg
ttactgctgcttcgtaatactcattgcctttatattttcctcattcactctcttcccattctcatctctctctctctacctttctctcacacaaagagttttttcttttaagacaaaaactctttcaaggttttaaatctttgaaaaaaatctctaaaactaaaagtgatcaatgaagattcggaacagccctagttttcatgggggtagtggttacagtgtcttaagagctcgtaacttaacattcaagaagtgagttcttgatcttataccgaacaaatccttcattatttttttccggtttattttcggataaggtttctaattttctagtttcattttctcatttaaaccacagagttgtgaagaaagtgatgagagaccagtcaaataatcaattcatgattcagatggagaacatgataagaagaattgtgagttttttttttttttttttccaatcgtctttacttaacaacttactctgcttaatcttaataaacacggattggtttttattaacatgttcctaatattgagccaccaagtttgac

SEQ ID NO: 45179 - DNA, 543 bp, Arabidopsis thaliana landsberg
aaactcacaccactattacaaaacatccaattgagtcttctccatattggtggagtcttctatcattttatttcatgatgttcaagaagaaaacaataagataaagatagacctgaaaacgaccaaagttattctgcggaaactatttgtacattccaaataattcaagtaagttttacacaaataaaactaagggtaaaaactaattttcgtctacttataaaaaggtaaaagaagttaaaaaaaaaaagagtaggaaattataaagaaatttatgaagaaaggagaaaaggaagagaagaagcacaaggttgcaattatggaggtttggacccatagtcagtgttcaccatcatttgtttatgatgccttatgctcacgcctgtctataattatctttctattatttttcaacattaaacctttactattagtcgtttgacgttaaacattcatatctcaacgatcaaacaataaaaagcattctcatctcagaaccgaaatttggtttcgattggattgactatattctccacgggtcga

SEQ ID NO: 45180 - DNA, 542 bp, Arabidopsis thaliana landsberg
gatgtcctgtatgaaaatcgaagcatggttagttaaatcaatatgaagatggccttagaatctccacttaatttttgacgtctcaagccatgaagaagtgtatcagcaattgtaggttctgttgttctcagcagatgcctatgtgagtcagcctaggacaaggagaaaagaaagtgttaggcactagcttctttgagtagtgaacatggcgtgcaaaatgactgcaagtacttactgcagttgattggtcatctgcgcaaaggtctagcgctttttcgtacagctgcatatttaggaaagtctgccaaaagggaatccaagaaaaataaggtcacaaaatactatgtgatggtgctagtggtaaacagtggaaagtcattggtagtcaagcgaaagatgcaactatagttgaagcagttggtgtcatcctcatcaagctttttctgcagatcatcaatcaagcgcaaaattcagactgcattttctgtgaagattttctttcttctctccttcagtgaattaatgagcatcggattcgattt

SEQ ID NO: 45181 - DNA, 267 bp, Arabidopsis thaliana landsberg
atgtatgtgtatctcctcttatatagtcctattataactcttatgtatatatgtctatctgttctacttgtgttatcttgttgtgttgtacttctgtattatgtgttatgtgttacttgtgtgttgtgtatgtctttgctgttactattgttatgttttgttactgtttaatgtgtcttgtctatttgttatgttcttcttctcttcttattgttgtatatgtattcttatcttgtatactataatgtgtctgtttctgtgtgtgtt

SEQ ID NO: 45182 - DNA, 602 bp, Arabidopsis thaliana landsberg
gcgcagaaagctcagaagtcactcagcttgagaaaaatattcaaaactaaaattattaaagctaacaaattttgcattttgatttatttatataaaagaaaatttaagaataaagttaacaaatgaatatgtagtgtatatagaaaaattatttacacaacactccacttgttcctaaatatccaagttttagaaagaaagaaaatgtttcaaaaagatacattttgctaggttttctaagcattggtagttagttatggatgataaattgtagactacaagacaaacaatagaatggtttagagttttaaaaaattgttaatcacaaaaaaaaatggatgtatttaatatcaacctgttacaaattggattaatctggaatagagtgagtatatattacttttgatagagaacaatattgttaaatggtaacacttgtagaaaacttagcataatctgccacttagtggaatatcttttaccatctaaatgcgaaagatatttactcctaatttttctttatactacatatatcctagtggatttggaggaaaattaattttttaagagattacgaggaggtgaaaaagaaatgtaaagtg

SEQ ID NO: 45183 - DNA, 433 bp, Arabidopsis thaliana landsberg
  unsure (1)..(433): unsure at all n locations
tactctgtctctatgtgctctctatgtatgtatgtatgtattgctatgctatatgctgtgttctctactgctgtgtgtgtnttttgtcctctatgctatgtgttgtaatatattctcttgtgttttgtattgtgttgtgtttcctgtattattctggttataatatctctctttattatatattctaaatatgatattatgctcctgatgtattatgtggtttgcatgttgtttgttgcctatgttgttgtgtaatcaatgtatgttcctacntgtattgaatatgtaactgttgtgtacttccatattgttctaatatgtgtgttgtatataatactctgttcttattctatgtgtgctgtattgtgttctatctatactgttgtatacctattctatccctatatatctatagtgtttctgtttgtgtgtg

SEQ ID NO: 45184 - DNA, 690 bp, Arabidopsis thaliana landsberg
ggaaatcggatgtaatacggaaataggtaaaacagtataaaatattggtaagaaaaagtggtacgaaattaatgatagtaaaatttttggtaacgtttttgtgtttggtagttagtcggtaagtcttgtatcattgtcgtaaggattcaacgattagagccggtatgataatatatttgtaaatagttaattcagagtttttttttataaatgtgatccaaattaaaaatggattgaacgaacggcataatattaaaatgggatcagagaggtaggtgaccatttattaatatgtttactactatcttgattagacaggttttatgatcattcttaattgtaatttatgttttaaatattaacgtaccaaactattttaatacaaaattattgttaaaaaataaaagaatgaaaatgtgtatttgatttgatttaaatgaatgaaaacaagtctttgtccgaaaaaataaaaaatgaaaatgtgtataaatatatttgttttttttcttgttaagagtttgtacaaaaaaactataaacataaacgtataatataatgaaagtatatatctttgtggcaattattcctaagtccacaagatatagacattaattgtattaatgtttacaaagaaactataaacatgaattataatgcagagcttattcctaagtcttaaataaataagct

SEQ ID NO: 45185 - DNA, 758 bp, Arabidopsis thaliana landsberg
agttcactggaatcgtaagtcgtaactatctgtcatgatataatcatattttagcttctttatattaattttttttcagggccacgatgtcattttcagaaagatgaaaaggatataattattaaaatttatatataaaccaaagtatattcagtcttttcgtttgagaaggtccattcattatggtatgggttttcaattctcactgtacgcgaacagtgatattcaacttcatcatctcaagccacacacgtatacacatttaactttacagataggtacatttatagaattgtacaacagttcttgttacgcgtatgtacattcgtcacgtaaccctttactaaagcatatacagtgtcagtattagtatatatatcatgtcgaaactatttttgatttctagcaatttcttttgaaagtgataaattctatatcgtcaagcaatatttaataatgaacttgcgtttcctttttaaccttatacgtatttatattaggaaagaaagtacatgagcaattgagcatacatctttaagtaatcaactaatcaaaaaaataccttattaaagactggattatttatagcatgaataaagtaccagctacaatattagccccctccccccactatatttatatgtaaattacgtttgtgttgacttcattttaagatgtcagtatgtcactaatattggacgtaaggtgataatgccagactttaatgaaggcaacttccaaacaaatgaagaaaatga

SEQ ID NO: 45186 - DNA, 690 bp, Arabidopsis thaliana landsberg
  unsure (1)..(690): unsure at all n locations
gtgtgcggctcatcaaattcttattactaccggtaattctccctaattcaataatggtatactgctatatattgactctaaaattaattacgggtagaccaatgaaatagattctcatacttgtaaaatactctactatttatacatgcattaaaatattcatacatataattctataacaaaataatgtatatgatatataaaattattatattcttaatataatataagcaaggtggtggcaaaaagaggtgccatcggagaggatgcgcaccaaagatttctaccaaagaaattattttaattaggaaaaacaatatcttatacaattaaaaatcagaacaaaatttgaaaagaagagaaagaaaaaaggcaaagactgtctagctccacttggagtccacactaaaaagatcaaatgctatgcgaagatctgaaatagtacacattattttatactatctattatataaaaaatgttaatatgtaataaaatctatgtatgtactgcgtatttaatattctttgaagataattagatgcccttttctttatattatctgtaacttaaatcaacgtataaagcgtttaatatcaaactcaaaaaaaatatgtatggaacttagaatcatgaattagccgnacgcgtgtatatatttataatataatgaaacaaggtgaatcattctt

SEQ ID NO: 45187 - DNA, 287 bp, Arabidopsis thaliana landsberg
tgtatcagaccagagtccgtcgtgtgtctccgatgaaatcattggttgttagatccgtctcggcggcggcgttagggcttcccatctcaaaaagaggaggagaagacgagagtaaagagagcttaagagccctttcgtcttcttccacagctcgtctcacgtcgaagcgacaaaggtaaatgacaaaacataaaactcgctcagagttgtcgaatctcaacgcgacttcgtctgaaaatttccgggaaacttgggattttccgtctatcagaatctaagtcttctca

SEQ ID NO: 45188 - DNA, 725 bp, Arabidopsis thaliana landsberg
atgtgtccattcatagttcacgtgatctaagatctgcaacatgttccggtttgtagtcactcacatacaactaaactgctgtaagtgtgatttttcattgtcatgtgcttctatgtgcagtttggcactttagctcgtatgcttcagtcagccccacctccaaaatttgttatagtcaccatgtctaagagggttcctttggctggggaagagttaattgcatatgagtaagagcaaaacagactgaaaagggaagaagctttgcgagctagcctcgtttatagaggaggaaacaaaagcttcccatggatccgatgataattcaagtgaacctatgatcatacataccaagactactcacgatggtaaattttttcttattttatataacattttattacccttgaatattctgtggcctgtaacttcttatttttcatgtaaactttaacttaattgaagtatctagtactgaaaatggctatgcacatagtaccctctgtaatgtactggttagttggttttaggaggcatttatgtggttatcttgagtgacctagaagctacatttagaagtctcacaatacatttctgggtaatttgtttagtttttcacagtcccacaatatgtgtctgtttcaattagacctctggctaccgtcgttgattgctcttctttccactacatagtggtctgcaactgaccttttacatttatgactact

SEQ ID NO: 45189 - DNA, 551 bp, Arabidopsis thaliana landsberg
  unsure (1)..(551): unsure at all n locations
cacatcggcgagcgggccgccgaccacgccgagccagttgctacgcggcaccggaacgggtgttgtttcctgaccattgccatagtagccaccgttcgacagtgctccggtattcttattgtatgatggctgcggcagatacggcatgccgtagtccggaatgcnnnnnnnnnnnnnnnnnnnnnnnnnnnnnnnnnnnnnnnnnnnnnnnnnnnnnnnnnnnnnnnnnnnnnnnnnnacgccccagcgcttgacggagacgttatcgcgatccggggttggcacgtcctggtacatcgcggagatgcgcccggagatgttgtccttcttgccgctggcgtcgatcagggcgcggtagccgccttcgctcgtgccgctgatgatgccgtcaacgaagctcgcgcccgtcggcagtttcgacaccgtgttgatcgcgccgccggtcgaaccgcggccgaaggcgaaggccgaagggcccttgtagacttcgacgcggtcggcgttgaacaggtcgcgcgtgtaccagcctgggtcgcggatgccatcgcgga

SEQ ID NO: 45190 - DNA, 559 bp, Arabidopsis thaliana landsberg
ataattatcaagaacatgtataaaattagaggaaaaagttattaattagtgttaatatttgtatgtacagcacagccatctctgctgtacacatgagcaggtgatgtctattttttgtcctcatcccaaaactcagttgagcacaataactaacagagtctctctaattatataatttccaactaatctttaatattatcaacacagaggtgaactaaacaaaaaaacagaggttgagatcagtatcaccaactaggatcaaaccatataatttgtgccaattttcttacgattaattcggcaggaaaggagtaggattagctcatgtcagaaaatgagaaatttgaagtggctgactacaaactcaatattttttaatgatatatattttttaaaaaatcatcacagttattaaaaaataccactactctgtctctaccataatattcttaatgatagtttagtcataaaagtagagtttctttagttttatggttcatgaagattttttacaacgttgttttcaaaacagttaagactatttttcacaacttgcatc

SEQ ID NO: 45191 - DNA, 702 bp, Arabidopsis thaliana landsberg
agatatcgatatctttcgtactcatctgctttttctggtctccatcacaaaagccaactaggtaatcatatcaatctttctttaccgtttactcgaccttttccaatcaggtgcttctggtgtgtctactactatcagttttaggtctttgtatacctgatcttatctgctactgaggcttgtaaaagtgattaaaactgtgacatttactctaagagaagtaacctgtttgatgcatttccctaatataccggtgtggaaaagtgtaggtatctgtactcagctgaaatggtggacgattttgaagaagatgaactctcattgactgaaagcgggttgaagagtgaagatggcgttattatcgagatgaatgtctcctggatgcttttattatcatgtttgggaatttaccaagggagaggtatcagaatctatcttagaaggttacatttagctcaagcttgcatcaacatctttacttagagctctacgggttttagtgtgtttgaagtttcttaactcctagtataattagaatcttctgcagcagactttagagttttgggatgtagagctaaccagagtcggtttgtttaaactagaatctttttatgtagcagacttgttcagtacctgaataccagttttaaattacagtcagatgttgatcttgttggtaataatggagaaacggaagaataa

SEQ ID NO: 45192 - DNA, 624 bp, Arabidopsis thaliana landsberg
  unsure (1)..(624): unsure at all n locations
cacaattacgttgttttgcggtcgaccaataccatccacccttgtaaattataattctacaaaagggaaaaatatgaaccataatctcccttttgcattgactatggtttgactcaatagtgaaaagaaaggttttattagctggcgatgcgaccttttggcctgaccccacgtgcttcttctgcatctctcattcttctttattacacactcgttatatatttactactagtaaattggtgttaagtatatacataagaagagatacacaagaacgaacaaatattgtttctgcagacgtgaatgtaagggtattaatcatccatgtatagtatcttggtctcattttcggaaccatctggttatagttaaggtttgggtctctacttcaagtcactcggcctctatcaagtaagtatataacgtgcagtcaaagaacgcttttctcaggtgatgaatggcaaataggtttatgacacgtgtctttcagttaagaagcccctattctctccagcgtgactagtcaaagattaattccgaaataattgatttgaccttnctgaaaataccaataataatatactctaaaaatcttgataatatataatgggttggttgcaaaga

SEQ ID NO: 45193 - DNA, 529 bp, Arabidopsis thaliana landsberg
ctgaaaaaaaaaacaaatgaatctaaacgaataatagagcgaaaactgatatggtcacattgctattagtcatagtcactaatttttttcttttttgaaaatgtttatttttgcaacaaacattcaatctagaacttcgtaatgaaaaacttaaatatttgaaatttattgggataaaaaacagtatttattaacacaaaaatgtatatttcacataactaaattaatttaaaagccgactaattagtttaacccatggcaaaggtaaaatgagaaaaccgaaaattaagatgatagaatcgtatatttagtcatcatggaaataaaatttaagaaaatccaaacaactattcttatcataacaaaccagaaaacagtttaaaaactaattaattaaaccatagaaattggtttgtgttaatccaaaaaattaccgtcaggtttacacttgggggggtcttcaaagagagaaagcgaaacctgttttaaagcaacgccggatatcaacacaatgacgccggaatttgga

SEQ ID NO: 45194 - DNA, 168 bp, Arabidopsis thaliana landsberg
ctctgagttatgggtaggtagaggatagtttatgtgtggggatggcatttatagtgaagatcttaaaaccctaaacagggttaggtttccttgttaagtttgttcacggtaatataaaacgactgtgggcctgtataccaggcccacaagataacatataaaaaaaat

SEQ ID NO: 45195 - DNA, 495 bp, Arabidopsis thaliana landsberg
  unsure (1)..(495): unsure at all n locations
cggggttaaatggatgacgtttcgtacggagaatttcccgncggtgatattaaacgcccagaaggggctgcatttgctcggttttctcgcgggtcgggaagtccccgatcctgacccggaagtaaggcgactgataggaaagataagtcctgtattgcggaaacagttccatgagcttcgccttggcggcggaggccttggcnnnnnnnnnnnnnnnnnnnnnnnnnncccggaacccgggcatgtttctcagggcgagcgtgttgacgtaaatctgtttctcgatcaagagctggatcctgggatcctggatgacactggcggtggcgacggcagcggtaccggcaggagccgcagcggcagactttctggtgttcacatgaaacgcatcaggcactttaccgccggattgcgcgcgagccgggatgactgcgtgcagacataacagaagggtagtcgcgagaatggctgttttcatgatcgatacttgttttt

SEQ ID NO: 45196 - DNA, 858 bp, Arabidopsis thaliana landsberg
aagcaggcgttcctgcgccattgtatatttatttagttttggttaccaagtgatgttttagtggtaattacattccattgggcccaagggaacgttcacaataaacaaatatgaaaaaccttttgtttcttgttcaagaaactcgacctaagcaataccagattctctaaaacaatacaaactgggttttctctcttatgccaaccttttcctgtcttgagtgaaaagcctagttgatacccatttaaacaaagatctataaagacaaaatttgttgaaaacttggctttccattagcaagtaattatttctttcacaatactaaagatgaattatacgtatatttgtcgtaaataaacgggagtgatatattatagaaaaatattttaaaatagcactaaaacaagtttaatggacaattaaaataacattgtccgcaaatttgtaaaattagcattagtgaatttacacagtaactattttataattatataaattaacaaaattaattacaatttgaagtcacgattaatttacaaacaatcgtgtgaaacgtcaatcgaatgttaataactttttattagttttattattattaatttgtgttttttagagtgttagagatgttgtgttaaatttagtaataaaacttactttcatgctatttatgagaattgcctatttctagaccaatttatttttaattataattcatataattaaaattttattgaattattttagctctaacaaataaaatgaaatttagaattgttatataaattttaaatgactcaaaactgatctttgttaaacatctaaatattgaaaagcaaaaggattaccaccgcacactat

SEQ ID NO: 45197 - DNA, 667 bp, Arabidopsis thaliana landsberg
aacgacgatgatgaaggtaagctctactaattcatcgtcttcgttccataattcattggcgccggtttgctttactcttccatcatgattcattcccgcactccaactacagaccacattcaattactcaactactgcatatcttctcttttattccatcgaggagctcatcttcggtgtcagtctgtcgcaattctatcctgccgacgtacactattccatcaacacatgtagaggacacatacacattctttgggtttaatcaaaaatgttctccatcgcctcatctgattttggtctaactctatctgcaacactccgccgtcgagatagtctcataaacggaatgacgctaatagccttgggattaatttggtgacccatcatagttttcttggatcaaactaacctaagctattaagtgtgatggtaggggaatcaagcgtatctaggacggccttagagagctgacatatgatgtcgaagtcatgaaggggttctactcttagttaatgaatctttattacaataatgcttctcacgatggtggaatgttagtaatattatggtaaactttaccaatttagaaggtgcatgcaatgtgaatgagagtgggcttatgactagatcgactactttaggtttaaaaatgaaaaacaggtaacga

SEQ ID NO: 45198 - DNA, 465 bp, Arabidopsis thaliana landsberg
cagaggggcctcgaatataagaccacaataagtttggacttaaattttgtaatatattggcccatttatataatttttatttgtcaccatagaaagcctttccttttctttttctgaccaacatgaaaaaagcatttctgatgtattttcttacaaaccttttatatacgtaactataaaagattagttatattgatacaagaaatagtttaatcattgatgcatgccgtctagaagaaaagaaatattttattttgcttagaaaaaagaatgaaccacatattaggtgtagtatacttcatacttgttatcatgtatgtaaactactaatacataggtaagtatacttgtttacgcaattttaacctattattgttgatttcttgtcacagaaagtgttatgaatcaactttcaaataagttaaaatttactcgcccaaaaagaaagaaaaagtatcaattaat

SEQ ID NO: 45199 - DNA, 628 bp, Arabidopsis thaliana landsberg
taataaagatcagtcattaaaatgaatcatgtggatgtaattctcgtcgtctctattccgaacatcgcaagtattgttttccttttgcatagtgcattttttaaaatgtcatattccaataataatctatagtgatactcgaccactatttccggtttgacgctagcatttccacacgcgtgattaactattacatgtcgttgttaggtggtgtcagattaactatgaacagaaaacgaaagaaggaacataatgaatgaacataatgaaactgcagaaatcttttattataggaaacgaataatctcttctgattctatactagaattaagcctgacatcgcatgatttctgatgcacttgtattatgtaacaagacccatttgcaattgataagtcatttggagacccactaaacagaaaaaagtgaatattccttcttttttttgttctttctcttttgacatagtgaatatttatactttataaatcagtaatattcgatgatcaaatgttttaatgtgtggattctagtgatcctctaataaaagtgttaaatttcttttacgacacatggaatttatatacttttagtagtccgttcatgacttaagcaaaataatagtatc

SEQ ID NO: 45200 - DNA, 276 bp, Arabidopsis thaliana landsberg
tggcaactttacaaaacttcgttgttgtgtttgattcgatttatattagaatctgatgcttctttgatatagatataaaaagatatttaggctatgttatggacaacgacggctaaagattcttgacgacgaaacatcctctgttttgctatgaaagcttctatcgttttctgaaactcttcgttgctcagatcatcctctggataggatattctcctcctcaaagtcataatagacctcagacgctttgcaaaactcttctggctccgatctcct

SEQ ID NO: 45201 - DNA, 731 bp, Arabidopsis thaliana landsberg
attcatttatctacatcattaaaaaaaattggctcactggattttcaactaaacctcgaccctgaattagagagtcgttgtttaagttattttgtttgaaagttacataagcttccaacccaaaattaattggctatatgtggaatagatcatgtctcttatattatactcaaagtatttctcatcttttagatgtgggacattacatgctacttaaggattatggaccttaatctcttggtccaataatccctactttaatctctagcatcctctctcgagataatagctatacaacaattaatctcggagattttatgacacctctctcatggatccgaggtgtgggcccatcgcgaacttgattacagaagcatttggatcgtgctttgataccatattaaagttacataagtttttaacccaaaaccaattagctatatataagtagagtggctcatatctcttatatattacttaaagtcgctctcacttttgagatatgggacagtacatgtttcctaaggattataaattttattttcatggtcagtaatccctaccttaatttctaacactttgtaaagaccagacaacacaaccatcaccaaaacatatcgtccaaattcatgttttctaacatgtttgtgattgtgttagtagtataaatcgaactcaggaaatagcgaatctatgccttatcacaggaaatatcactttgatgcaagcgt

SEQ ID NO: 45202 - DNA, 625 bp, Arabidopsis thaliana landsberg
  unsure (1)..(625): unsure at all n locations
ccctaacagctagtcatcgttttgcttagaacgtacacaaagacacaactcctgagacatggctcgtggttttgtcgatttctatttatttaatttaatttacctattttaccttaatcttcttcaatttttacaaagtctaccaccaacatccacgttgaaccggtttatctaacataactatacatccaaattgttcccatactagttattgtagatgtttcttcacaagaattataactatgatgaaaatatagagaataatacaaaaataagaacactattcttaacacatatgacattgtattatcaattttaaaacttacaaaattgttaggtaacgttctgatgaaaattagtctgtaaccaattaatcaaagagcataggctttatatatatataattgattaatcataacttttaaaatagcatgttaaatttctatcttagtatatcatttgtacatttttaactttntatattagaataaaataaaataaaataaactattacttatgcacctattccgtttatctggatatcttagagtaatatacatgtaagctaaaattgatttggctaatattaaaacgtcaatatatatttaatcatctaggcgactaa

SEQ ID NO: 45203 - DNA, 1100 bp, Arabidopsis thaliana landsberg
tcaacctaaaaactctatgaggtgatagtgacagtgttacacactcaggcgaaaacatacttggctacctacaggacaaggggcataagagaatccggtaacgcttactttcattaggcatcgccgtgacttagagcatcagcctctgctctggccataggatcatttttggtatctgtatcttcctccatctctccttgtcgatcttccgccaatttcttcctgtgaagctcctcagcagtctccatggcagccttgttctcagcttgcatcttcagaatctccttctcctgttgctgcctctcaaaccatgtgtctgcatctgcccaaactgaaacaaaccaacaacaccaataagtcccatttgttaaacaacgagacaacctctcagcttaatcatatatacaatcgagaagcaaatacaaacttgacctaacttcaaatccgcaaatctaacaacactaattgcagaatcaataataaatcacaaagaacactaattgcaaaccctaatttcataaacccccaaatcaacattatcaatagctcaaatttcagaaatcaaaaggagaagagaaacagtaattggaaacgtacgtggatgagcagcccaaccctgttcaccacccttaattttctcagggagagcataattaacagtgagaacacgaccataaagctcagcaccgtccatattatccatagcagcagaagcgtcttctctctcaagaaaagtaacgaatccgaaggatctatgcttctgattcgcttggtccaacggcgtcttcacgtctttgatatcgccgaaaggtataaacgcggcgtgaaggatcgattcgttaacttcatcagctaaacctcctacgtataaagtgttcttctgcatcgcttgttgctgttgaactgccgccattgttgaaatctgtttcttcgaattccttctcgcttctacttctacttctcagggaattactggaaaacaccagagagaagacgataccgatattttttttctttttttgtttccatcgtataaatgggctttttggcggattggcccaataatacatatgtgtttttgtgcgggtcggtcccaatgg

SEQ ID NO: 45204 - DNA, 434 bp, Arabidopsis thaliana landsberg
ttcccttcccctgcttgatctaaaaaaaatcttttttggcttttcatagtcgaaccttgccgtacggatgtgttaaggaaacaaatctgtcatggatgcattcgtcctttcatcgcattcgaactataacattcttgtctcttatccacaggggtggcgtcacgacctccccgtatcgtcggaacatgtacatagacagattaatacccgtatgattagaagggcatccctttcatctcacagaatgagtccgccggctctctatagggaagctactactctgacattataccttgtgatgtgggtaggatttcattcactattgcgtctaaattgcatggaatgcggagtgagttggatcagtgtcatggacccgggcgagctctgctctcttgagttaagcgcggattgtaggagggtttctcacttcatct

SEQ ID NO: 45205 - DNA, 687 bp, Arabidopsis thaliana landsberg
cttatactcaaaagctacataacttgatatagactcttgttctgtgtctcgtcatcacacttgtgggtttctatgattgaatgaatgcttttgcttgtcttaggattacggagagggaacaacatcgtgaagaagcatcttgaatctcactaaatgcaagagaaagcatttcaatgccaaatgcaagaagaatagagattatgtgctttgtttccccttgttggaggattgctggcggaatttgtttggatccataagttatgtaaggctctagtcttccaagacccatcacgatttggctctctttcagaacgatctcgttgcccaagttttgttacattggcaaacatttgacagctgataaaatttagcttgtttctataaatcaagttattattattcgtatcatcaagtaacaaaattgatcttacactttgacgattaataaggcgggaacatgttatcgaaaaagtaaacttttttttttacatttatggctctgcttcattcttcttcttcttcttctcaagtttcaacttttattattccaccgaatctgtgcatatggctaaacaaaatgaagaacaattatggaaacagatttatgattcaacacaatgtagatgttcattaagaagaaaaaataaaaacctaaatattgaatggataccagttgccttttttacc

SEQ ID NO: 45206 - DNA, 779 bp, Arabidopsis thaliana landsberg
  unsure (1)..(779): unsure at all n locations
aaaatccaatcaaaaatcaaaactttatggaaacccagaacaaggaattcagaaaactgataaaaattgtataccaagaatctctcgtagctgttggattttatcttcagaaggaataacaccaggaccaccattagagaacacttccttgcaagtattaaacaaccgccgcaccgcagtgatcccatccgccggggaatcaatcttcttccgtcgccacgtcatcatcatcttcttattcttgtttttgttcttcttcttcacagaattgggattagacttgcattgattcttactagaaatcaattccaaaacctctttctctggtttcatctcaaaccccataaaagtctcaccaaacccaacaaaaaaaaaaaaaatgtaacagtgtatcacgaaatcaaaagtgtgaatctgggaatggatttaagaagaataagaatgagatataaaaacagggaaaaataagaaaagaggattataccattatcgattacaaaaccaggggccattcttttgtttcctatgggctgtgtttttttcaaacagcggattctttttttatccgtttcggtcttcgcaaaggggcaaatttggaaacacatacactntattaaaatattatcatatgttttatcggtttactctaacccggttggttataaatagccggtttattagatttgttttatttacttacactggctgaattactatttcactcataatttgtcaatttcatagattcattcatataaatttgacaaataaaaatacat

SEQ ID NO: 45207 - DNA, 696 bp, Arabidopsis thaliana landsberg
ggaaaagcgaaaattttaagtttgtttttctgcatcatcatagagctgatcaggctactggactctagccatctattgtgtagaactccaccgctttgctagtcctctaggttttaataagaatcattagtaaatgtacaactttctcatggaactagcgatatttgtaactgtgaatgtttgtgctgtcttttttgagttgagttattagttttgtttactcttgttctgcttctaattttctcttgtgatatttctttgccttgtagatggtcaccttacaggacctgtaccacaaaatgtatgatctgcaagcagcaagtgcatcaagatggtaaatactgtcacacatgtgcctatagcaaaggtaaatagttaatacatctgttttactctactaaattcttacctctggttggatagtgatattatagagtaacttaacaactgatggaattgcctcttcatggttgcgcaggagtgtgcgcaatgtgcgggaagcaagtgttggacaccaagatgtacaagcaaagcaatgtataaacaaatccgcaagcgtttcacattttagttgttgtccctttgatgtcaacgttgtatcctctcactcatgtatttttttgtaccggcttcctgcggttttaatataaccaaacagaatctttgtgcttcactgggtttcttgactgatcataa

SEQ ID NO: 45208 - DNA, 676 bp, Arabidopsis thaliana landsberg
atatttattatacatttgaacttgaattatggcacagcgatgacattaacacattccattagattacaatatttcatgatatttaatgttttgaaagattaacagtatataacttgcttaatcaaactgaaaatacttttcttaaaagaaatagattcttgaagaaagtaaatctcatgagaagtttagatacattttacactcacaaaaaaatagaaattgatctaagtttcccaattggtctattcataaaaatgcaatcttcctaagctaagataataaaaaatatcgacaataatcctataattgaatatcgacgacggcttgtgattttccataggtctctcgaatgatcaaatggtctcttcctagctccttctttcgaacatttttggcttgaacaaagcttataacgcttgaaaacatcctaatcccgcataaggatctaaaacatgtacataatttaagacacgatagtaaagaatcaaagatggattccaacacgacaaatgactaaaaacaaatactacacaagggaaaaagataccaaaaaaaaaacacaaaatctgaagaatataaattgcctaaaagtaattaaaaaaactaattaattttagatggaaagttgaaaccatacattatctaatttaaaacatttcttactcctaaatcatca

SEQ ID NO: 45209 - DNA, 874 bp, Arabidopsis thaliana landsberg
  unsure (1)..(874): unsure at all n locations
taaacaatttttttttttttagatttaacatcgagtattcgaatttgcttatacatccgtttaatttcaaaactgaacagactttttggtatatttaacttactagatggtatatggttttagactcggcctacgacaaaaacaaaacaagtaaaattatatattaagatctccaaatttaaaatcggattattagatctttgtcaatatttatagttatttgacagtatgacactatccgaagacattttagtatttactaattactattggtggacttttttaacaaaaaaaaagttaaaaaaaaattatagtgaaaattcttgataagaaataaaatctggataatgtataaaagaacccaattttctagatttggggcactgtatccgaaaacattggaccagtcctaataattcttgctaacatcatggtgtttaacttatcctcaaaactttgattttgcaagatacaaaagaacacaaactttgaatttatgttcaaaattaggcgttacaatattctaaagcacaccaaaaacacattcatataataaaatcataatacaaaggaagcaacgaaatggaataatcatgaaccttagaagattccatgtaacttccattaacgtatttaaataagagatcatgttggcgcggtggtctttgtcctctttgatgcgccacgtcagtagcaactagagtcatggtccgtttctgcatactcatcaacacgttgtgccacgtgttaacccttgactgttgcttgccgtgaaccccaacgttcatttccgacaagtcctcgcttctcacgcncatcactttctctggcttagcacccgctaggatccagataagacaagacaaaacccttt

SEQ ID NO: 45210 - DNA, 599 bp, Arabidopsis thaliana landsberg
agtctcctggttttaagcctaggactgttgacagaggctctgaaacaacagagagcaagaggatttcgtctagtaataactttcagagggaagccaaggctctgagaaaaccgctgggggtcctgagcgaagacaatcatgctcgagaagccaatagtgaccatttgttttccttgacttacaagcgaagaaaggttcagagaatcgcttgagctcccgtgacgctatgctaattcaatgttccacctaatgtagtcttccatgaaaatatgaagtgtaatgctgcaacttggtaactggatttggtttggggttgagtttgttagttttcaaaatttgaaggcactaaaaagaaacactaaagaaatagaggagtaaaagtgaaaataatctgaactattaaacaaattaccgataaggtcacattctttagcttttctctgcggaacacatcgagagagcttcttccaaaaacctcaaacgctcctcacacaacggtaagctcctccaaatctcccaaaacgttatagctttcgaaattaattatcatcatcgtcatcactcagcgattatttaccaaaagaatttttttctggagg

SEQ ID NO: 45211 - DNA, 653 bp, Arabidopsis thaliana landsberg
aatttctttgttaacgcgtttttgggtatgccatatttcacatcaaacacaatgtattggttgttggaggaccacattttcttacacgtctcggagacatgaagacgtataatgtgggcagatccaaaacaaatgttagttttgtcaacatttggtttttccaaaacaatgagaaagacatccatgtcaaaagattaatatttttttgtgttattttgcagattataaaattttgcgttattttcataatctccctaatttttatataactcaaaaaggaagaagattagaatccaaattcagaaatctaactatgacattgagtttgaaaacaaacataggaatacaagtgttgagaaaagaaagtactcctaaaagaaagcattaaccacactggctaacttgttatgcactttagcaacttctctctatcattcaccttcacattgaattatagcagattcctcatcttcaacttgttctgattgcgtagtgaaaagttcaccgctcgagatggaagacactcttgttagctctaattccctatactgttccggacttcgcggcaatggagtgctctgatcggtcaaagggcttgaactccttgagtaataggtgaactcacattatgaacggcattcttcttgacatat

SEQ ID NO: 45212 - DNA, 1003 bp, Arabidopsis thaliana landsberg
agaaaaggacagagaaaaaaaaagtgaaatttttggttaggttaaaaagcacattgtatagaagtttgctttttgttaacttttaataccgagtaatgtttatggcttttcctcggaatcacataaatcaataatcatttcgtgaaatagctttggagaacaagtatgtatgtatatatgccaatttctcaattccctgtatccaaaatattgaatcaatcaattgaaaatgttagattgtgcaatacacatgtctttttttgttttttccacaagtctaaaactttgtggctagaagacttgtttgaatatgtttacactttttgatcaaaaatacaaagtcctgtgggtttacttctgtttatttttaaagaaacgtttccaatcaaaatatttatagaggtataaaattaaaattacgttcaaaaatgtaatgtgttgctaatttgctattactcgagttcagtttcttaattacaaacaacttaaattatctttcaaaaaataatagagaacgcgtactatcattttaatgaagaaaccaaaataacgttttaataaatttaagacttgaagaaacacaattatgagttttaaatcattatgattcttagtgcaatgtatgcacgtgggcccttaaatatgcaacttgttgtatcctggcccgttgtcagaaattaataaaagatccttttccccaactaaaaaaacaatgatattttggtaaaaactttagtccctaccattttgaacaactttgattagatgaagtccggggccgattctgtccgatccaaattacgtagtcttggcgatttgttaatgctgaaaaattcagttttttttttccaaatcggataaaattggatcttaggttcttccgcgcttattaatcataacgaatttcggaccagtctttggaccaaatttacgttttgttagttggatgatcattgttcaagaccgaacaaatcattgttcaagaccgaacgaaagaaagtta

SEQ ID NO: 45213 - DNA, 641 bp, Arabidopsis thaliana landsberg
  unsure (1)..(641): unsure at all n locations
gttgaaagccttgaagatcagaatcacgtcaatattcttgaaagttactatagtgtggtaaaaaaaaaaaaaaacaatttttgtcgcacaaaatacatataataccaagcaaagacattatgcagatgggttgtgaattgtcttctctgtttaaatagtgtaattttactatttttacgtaaaattttaaaataagaaaaaaaccttacaatcttctttgttacaatattcaaactaatttttcttctctaaataaattaaaaatagagaaaaaatttgaaatttgatttaaaaatacaaaattactttttgtgaaatgaaagtagagtttcaaaaacgatactatttgttttgtgaaacccaaggaatagacgaagagtatgtagtaatttgttatagtaaaaaaaaaaaaaaaaaaattataaaaaaatgaagtatgtgtatatgtaaaataaatgggtgctgggtttcaacagctgtaagatagatgacgaggagacaaagagcattgaaataggtagaccgagcacttgcgttacgggaaaacgtgtcgatctcttttattcctcaatttagncattttcttgatttattttgaataaatgtgtaatttgaaaaacaaccatcatttatttagaagc

SEQ ID NO: 45214 - DNA, 591 bp, Arabidopsis thaliana landsberg
  unsure (1)..(591): unsure at all n locations
tcgtctaataccagcctagacaaattcctccaatcacccaacccttgcttcaacctgacaaactgcaaccatcgtgctgcagtaccttcaaagttgagagacgccacagtggacttcagaaaatcagggacccggtagaggttgaagtaatcttcacattgtataatccaactggctggatttgttcctccaaactttggaaagggcatccttggtatatnnnnnnnnnnnnnnnnnnnntctctgtccagttgcccagaactctcctctctacctctgtacattctttctcctctgttctgagaatttctgctgtctctttctcctgcttcttcattcccataacgatccatatcccttgccatggcttccacccgaagaagagaaacagccttcccggtctcctccatttgcttgcgaaacagcgtcctctcttcctccatggcatcaacctttcctgtcagcttctcgatggccaacatcatcttctcccagcgtgcttcagcctgcttcgcttccatggtgacagcctcgatcaccaaccgggactgggccgacgcgttaattgaaggtgcagtgatgaacaaaatt

SEQ ID NO: 45215 - DNA, 646 bp, Arabidopsis thaliana landsberg
ccaacatttgtttgtttaaataacaagatgttgtctaatttctcattcataatttgtctcttgtgtcgctcaattaccaaaatggtttctataaaataggtttttatggatttgtcggtgcactagctaaggttgttgccaaaaaagaaaaagtaacaatttctgttttgttttgatttgtaaacaaataaacattcttctctctcctttgatgttttttttataactttgcttgcaaaatttccatgtcttttacacacaaaatgaattaaaacaataaaaagaattaataagtttacctttttcgcggaatattaaaaaattgcgccgcttcaagttcaaaattagatgctaaaatgtgtttctgtccaaattcaaaccagttttgtcttgtcttgtcttcttcttcttcagagcattgcaatgaaagttccagattcttcttcaccgaccggagttctcgaagaattcttcagaaccgaagaattcaatagctcctccgagacggtcaagaacccttcctcttctcgtttccgcaagatggttcagcttctcagaagcaaatccaaaaagtctcttgagaatgtcaagattccgtttcacaacaatggtgttattaagagttcttttagaagatgcagtagca

SEQ ID NO: 45216 - DNA, 562 bp, Arabidopsis thaliana landsberg
atgaacaaaaatgggtgtccaaaaccaaaggagacacatacgaagctgcgccaagcaaactataagattgttgctgattcacaacagatgatcgaggaagctgctataaccgcagcctgtaaagtcgcagaggcggagaataaaatagacgttgccaaactagcagcagaagagtttgagaagatgacaaagattgcagaagaaaatagaaaactcctggtcatagctactgagatgcatgaactatgtaagaaaaagccagactcttttctcattattggctaagcaaaacaaaacaaaacgtctctaactttggtattatatggtctgttttgcaggttcctgcggggagactatgctcttggcttgaattgaatctatgggacattccttgtagctctcttcagttatctccggaatggcgttgataataatatataaaaagaaaactaaattaatttactaggcgtggcttttttggttgtatattcctgaacctacatacatatttttacattagcgaagttactttcgtataattttatttaaacctctttacatc

SEQ ID NO: 45217 - DNA, 552 bp, Arabidopsis thaliana landsberg
gttgcatgtaagaaacacaaataaaggacgcaatatctacaaacctcatgggttattcaaacaaagcacatcaatatttacaaacctcatgtgttttccaaaaaagcacagaaggattcccaaaaaaaactagagactttagccgcaaactctcgatggtcgcctaactttcattcatcaacagtacacgaaacaaaattaaggttagttaagaacgaaccaaactttatatctagacacaagcgatgattgacatgcaattaaaggtacaggggaagagaaataagaagagcgactgtaaataatcggaaatcagtggctctacttacccaaatcgtcggcgagggaagaccgaaaattaatccttcaattgtcaccggcgactgcaacgagaagacgatttgaaaaggataatcggaaacacaatcaatatttagaaacaactactacttggatcgaaaagatgagagcaacgacgatgaaattaatcgccgccgagagagtttttttcggtgagaaaaaagaaactctttttttttaattttaaggtta

SEQ ID NO: 45218 - DNA, 361 bp, Arabidopsis thaliana landsberg
ctgcaggtcagatcatgccgatatttaaagtcgatggtagaatgcttcctaggaaatgcgaaagattatatgtagtaaattatatatatactaagtggttacgaatacactcgagtagggcgtaaatcagaatactagacacttgtcagacacctgtgtgatcatgggcaatgaagaggtgggagctcgtatatgtgtctaagtcgcattatcgtagtagcttttgtgggcttagtcatgggattcctcgcgaacccgcatacctagaagtgcatcgaaaactgtcagcagattatgcggaatcgggatcgactcttgagtcaccggttcactcattcaatctactctgcactatgagtag

SEQ ID NO: 45219 - DNA, 544 bp, Arabidopsis thaliana landsberg
tgtcgttgtcatcccatcccaacattgcatttccatgttatagtccttcgatacatgatttctgcgattagtttcaagaacagttatctgggcaacagtttcgacttctccatccaccagaaacccactttttttgtccgtaagttcactaaggtgaaacaaggatccacccttgcttcgatccttcttattaaaacagtgttttagtcctgtaaaaagtcatcacaaagcatatataaaactgtctttaaaacaagcattaattatctaatagaatcttgcagcgcaagtaagtaatcactaatcacctatctgtcttgagagtttcttcgagaaaaaatttacgacagtaaaggaaaccttcacgacctttctccattcagaaggcaagaattcacaatcaacaagttccagatccagacaaaggaattgatgaccatctcgtttcttggaataggccagaaaatgcctgcacgcaaaaaccatacaatgaaacaatggatgacctcgcaaacctatattgaaataaaacgctagataactc

SEQ ID NO: 45220 - DNA, 1592 bp, Arabidopsis thaliana landsberg
gcaagctcgttttgccccttcaccagctcagccagtcctctcatatgtgcccagctcatatggttgctttcaaccattccaggtcgggacatcttattactatatgggcaatcaggtgccacaaatgtctggtcaccaaacatcaccacctacgtaagcatttctctgtattttcaaacatatccaaaacctgtcttttgcattaaatgtcactcatacttcctattattataactcaggttccagctgggaaagtgcctctcaaggagagaaggtcaatgcacctggtctacaaacatctggtatatgccttcattgacaattacataatgctgaatctttcattatctccatggtttttatgttgaattagttcgaaatgtttcatcagttgagagttttcatctctaaggtgatatatttctgcaggcttatcccgttgccaagaggggttctaaacagacactggtttttaagggtgaggttaacagaaatttagaggccggaacatgctccaaagcaacaacatctgatgagaaccgtaaagaagaacgaagattgactttgtcaggaaagttgtcaccagaagtgaaggtagaggaatcaggaaaacaattgcaatgattgaagcttcttaaactttggccctgctgctgtggctggagatttctcactgcttagaattctacgctgttcattttaacacttcattaggttttcctcatagcaatggtatatgtagatcttttgatcacacagggagatggttgtatatagtttctggtactaagtgttctcaactcttggtttagtacttgtaataagtttcaatatatttttagtaaaacagtgatgctttgatacataattcaaagaaaaacaaatgtatgactcaatgtgggatagaaacagcgatttgaaaagggaacataagataaatacttagagatcaaccgaggagagaaaagccctgtccaattagggcagtggcaagaatctcattggcagcttcagaaggatgtacactgtcccagaacacatactgtgtagcattggagcatgtcccaaacgattttgggttgcacaagagtgaagttgtctcgactgttcctgttccacaacatcctttggttgcttccgtgaatcctgttatagacaaaaagatgaatgtgtcatggattatctaaagcagatcagcaccaataaatgttataacaaactatatatatcagtccattttgaggacttaccggatttggaagggttctgaacaagatcataaagtggagagtagatgtcgaagacaacaatcttaagatcggaatattgcttctgaagctttgaagcagcagcgttaagcttcttgttaaagttttgagcatctgtgttgagtcttgaaacacagcctttttcatggaaaccgaaaagggttcttgcagcgggaagacatcctgttggaggcagagatgtcacaccgatcttccttgctccaaccgcatacacttgctgcaacagtcaatcaaaaactcaaaatgtctcatctttctttttctctattcagaacagaggataaccaaggaagattctaaacc

SEQ ID NO: 45221 - DNA, 1025 bp, Arabidopsis thaliana landsberg
cagacaattttatatacatatttgatcatatcagtttttggtttggattggataaaacgtgtgttcatattgtgttactatgttgagttttatgagttttcaattcaaaattaatttacaagtaactagattacctatgttttgtgaataaaattaatcaaatcgttcatcagttacaactaagaaataagaattatgatttgtataactattttctatccaatatttttttttaaaacataaagattctatgtaaacaaaaataaatcatatatatgttttcttataaaaatatcttcaagtggtaggagcttcttctgcgatgcttttgtactgcgaaagctgcaaaaaacatgtgtctctttctcctttttcatttttttctggttttactttcctttttggttcttttctttttttctgttgcaaataactttgtattcaagctcaaagactttcttttggaagagtctatttgttaccaaagtaaaaacatcacaagcaaattgtcttttgggagagtccaagggttgacgaagagagtagataacacatttgctgttcacaatcttggttctgatttacacaatctagctcgaaatttctggttaacatgcatagctttgagatcatttatacatagccaactatattgtttattcccaatgatcacctctgtattccaacgcgctgtgatccactaacacatacttgagtatattttgtcaacacaactgtttcatcttctgaaaatgtctcatttgagtatatctatacacatacttttataagataaatgcaaagtttacactaactcgtgcatttaactttagtgttatgaatcaaatagaccaatctacatctgtttctaactaaacttcaacacttacaattaagaatcattgatagcatttcacactgtttcatataaacccttgagcaaaaaaaaagaaaaggtagtagaccaatgtttcagttccactaatatgcaggggaagaaagcctgagaatgacaacaaatagct

SEQ ID NO: 45222 - DNA, 558 bp, Arabidopsis thaliana landsberg
cagggaaggtggggtccctctttggatacacttaattatcttcaacataattaaaatggtttttaaatttatcctgttttacataaaataaaataataaaatctagtcctacttaaatttctcaattcatctctaatacaatctacatgcatgtgcaagtttttgtttttcacttgcacatgtatacccgtgtttggaactctcaataaatctttttacaagaagaaatctatatatacgtaaataactaaatatgttgtatacaatgtctctgttatgagaaaaatagaattggttaattagtattctttctatgtctcaatgcatgtattattatatgtgatacgtacttcggtacctggcacagcccatgatcatatgatataactttcctttaaaagagacaaatacgacagctaaccctttttggtcaagactatagttaaaacttaaacatggtcaagttgcataagttttacggacaccgtatactactaactaacgtttcagaagtggtaattgagaagtgtaaagttgtttgatacttcgatggcaata

SEQ ID NO: 45223 - DNA, 645 bp, Arabidopsis thaliana landsberg
atcatttgccacacacactcactgtatttactaacgtcaaagaggtgtgactttccaatctttcatatactacttttcacaattttttcgacataatctctaaacaaaaacctaaaaactagttatttatttttacatcactttcctataaattggttatagttatttcacaataattcaaaattttcataatttcgtgctgatatactacattccattgttctttactaatttttatatcattattatgttctgttatttcattgtttttttagtattttagttacacttttttcaattgagaaaacttctaaaaagagaataatactatccaacaacattgaggttggtgccaccaacgcaaaacgtgaacaacgcgacataatagatctgactatataataaaccaaaatcaaataacaaatgtcttcaacactttgtcatcttcaattgaaaaaaaaaaaaaaattcaacccaaagctctgcttcgttgagctaaaacaatggcggaaacaactcccaaagtgaaaggccacgtcgtaatcttaccatacccagttcaaggccacctaaacccaatggttcaattcgctaaacgtctagtcttcaaaaacgtcaaagtcacaatcgccaccactacctaca

SEQ ID NO: 45224 - DNA, 855 bp, Arabidopsis thaliana landsberg
tataccttcacaagtaataataatgggacttgtaattaagtaaaacgaggctaagcattcagtattatagaacagttttagagaaaatgcctaaggcacgctttcttctctgtgtttctactcaaagttattaatggctaagagattgtgagacaatttcaaattaactctcttattttttctgctctctttgtctccttcatcataactacatttaatattcttacccatatttatttactgcaaaatttattcacaaagttgagtagtaattatttatagctgaaaagaagaaaaaagctgagtattaattctggttagaatttgtttttggtgtgtagacaaaggaaaagactgtcttaagcagtagatacgaaaatactttattagttatgttggtctgaaactgattagacctggtcaaaccaaaagctcctttttaatcaatcttttgaaaaatattgcctcctgagccacgccttttaccactacttaccataataaagacagagaacaacatatgtgtatgttccatcataatttagattcccatttgtttgtttgtcatcaaccacaatcattttcagtttcccctgtgtcctcttttttaccagacaaatctcagagaagattaatctacaagcatttgtctctatatgcccctattttatgtgtatatatattgttatttttcatagttatttgaataataccttgtgaaattaaatggccgaagtccatacataaacgcatatgatataatgtttaggccgaagaaagcccaaaagtataaataattaacagcccatatagttaagacactcgtcgagctcgtgtccttattattagaaagga

SEQ ID NO: 45225 - DNA, 192 bp, Arabidopsis thaliana landsberg
actcgtcattgctgcagctaaagtccatgagtgaggaaaagtgtgtctcgattcacgtgcccagcaatccactcacctcggtgactttgcacactttgctatacttccatacattattctgaaatatcatgtaatcatattcttacaattcttacacttcttatgtgaagagctctccgcagcaagcgcaag

SEQ ID NO: 45226 - DNA, 830 bp, Arabidopsis thaliana landsberg
ctttaaaatctatatcggatcgaagccaaataaaatgacaaaaatgtcacagtcattcatgattcttacacaataaaggttagtatttttttacaggagaatgagctacttgcagcccaattaataatgatttgtataaatcatactatatttttattatgcatcaatacattttctatttagaaataaataatacatctgtgaaccggccagaccagattgtggaccgtgcgtgatccaattcaacacccactctgtttttaaaaaacattgttacaaaattgtttcatcccctacattttaggtgtacattccaaaaccacaaatatatttattttaaatggataattgaaatgttctgtttgattattccaagcctataaagagttaccatatgaaagaacaaaaaaaaatacatatacttttcttataatattgttgtaggtattaatgtatatttaatatcgatgaatgttggtattgtgatttactgatatttttcttataatttaaaagttacaagtaaatttatcatttatgcgactccatgcatatgtcatccaaattttttgttgtttgttcatattttttttttgccttgcttctaaatgatcagttatcagatcaaactaaaactctttaagataattagataattagttagaccgttaagattgatttggatttactagaatttcgaaattaatttattggggtaagaaagaatgaaagatcattccaaaatttaatgtagcaaaattcctaagacccgtttatacggtaggaataaagagagaacagcttcacgtttttcatcacatagtaacgtc

SEQ ID NO: 45227 - DNA, 551 bp, Arabidopsis thaliana landsberg
gtgttcctctcctcttcctcgcatccttcatcggaatccgccggctcaatcgtttcggccttgcgttttaaagatagatctgcgtccatcacctcgggctcaaccgtatcgacatcactggatttgggatccattttttccccaatttcaaaaaccctagaaattctgaaaaactagtttgagaagaagaaaagtttcgtggtggaatgaatgattggctaacccttagtaaaaagatttggttggcccaccaaatcaatagaaaatttaattgttgggctaagtaaattaacattctattttgtaccaataaataaaaaaacaacctatgactataacaagagcgatggaaaaacgacaacacttgtgaggttagcgatcatgtttacgatttagattttgtaagctatcatatccacttagatgtagctttttcgagttatagatggcatatgtactactagacactgttaacaacatcgaaattaaaccccacaaacatagctgataaaacgatagatcatagcaaaaaaaatatcaagttcattttg

SEQ ID NO: 45228 - DNA, 507 bp, Arabidopsis thaliana landsberg
aagaaacatacttgattacattggtattttgtttttaagagtttcagatcatatagagattttcgtttcaagatgatcattataatttgtccattgttaggtttttctttttggttatgattttttccaatattgttttttttcttctgtttttatgtttgttttctgtaaatgcaaaatagctaattattgctaatattgctgctggatgtttagagagtacacttactctaaaaacttaaatatgtttcttcatgacattttttctataaaactcgagttactcgtatgacatgatggttcaacgttagtaaagtgaaaattcagttagtattagtcatcaacgagtagccttgtgatatgggtaagctacaaaaagatttgttgacaattgtataatgtatacttgtttaccaatattcactcacaatgaacgaagatgatatcgtaaagttaaaggtaagcaaaagctaagagagagagttaaagtgaaaaaagggagagaaa

SEQ ID NO: 45229 - DNA, 414 bp, Arabidopsis thaliana landsberg
ggatcacactatacccaataagcacctatgtacaaagcgcaccggataacagtccgcgggatgaaggtaaatttggcggggcgtcagcgccgacatttcccattaagacatcagaactatataaaggtaatgccggtatgatacgctctaccccatatggcaacagcatgacgcttgaccttgcccgtgcagccgttgaaggggaaaaactgggcagcattgtggatacagattttgttgcgtttagtctttcttcaccagactatgtaggccatcagcttggtcccaactctattgaggcataagatacctatctgcgtttggattaagacctggcagctgtcttcacttacctggatggaaaaagttggctaaggcaattatactgtgtttttaactgcagaccatggcgcc

SEQ ID NO: 45230 - DNA, 540 bp, Arabidopsis thaliana landsberg
ccaaacccacttttttattaactcaatgccaactactgttgttaatgctggatacactactattttattcacatatcttacctcctcatctcgttcacccatcaattccagagcagccgcgtgtctttgccttagtgcttccagctctgcctttatgcccgggaccctatctgcctccccccgtagcttctcacactacatccacagttaccagatatagacgaaatatcatcataacactgagcataatatcaactctaaactctcagcgctatacatacctctgctgtcattttgactagttcttcagccagggaatctcggatagactccattgatgcctgtccaaaggcaaatagactcttacagttagattctacagataacgatgatactaacaaccagcctatactacctcgacgagtagagctaaaccttctaaaccagcttataaaagaaggctaacccacggtgtgcaactaaccaataatttctcaacatgatccaaacaccccatagtgtcccattgtaaggactgat

SEQ ID NO: 45231 - DNA, 527 bp, Arabidopsis thaliana landsberg
cagaaatatatactcaataggcgagtgcaaaagtaacagaaaatttccaattatagattatcccttacctatgagaatgccaaaacaatttcatagactcgtacgcggcgaaattgatagcaagacttggtccaacaccctgcattacaatgtacgaagaagttaacaatcaacatagtttgcacaagagaacatgggaaagcaaactaagcataccaataatgtagcaccaagtcctttatatagacccaaaattccctcttctctgcatatggtacggaaagtatgctcaataccctggtagtaaattgcattcctctgggaagcatcaaatataatgcaatggtaagccaggaaaagacaaagaaactgttagatcaagtgaataataaagctttcaatcatcatattcaagaagaaaacaaaaaaacaaaacaattacctgtgcagcaagacgagtcctgacaagatcgaggggatatgtagctgtagcagctgtaattccagccaagccaccactaacaaaa

SEQ ID NO: 45232 - DNA, 613 bp, Arabidopsis thaliana landsberg
  unsure (1)..(613): unsure at all n locations
tatgtatctatgtttcttgttgaatcgaataagattcaaaataaatttggcaaatagcaataatttttttatagatgtcaataagaaaaaatgtgacattgtttttaaatagtctcaagtaaattttagttttgattttgttcttctttctttctttgttaaagcttaattttttctccacttaattaattgttctggaaacatgatatttttcataactatcaaatctgtagtttatcatccggtagtttaacaaaactaaactcaattgcatagtactgttgtatgctttaatgtacactaaagtatgcatgtctctttaccaaaatattggtatatatgcatgcatattgcatgtcttagaacgcattatagcattgaaccattcaaagcgtaaatctcaaatcctactctcggtggtatctcgatcttgatatttagcctattctcggaggtctatcatgtcaatcttttttatgatctctcccgccagttcccacccaaaagtttcctgaactgatttctttggacgacacattctatttctcaaaaacaatatattggtttattngctctgcanagctcagaacttcgacagcatnaaaattaactt

SEQ ID NO: 45233 - DNA, 825 bp, Arabidopsis thaliana landsberg
atttaactggatattcatttatactttattcatttaaaataaatttgtttcgatccaaaaaacatagaaatgtgtatatataaagggtagataatcaatgaaaagtggggggatagagaaatattatcttcaaaatattttgcatggatatgaaaacggtgacgtagcgagaggatggtcacggaacaaacgccaaaatagactttcgatcgagaaagggttaaattcacagctggaatctaaaatctattatttttcttctttaaaaaacacaatatataatatatacaaaaataaattaaatgagaatgaaatacagaaattgacacaaaatatagatctatttatgatttacttctttgaagacaggtcccaaataagagcagtggctgagaaaatacagaagtgaaactattttggcttccctcccaagaacagaaggctaaaaggagacatgtgccctctctctcatgcaattttcttttacatttatcctttcaaaatttgtctagatttttctttccaaatgatttgtatatccataatttcttttatatgtgtcatgagataagactggctggcttcttagactattgtgcttaaatctatggaccgacttctcataaatcaaacattcatatctttaacagcagtgttttcggatttccgtctactgtttattttttattttcattttgatttgtcgtttagatcttattattttctactttatatatatgttaataaaaaatttgttttcttttgctggtttgttttttctatagaccaaaagtccatatatctatgtataaacaaattttttta

SEQ ID NO: 45234 - DNA, 1005 bp, Arabidopsis thaliana landsberg
  unsure (1)..(1005): unsure at all n locations
cgacacgctatgtatgagtttggtaagacttctgctttaacccgttatattttaaatcatataaaaatagaaaatattggattctgatttattgaagaactaaaaccttaacttgatattagcataattctacgctttgcattagaaaaaggctaaactcctcaaaagatttctttccatgatctcaacaagtacgctaaataaagttggtccatatcacacacatatacaaatataataaatgaaacaaaataaattgccaccacctctatggctctatcatcacaagagtaatacaaatccgtgacacattatgtatagttatagtaataatgtgatacaaaaatgttggcggagtagagggtgctagtaaattaaacattatatgtctttcttttggtaccgttgaccgtatttgataacgtataatatacgagatgcgaccgtatgcgtatctagtcggtggaggattagcatgtgcacagagaacaggtgagagagggcgcgggtgacttgcgagcaagtaagagcccatgttttccttaggacccactcttgtctaaaatacgtgacaagatacgattttttttataaactgttttacgtgttccttgattaaacaaagaagaaagattagaagaagattcaagtttgaaataataatatatcattcatcagcaatcacgtggttttgcctagggatcggttctcttctttctgacaaatgaatatttctaactggaacgaatgggaatctaacacgtgtccaacaatctccacgttagatcatgtgatggtgtgggtcctagtagtgtgcgagctctactagctcttggggaaggaaggaacggactcacttgggtttactccataacaacaagtcctaggatcaacggatcgattcaataattcattcacttactactctataaccatatccacatgcactgcttttttgttttggaatacacaannctttttttattatctatacgaattatattt

SEQ ID NO: 45235 - DNA, 700 bp, Arabidopsis thaliana landsberg
aatatgtcatatatgtttatgctacttgtggtttccttggcctcagataaaatgctcagaagaaacaaaagtttcataaattctttataaacttttccaagacagaaacataatgataagaaaacagagacgacgtgaaccaatcatcatcatctccttctcctcttccgtttattctctgcaacacacaacctttctcttcatccaacttctcactcacctgtaaggtctcctttcaaaaattccctttgttcatcaccaaatccaatcttgaactagaatatttgtttattgtttcagtagaaacttagtaggaactgatcaatgggtgaaaggaatttagatggaactgtatcagtgaaagccaccattaataagtacggacaaaaagctacaagaagcgtcattaaggtgagaatccaaagatcaaatctttcagatgaaaaatgtgaaatttctttcatatttgtgcaaagaatgttgttatattgctaaagtttcgatttttaatgcaaatgatgcaattttgtgtacaattgcttaagtttcaatttttaatgcaaatgatgcaattttgtgtacaattgctaaagtttcgatttttattgctaaagttatgattttgaaatcttaaggcaatttttctgtaggtgatgatgatgatgatgatttatttgttctaatttatgagttttgttgt

SEQ ID NO: 45236 - DNA, 837 bp, Arabidopsis thaliana landsberg
ctcccgacgccgttaatttagcctctaagtgtaattagttaattattttgtttttaatatttattttcgagttaatttttaagaagattatcttttctttcgagttttatcattccaaatgtttaagatatggaattatcaagagttctatacattaatgtcagtaatgaaatcgattaacattagttaaatttattaattaattatatgccatgtcttgtacttaaatttattaattaatttaatgtacctcggaaacattttaatatcagaaacttttttttcaaaccaacccacaaaagagaaacaaagagtgtataatgtactgtaacaactttaatcaatgttaaaatatatcagtatcaacattaatataaacgaacagaacaaaatgaaacaatcacaaccaaatgctttttatagtttaatcattttttatcaacaaagacatgttgaattgaaacttgatgtgtcatcatagcaacattttattttttgaattgaatttattttaaaaccaaaacatgtagtatcgaaacaatagattttaaaaccagaagattagagccttgtacatgacatatactacataatgttaatcctctttttttacttaaaaccaataatgttttctactttttcccccccatagatttacatattaagattcactatacatcataaaattgtcatacattcattttaagagaattaaaaaatgtctaatacatttgaacaatagtcccaattttatggtgatagtgattacatggcaggtgtgaaataatattttgtatggcatattttatgaagcattgagtttaaatatttttacta

SEQ ID NO: 45237 - DNA, 433 bp, Arabidopsis thaliana landsberg
  unsure (1)..(433): unsure at all n locations
tgaggtcaagaaaataagcctagtcggccatgatctataggccctagactcagcctccgcggacgaatcctgcggagcaaccctcgggatttcggnnnnnnnnnnnnnnnnnnnnnnnnnnnnnnnnnnnnnnnnnnnnnnnnnnnnnnnnnnnnnnnnnnnnnnnnnnnnnnnnnnnnnnnnnnnnnnnnnnnnnnnnnnnnnnnnnnnnnnnnnnnnnnnnnnnnnnnnnnnnnnnnnnnnnnnnnnnnnnnnnnnnnnnnnnnnnnnnnnnnnnnnnnnnnnnnnnnnnnnnnnnnnnnnnnnnnnnnnnnnnnnnnnnnnnnnnnnnnnnnnnnnnnnnnnnnnnnnnnnnnnnnnnnnnnnnnnnnnnnnnnnnnnnnnnnnnnnnnnnnnnnnnnnnnnnnnnnnnnnnnnnnnnnnnnnnnnnnnc

SEQ ID NO: 45238 - DNA, 1107 bp, Arabidopsis thaliana landsberg
gcttaaatctgaactaaatgtcggattttctggtccaggcttgttcccactttcgtagaccattgttatcaatcaaaaggttcttcaatggcatcgactgtaaccaaattttcgatcttttttcttgaaatcgaagaatcagttttttttttggtcttgtgttcttgaagagccaagacgaatttttattaacactccccaatccccaatcttgattcttgaatattgatttttctttttaatatacgaaatcgaatttttcaaattctcttatttaaatattgggaattaacttcacgtttatttataaaaagaagctttagcaaaatttgtttatcgccgagatctatggaatatccaacgtggcattttgttaaccatgtattgttttcttaaacattgagaatctttttttttttttcaaaacaaacacactattagtatctaataaaaaaatgagattcacatggcacaaaattgagaaaatttatttcaaaaactgtcacacggtaaaaaaaaaaacagagcactcccctaattacagcttggaaatagcatccatatccataaactgtctccaaagcatatatccaatttttggtaacaacaaaaaaggttcaaagtagcaaatgactcaaacaatgagagaagataatgcacaaagagtgatgagtcaaatcaggatcaaagagaagtccaaccaaaatgacttttgacccaagaaagaaaaaacaacccaaaaaaaaaatccatatctctctgtcaatggttaagctaaagcttacaccaaaacctctctgataaaaagcagttttagattgcagattccgaatcagagggtggctgctgattatcgcttgaagatgtatccattggcacagcttccacaggtacataatatccataaacaaagtaaaaaaatacatcagtttcttgatgttatatcaatagcagggaagagaaactgagtgatacttaagctaaaagagaatgtttttcattacctactggacttgcatgtgcctgtggaggttgttgatgagtcgctgagattttattaccagagtcgcttgaagtcatagtctgattaacaacttcactatcagc

SEQ ID NO: 45239 - DNA, 655 bp, Arabidopsis thaliana landsberg
gtccttgtgcattatttgttaaatgtttttcttttatggtttcaggttttatggaggtttgggaccagcaacctcaagactatgaaaagttcttctgaggcaccaactcgtgttgctgaaactgttctggagttcgactgataaataccagttatacttgcataggcagaaataaagcagtagatcgtgcctaacaaatagaatcccgtgtactcgtgcgacagagcacctcatgcacttgtatgttccaggccatacatatgtgttcagacatatgtattcagactccctgccttgcccgacagtggtgtaaaaagtagtcgtatagctgtcatgtaattcaagggaattgacctaagcacgatagagcattcatccgaaacaattcttcatttgtaataaacagctctatattccaaattaaaagtgtttatttgttatatctatgttcttgttgtgctgtaagctgtgtgatttgtgtcttgtaaacctgtttggataggattataggaatcaatgcaaatcccttcgaataggtgtagttctttctaacaaacttcctttttaaatcaagaggtgaatgtgtgaaaaaggtctcaatggcaagaagtcagatgtaatttatgagaaacactcccaatctaaggggtatgag

SEQ ID NO: 45240 - DNA, 1016 bp, Arabidopsis thaliana landsberg
  unsure (1)..(1016): unsure at all n locations
gtatacaattgtatatagtcaatatccaaatctatatataattattgaggtgataatttttggacttttagataaataattaaaaacttttaagttggagtaaaattatcacgcgtttttcaataacttttaaaaactaacatttgacttccaattatatcatatctttttattttattttattttattctggtgaaaatatcataacatttttcatactgctttctgataatctaccacgtaaaagtattatatgctactcggatatatcgaaaaaaaattatcttgatttgatttttattattttctggtgatgtaatatattaatgagattggacattggcatatatcgaaagaaaaaaaaatgtttgaatttggtcttttctattctagcaactagcaagtcaatattacatactcccggcaatgtagaatctttattttttttcttaatattagatgaataaagctaagcctctgttctaaatttctaatatattaatttaacagcaatttgatgtccaactatgtcaaacaattataaatagtaattcgaactgggtcttcgtcttcgctattctctagctagtcaagatattacgtgttccaggggaccgagttgtactattatcggaacaaccctaattcttttaatttaattaaaactcagatctatagaagattacgattttcaaaacttgatggtatatatataaaggttaaactattaatctattatatgattaaatttcatcttaaataattaataggtggtgataatttaagtacgcatgagtttaagtgaatgaatatctaggtaacctaaacttgacaaaaaaataaatttagtttttctatgatataactnttgattgctcacagaatgttttgcatattttaccaatctggcaatgttcaaaaattacgatnttatcatgctatttcatcatctaataatataaacctaaaaaggcatcatcattcgattgctttttttttttttaaattagtttttt

SEQ ID NO: 45241 - DNA, 475 bp, Arabidopsis thaliana landsberg
cttgataaactacgtagttttgataaacaaacaaatcgtttatcttaataaattaggtagttttgattttctttgttttttgtcagtttgtaaagaaaaagaaaacaaaactctagtgactaagcaaagttcagattattgttgggccaaaatatttaggcccattttaaggtctaccgtcattttaactttttatggtccaaaaacgattcgacttttttcctgattcgtgtagagaaaaataaaaaataaaatctaaaaaattaagtactttgggaaaaagcgaaacgtatcttaccatttatacccctccaatcaaaattgatggtttccccgatttgagaaatctttttcatcatcatcactcttcctccttccccattgcttagtgttggttcccaagtcccaacctgcttcaatttaggtcgcaaacgatctcaattattcacaatccaatcttttcttcaatcgatct

SEQ ID NO: 45242 - DNA, 375 bp, Arabidopsis thaliana landsberg
tcaaacattataaattcaaaatgggttgtaatgaatattccctttttgcattccgtaacaaaaaaataatcaatttttgttgtaaagtttattcaggttggttcaccttcaaagtaggaaaaaaagtttggtcttgatttaagtttttttttcatttgggtcacacaaatgagcaatttggaagcaaaaatccttgatatatatgcatgccttattcaaatttccaatgtaaagatttgaagcaaaaatccttatatataattaggtctttccaaaggtaccaatattctagcccatgtaattctaaacgaacgccattagatatgtaagagcatctccatcaggaggttctccatgagataccaaccaaaaaaa

SEQ ID NO: 45243 - DNA, 487 bp, Arabidopsis thaliana landsberg
agacttcttgcttcttatatgtgatgccaagtgatactcaccatatcatagttcttggtgtttctgtataaatctgtagtgaacagccataggttattatagcatagtgatcttcaagaacagtagcctttagatctcctcttgttaatgatcgtatttgtttctgcttcttagaagtttgaacttgttagtgctttgatcttacgatctgattatttgaaactccatcggtttatcagagtatcagtagaggaatttctcattcttgatgatcatcccattctctgctacgattttactatctttaggtcaaactccactgattgatcttctttatcttagcctctgttaccatttatgatttattctcttcccagataagctccccggaactctgatcatctatattaaacttaaatcatgatcttatagtgcttgtagcatatttagaacctgccaggctgcgacaagcttttgtgaatgttat

SEQ ID NO: 45244 - DNA, 509 bp, Arabidopsis thaliana landsberg
cggcgttctgatgctgacgtggccgatgagagctgatcagtacactgacgcgtctctggtggttgaagagttgaaagtgggtgtgcgtgcttgcgaaggacctgatacggtacctgactcggacgagttagccagagttttcgctgattccgtgaccgggaagcaaatggtgaggatcaaagccgtggagctgaggaaagctgcgttggatgcgattcaagaacgcgggagctccgttaaggatttagatggatttatcagacatgtcgttagtttaggactaaacaaatgatttgatttagtcaaacaaaattctaattatgtttttttttttcccttaatatgttcctcacgaactaaaaaaatctgcatgagtgtattttactaaattgttgtaagatgataaataagtgtttgtgattgtgattcataaataagagtttgtgatttttattaaaaaatcgggtcaatttggtcgggtcgggtcaatcgggtcaagtttaataata

SEQ ID NO: 45245 - DNA, 839 bp, Arabidopsis thaliana landsberg
ttattagataaaagttaaaatgtttagaaaagaaataaacattttttttaaccctaacaccaagcacttgtgtgaaagagaaagatagattcatgatcgaagagaaagtctaaaaggatgtgcccaaaaaattttttatcataacaaactttcatatcttacccacaaaatcttataagacacagaaaaaaaaaaaaacagagttatctaatatacaaatcaatcgaaaatataaaagatttaggttcacatcaaaccattcttcattccataacctaatcaacaacaaaaatggcaaacaggcatctggaaatagagaccggattcccaacgccactgtcctccgccactgatcctcctcctccatcacggtggtggacacaactacattcattattccttcgtcgtaacgaactcactaaagaagagaaatcagctatttcaaaaccccgtttgtgcggcttcttgacaatcttaatcttaaccggtttgaacctcgtcttacagatgtacaaccttttatgccacgccagcgtctccgtcgaatccataaccgtttccccctcctcttccgccacgttgcacatcgattttctcctgaaaccgagctcatcgtgtcctatccaatacaacggagatgacgtgtacgccaagctaggttccttaaacgccgccgttttgaaactttcgcgcgggagtggttcacgtggcggtcaacgagtttctcggtggatttagctatggagggtaacatagagttttcgaattagacttgaaacttagtacgatgaaggacagcttgcgttagtgtatgaatatggacatttcgatatcaggtg

SEQ ID NO: 45246 - DNA, 561 bp, Arabidopsis thaliana landsberg
gtgtagcgtttcgaaaatatactctgtttgaaactttgaatataagcgggttttcactgtaagatgttaaatttagaaggatttttttttaaatctatcgtaatattaatgacagcaataaattgggttatcaaaaatgctaatggcgtttaaaagtttttaggtgttaatttggtaggagatgtatcagttgcgtgtcctacgtgtaattgtgaaagcaacaacgcaaagaaaatgaagccttgatgaaaatatatgtttaaaacaaaattaattgacggaaatagtatgttttaaattaatgttctaattgtacaatagaaaaagcatgtacatgtacaaaactcagttatattgtaatcaaatttattgatctgtaattcatgcttgtttatgacttttttgaccggccgatagagcggcggacgcaactttgggatctgaagatattaaaagaaaatgttcctaaagaattctaatatccagcccgattctcatcgtttcttactttatttcaatatgatctcaaaatcatcaccctttagaaaatttgtttcatga

SEQ ID NO: 45247 - DNA, 699 bp, Arabidopsis thaliana landsberg
tttagaataaacttacattgttgtttctctcaaccgtgacatcttggattactacttcttactactttcctttttcatgtgccccaaaagataatagttactttttcaaaatctggttttgttgtttgggtttgtgtcattcattgataaagtcactaatggagaagtagaaaacaattgcaaaatttcgaatctgtgttgtcattgctgaattctgtagtggatgtttgcttgcagtttagagcttcggagtgcgaagagtgagacacaagaggattctttctggaaccgcattattccctttagaggaggaagaagaagacaactcactcacaaggtaaaaacagctcctttgcatgtttctttatcttgcttgttagagatgtagacaagacacgcactttatagacgcaaaatcttagtattctggttcaagattgagatgcattttgtgatagtgattaaatgttctgttggtgcaattgataaggtttcattgagttttgactaagtaaactccaagttactttttttaacctttaaacacgcatttgtgactgaccttgtctccctctccattgatgaattcaaaaactacaaagctattatttttatgcttgattccgcgtgtacatatattataatccaagtaacttttcaaagtttagagtatgataacttatttttttgttctctaca

SEQ ID NO: 45248 - DNA, 501 bp, Arabidopsis thaliana landsberg
gcgcccggcagcgccttgagcgcgggccgtttgagcgtgctgcggatgccgatcgccaccagcgcatgactgagtttgccgtgcgtgcgccagaccggcgccgccagcacgctgacgccggcaatgtaattgccgtcgtcgatcgcatagccctgcttgcgggtctgtgcgacctgcgcctgccactgcgcaaagctcggcggcgcatcccagcgcagcgtgcggaaacgtgattcgatttccgcgtccgcatgttcgccgaacgcggcgatgcagcgaccggtggcgctgatcagcgcgggaaagcggctgccgatttgtgcgctgagctggaagtgcgggccggcctgcgaggtggcgacgaccacgatgtgatcgaggccgacgatctgcacgccgagcatggtccgctcgaactgctggctgatgcggacgagcgacggctgcaccagatcattggaacggttgcgacgcagtcagtcgcgcgccagcgttagcacg

SEQ ID NO: 45249 - DNA, 377 bp, Arabidopsis thaliana landsberg
  unsure (1)..(377): unsure at all n locations
nnnnnnnnnnnnnnnnnnnnnnnnnnnnnnnnnnnnnnnnnnnnnnnnnnnnnnnnnnnnnnnnnnnnnnnnnnnnnnnnnnnnnnnnnnnnnnnnnnnnnnnnnnnnnnnnnnnnnnnnnnnccatatgcggtagcaatttgcaaacagtcaaaaaactattttacacgtgtccattctagacctagaccaacactcatcgagccgtaatccgattggtgcttatgtatcgccctctaattcactcaagtagattatcagccttcaactttagcgatcagcaggtcgataagactagatgaagcatccctaagctcgcggttaggtgccacggcnnnnnnnnnnnnnnnnnnnnnnnnnnnnnnnnnnnnnnngcg

SEQ ID NO: 45250 - DNA, 570 bp, Arabidopsis thaliana landsberg
tgctgcgatgtggactattattctaccagtgctgtattctcattcaagaaggaaatacatttgttattttacaaattacaaaacctggcttggtgaatggtgtttttctccatacatggtggcagtcacgatatacctgacaggaagtgcaattgagttggtcttgtttttcgttcctgccatcagcaaatacattgagacctccaatcatggcatctttaaaactttgtcttggtggggacaggtacttaaatctcagaaactccacatttttgagcaaatttctcacggttgagcatgaaagcacattaatgtttcgaacaatgttttcagttagtctgttttacttttggtgcatttcaaactcactttacaagttaccatccgattactttctaagctgctagccgatttgtttgcagcctaggttatatgttgggcgaggaatgcaagaaactcatgtgtcacaattcaagtatgccccgagccaaatttcctctatatttgtttagttagtctagtcatttctatttttctgtggtttttatttttatttctgatcaaatacac

SEQ ID NO: 45251 - DNA, 607 bp, Arabidopsis thaliana landsberg
  unsure (1)..(607): unsure at all n locations
gactttcctttcgcatccttcacaatctatcaaaaccctcacatccaccgtctagtattttctcaaccacatcttattataataaggatttgattataaataaacgtaattatgaatggatgcagaatttaattacctgtagacttttgtgtctcttggagcttccatgagaacaatcgaaatattcagagacgtgatcaagaacacccatttttcttgtttcttggtttcttctttcttttggtttggcgaaaaaagttagactctatatgttgagatatatgatatgattttctttttttgttattgtcaacataaaaattgagtttaaaatgttgaaaatacgacctaccaaactctataagtagttttcgaccatatatttagttattatatgctgatattttgtatcaaccttcagtgagtcgtgtatgagtttgactctcaaacggcaagaatatatatatgtatgtgtatgtgtattggnggttactgggtgtatatgaaccctgtataaaaggactttaatctatataggtcgtttttgtatatnnnnnnnnnnnnnnnnnnnnnaattaaactttacagattgatgaatagacttttg

SEQ ID NO: 45252 - DNA, 1096 bp, Arabidopsis thaliana landsberg
cttcactgttaaaagagaatagctgaatgccatgatttaaatctttcaatataagaattgtctataaaaactaagtcattttttataaacataatgccatgatcaaagagtcttcaagatccctgactcaaccaatttgagcatgccacgccctaggataccatttgatgatcaatgattctatctaaaactaaaaacattaatcattatatatacataatttgtttttaataataatgcagtcttggatcaatacaacaataataagttaaatatgtggatacttatttggtgtgggagcccatgccaggtgtacgacacagaaaattatcgtagtaccactctacaattaaatatcccgtaagtataaagtctggtattaattatgttcataggtactaaatacaacatcatttgatgtttatgtcgatcgtcttcgtcacttagctacttaacttgattgttacaaaagatttacgtatcttattttgtgtggtagattaataaaagtttcctctgcaaagttgggtagccaattcaaccacatttgtagaattttaaacaaaccttttatttagctaagataaataatttgttgtttgaaggaaaaacaatgatctttttgcaaaagtagaaagcttttcgaagacgtaacacaaaccttgcaaactattgtcctacatgcatgtggaaataaaaataaaaaggtaagtgtccccaaagcaattacctttttcatgtacttaaagaataatttgctcaacatattggaccaccaaaagagctaaatatataatagatgaacctcgaatcacgaaatatgaaatatctatttgtattcccattttccaacttaataatgcaaaatgttatcaagcaaagttcaaataaaataatgcaaggtgttagttgaaatatttggattttggaataatttcttttggtgggttaggagcacctgactcgtttcacaattattgagaatctatcagcaaaagtaaaaagtcccccccccattttgcttatttccactaaggataaaaaaatttcatgaacatttgcgattaaaaacgaagcaccctcagtataataaatc

SEQ ID NO: 45253 - DNA, 602 bp, Arabidopsis thaliana landsberg
tctgtcgaattattccaccatgtggtaaatattgaataatgttctcttctattttcccaattttttgtgaattttccccaattcgaacataaaatgacattaaaattcctaactcaatatctttgtaagaagaaacccactcttggttggatacatatcaagcatccaaaaaagatcacaaagtaatcttacaaatcagctacgtttaacaatatcgaagacaaaaacagaattcatagctgcttctcagacaatgggcacaatgattccacatatgagtgcttgagaaaatgataatgttcttcaagatttaaactaagaaaaatatcgaacaagagctctacactgatctcttccttgatctaaaacacaaagggaaacaaatccccttcaagtattttagatcaaagtgtcatcaagcaatacatatagctcaagaactctttctttggattaaatcaagaagaaccacatcacattctcaagcccatcttttcagtgtggttaaagcaatataatcatcatagaacagccaaaaaaacaaaccaaaattttttttaaaaaacaacaatttagaaaaacctgaatttgagaaaaaagct

SEQ ID NO: 45254 - DNA, 722 bp, Arabidopsis thaliana landsberg
gataagggtcgatccactggaattgcagcgaactaaattgccaattaaaagatatgtatgaacttaattgatgtttttaactcactcctagattgtacatgtaggattggatccacaactaaactaaaagatagaatcgtgagccttatcaacttgctagaagttcatataccaaactgtatcaaagatgcaccactgagaaaactttaaatttaagaagaaattaaatatgctgagaaaagcaaaactgtatggatacagttctatcatgtatccacctatttcctataaactataaataacaaagaatgtcgtgatgataagaaataaggggaaaaaaattccaagccgtttccaaacaaggaaagaaggttctatggacatgtagtgcaagttatgaaatctagaattcctcaagaaacatcctttacaccaattgctttgaccaacgaaaccatcctttatggacatgcaattcactaacaagtgtgcttaaaacacgattctcacatataataatgctgtaacgatgagaatgagattgatgacaagaagaacgctatatcaaatttcaagcataagtaagagaaataaacatggaggagacattaccaaaagtaattgcattgtctgttgtgtgctgatccttcaatagcatgccaacgagactaaagctgcagactgtagaatagtttaacatagcgtgttacataaaataacac

SEQ ID NO: 45255 - DNA, 527 bp, Arabidopsis thaliana landsberg
tggtattggtggcctgatctctttcgaggtaagaaataataaaactccatcgatccaagaaactatattactaataataatctaaagatgtctttgttctttcacgaaaatagattgatggagatctcaagactacaatcaagttcatcgatgctctgaagatcccttaccttgcagcatcgtttggtggatgcgagagcctcgtggaccaactcgcccagggatctggtatatatgattttccactaaaacattgataatttttttaatttcggttacataataaaaacgtatttggtgtttgatttagggatataccacgagaagaaaggcttaaagatggattccaagacaacttagttcgcttcagttttggtattgaagactttgaggacatcaaggctgacgttctccacgctcttgaaaccatctgaacatgttggctttatttttataaaacgaagttccttctcttttattgtgacaaaagttctttgaaataaataatttacataataaagacaatc

SEQ ID NO: 45256 - DNA, 625 bp, Arabidopsis thaliana landsberg
gcggcaacctcaattcgcttttcactaaactcttcttttgccgatgggtgagtttcaagcgcgagggtcagggttcaatgcgatggtccgcgacccggccttaaatagtcgaaggtgggagcgaagtccgcgcgtttgttacaccgacctccacggaactcgcggtggttggttctatcgttgccgcacgaggtggaggacgattctggcctccctgacccaccagtaagagactaaggcgggcgcgacatgaaaccgtgacgctgatcagaggggcccaccagtcagcgaaacgagaaggaaggagcgcgcgtggaattggctgcacgcgggccccacctgtcggttacatgacgcagcggcgcccaacgctggcgagatgggccgacggggaaaagagaagaagtggtcaggtgggccgaattgtgcaggagcggcccaggttagtgtttttcctttattcttttcctgctttcttatttcaaatttctatttctatttccaaattcaactcagattttaggtttagaattcaaaataaatttaaagtcaaaactccaatatgaatgtgacaatatcttattaattaattaatttccctatttagacaaatgctttcacatat

SEQ ID NO: 45257 - DNA, 579 bp, Arabidopsis thaliana landsberg
aaatttcgtagaccctaatgggacatatcaagaattgcatattaagctcatcatatacagtgtaataaataatttaattaccaccaattatatgcactatagaaagtaatcatagagggggaaatgagaaagcaacttgaggaaattggtgaccaaaaattggtcctttcaaacgcatgacagcaataaagacaaaagctttcacaaaaattgattgatatggcaaagcaaaacaaaacaaaatcagcaatggaagctaaccaaattcaatatattttttaggtctttccctactttgcttctaatgcttttcttctttatctttatgtatttttccctttaatactctctttgactaagcactcactttcatagtacacatgcacgaacacattaggcctcagtgatgcaaacaactgagtaaatgggcagactcatcggtcacttcacactacatcatgatcacattttttttttttacctttaacattttttatacttattgtttttatgactccttaattttaaaacagaatgctactactaacaatattctatctcccacaaaaaatcctgatt

SEQ ID NO: 45258 - DNA, 493 bp, Arabidopsis thaliana landsberg
gccacgtccttgttattataaataactataataatctaagcataataatgtagattatataattcaaacgaacgaaattatacttcattattcataacttttttggtttataattaatttatttttaaagatttgctggttttactgtaatgattattatttttattattttttaggtatgtgtaaaagatgagtgtagaaggaagaagtaaaatctggtgttatgtttaacgctggtgttatagaaatcagaaagaaaatataatgattaaaaataataatatgagataattggattttcacaaaaaaaaaaaaaaagaagatataattggatatcgaagctttcttatatactttaactctttaacgctgaacataataaaaaaattataaattcaagtactctttttcaaatattattctttgtaaaatccttattctatatttattcttttaaaaaaagaagcttttcaaatcaacatatatatttttg

SEQ ID NO: 45259 - DNA, 909 bp, Arabidopsis thaliana landsberg
gtagcggagaagaagattagaggtgttcaaaggtgataacgtttgcagaacgtgaccacaattataattttgattggtatcagaaaactttgctaagatttattataaactccttttttatttaaattcaagagatatcaaacaactacttcatttttttttttgtagcagccgagtacttttttttgacggtgtccgtgttcgtgcttggtctgaaattgacgaaaaatattccgacaagacaacaacaacaattagagagattcagacaagggatttgaaattcggaggatgtttgggatccaaagcagacgtgatttaacgatggagctacaatctcagattccgattctccgtccaagcatccacgcaagacgagccaacatcgtcgttaaattccaggacttgtacgggttcacggtggaaggaaatgtcgacgacgttaatgtgttgaacgaggttagagagaaagtcaggaatcaaggacgagtttggtgggctcttgaagctagcaaaggagctaattggtatcttcagccggagattctcttgatcggtgacggtatcgctttgaaaacttctctcaagctctccactttgactaatgcgattacgttgaagagattgattcggaaagggatccctcctgtgcttagacctaaggtttggttttctctttctggtgctgctaagaagaaatccaccgtcccagagagttattatagtgatttgaccaaagccgtcgaagggatggtcacgccggctacgaggcagattgatcatgtgagtttgatttataatccaaaggctcaatttttcctttttgattgggtttgatgttcttcacaaatcttagtattttcagggttgaatttcgttgatcctttgtgtaagggttggtgtagatct

SEQ ID NO: 45260 - DNA, 743 bp, Arabidopsis thaliana landsberg
tttctaatcaaaatacgtatgagtagagcaacttttagtttattttagtaaaattcactacatttttgttactatatgatgtggttcgactgcaccaatccgagttatccaaattagacactgatttttttttctcaaacatatgtaggtcgataaaatcaaaaaatttatttgttttactccaaattaataccacattctttaacaaaaaaaaaagaaattttaaatttcaaattaatagctcctcaataaattaataattaagaattttatcttcatatatttcaaaagaacaattgctaaaactcctgtaattcactttattattttgttaataacccaaccggattaaaccaacccctccgaatcggaaccggcggttaagttcagagaccataacataatagtggcatggaacagtaaatattaagaaaaacaagggcaagtaccaaagacgccagccaaccacatgctctcgtttatcttcttcaaaatgagtttagtctctctactagtctctcgcctttactcttttctttcttagtactaaaaattaaacgacacttctcccctcaaatccctttttctctctctaaacacatttacacacagaacacaacacactctctctctctctctacgattctcgctcactgttcatcgaatcagtcattggatcgattcgaacttggtgtgtgttttctttccatacctctgattagagatttcagcagatctgaacg

SEQ ID NO: 45261 - DNA, 736 bp, Arabidopsis thaliana landsberg
ccgcacaaaatatacaataaagaaagttaggaacttatttattttagatcctttttttaggtaattttaattcttcttagtaaattatgactcaaataattatttatcaagtaaaaggttattggtaaacattttgttataaaactttagagcatctttatccatatagtttttcaaatagtaaagaaattcactatcaactttttcccaactgtaaaagattcatgtacaggaccatcaattaatggagattctttcagttcttcactgtttcaatctttaactaatcgtcgtgatgaatacaaaatagatacattcagaaaagcaaacacaaatgacggaaacaaattgaaaacaaatacatttaaaagttgcatatttcgttgattgttgattaacattgcttgtcttatcgtactaactacaagtttacaacatcggagtggtttttaattgcttaagatctctaaaacgatttcaataatggtagactgatcttcatttcgatttcatgataacaccgaatgttaggctttatatcctctaaatatcgacatgcattgtgaattgagaccgtaccccgactaatcttgtgacttaatggtcataatggtcgtacaccaattattcacaccggttaacagttaccggaaccacaatatggaagtgaaaagcaattcaactcaaattccagatctttttttttgtcaaaattgtacaactttctgtttataca

SEQ ID NO: 45262 - DNA, 574 bp, Arabidopsis thaliana landsberg
cgaataaaagcaattattattgtttagcataagctatttccatttcaagtttagtctctattttatttgttgtatccacaatgtgtataagaaaactcaaatcttgttgcaatatgaaacagcacattgggtccccaacatgaaaatgttgctgattatgttagttaagtttggtattttgggtaaagaaccaaaaaaaaaaaaaaagacttcaccttttgtgttgttgtgttaaaattttggtttcccccaaatgaagaaaggaggaatctttttgattgtgggtgatgcagaaaagtccccacaagtgtcgtgtcatagtgaatgtcctttgggataggagtgtggtcccttgtttgtatcattcgatggcttcaatagaaaagcacaaattgtgaatgatgtgtgaccaagttggacatggatgggtttcttcttttttgcttagtgccatttgtggtggggattgattggctatcttttcctttttatttatttcttttgggtgtcacattcttgtttctacgttggatcatttcgattaggtcattgactatttaaaggtgatgatgat

SEQ ID NO: 45263 - DNA, 597 bp, Arabidopsis thaliana landsberg
agtgcaaagatagtttgaatgtttggtaagtttgaatattggtttcttctacttgtaggaaacagaggctgaagctaaaagcgatgttgaaggcctttcttcctggaacgcaggaggaggaaacattatcttctttgcagtctgggtaggcactttctatttatgaatagtatttcaacattatcctttctgttgtcctgagaaataacaatggaagtcgttgcctcaaatgtgcaggaaagtcgatgcaaaaatggaaatggacgacccagagaaggcaatggctacagttgctcagctcatagagcaacttcatgcgaaaacatcttcaccgcaagataaagaactcacaacagctcgtctactaggtattgcaaaaggcaaaagggaggcaagaaggctcatcggttcgtatggccaagcaatgcctttatttatttccatgcttagaaatgggacgactttggccaaagtaaatgtcgcttcaatcctttgtgtattgtgcaaagacaaggacttgcgactaaaagtgcttctaggaggatgcatcccgccattactctcggttttgaagtcgggaacatgggaactagaaag

SEQ ID NO: 45264 - DNA, 757 bp, Arabidopsis thaliana landsberg
gttcactaagtttctaagctggtttagttgttcctcgggtatctccgacaaatctgtcttataacattgaaaaacttgggtaatacgaataatcccactacttcctagacacattcccagataaagaataaactctgaccagcatttttaacactttcggacaatgtcaccaatcgagtcttttcacaggtaggagcttcagtgatgggcttaattggcggcatgttaagcatgtatctacaggtcatcaaaccaagaaatttcctttatatcaataagtacacaaaccggaccacattgaaacacagttcaattgtcataagctccgaacttgatttcacaaaggtcctaactacttatgtataaatgcaatgactaacagatgatcctttgcacagcaagatgagctattgaagaaacgtacccattgagaatgcgagatgcgcttttacagagttcacggggagttctaagagcccagagcttgagattgacatcgaacttgctttcatcaaacatggtgctaacggtgtcgttttacaatgtttgaataccagaaagagaaaatgtgaagaaatcggcggaagaagaagaatgaaccacccagaccgtggcgtcagtgaagacgttagtcgtgctctctcggtattttagggtttgattaaaaaaaacacaatccaaaaacaataatacgacattgtatatagcacgaggaggaatcgaaccagcgacttgaggttttgggccagtttaacct

SEQ ID NO: 45265 - DNA, 626 bp, Arabidopsis thaliana landsberg
actcttttgccatactcttttgatcctccaccactcttcctaccaacctccttacttatctttcatttttatgcctacctaaccttccattcatgttagatttcttgcaaacctaatttcttttatttgtttattaagtatctaacttattacataaagtaaggttttgaactggttttgtttttctattttaaaatgtttaattatctatttaaaaacaataaatcaaatgttgaattgattaaatatgttactaggtttctcttaaatctatacatatatatatatatatgtttttcaatggaggttgtcgtcgatttcgattcatattactgcgacaaagaggaagaagaaccagctcagcatcttccaacaagaacttttgccattctctaatagtcaaagtgaaaccattatgaggcaaagtattccatgcagacactactattttttatttttaaaattacattactaatagtattggttttaaaataaaaaaattcattaatttattaaaaaccggcctgttactttactacttcaactaagcagccccaaatttggaaaccagaattttttaaaaatttaaagaaaaagaaaactttaataggtccccactttttttt

SEQ ID NO: 45266 - DNA, 969 bp, Arabidopsis thaliana landsberg
  unsure (1)..(969): unsure at all n locations
cggttccaagttttcctccctccaccttatgatctccaccaattcatccaagcttttactttaagaaacatagtcttttgatagaatgacgactgagatacttgattcttctatggcttgtgttacctcgggacgacttcatagactttgcctcccatgaatccactatttactacagtaatgccaatccattttaatttcttgattaaatagctgacaaaatatcttgggacatcctcactgaagctcaaaaaacctgatggctccgacgttgaagcaaagaaggtgatgtgagataagccgtatcggcttggcttatcttttctgggagatccccttgtttggtttttgagatgttcaacctctggttttcctaaagaaaaattaaattcaaatcatcactacacgaagcaacaataattacaacattatataaaacaaagtccaaatgttacttcagaagcttaactaaggcaacccccaatgaaatatgaaatatgaaacactcagatgtaccatttcaatgtcttctgatcccgagaaacttcgttttcgcttcttatacggtggtaacaaggcaaaagacggtcctctaaagtcaagatttgtttggtctacgttttcagtaattgcatatactccacactctgtaacagtgcaacaatcatcaagaatcttgttctccctgctaaccggaagcaattcaaaatgaaccacatcatccaatatattgaagtcatttccatcaacaacacatggatgcatcgagacatcatagaagacaaacatgtgacttttttgaacaacttcctttggattccaacaagaaaaaattctttcaagtcgacgtgaaaggcctttcttgtttttccagcaacagacacacctgattccaaaacaggagtcnctgtgaaaatcattccaaaatgcaactacaactgattttggaaccccaaaagcgatttctat

SEQ ID NO: 45267 - DNA, 515 bp, Arabidopsis thaliana landsberg
tacagtttaatttctattaaataatgaagatttgcttgcaagaaaaagagaagatatggtaataaaaatatggtttatagaaagaaaagatgagaaaaggagatgaaagtacaataattgtatatatcgtcaaccatggcgacatgatcatatacatacatgtttaaaataattttggaaagtgtaaaagcaagtgtctaaggaagtgttatgcactaatagaagtataggacggtatctagtgagaagaaacaaagagtaaagatacaaaaaaaacagagtgattaacatttcctacatatattctatagttttttttttggaatatgttgtaacagttatgacatgattcatgtggaagctgctacaaaaaagtggaggaacgagagggaatagtaataaagcagaaaggggtgtttctttgagagagtacatttgtgaacgaggaccagcctttgtgggacctaagagtgagtggtggttcagcttttagccgagacgtcctcattgcccag

SEQ ID NO: 45268 - DNA, 408 bp, Arabidopsis thaliana landsberg
  unsure (1)..(408): unsure at all n locations
nnnnnnnnnnnnnnnnnnnnnnnnnnnnnnnnnnnnnnnnnnnnnnnnnnnnnnnnnnnnnnnnnnnnnnnnnnnnnnnnnnnnnnnnnnnnnnnnnnnnnnnnnnnnnnnnnnnnnnnnnnnnttatccgccgcccattccaccccacagtccacccgggagcatcacgtcgcaaacctggggggcctaataagtgatctggcgccctttcaataacggtgcgatcctcggcacccttccatacgggaacacctcctgggccaccagcattattcaagcagccaaccccccgtagggatgcggttggcaccctagaggccagggtggttcttctgcttaccagttcatcgggcagcagccgcagtgcccgttcaccaccgggtccccgagacaattgcagcaagcag

SEQ ID NO: 45269 - DNA, 890 bp, Arabidopsis thaliana landsberg
tctaccatcacataaaataactatacccaataactctatcgtaaagtctagctataccagattagtgtatctctaccataactacaaatatgtctattcaataagtctacccatgtacataactatatttgatatatctatcaaaaaattatatctactgtaacattaaaattatggcgggaacttttcctgccaaaactgtcctagctggcacattatatttaatcgcatgttggtaaatactttattcctaccaaactttataaagggtattttgacattaaaaaatcgcaaaacagtggatgttagtccagtaattacacaccgtaaaaaagtcatttgagtaagtctgcctaaaatttaaaatttattgaaaattttagttgttgctatatttaaaaagaaaaaagctagttagttagttagttagtcagtgtgcgaagtaagttaatatatttgaactgaaaatggtaatgttatgtcgcaataaattactagagagctatgtgcttgttaacgtgttatgtcacactacaaaatcatgtagcaaatagacaaactatacatgaaaacaaagaaaaaagcaagtagtggagaagaatcaacgaagcgattaatgaactaagcagaggaatcaaggaagcaaataaaaacaaacaatgcacttaacagaagaattaaagaagcacaaaagcaagaaaagcacttaacagaggaaccaaagaagcaaagaaaccaacaatgcacaaagcagaggaatcaaatgagctaacaaacaaacaatgaatttagtaatagaagcaaagaagaaacaagtaacatgttatacatgtatgaaagaaacaacaaacaaagtcaagaatcaaagaagtagcatatatacatgaatg

SEQ ID NO: 45270 - DNA, 451 bp, Arabidopsis thaliana landsberg
tagaaactaggagaaatatttataacaagaatacactagcgtttatcaccacaccagtggtagacggctttgacggtagaggagacggagtccacgacaggacgggcatgttcatcgaagactttggtaaagtcggttgcggctgagtctatcctctgtccgatggttggtgtttcctcggcagataccaacacggacatatgcaacatcacagccatcaccaaagccaccttcttctccatgatcctgtccgttaacgtagattcattcttcttctattgtctttctttgtgaaagaggtgtcttaaataaatgacttgagggaacacaatgtactacattgacatcctcgtgagtatgtctatatataacttgctctttctggccacagtctatatataaactgttagttttggcgagaggtgtttatctttatgagaatgagacaatg

SEQ ID NO: 45271 - DNA, 717 bp, Arabidopsis thaliana landsberg
  unsure (1)..(717): unsure at all n locations
atcatcatcatcagacaagtggtggtactgatcagaatcagcttctggaagattcttcatctgccatgagactatgcaatgttaataatgatttcccaagtgaagtaaatgatgagagaccaccacaaagaccaagccaaggtctttccctttctctctcctcttcaaatcctacaagcatcagtctccaagtcttatcgaactcagacccccaacaacaacaacaagggtattccggtaataaatcaacacaacatcagaatctccaacacacgcagatgatgatgatgatgatgaatagtcaccaccaaaacaacaacaataacaatcatcagcatcataatcatcatcagtttcagattgggagtccaagtatttgagtccagctcaagagctactgagtgagttttgcagtcttggagtaaaggaaagcgatgaagaagtgatgatgatgaagcataagaagaagcaaaagggtaaacaacaagaagagtgggacacaagtcaccacagcaacaatgatcaacatgaccaatctgcgactacttcttcaaagaaacatgttccacacttcactctcttgagttcatggaacttcagaaaagaaaagcgaagttgctctccatgctcgaagaggtatatatattttcaagaaattattcattactactatcaaacttacatgagttcttagaaaacnaatcattttttatttgg

SEQ ID NO: 45272 - DNA, 676 bp, Arabidopsis thaliana landsberg
  unsure (1)..(676): unsure at all n locations
aagcgcgaaggaaacttacgcttagattcagacttgtttgtaccatctcctttaggcacctccttcttacccttggggtaatagttctcgtagtctaaaatcagaaaaggggcaccatttcagaaacagagccaccaaaaaccattggtaataatctcatcaaaacgaggggacgtactcttcttggacccgtccgagaagaggcgtcggaaatgtgggctggcgaggacatatctccaatccacggtcttgcccgcggatggcttcccaagagctgccgacgaggccgcagtcaggtagctgcgaacaaatcctgccgccccaccctcaccgccgtggacgggcggcggtacgtgtggcgcgggcggctgccggacgccccgagctggaaaccctagaaggagcagcgagaggtcagacctgcgagacgaggataggggggccggtgaggggatgagaacttgagaagggatactcgcctggcgcgggcgggaggagcgcgcggaccggccgagggcgcgggcgagggaggcgagcgtcatgtcggctgcggcggcggctgctgcccgtgcgantgtggagggcggagggacctggccgtctggatccaagcgagaggggtcgcgtcgaggtcggggcgatagaggtgtgtgtgtgtgtctgagatttgtttgtc

SEQ ID NO: 45273 - DNA, 273 bp, Arabidopsis thaliana landsberg
  unsure (1)..(273): unsure at all n locations
gaagaggaaaagccgaaaacggcagacnacccaggcagccagaaacaagccaaagacgacacggcggggacaaaggccggaacaggcaaaggaaaagagcaagacaacacggagacacaaggaacgcanaggagaacgggcagcggcgagaggggaaagacgcaaggcaccaccaagccacaggaacggcacagaagggaaccacagacgagaagacgcagaccaacgaagaacccaaaaggcgaaggcgagaacccaaaggagccaccgaag

SEQ ID NO: 45274 - DNA, 436 bp, Arabidopsis thaliana landsberg
  unsure (1)..(436): unsure at all n locations
cacggagatttnnaattgcnagcaaacagaagcatatgggcatgcggggatttttttgaataactgctgctactgcacgattaataaattagactaatggcaccaaaaaaggagttgatggctcaaacgtcataactaagcgaagcccatgctctgggatatctatgcattcaagtgtaagtggctctttaaaaaatcttcggttgcgaccacccaactttccaaggattagcaaggatacatttaccccaaggatatggcacaagcctcaaatgggaccataatgctaagaccacttcagacatcacattcgccatgctatgttccaggaaatcaggattcagactatccactcacaatctaagggcgcgtggcctcaagctaacaagtatatcgcttcccctcaaacacaatacaagaggcttcatgatactgc

SEQ ID NO: 45275 - DNA, 419 bp, Arabidopsis thaliana landsberg
tgaaaaaaacagcactttggaggagtctaagatctccaaacccttttatagtgcccaaaggtggtagaccctaagaaaaacccagtataagctgactttgcatagtatctgtcattcgatgataagctaaaatctgcgaggatattccaaaggtgtaggtaatctacaatgactccaactgtaacagcccctttgatgtctgcaatccatcgtctgttcaatagagcctgctgcagtccttctgttagtaattctttttgggataatgctgaataatctgagagcaatatctgagacccttttgccatggatccatttatctgtccaaaacatggtgttggtcccattccccacctcagaaatcagcaccttggagaagaaggattgagctttgttagggacttgaatggacaggctag

SEQ ID NO: 45276 - DNA, 426 bp, Arabidopsis thaliana landsberg
  unsure (1)..(426): unsure at all n locations
tcaactcagtcaacacaagtatatatagccccctctccaaaactagccgttatgggccaattgccccttttctgcgcacatgcagacgatctgcaatacaagcccggactatccgcacaagaatcccaacggctataaacagttataaaaattgtcagagtattcaaaatgacttgcggacggtctgcccctcaaggtcggacggtccgcgatacataaaattgagccaaaacgaagtgttgcnnnnnnnnnnnnnnnnnnnnnnnnnnnnnnnnnnnnggtccgcacttggaccccggacgatccgcaatacaaaatatttgtactgtggacggtccgcactcaggcctcggacggtccacagttcaaaaaagaaaactaaaacggaacttctcgagttctgtccaacaccagtccttcaagtac

SEQ ID NO: 45277 - DNA, 529 bp, Arabidopsis thaliana landsberg
aattatgttttcaatgtagaaattataaaaacaaaagaaattgattattttttaaaattttgtgcttttagataaagtggcttatatttagaaacagagggagggagtactataattttattgatttctcttgttttttatttgatttagtcttttcctttttcccataattttgtctttaatcctgaaaaggatttttaaaataagatgttattacgtataattaaaaaaaatgatttgatgaaaattctcaactgattatgagaccgcaccatttgaaaaaaaaatctcaactaataatgagactttaagatctactttaactattatgcaaatggaatatttgtgtttatcaaacaaacagatctaagtgaatataaaacatactcatacgaggattaatcaaagttatgacatggatatgatttctggataacaagccaaaagtggtaaaatttgaaagagatttagacgaataaaacaaaaaggttacagtgagtttaacgtaaagaagaggtcaatatttaat

SEQ ID NO: 45278 - DNA, 995 bp, Arabidopsis thaliana landsberg
taacattttcatactaagaagaatactttaagaagctctaatttgaattttgattagtgactgtgggatgatgaattggatttgacttgtacaaatacacgtctaatgtagacttgtcacaataaggggcaagtttagagactacatagtctacaatgcagatgattaaaactatagttgataatcatagaatcttaaataaaaatcatagaatctatggactgaaactttccaagtgatggaatcaaagacagccacatgagtcaaggatttctttcaatcttttcaaatattccataagagtaaataataatagtttcatgatcaaaatcatcaatgtgatctgcctatgtgtcatttgtaccggctcttgttcaacctgactgttttggaccccttcaaaacaagattgtgattggtaccacacctctatttttctctcttattatgttatatccagttatatttgagggaatagttcttataagtcttccttctctttgttggcaaactggatatagcaaatctcatcgtacgtatatctttacatgcatgtgtgtatgtgtgcttatcttctttagaccaagtgcatctatatctcttagagagatttgacagacaagttaaaaaatccaaatacatgtcgattcttgaacatttctaagaaaatttgtatctatatgattattacaacaatatgattattattattaaatttggaggaaaaaggacaaaaaaaaaagagaggggagggtaagaaccagggaagttgggctctggaggagtaccaaaggctgcatataataacgtgtctcactcgctctctttactcttgccaactatcaatttggctttcaattctttctcttttgtcctcatttatttccatattttttcaacatttctatatcctcttaattctaaaccataaaaaaggatttatatatcaattcgaaaatgattatgtttttctaaatatttcgtaatatgtagct

SEQ ID NO: 45279 - DNA, 510 bp, Arabidopsis thaliana landsberg
ttcttcgtaccatcttcttagcaatttcaaaatttttctatgatttctattgtatataacttagttggcaaaacattattttataggcttaacaccagctaccttatcctacaagctatggccatatgggggaatgatagtcgaataaaatttgttagggtgagtggagtacattccttttatattcaaacatacactccagttacaaaataataaattgatgttttgttctcttatatcttatgtgtgggatgcaaagattcttcagagaaactttattatcaaactgttaagttacgaggataattcgtgcaaatatggcatcccgacaaacatacaacagaggtttaatgatattgttaaaaaagattagattagtgtacaaggtgtcaacatatttactttcacattatatatttactctttagaaattatttatgcgattccatttcaatctatttgggtagacatatttatatcgttctgtaactatgtttaacttcagatttt

SEQ ID NO: 45280 - DNA, 876 bp, Arabidopsis thaliana landsberg
agttcagcgactcgcaagaatcaagattagtatagaaatggtcacaactcacaaatgccatgaatgaatcatgatcattgatcaaccattaaccatattatggttgaattttccaataactaaaacattaccataaaagctctaaaacattaccataaaagctcaaacgtctgaataattatcttctcactagcacatgggctttcttgcaaacttaagaaaagttggaaccttttttaataacgatagactataaggggtctcttgaaattaagtaaaagatatggggcgatatcgccaatatcaatattctcagagactcagaaaaagttattgtcgtcttcctcgttcccctctcttcgttcaccttccactctctttcttttattgctttctctctctacagagtctcttccttttccacgtcaaaaactcgccggcggttttcgatttcacggtaagaagttgaatcgtttgctatctgaaacaacattctgttttttttttcatctcccctgcgttcgtcgtgcattctccagtttactgatcattttctctctttaaattccgtaccacgcaagcaaaaaaaaagtcgtggatactttctccttgatgattttctgaaatttttgctccttttttgaagaaaaaacttgttgattctgtgtttcggtttatctgcattcgctgtcacacgttccgtactgttcacctgaaaatgggtttcgttagggttttgtaggttctttaatctaaggttacgattacggaacttatctgcagaaacatggcttttggtgagaataggtggttttagctcgcgtttagtttctagtggaataatccgcatcaatggagtttgtgcttcgttatctg

SEQ ID NO: 45281 - DNA, 539 bp, Arabidopsis thaliana landsberg
aaaattatacttcctttgtttcatattataagttgttttcaagttttttttgttacaaattataagttgtttaataacccaatactgaagagtaatcttttaataaaaatattaaaaaacacttactgtcgtttgattccaatacaataattacattttatgaggaaaacaatattacacattttgtaaaaatttaatatttagtcaattaaagttattaatggaaaaataccaacatacagttttagtttattatcaatccaattgtctttctttaaaaataatataatgaagaaaaatgaagaaaaaatgtcatataagaaaatcttcagaagatccatcaaacacaatcaaactagcaaatgttcattcgtctatctgaataaaatgtattatgatattggacagcttcatattacagagaaatcaaagacactatacagaagatattggagattaattgtcttgagattctagttttaatggtcattgatgatttgtgttctgaatatgaatggaataatgaatataagtgagaa

SEQ ID NO: 45282 - DNA, 931 bp, Arabidopsis thaliana landsberg
cacagttttcttttatttttctttttttttgaattacactttctttcttttatttttttcattacaaatttttcaaaaaatagtgttcggcacaaaaaaaaattagatcggccaatgcattatatcccctagcgtaagctctttttcaaccaatcgagagtccatgttttcaataaaaatgggttttattagtaacagtagttaaagcatttaacatacgtaatcccaaaaaaataaaataattctgtatagggacgaagactagtattcgttgacgacaagagtagagtagactctagctagctgcaagttttgaagaaatctaataaccaaatctaagtcattttacttacatcatcatggatcatcattaaccacatgaggctgagcagatatcgaacgtgtgattgcgatgtggagaagtaaaggacgaggccacgcgcaactgagcaggagcgcgtgagattcagggttttagggcagagatacggaaagagacagaggttttatagcattatattgaaagagaacaaataaaaataaaaatatgagcctcgtgatcggagatttttgcagtgatgactgtactcttcttcctcttctctcccccttgtcacgtgggctaaattttgaccacccttcttcaatgaccatcaacatcacatcacactctctccttcttcttcttctacgttttttattttctgttgaattttcctccacaaaatcgataatttcaattttttcatacaatatcatagttctagtaaagtaaacattcgtgtgtgagtgcataataattgcttcaaaaagaaataacgacataataagagtgtgtgcttgatggtccaaaagtcgatgttttcaccatcacaataagattaccatactacttaaccaaactcaatctatgatattggaagctagcatg

SEQ ID NO: 45283 - DNA, 523 bp, Arabidopsis thaliana landsberg
ataataaacccccacgaagttagtagtttccaaattaagcttaagctaaacaaccgtgacacatgaatacgttggaaatgaagccctcattcctttttaggaatacacgcttctttcaacatattggcacgcttgtggaaaaaaacatagaatagtagaaaacctagcaagatagaaaacctagcaagatacggccatagaagaaattaaggaatcttaaaaatctcttctttcacattgtttccacacttcccctgctttgttgtttcagaattgagacacgttgtacaagatttttggatcaaaagactcgcaaatatagttaagtttatttatgacacctaagttctagtccaacaagaatttgcgtgatcgcaaattttgataaatttgtgtgcttgtattatctattttatccaacggaaaaagattcttgataaataatatctatcgtcttcgaaaaattttgtttttcatcactgagtttttaacatcgaatgcattaatttcatggaatgctttt

SEQ ID NO: 45284 - DNA, 444 bp, Arabidopsis thaliana landsberg
tgaacttagaggcatcaccgttagaacctaaaaactaaaatctccattactccaattaaccttagcaaaagataagtgccagttccaattttttcatcctcaaaccaaagacaccaaaaaacacatcaaatcaccaccgcaagtcgatctttaaaaataaaatccagtaagcataaagatcgaaatcggtcccttatactagagaggctaatgaattacaatttcagatcaaaggaaagaggtaaaaaaaattcaaagcaaaccatagcaaattgaaacaaaagagacaaggaagaagattaaatatggaccaaacatcatcggacagaagtggaatcatcggagatagagccggacaatctagaaaccgagattgaaaaagaagagccagtcataggtgctaatcgaagccacctaagccaggaatagagctggccaaaggtc

SEQ ID NO: 45285 - DNA, 665 bp, Arabidopsis thaliana landsberg
ttatgcgcttcttcttccactgcagaatatgaccttcaattttggtaggatcaaattcattcgtatgggataacaaacaatacacatgaggaaagaaacacgacataaatggagagttttcatttcaacaaccttaacctatataacaggatctctatctataggttagataaaccagtagtaagtgagttttctggcacagagatggttccaatcgagattaccaacattttttcagaatctctttacggcttccagtacaacaaatttaacagtgggatgcaaaatcgattaccattttcaattgttctaatgtcaaaaacataatcctcagatcttcttgtacgactttactaaggatatatataacatttgcattgtagaatgtaacatctatctctctctacgtatatgtgtatccatacatgaatgggtattatcgatgaaactaacgctaataagttctaatacaaagaacaatattgaatcgaagaagtcgaagaagaagaagatgttaccttcgctctcattgttcttgttgttgatgcttagttctcagattcgccgatttctcgagaaagaagagagaaatgatttgagtgagagcctctaaaatttatagctagggtttcccacgtatatcaatgggcctagtagaatgggcc

SEQ ID NO: 45286 - DNA, 621 bp, Arabidopsis thaliana landsberg
  unsure (1)..(621): unsure at all n locations
cttggtatctattctcatatcataacttattttcactttgatactttttgaaaagaggagtttatgtttactgattccctgaaatgggagcatcacggcctctcttgaaatcgtcccatcctctgacccagggctgtccagccgctgcacgagtctctggcgctgcatgcttgttcagattcttcatgactttctcgtgtaacgccgagaacacctttaacatcacaacaaggattgttttaatcactgaagtaaacaaaagacgatatactgtttaaacgtagactcgattaagagattgtgattaccggatttgaactcactgcttccggaggctgttcctgttcagttagccatttccacgagatcangggttttcctgcatagaacaaaaaaagattgaatgcaataatctaacaaattcctgattacaccttttgacgtcactatgaacataataaagttttcaccaaccaaattacttgtttggatcatttcgagattagatcacatcacagaaacccacctcatctggttaaacaactcctccatacaagtatttggtagcttcagattctaccctaacatgcaaatattcatatacataaagataattttact

SEQ ID NO: 45287 - DNA, 874 bp, Arabidopsis thaliana landsberg
gtaaggcatctccttagggagcatccacttatcagcacaattcaaacgaatttaaggtcactctatatcaaatatctatcaaagcatggggaggaaaactttatatgcataatctttctattagacacaagcatatgtatatagatatacaccattgaattgcatgtgaaacagtgcagttatggaggtgtgtatacagtcattaaatgtgttccagttttgcagaaccgtgtctacgttcttcagacaatcagtcggaacgttttatctttgttgattatgactgatcacaagtattgtcgtaaataagtgatagcatttagcgtatcggataattagtgaaagaataagagccgagtttatataacttggtcatattaagattctaaatttatgcattaatcttctcaaatacctctaaaagtaatttacattcttttatcttggaatttaggttaaaagctaaatcttttgtggtaaagttcaaaaatggagtgagaaaaagagaagagagagagatcagagacaagaagattcgctcgtgggcgagcaaaaatgataaagaaacgaaataaagtgaggaaaaaggagacaaggcaattaaatattccaactaaggttggtctccctcttcttcttcgtctgctcgttaccggttactatcttgttgggtccttacccgatccgttactgtcttgctgggtccttacccgacccgtttctttaccctttaccgattgagagagatagacttagatcgaatatcatcctttatatatcgggatcttctttttcatcctaaaaagggttttgttttcatcctatatttaactaaataagggtttatcttctgtcacaaagaccaaaaatgcta

SEQ ID NO: 45288 - DNA, 764 bp, Arabidopsis thaliana landsberg
cttctctgcctttttcattttgtggcaaagcaattttgttctcttttccatggcttttccctaccttacataggcatggggttttcctattaaaatttgtaaaagcaaattacgaattgagattttttattttcacccaaatgcctttacgaaaatttgaaaaaaaaaacaagtttggcccccaatttaacattgactaatgccaaacgcgattcaaccacaaacgcaccactataattgatcaagacacgaagatattaggcataccttctttttgtttattagaggatcacaaatggttccaaataggagacaagaacgtcgttaagatgtttaaaaccataagtacatacgaagcaatgtgaaatgaaacttcttttttcatgtttctgcatgctgtaattaaaaatggaagcatttcaaatcaaagagaaacaattaactaaaacttaggcctaactaatcttctgatcttctttcgcctttaaatttaattaatttatcttctaaatctaatgactctattctattggttggccccataattaactacgttggctagataaccttactatgatatgatatttattggaagaaaaatagaagaaaatgaagataatgtataatgcctcttgctttcttttcaacacatgtatcaagaatgagtttaactaaaagcattttgtggtatgactatataattgagtaatttatacttctaacctttactgcaatcagcgatcgaaattcatactatgatatat

SEQ ID NO: 45289 - DNA, 3154 bp, Arabidopsis thaliana landsberg
atctccacctgtctagatcgctgacctccaggtgggctatccagaagagggagttccagtcacttatccccaaaggtttaaacgcttcgtctagactcttcacaatgttcttggagatgaggccgggaacatccttgaggagatggaaggtgagaccaacttccctcaaatgtccgtctatggcaccatcagagtctggaaggatggtctgagcggcagacaccatctcaaagatgggtttctctccgacagatgtgtcagggtccgaccccacaatgagtgcggcgggcgccatcactgaaaagagcctgaccgacgagggagtcaaggtgggtgtcagagggaccacggaaggtaacggctgtgatctcagagcagacaacgaggacacgtgctccacggttgttctcggcgagatccttagcgatacggaggacagtaccgccggcgaagcaaccttgctggtacatcatgagacgcttgacggaaggacggagaccaagaagcttggtgagctggtagtcagcaccaggcatgtcgacgccggaggtagtgcagaagacgacatgagtgatctttgacttgggctggccccactccttgatggccttcactgccgcttctttgcctagcttagggacttcgaccaccacgatgtcctgtctggtgtccagagaaggagccatgtaagcacacatgtgtgggttttccttgaggaattcctccgtcagatgcatgtgacgtttccgaattgtcgacttgtcgcctgtgaatagtaaatacttgttagctaaactatgtgaatgaagatatatgccaaaggaaatgaaagtagaagttaataagacgtacacatgcgcttgaacttctccttgaggtcggtcatgtgttcactgttggtgatgcggaagtagtagtcaggatactccgcctgaagcacatggttctcagggttagcagtgccaatagccaagatgcctgcaggtccatcagctctctgagcctgtctgatctcatccaaagaagaagcaccagccatcaccattatagtatacaccaacttgggtatattagagtttgatgttgctgttgtgtactaaacaagttaggtgtatttggaaatataccggagagtgagagcttatataacaaactgacacgggaaaaagaagatgagagtgtggtaggttagatggacgggcagatgaagatctacgtgtctagttgttagcccccttttctgtggttcttcttgcttccctgttttttcgttacttaccaagattgaatggtgggttttaattcttttgattgatttatatatttgcaacaacaacaactcatattaatttctactatatgcctatttattatatatatacaggtgtatactgtatatatatcttaagatatttattatgagtaagatatatatttattatgtcttaagatacgtatcgcttgtgataaaagaataaaaattaatacgtatacaccaacaaagggctttgttgtatagtttcttcaccatacaggaggtttcacttcccagttcttacacgtgcatacttaactccatcattagctcctactaatctaatattcattcttcatttttaccttatgatcctataactaggcccaaacaaaaaaaaagtcctataactaacgactaattaagtagtgttacattaggtacgcctcgttttctttctcccaccccccatcatagtgatatctgtctgaaaatctgccctatttgcgctttccaacggaagatgtcaagatgcatttattttgtttttcattaaccatcaaaataaaattactaatgttcatcacattctttttggtatgtgtattccactcgtttttattgttttttgttttatcgacctaacaatagttttaattggaaaaattataccataggcccacatgggttatgaaccatatgtgccgggcccattatgacagagaaatcacaaaacccgatgcgtgaaaattcaattgcaaggaaggactccaaaccgttttcttttaatccggttgacccggcctaccaaaaccgccaaatccattattgacggttaaatatgataggcatgcgaggcgtagacgccgtagagtcatatccgcagaagcctataggtgttatttggtcagctgtagtttttaaccgatcagaacgacatggttctcatattatacacaacacacttgtttcgttaatctgcttaaagtcttcaggcccattaagcccgtcccatattcagcatgttttgtttagtcatagctaaaaataaattatgtgggcttaaaaaagatgacctggcccatattaacatcccgagaaggagaatgttcgacgaatgcttaacggcacaatgcagaccggaaattgcttccgatgccgtcaggctggccactggatcaacgattgtcctctcaaatcctacaccgatgatcctccaccggcgatccaatgcccatgcggcggaggtttctgtgaaatcaaggtcgcgaatactcgagaaaatcccggaaggaagttctacaagtgtccaacggttcgtactcgctttctttactgattcttcatctcctgcaaaattcgcgaggaaatttgaatttgttactgacgacatttgaaattcgcaggctcagaattgctgtttcttcaaatggtgtgacaaagtaaccgacgaagatatcaaattccgtcctgccttcaccatcccgatttgttcctgcggtgctggaccttgccggagagttaaagacgtttccggtagagcttacctgatatgctgcatcaaaaaggttttgactcgttcgcaagtttaaagctcatagttgataattctggttaacattgttttaagaaattgtgttagggatttggagcttgtggattcttcaagtgggaagatgttgagatgattcctagttgtgatgttatggatgagattgatttttgggttgaagctgatcaaattttgagtgatgttgagagtagcttccaggctcgtggtggtgttataccggaaattgcaaaccaaatggcatcagagaaagaatgtcaagcttctgttagtggtatagaggatgattgtgtagtagaatgtcaagattctgttagtgcagaggatga

SEQ ID NO: 45290 - DNA, 546 bp, Arabidopsis thaliana landsberg
cgctatgaggcagtatattttatacaactatcacattcttctttacccaattaaaacgttaaaaaaaactacccaatcttatagcgaagatgtgtgagatccaatgatgaagcaattaaattattgctagtgaattcatgtcattatgcgaacacgtactacttgagaaaagtacaccatatagttttcttgtgatggacggtgaggattcagcttgggaaacgatgtcgtaacgtttggatgcagaacgtcgggcgcacgatttggatatctctttttttttttttgtctcccctatcctcaagtcagggattttattacaactttgaatatttatttcctttttttttgtcggccttcttaaaacttttcaagattttcaattagtcactaaactttccattttatctttttcactctattatataattttagatgtaacgtaaaatattactattaggatgtgagataacataatccaaccacaattatatcgttatctagtaacattaactatatattataagttataaattgaaaggaatc

SEQ ID NO: 45291 - DNA, 561 bp, Arabidopsis thaliana landsberg
taccaaagaaagtgaagaaataacctaatttatcaacttgccagctagtgaagtagctccttggaggtttcagtaaaaaataataaaagtcgataaaaaaatactacccaacttcatggttgattattaaatgcgatgtggtcgagacaaagtaccacttgagtaccgtactaggatatgctcaacatatttaaaattttgaccacgtcaaattaaccagccagagatgttaacagttaatgtagtagccaccggtccaatgaaattgcaaatgaacaaacgtagcacctgaaaactcgccaccgatcacgatcagcacacttgttatgaattggtcaagatattatcttctatcattagatgaatacttgcatgttagtattctctactatcagacggtgtgtatctttttatttatagggttgaacgctttattgtcccatgcacacgtaaaagtcgacctccccatcattttttcactatagatagtggttgattcaagcagatttctcaaactaagacctatatacatcgaacacaactaagtataacaatagtcat

SEQ ID NO: 45292 - DNA, 666 bp, Arabidopsis thaliana landsberg
  unsure (1)..(666): unsure at all n locations
gagggcagcagtggcagggaggaagggtacggctctgatgccgcacattgctgagttcttgaggtgcgcttcattgaggacttgttcatttttgttggtcatgtattccattnnnnnnnnnnnnnnnnnnnnnnnnnnnnnnnaggaatgttttcactagaagagttcatcaatcttatgttggtttcttcgatcagttttgctctatggctaaatggtcgaattgagcctatttcattataaagttagcgagcgaataattgttcagcctcttcctagaactcattaccagtagaaccagttactaactgctttgctttttcttggattagaatggctagggctatctctcaccacgcgctacgattttcgcaatcccactggtgcagtgcgaagaactctagattcggaaagaggatggacaatgctcgcctggtttatctaaaaggaagatgtggtttaggcagcagaaaactgggtttgatgtgggcctcgagctcgcagtcttctgtcatggagccgacgcacctaccatccgatggcaacagcggccacacaccaaagaaatcaactaattttaacgacctcctatggtggttatctgtgtctatttgagaactgtcatttgaccatttactttggggtctcagaattggggcatatata

SEQ ID NO: 45293 - DNA, 623 bp, Arabidopsis thaliana landsberg
tatttcgattaaatataaatatggttatcgtggtctgtgacaataaatatggaaatagatgtggtttttatgatcatgtgaagaagaagaagaacacgtgcagatgaactgcaaatgataataatgtgcatgtccatgagttatgtacttatgtgtattatctacgtgttttccatacatacatatataaatcttatattactatatggttttgtcgtaaaagttacgtagcatcaataatttgtgattcgttgccataaacagacaactacttgtaacggtataaggcttggctctcatgataaaatgataaccctttttttcgtcggagacagacaaacgcataaatcactaattctaaaccgagatgattgtcgatttgtttgccatatgcataactagaatcttcagttaatattaatttttggtgttttcgatcgaataaaaaaaaataaacattgcaatatttcgaaatttgtcgtctttctttttataacactagcaagtgagaggctgagagccaagtggaacgttaaaagacaacattagatatatattatatattgctaaatctgtattatttctttttaacatacgcaacttttgattggaaatccgaagtt

SEQ ID NO: 45294 - DNA, 1453 bp, Arabidopsis thaliana landsberg
aaattgagagattccgggagcttcagaaccagttcaaaattcaacaacatactagttttgtaacccgaaccagtttaaaagaagaacattttgagtcaagttcaacaatggttatttatttcatttttttttcaaggtaacaacattctactaataacaacattaagaaaattttaatttacatatacgttcagattacatttttactttatcaactattctatctgcatctttactttaactatcggcactagattataccattcagcaatcttcaaacgctttcctaacattggcgtgacattttaactaaggacaacaaaggtggagaatacattagtttgaagcaagcgtaaaagtttactaagaatcttcatcaaatacacaggacataagcttctctttctactttttgcctacaaattaacttgataatattaaatattttgttttgtttggtcatcgctgctactaaagaagagagattgcatgcctagacgatcaagctttgcggacaatagaacgtctctctcgctggtactcaacttcacctctctggtgcattatcaacaaagctctcctcacctgccattttaacatgcacattacctcaaaaatcccattcacattactgaaaattaaacaacaaagatgttagcttaggtaccattgaatcgttcattcccattctagccagatcctctatcagtcttctctctgataatcgagctccgatccccattcttctctttatctgtgtttccgcttgctgttttttcacaccaataccaaatttagttattacatctagagatacgatgattctttcttccccacaagcaactaaccttgatttcattggccatctcgcctgttatgtttatctgttgatttatccctgatcttgctgcatccattgtcgaggtatcaaaaagtttaaaagctttgtctacatcatctggtgtggcctcgtgtgacctgacatatttaacaatgtcaatgcacggcacatcccatcaggtttcaggaatcaggaatctctatgttaataagattacttacagtctcatttttgcaagtgactcactcagtctgacaatagcttcgagttgtctcactgtgataggtatcggagcagcctctcctgtttcatgtgcacgtctcttcaatcctgtttagccgaaaattttatactgagaccaactctgttttttaaccatcttattgtcaaatctaatgtaaatgacatttactattctgattgtgacatatttccgctgcaggttctcatcagcgtcttttgagagacggggatgacaccttgctcgacagtattgtatatacctaacataaaaagagcattatattttagagtcatgattttgtacagaaaactgcaaacccacattgattttttcgtcgaaagaaaacccaccttttgagcccattatct

SEQ ID NO: 45295 - DNA, 538 bp, Arabidopsis thaliana landsberg
tatcttgtcctcccagtgccggtcgttgtgtcgaacaaggtgtgaactctagcatttcttctgacacgctctagatctttgagaagtcatcttttgtgaaggaggctggggccgcgatcacggcaccgcccaacttcagccgtgttttgcgcttctatggcttcgacttccaaaagtcccgggccacggaggcaggcgacgtaggtgtcctttgtcccgagaaacgactcgggacacattttgttccgcacaccccacgatctaaatgacttctagatcctgtactaccacaacaagagcgggaaaccaacgagcgttctttctgttggtgattacgaagagaaattcaacgcccattggtactacttccaccgcgtcgatctgcataatcagctccaagaaatggttttgagtgaaccagaggctggttctcacaagaagaaagcaaccattcggctgcgtaccacggtgaaggacatcgagctcgacggcaccatcacgctgcaggacggtaccgccatcaagaaggatcttgttg

SEQ ID NO: 45296 - DNA, 758 bp, Arabidopsis thaliana landsberg
attacccttggcttattttaagcttgaaagagaaaagtgaaaaaaaaggccaccgattgtgtttatgcatggcacaaacgcaaacaaagaatggttaaggccatggcttggagtaaaacaaccaccacaatttcataacttttgatttcttctttaatcaacatagtactgttgattatactttgtgttttttttttcacttaggcatatgcttcgcggggatatgtagccatcggtttagactctcgttaccacggtgaacgtgctgattgcaaaactgcatatcgagatgtaatatcgttgttacgaatcttcgtttatctaatggttcttctagtcttttgagttctgatatgtttttttttttttctctttggtgtaaaatttcgatgcaggctcttatatcatcttggagaaatggaaacactatgccttttatctttgatactgtataaacatttgtctctttttagctttcattttctggttacactttagagtgttaacacatcttatcgttgtctttctcaggtatgggatttgatcaaactagctgaatatcttactcagagggatgatatagacccgaaaaagataggaatcaccggtatttcgctaggaggtcagttatacaacaaattgagtagcaagatttgtattaagagtaattatatatactaattttgttcattgataaagcatattacagggatgcatgcttggcttgctgctgcagctgacactcgctattccgtggt

SEQ ID NO: 45297 - DNA, 1101 bp, Arabidopsis thaliana landsberg
  unsure (1)..(1101): unsure at all n locations
gttcggttctttggctttcaccgcatcatcaagatcctgtattgtatagtgcaggatccgtgtaatgggttcaacataacgtcgaaccaaaacatccccaacaaccacattgttcattgacttcagcacgtaatcaagcagaccggtatctccaatatgcaatctagctgaatccctaacatcttgtcgagtcataccgttctgcttcaacgctttcatctctttcagtgactctactatcacttcagctgcaaatattagtctcctcacaggccatctactacccaaatttgcagccacagtactatagttcctatatttcggagacttgtcattatccgcaacatcacttttcttcaaaagcaatcggcttgatctcttctgatgaggagaatctgtcaagagaggaggagtcacaggaagaagcttttgaggagaagcatgagactttataatgagcataaaacgcaaaagatctctgaaagtcttcaaagtgtccttcactcatttctctgtaatatcgaaaaacctgattgatctccttagattgtcgaagctcaccggaatcagaactcgatttgatcaatctcaagtgaaccaagagcctcaatggcattctcatactcattcttggtcacaccaaaactcccacaacagaacttatatccccatcttccaaaccaagagtgaccataagcaacaccatacaacaacctcagttccacagacctcttcttagccaaatcttcaacagtaatcatcctgcaacaagatcacactctatcaatttccaagcaaaatccaacaaacacaaaaagaacagataaatgttatctccattaccttgctccgagactattacaaagccgatcccaaaagtccacaatctctcttccgcataagtacttagaaccactttccataccattgacacataccaaatgaccaaaaccattgcaatgaatcaaaccatgtaaaacatgggattgagaatcaaaagcatcatcttctaatggcaaactccactcagtatcaatcggaataatgaagtgatattttctcttcgacacanaatggttactccaaacctaacaaacacac

SEQ ID NO: 45298 - DNA, 646 bp, Arabidopsis thaliana landsberg
ttcatacaatttatatttacgtaagtaatacaaaaacgaagtaattttatttttgaatttgctaaatttgaatattgtatcagtacgcaattgaaatgttttttagaaataacatttcctaaatcgtattttgattataagaataatggacttctacgatgtcctacaaaaggataaaaccaaagttatgcaaccttttacgatgctcattcaagaaaacaaaaaacaaaaaaacgagtcggaatgaccactgaccaaataaacaaacattagaagtacaccaggagccgatgaagacaacgcacacaggcgtatagcatgcgccacaaagccgctgcatttagcggatcaccgacgcccggtaaaatttagcgcacgctataccgaacattgcgggagggaaagaggagagaatgaaccggtaaatttagagtacatgagcttttacagggtcttgcttgagacaatctaaggctatctcggtctgctctcgtatctcatctgcattttaatctcggcttctataaaatcattgcttatagtacaagatactttttatatgccacatgtatgatctgttgttgtacattgtctaaagcagaaaaggcgcatcagatcactcaggtttaccgacccattttgaatt

SEQ ID NO: 45299 - DNA, 461 bp, Arabidopsis thaliana landsberg
gacatcctgtacacaccaacctacataaccgcattatatttaatgactcactatcacataacatggtgtgagaggaaaaaacccttctttaaccgtttgaaacccagctagagctaagatgggacgaacattctcggacatgaaagcgacaccaagaactgttataaactggcatacagctttagccatcgtgacagctgagtctgccatgacgagagaatcagatttagagagatgaggacaatgcttttgagcaggagacaagacccattgcacttgtggagccatatagaagtgagcagccactcctatcttatttttcttcaacacattgacatgcttttcaacccgagactcctccggaaacaaatatttctcctgcaagtgaaaacacaggagtcagacaacaaatgtgaataagctacacaaagtacaagtcttgtacaagagtggaaccttaa

SEQ ID NO: 45300 - DNA, 615 bp, Arabidopsis thaliana landsberg
ccgcagtatagtttaaccgctacgtttggtatggaatgctgttttttttgttgagaaacatgtttcttaattagtatatggaacgattcacagcactgtaatattggaacaaagctatgtgtttggctgggaactcatatatatcggacgggctactttctgcgagtgtcaattttagatgcggacataaacctaacatcatagagactgtactgcagcccaagaattgaagattggagacgacacctacataaaaatcgcaaaagtatgttcaatgggagaacaagtaaaacttttatctatagagattattgtaaagaaccaagcttagatcattgcaagatgcaagactcatttttaacgtaagtattattcatcaaactcttagaacgagattgatatatagcatcatgcacattaactatattatataacgatctaaaatcataataatcaatatgaccgcattattggagatatatagatcaatctcatccacgggttactctaaaccatcccatgaacggagcaaaacccttctttaattttgtcttcttgaccgaacaattctctcttaaaaatccttcttttttctttgttttagagtttttggat

SEQ ID NO: 45301 - DNA, 597 bp, Arabidopsis thaliana landsberg
cttaaactctctagacgatgattcttgatttattttctgtcaataactagttgagttaaattgaactgattggaagtgctgttctagacttctagtagattaaataaaactaaacaatgtttttgagaaaaaaaaattattacgttgacaagatttaacatataacttctaattgtaaaaaatatggtacatgaaaactataggaaatatctaaaaataataattttatgtcacgttgtgattagtaattatcagagtaatatactctatagtctataccgtatcagtacgaggttaccattcaaaattagcatttttgttttttgtattttatataatgtccattagtttggcaaaatagacaatatatggtggggcggcttacgtgtgaagctccacaagaatacatttcaattggacaacatgcaaaataatatactactgagtacagtatttatggtgcactcattggtacatcgtaaagaaaacaatattatctatatcattttcttaaattgtttgattttcggggaaaaaggcatgatgcatcatttgtattgctattcttaattttattttatttttgtatctattaca

SEQ ID NO: 45302 - DNA, 106 bp, Arabidopsis thaliana landsberg
  unsure (1)..(106): unsure at all n locations
atgcatttttcgatggcgtactgcgccacattgcccgagcccgagaccgcgacggtatanccttccagcgactggccggcgtgccgcaacatttcttccgcgaaat

SEQ ID NO: 45303 - DNA, 939 bp, Arabidopsis thaliana landsberg
caatcttcttcctagtattgccatggaaaacattttccattttgtcaaaatgacccgttaaataggcaaatggtgtaaaaactatttttaagttttcctttcatttcatggtaacaaatatattttttccagttatttctgtttaaagaaagtttcatttgagatctgattggtgggaaatagaagaaaaaaaactcaatctgattttaaacttttaaaagcataattcggttgatttttattttattttattctgattgatagaaactggaaagtaagatgaattggacattaaaaaaaaaaaaatccctttaaatttgagctaattatagcaagtagtcagatccttcttttttttctttgaacagaaaaagaatcgccaaaaaaagaaaaagatgtacttatttagcgaaaatatttttcgtagtaaaaaaacttctttcaatatctttgcttgaatgtgaccatttctattgcacatacaaaaaaacgactataaaaaggacccacagtgattatgaaaatcagattgacgaaaagtttgtgtgtctgattccaatcatattgatccaattcattcatcatattcgatggttgtcaaagcatatatagctggattaagtggggcacaacatctgaaaacgtttctcaaccttatgatgtcatttcagcttttggttttctcaacgtttaatcggtgaccgtcaatttcttttcaatctctataatcatttcttcttttggcgtgtctctgggacattcactgtcaatgctgaattaatatcctttaaggatttgaaggcaagaaaaatcttgttgcaactaataaaaggagtcgattttgatgctcgttagtcgacctttatgaccaaaatgggcctatatatatattgagagatttttgaatgctcatatgatacacacaagtccaacatttga

SEQ ID NO: 45304 - DNA, 462 bp, Arabidopsis thaliana landsberg
atttaaataatataattaataaacgtcttttcatacttgtattttccgacccgagttctgaaagtgaaaacatatggtactagatattctcgatttgttttgtagccactagacctgtaaacagaaaaagaagccaaaaggacaacgttaaaaaagagacactggttataaacagttagaaaccaaaccggtgaaaatccagctacgtacgttatataaagccaaggtaccaaactaatgaactgtaacctctattttcttatctattttgttaaaggatttctgaactgtaacttagaatgcttggtttgtgggcagtgtaatatatgacacacatgccttttttttgtctgtcaaataggaagacttctttattccttatcgacttccctattttcctaaaacaaaacactgaaaaaagtacagatgttctcacgtacgtcacgtgtacatacatatata

SEQ ID NO: 45305 - DNA, 592 bp, Arabidopsis thaliana landsberg
aaacccactggatagattgaaagaagagaatcataacaaaaactctatagagaccgaaacccttgctcccaagggtgttgccattcaatagcttcacaatagatgcatggctagtcttatttctccgtacatgccgaagaaagtttgctaaaggcaaaactattcaagaagccatcaaatgatcaatgtataccaatcttaaactatatccattttttaatagatttctaaaaaacaagtttgcactgatttttcatatacatatcacataaaccaaatattttccaaagatcagatctaatcttagtgctaccaactcttccatggacgagcgagatcatccctatcaagaccataaacccttctagtattctgatttagttagttttatatagtcgactgatatcttaacaaatatcctgtattttgatattttgataaaaaaaattaaagtcgattaatgttttagaatgtatttcctttatcatttcgctaaaagctaaaaaattatcaaatatatttaatatatattttcatataattactgaatttatgtagtttgggtcaaccaacgtttttaattataaatatt

SEQ ID NO: 45306 - DNA, 567 bp, Arabidopsis thaliana landsberg
agaaacctattccttgaacatttctaattttatatttcaggttaatataaagtacattgataaaacatttttaaaattcaaaaccaatgtgctcaacatcctctaagcattatatgtatagcttatatttttgtgaatctattttattgtgattagtatagtcatcactcaggagacagaagaacaaaatagagggaaataataaatgtaaagggtgatccaatgtttaccaaatttatataaaattttcgtccttttccgataaaaagactcagtgagtcaaaattattcatttaatttttcttacgtcaatttaaagtcaatttatacattttaatttttgtgtctactttataagtactcagtatttttttttttgtataaagaatttaacgaaattaccaactgttaagacaaaatatgagtggaggacagagagcgccaagcgacacacttttactgggtcccacattttaaattcatttattatcttttatttattttctaaatctctttttatttttttggtggtagtttgtgtggttttctttctctactttggtttgg
